United States Patent Application Publication US 2008/0008996 A1 - sequence listing, part 6

SEQ ID NO: 34502 - DNA, 434 bp, Zea mays
  unsure (1)..(434): unsure at all n locations
naagcttgattatgtcttggaatggattgctagctcttgtattgaatgtgaaagattggagtgcttgggtgaagtgaatggaggtggttggagttgtatttatagcccccaaccacttcctagccgttgctcctttcctgccaaccacggacggtccgcacccttggtccggacggtccggccctacacatcaatggctgaaatcgcaacggtcagtagtgacagctatatcaacggctatatcaatgactatagagcatttaatgagtcgtcagatgtcagataaagcagtcgcggacggtctgatcgtgcaccccagacggtccgcgaggacgctaaaatacattttaccgaacccgtcaccttcaggtttttctggttgtcaccgaccagacagtccgcgcctgaggccggacgatccacgcttggtctcg

SEQ ID NO: 34503 - DNA, 492 bp, Zea mays
  unsure (1)..(492): unsure at all n locations
gtttatcgtctctcttgtcaaaagttggcttcttgtggagagaagtattgattatgggaaatagggggagtttttgaaatctttgatcaatctcttttggaatgactctctntatacttcaacatgtgtgttcgacttagagatagagatttgagtttgatttgcaaaaacaaaccaagtggtggcaaaggatgatccatatatgccaaaattgaataaaacttaaatctattgtatttgaagtgagtttgcacttgttctagttgctttatgttgtgttggcataaatcaccacaaagggggagattgaaagggaaatgtgcccttgggccatttctatgtattctggtgattgagtgccaacacatgtgcttaattgtgaagttatgtacatggatgaacaatgtgaatatcatgaagtaaaggtatgtttctaagccttagtacattggtttatgtactaatatanttggctaagtgttagaaacagaa

SEQ ID NO: 34504 - DNA, 420 bp, Zea mays
  unsure (1)..(420): unsure at all n locations
gagaacacgtgataggtttaacttatgttaccttcgaaaaagaagaccttgtgcagcttgtcaagcaggtaaacaagtgggaggagcgcatcacagcaagaatgtgatgaccacgtcaagaaccctggagttgctgcatatggacctcttctgacccgtcgcctatctaatcataagaggaaagaagtatgggttagttattgttgatgacttttcccgcttcacttgggtatcctttttgcaggataagtctgaaacccaagggaccctcaagcgcttcctaaggagagctcanaacgagtttgagctcaaagtaaagaagataaggagcgacaatgggtccgaattcaagaaccttcaagtggaggagtaccttgatgaggaagggatcaagcacgagttctccgctccctacacacc

SEQ ID NO: 34505 - DNA, 432 bp, Zea mays
  unsure (1)..(432): unsure at all n locations
atgtaagagagcaactcaagacatatattgtccatgtgagatggcatgctgcttttagtacttgtgaagatattgcaactctttctattaagatggttctgactggaaagcatgttgtgtttcctttagtctacaagctaattgagttggccctattattacttgtgtcaacgtctagtgttgaaagaacattctcagctatgaatataattaagagagaattgcgtaacaacattgaagatgattggttgaatgatntaatggtgtgctacattgagaaagagatcttcaaatccattgatgatgagcttattattcgacgatgtcaacgcctcgaaactaaaaggatgcaattgccttggtcacataaacttaacggtatgtatgctttttattatatggctgtcttgaatttatatcatgtttgatata

SEQ ID NO: 34506 - DNA, 387 bp, Zea mays
agcttgaagccatggttagtagcatatgctaataatatgcgaattgactcaagcctagctacgggtgcataggtttcaccaaaatccaaaccttcgacttgtgaataccccttggccacgagtcgagctttgttccttgtcaccacaccatgctcatcttgcttgttgcggaagacccatatggttcctacaacattttggttaggacgtggaactaaatgccatacctcgttcctcgagaaattgttgagctcctcttgcattgtcaccacccaatccgaatcttgaagtgcttcctctatcctgtgtggctcaatagaggaaacgaaagagtaatgttcacataaatgtgcaacacgagatcgagtggtacccccttatgaatgt

SEQ ID NO: 34507 - DNA, 475 bp, Zea mays
  unsure (1)..(475): unsure at all n locations
tanagcaatggtgggcaataaagctttagttgaaggatgtattgcggaacaatttatactaaaggaggtagcacacttcacaagttgttactttgcaaaagaacataatgtatttgctcgatagaaaaggtaccatgatgatgaacgagagatgcctccgtgtagtgatctttcgatttttcagacaaacggcatagccggtggtccacccaaggcatatcacctcagtatggaagaacggaagtctgctttactgtacatgttcacgaatatgcctgaggtggagaaatactttgtgttagacttgttntcttaaactgttcatatgtgaattagtttatgttatcaaatatctcatgtcatacaataatatttgacagcgaggttgatgaaccaaacatgatgtgtctctgtatgccaacagcgagagacataaacaaattgcgacgttgatgtatgcatgggcgacctaatt

SEQ ID NO: 34508 - DNA, 438 bp, Zea mays
  unsure (1)..(438): unsure at all n locations
agcttgttggctcgctcagttcatggtcagtttgacttggctcggatcgtctcgtttgaattatttcacgagctaagctgatatcctagctcggttcgttaacgagccagctcgcgagttaaacgagctaccacattttagcaaaaccaaactataccatttacctaataattgatgaacatcttatatgtctatgtgggggttatgttctatgaattaaactaatgattgatgaattgtgaattcatgagtgataaattatgttaatttggtgttacattgatatggtccgcgaaaatataaatataattattattttctattgttaaattagcttaaaaataactataaattgattattatatatattggttttntcttgagctcgcgacctaaacgatccgagctagctcgttagcttaacaagtaagctcggac

SEQ ID NO: 34509 - DNA, 436 bp, Zea mays
  unsure (1)..(436): unsure at all n locations
tcctatggtacctncggcggagcctgactgcctgtcagtctcactgtgtcaaatggcaccgcagtcggagtggcgcatgcggcgctgtccttctgtcaagccggtcagtggagcggcgaagtgacggcggtcacttctgctctgccggggggcgtgcgtcaggataaaggtgtcaagccacctttgcattaaatgctcctgcgactaggtcagtcggtgcggcgatttagtcagggttgcttcttatcgaatgcatggcctcgggcgagccaaatatatgttcgccgttggaggggggcctcgggcgagacggaaatcctccaaggtctgctgcccttgttcgaggttatgctcgggcgaggcgtgatcgagtctctcgaatggactgatccctgacttagtcgcacccatcaggcctttgcagctttatgcttga

SEQ ID NO: 34510 - DNA, 430 bp, Zea mays
agcttgtactccaccataaaatcatattcgaataacttgctcacccatgtatgttggggaattgtggtcagtcgctgatctaataaatatttaagactgtagtgatcggtgcggactagaaactggcgcccccagatataaggcctccagtgccggactgctttcaccaacccaatcagttcccgttcatatgctggcaacttctgatgttgaggtgcgactgccctgctgaagaaagcaatagctccatctccctggtgtaacacggcgccaaaaccagaccctgacgcatcacaatcaatgatgaaactgcgatcgaagtcgggcatctgcagtaatggtgcggacattaaggcctgtttgagcagattaaaagcctcctctgcttcttctgtccatctgaatgcctctcgtttcaacagtgctgtca

SEQ ID NO: 34511 - DNA, 474 bp, Zea mays
  unsure (1)..(474): unsure at all n locations
tctaagggatgaacacatttgggactaacaaatggttcatttgagaaagacagggcttgtagcgcatgccaagcattaaagcaagttggtattcatcatccacacaagaacatcatgacgactgacaggccgctcgagctactccacatggacctattcagcccgatagcttacataggcatcgatgagagtaagtactgtctagttattgtggatgattattctcgattcacttgggtattctttttgcatgaaaattgcaaacccaagagaccttaaaaggattcttaagacgagctcaaaatgagttcggattaaggataaaaaagataagaagcgataatgggacggagttcaagaactcacaaatcgaaggctttcttgaggatgaggggatcaagcatgagttctcttctcctacacacctcaacanaatggtgtagtggagaggaagaatagaactctactggacat

SEQ ID NO: 34512 - DNA, 279 bp, Zea mays
  unsure (1)..(279): unsure at all n locations
agcttatcgcaagatgctgctcgactcgtgcgatctgatctcacgcctgagatccgtgaaagatatgccatctagtggctcggtaaatatgtttgctaatgagacatatttatgaactgcaaatatactgatatcccggttggagccgagatccctataaatatgataccgtatggctatgggctganggccgttatactcaactgtgacgcctgacacttctattgctctctatattatcagctagccaatggactctggctcattcgcaccgcaatc

SEQ ID NO: 34513 - DNA, 441 bp, Zea mays
agcttcggtaattctcccagctctgccaaaaagatcttttatgcatctattatgcaccacatttggggcaatattataggtctctctcatgctgagaaagaactcccgtcctttgtcaaccaagccagcgtgagtgcatgctgtgagaacaccaatgaatgtcacctcatctggagtttctgaaaccccgatcattctgtggaacatttcaatagcctcttccccataaccattcactgcgagaccaagtatgatagcagtccaagtaaacttatctctgtggtgcatgtctatgaaaacatccaatgcgcgctcaatacttccacacttggaatacatgtctatgagtgcattacccacgaaagcatccatcttaatcccttgcctgctcatgtaaaccctcacccattctctcatctccaaagcacctagctgcgcaca

SEQ ID NO: 34514 - DNA, 397 bp, Zea mays
  unsure (1)..(397): unsure at all n locations
ttaagttntctcaacttaggttaagtgttacccctctaatcactatttatggttaagtcctttaaccagggtcctatttgtaaaacattaaaacaatacaacttgtttgaaatttttgcctagtgaatgcactctaggtgtgtcaaacatatgcaatgccaatgcttatgatgtcatgctcaagttntaattatagtaacaccaggggtgttacagactccacgcataaactttggcgtttgcgcggagaaagtcgacgagcactgcttcctatttggggtcgagctcggagccgatccggacttgcctgcaagcgtcgttgctggtgtcgagagggacggacttaaccgcctctgctggctcgaagttgccggcgtggcgcttcgcatcgggcacc

SEQ ID NO: 34515 - DNA, 175 bp, Zea mays
  unsure (1)..(175): unsure at all n locations
agcttcggtcttcggaggccgaaggttgaaatgaactataccgccgaatagtgccaaagagccttcggcgttgtctgctcttttataggaacaagggacttattacaagagcatattgccttcanggtgtggccgcttgcggagaaatgggaaatgccacaagaaaccattaaag

SEQ ID NO: 34516 - DNA, 417 bp, Zea mays
  unsure (1)..(417): unsure at all n locations
tcagcatcataagaacccatcaacggtggaatagtgaactttatcttataaaatggatcatggtatggtttaggattatgatgacgatgtctaccattacctcacatatcttgtcaattacgtgcgaggcgttgtctcagcggtgcataaacatcgtcgtcatcgtcggcatcatcgtccgcgtccatatgagagtgagctcgggctggagttggtggtgggggacgagcctctagtacgttcatgcgtgtaacaagttcatcaactcatcgatcaagctgctcataggatgtcgctgcagagtcctggtattntataaaagcttcaatcatcgcgcgcgtgatcttcttcaattccagctgagagacacactcatcgtcgttgagcttaagccccttgtccttgtgccattgagtc

SEQ ID NO: 34517 - DNA, 433 bp, Zea mays
agcttcacagaaccacaaaatgagtccatattcatttgcctactgtattatagattatatgattctagcaaacaatcagctctttgtgatttaatcaagaatggtacaacattggaatgatcaggtcaaaaaaggagtcacatgtgcaaatgaatcgtcattgtcctcttgactgtgagaggcatttggagctgaaatattggtaccacgaccaccggtggcaccatgaccacttgaggaggaagcaccaataggtcgaggtataccacgtccatgagaggaggtgctccatgctgcacaaccacttctaggaccctcgctggtcgttcgtggaactctgaggcctctgcctgtaacaccacgaccaataccagctgatcaagaatgactacgacccctgtgaccatcatgaactggagtagcatggtagtta

SEQ ID NO: 34518 - DNA, 376 bp, Zea mays
  unsure (1)..(376): unsure at all n locations
ntctcgactaantcggagacagggcctcatggtcgggtgaaagtacgcgtaagcggcaaggccgaccgagccgagggattcccacgcctctgggatacggatacctcactcgtcccttccgcgaaaagcagctcttgctcacacaaacatccctgttaccgacgaagtccagatgctcgaaacaggaggataaaaggcgcagcttcgcaagagcagcgagggtggtttcttctggcctcggcggccgcaggaagcacacgctacaagatgatcggatcctgcaggctcgggtcttcacgccgaagggagctgtagcaccctcngcatcgacgacgtcttcagcaaagcccgacccagcctcgggcggcgccgcggt

SEQ ID NO: 34519 - DNA, 425 bp, Zea mays
agcttgcgcagactgcgcctcatcacaagccctgttcgcgtccctcctctcctccaccaactaacgcctgagatcctccttctcggcctccgcaaccgccagcctctccgccagcctgcggctcttgttctccgtagctgacttgtcccaaacagcatccgtatgctgcgctcggaggcgctcgatcctaccctcgagtcgttgcctctcggcagcgaactccgaagttagggcgcccgacgcaacatggtcggcaaaggcggctgcctgccacaaaacatccatcggactcgcagccacataaaaacaacgagctaacgaagtccaagacggcttacatgcttcagctgccgcgacgcatgcctcagctgctgggacacggagcccgccacgtctttggcggcggcggccggcaaaatctcacc

SEQ ID NO: 34520 - DNA, 490 bp, Zea mays
  unsure (1)..(490): unsure at all n locations
ctaagctttatgttctanagccactttggaaatctattattagctaatcctacagttctggacttggagtattataaccaagtggaggaccacatgttggtgtgcaattttgataaaggatcctacccctaaagccatatgaaactggcattaacagtgatctaaatgttcaatgtttttaaatctagattcagacttagtcccatttcatctcactaaaattggtgtgaatggttaaactttggggttcctttgtggatgatcagtggagtatggagccatactcgttatagataagttgtagagtatattttagagtacaagtctgattaagggagatggacttggtgctgcacaaaaatcacaaaaagaagtgcttgaatatgggctgtcagacttctgaagatntcagatgatgaatagtgcccctgcgctaaattcattaattggctcaacttgagaactgtgtggtgcctgttctacatgttgt

SEQ ID NO: 34521 - DNA, 390 bp, Zea mays
cgacccgggatcttaatcacctgagctgcaagctttctttcgcataaccttgacgtaaaccattccgattcctcctgtgcccattgcttcggagctgatacaggatacttctattttccgaaagcaaaatataacaaccaaaattctatgtaatccatcttttctagcctttgtctgatagtgcaattcgtgaacacggcaaaagctgtccgcaaacggttccaccgcctggcttcgaagtgcccagatataaacattgagcctaacgatagcgttgggggtcaactggtgaaaatagattccaaaattctttaatatctctacaataatcccatgaagggggaatcttaatccagcttttatgaagctcttaaaaataacaatttcatc

SEQ ID NO: 34522 - DNA, 291 bp, Zea mays
actgcttcgcaggagagcttccgaactgtgatgactcgttcggtccacggagtcgctttatccgagcgcaagttacttatcgcagaaggggacgagtgaggtatccgtatcccggaggcgtaggagtccctcggctcggtcagccttggctggttacgtgtacctcggcgtttccagggtccgctttccaaagtagtcaagaagcacggaagaaatcctgctaaaaagaggtcctttttcgaggaaaaaattcgacgcagagggggtctccccccttttagcccccgaggg

SEQ ID NO: 34523 - DNA, 421 bp, Zea mays
  unsure (1)..(421): unsure at all n locations
agcttgagtcaatcattntgcaaatgataattgatgctcaaaaggataatttgggtatgaagcacatacgagagaagataagggctggagtagtcaagtgtttcaaagaaggcgatcaaggtgtgatatggtttaaaaaccgcatagtagtgccaaagaacgaagaactccgccagcaaattcttgatgaagcacatcttagtcgttattctattcatcccggaagcactaagatgtaccaagatttaaagcaacattactggtggacaaagatgaagatcgaaattgcacgctatgtggctaagtgtgacacttgcagacgtgtcaaggccatacacatgaaaactgctggtccattacaatctttgccaatcccaacatggaaatgggaagacatcagtatggactttattgtgggact

SEQ ID NO: 34524 - DNA, 373 bp, Zea mays
  unsure (1)..(373): unsure at all n locations
ntgctgagtgcctcctaatgcactcggtaaagaaactgacaaaggacccgaaggtggcccctttgccgagtgtatgctggcggacactctgcaaagagggaaactctttgccgagagtcacctaatacactcggcaaaggaattctctttgccaagtgtcaactagtacactcggcaaaggcgtcgtctccgtcaccagccgtcgtgatgacaccttttctttgccgagtaccgggcaacactcagcaaaagactttgctgagtgcccaataataagtactcggcaaagaagccattgccgatatatagttcgccgagatctctttgccgagtgtcacactcggtaaagccttcgtcgagtgtcacactcgac

SEQ ID NO: 34525 - DNA, 183 bp, Zea mays
atcctctaatcacctgcggcatgcagcctttaagatgttattacaattcctctttaagaccttctctacaacatcggtcagcaatttgttcatgacttcgtagacaatggattcagccatgtttataatgtcaatggcttccttcattcttgaatcgctaagggaaccaattggtcccgcggc

SEQ ID NO: 34526 - DNA, 269 bp, Zea mays
tccacagcttaaatgtgagagaataagatttttgtacttaagaacaaaaaaaattcgtttgcttatacttaataccacactccttttgccgggccttattcttagcaacgccctcaaggcgccaaatagcgctgataacgagggatgtaccatggccttgaataaccttcgttccgaagtaattgagctaaggaacgaaggtcttgaaaaagacacaatatttaactcattgataaacaagataaaagaagacgaggctacttcaaaag

SEQ ID NO: 34527 - DNA, 423 bp, Zea mays
  unsure (1)..(423): unsure at all n locations
agcttgacggagactgatgaagctgctgcacaaatctttatagacatttgaattatctctgtaaaagatattgtaatttacgaatcaaacattactctataaatntgtccataccttgtaatatatatttacctttccatctgtgtatgaattgctttgatgtggacgaaacttgtatctttggagccgaaggtgaaaaacacctacccttcttttcgtacacaacgaagcgtatctttgctcttttatgctcatcgaagcattgtcatcaaagctgaagtatctgtctgtgttttatgttatgatgatgatgaacctatgaatgtctacatgaatgtttatgaatgcaatgaatgatataatgtaacgtgcaaatgaatgttcaaacacacccgaagccacacctagactctgcattcactt

SEQ ID NO: 34528 - DNA, 454 bp, Zea mays
  unsure (1)..(454): unsure at all n locations
cacaccattcttcatggtgtatgagccatatgtagtgctacctgccgatctgatctttggggcgcccaggttgacctttgaaagcatagtccaagcagaagcaaccaggcttgaggacaacgatgtgctggaggaggaacgactagatgtggtaattcagtcggccagatactagccgaccttgaggcgctaccacgataaagcggtgcgacatcgatcctttgcagtgggagacttggtcctccgccgaattctaacgggggagggacggcacaaactgtcaccaccgtgggaaggaccgttcatcattgcagaggtcacacaaccgggatcctaccggcttactcagatggatgacaccgaagtggggaactcatggaatattgagcacctcaagaaattctacccctagcagtacctcataactcttganggacagttgtactttgtaagt

SEQ ID NO: 34529 - DNA, 342 bp, Zea mays
agcttctcttggacaagtgccgcacttaccgcttagtgcgaagctgccacatataacaacagaggagcccctggcgttggtggagttaacgtcgttaggtctatcaaatattgcttcagctcttcgaaagctctctgctgaactggtccccattgaaaaacttcggctgacttcagcacttcgaagaatggtaaatttatctctgctgatctagatatgaatctgttgagagatgccagtcttcctgtcaatcgttgagcccccttctttgtgcttggtggttccattcgaagaaatagcttcgatttatttggattaacctcaatccctctttgttgaact

SEQ ID NO: 34530 - DNA, 475 bp, Zea mays
  unsure (1)..(475): unsure at all n locations
ttaaagggagaacacattntangactaacaaatgttcattttgagaaagatagaatttgtagcgcatgtcaagcagggaagcaagttggtacccatcatccacacaagaacatcatgacaacggacaggccactggagttactccacatggatctattcggcccgatagcttacataagcatcgacgggagtaagtactgtcttgttattgtggatgattattctcgcttcacttgggtattctttntgcaggaaaaatcacaaatccaagagaccttaaagggattcttgagacgggctcaaaatgagtttggattaaaaatcaaaaagataagaagcgacaacgggatggagttcaagaactctcaaattgaaggttntcttgatgatgagggcatcaagcatgagttctcttctccctacacacctcaacanaatggtgtagtggagagaaagatagaactctactggacat

SEQ ID NO: 34531 - DNA, 440 bp, Zea mays
agcttgccaagccctcggacccggccggacttcaccggaggcccgagatcgacctcaccggacttcggtcttccgccgccgcgcgtggaccgagctatccagtgagtctccgcccaattccttgcgctcatgtcttctctggcaccccgggaacctctctgacccatccaattgctctatctcgccgtgaccaggccggactcctcgccgccgacgagcatcctcgcctgcgcgcgtggaccgaccgactccggccatctccgacggcgacccacacaccgttgtgatccccgagacctcccctacgtcctcgaccacttcaccggagcaacctcgccgccggtaagcccctccgcccattcttccgccgcggttactgtttaaggtagaagaaggacctcaggttaggatttgtagattccgaggggttttctgaaacg

SEQ ID NO: 34532 - DNA, 449 bp, Zea mays
  unsure (1)..(449): unsure at all n locations
atccttcttctcttgttagaagctnnttgatttcgtggagagttcactatttaatttagcaatctcggcttgagcttctgccagtgaaccctccattgtttgaatcacgaaatccttcttctccagagcagcttcgtgatctttaatcttgccctctaggccctcaattataatctcatttttcttgtcctcgagatcttgttgcattcttaaggttttacttagtagtagactctgagaaaataaccttcattagaagtaaccttcatctcgaagacaacaaanattaaggcaagaactttaccttaaagttagaataaaacaagctaccagcgatatgttgccgctggtatctgctgaggtcggcctcaagcttcggaaagccaacactctttgatagagtgctgacaaccttcgctccagtccggtcccagaggcatnctaagctc

SEQ ID NO: 34533 - DNA, 443 bp, Zea mays
  unsure (1)..(443): unsure at all n locations
agcttcgacagaggatgaagctgattgccaaataacaataagacaccatagaagggaccagacttcaggccatagagcacatcaataagtactaggccgaaacaataaaatggcgcgatagaaaagttcgactgaaaaatatcaaaccaggtcatttggtgcttcgaaggatagctaacccagacacagtggggaagcttcagctgaagtgggaaggtccttttctggtagtatctttgtcaagaccaggttcttacagacttaaggatatggacgacaatgacatacccaggtcttggaatgcggatgatcttcaatgatattatgtgtaattgatgtaatctttntattttttcctatggcacccttttcctttcaggaggggagaaaggtttttaatggggatatagtttgtaattntcattntagctctatgcaataca

SEQ ID NO: 34534 - DNA, 420 bp, Zea mays
  unsure (1)..(420): unsure at all n locations
taagctccttcgaggatttctgtcaaaatatccctcgaggacattatgattatgctgattngctagctaagtcagcagcacaggggctacccttaccttcggatgtgttctccgaaacaataaaagcaccttcagtggaacttcttgaaagagcagttctcaatatctcctgtttatagcgaagattggagaactgagatcatctcttaccttcagggtaaattcctttcagatgacgaaacttataacaggaggatagaggcaagagctcgtccatatgtcatgatagaaggggagttgtacaagcatggagtttgtgctccactactcaagtgtttatcaagaaccgaaggcatagaattgatgaaagaaatacatgcaggcctgtgtggatctcacattggatctaggccgttactt

SEQ ID NO: 34535 - DNA, 440 bp, Zea mays
agcttcggtctgcaggttctgcttgtgctttgtaatgggcgttgtatagcgagtttatgtgttagtgataggaaatagtctaaggactgttctacgataaagcctggagaaagctgaagtggctggtgattacaaaactggtggcaactcccattcctgtggtagtcctggctaactgtaaatatcgtttgacagagcattaccatgccaactcaatctgttgtgatcctcttgtaatgactagtgagttaaggtgaactgttgggtagatacgagatactatattattatcgcgttcactctcttttttttgggtcccatctttgtttttttagaaactgcaattgcattctgtttatatcatggagcatctagcggcttgaaatgaacaagaacaagatgcatgggcagtgggcagtattggttgtgggtaactgaaa

SEQ ID NO: 34536 - DNA, 456 bp, Zea mays
ttactacacttggcgcgatatcagcagtctctactactctaccacgcccgaatggttcggccccgaggcttccaagtgggagacttggtgcttcggctgcgacaagacgctcgtgggcgccacaagcttactcccccctgtgaagggctattcatcatctgcaagatcttgaagcccggaacatacaagctggccaacgatcaaggcgaggtctacagcaacgcttggaacatcgaacagctacgtcgcttctacccttaatatgtttcaagtcgatcatgttcctcgttcttacgcgtttaaataaagtctaaccgtcaagaagggtcagccttgcctcggccaagcccgaccctccctcgatggctagaatggggaccccccctctgcgtcaaaagtttcctcgaaaaagttttctaccggaacaactttcgtgcttgtgactatatcgatagc

SEQ ID NO: 34537 - DNA, 301 bp, Zea mays
agcttgtgaaggttcttcatccccacatgtgctaagctgcgatgccacagcccagccatgctagtctttacaattaaagctggcttctaaacgggcctcttcttttgcaaaataactaaataaagattggcgtcttatacaccctttaaagctattgaaccatctcttcttctaaaacacacacatctacacttgtgaatatacacatttatctcctatatcgtaattgactaacacagaacacgttatatccccgagacatctctctaaacacacttgatatatagagtgctcatttgat

SEQ ID NO: 34538 - DNA, 460 bp, Zea mays
  unsure (1)..(460): unsure at all n locations
gacactatgaaactcagcttggaagattcttcattccaacatgtgctagtcggcgatgccagagccagcccatgttagtcttagcaattaagcaagtgtcgagttcagctctatcaaaatctactaagtatagctgaccctctaacactcccttaaatgctactgaatcatcacttcttctaaagacagtaacacctatatccgtaaaaagacagttgtaacccattttacataactgtgaaactgaaagcaagttataatctaaagaatctacaagaaaaacattggaaatagaatggtcaggtgatatagcaattntacccaatcctttgaccaaaccttgatttccatccccgaatgtgatagctcgttggggatcttggttnttcacgtaggaagagaacatcttcttcttccctgtcatggtggttgtgcacccgctatcgatgatccaacttga

SEQ ID NO: 34539 - DNA, 457 bp, Zea mays
cacctgctgcatcaagcttgcacctcgatacattggtcgtttccttattcttgaacaatgttgaccactggcataccgacttcaactacccgaaaccttgtctgttgtacataatgtgttccacgtgtctcaactgaagaagtgtctttgggaccctgatcgaaccattgaagtaacagatgttgccttagagctagacttgacatattcagaacatcctgttcgagtcttggatcatagggatagaattacccgaagaaaaactctcaagttttacaagatacagtggaaccaacattcagaatgtgaggctacatgggagactcgagactttttagaaacgaatttcccaggctatttagcctcatgtaatttgtagagtgtatagaattgttgatataggagtgagtctcataccacccctgtcttgtaccagaaataatgaaataaaaatgtg

SEQ ID NO: 34540 - DNA, 403 bp, Zea mays
tatacttccaagaatcatgttcaaagcaaacggagtctcaattgagcttaatgatgcaaccccaatcaaaaccctaattgagccctataaacaaaattcaagagaaaggggaataaggtatgaaaaatataaaatcgtgacttgcgccaactataaacatttaagtatactaaataagcaacaacacagattatggaagcttggccaaaacaatttaaataaaaccctaggcaagcttctcaagtgggatttcattagggaattctgaaattcaaaattctgaatttccgaccttgagccaaagatcaagtgtgttcaccttgatccctaactcaaatcctaatggccccattaacaaatacgtgcataactaacctgtctgtcttgtgccacaagatggcat

SEQ ID NO: 34541 - DNA, 425 bp, Zea mays
  unsure (1)..(425): unsure at all n locations
atctggacgctgacggacctcattttatgggacattatcatgagtggaaagcattaacggttgggtcctacaaatcaaacaacctgtaaaataagtcccggccgatccacacactgtaacaaatcgaggacgcgtgaagatacattntactcactgtgaacattgggcaaacctgtaaaatagaaccgagatcttttttcgctgaaattattactttctgaataataagttaataacccaattgtattgcaagagaagttgccatatatttttatctatcacatttaaagcgcgtaggtggcttatagtgctcgtttgaaacaggatatcacaatatttcttcctgtaagacacgaataaattacttacaattaaaactatctacanaacctatgatacatgcgaggtggtgatgtagagtgctc

SEQ ID NO: 34542 - DNA, 483 bp, Zea mays
  unsure (1)..(483): unsure at all n locations
tntatagggagagcacatattacgatgaacgtatgttcatttttagaaagacaggatttgtagcgcatgccaagcatgaaagcaagttggtgctcaccatccacacaagaacatcatgacgaccgacaggccactggagctcctacacatggatctatcccggccgatcgcttacataagcatcggcgggagtaagtactgtctacatattgtggatgactattctcgcttcacttgagtattctttatgcaggaaaaatctcatacccaagaaaccttagagggattcttgagacaggctcacaatgagttccgcttaaggatcaagaaatatagaagcgacaacgggacggagttcaagaactctcaaattgaacgcttccttgatgaggaaggcatcaagaatgagttctcttctctctacatgccacaacactactggtgtataggagaggaagaatagaactctctcggacatggcaa

SEQ ID NO: 34543 - DNA, 432 bp, Zea mays
  unsure (1)..(432): unsure at all n locations
agcttgttccacaaattgctccctaatatcaaataatattatacacaggtattgaatatgcttgcttgttggattgaagacccaaactcagaggcattcaagctccatgttcctcgaatttatgattatttgtggcttgctgaagatggtatgaaaatgaaggtaaccattgttgaatcattcttcttagttaaaactaattgagagttcctagttacatcaaaggattattatgatggccaatgatgtaattattatcaaggcatgaaagtatccatgcatgcgtcatacacttctcatttgtccatgcatggttataaacattatacgttgatgactacattntgtgcgttcgacgcaaaaagcaatcaccaactgtagcacagacatgaatggttcaactctacttttagattgcttgattcaactatt

SEQ ID NO: 34544 - DNA, 483 bp, Zea mays
  unsure (1)..(483): unsure at all n locations
tatgaagattcttcatcccaacatgggctagtctgtggtgctagagccaacccatgttagtcttagcaattaagcatgtgtcgagttcagctctatcaaaatctactaagtatagctgaccctctaacacacccttaaatgctattgaatcatcacttcttctaaagacagtgacacctgtatcagtgaaaagacagttgtagcccattttgcataattgagatacagaaagcaaattgtaatctaatgaatctacaagacaaacgttggaaatagaatggtcaggagatatagcaatcttaccaagacctttgaccaaagcttgatttccatccccgaatgtgatagctcagtggggatcttggtttttctcataggaggagaacattntcttctcccctgtcatgtggtttgtgcaccctctgtcgatgatctaactttgagccccggatgcatanacctacacaacatatttagttcttg

SEQ ID NO: 34545 - DNA, 361 bp, Zea mays
  unsure (1)..(361): unsure at all n locations
agcttaatgcccctaagagattgtctaattntgttaatggcaaggctcccatggctcaagataacgagggttatattttatatcctgctggttatcctgagcacaagattaggagaattcatgctaagaagactcactctattttccatcatgcttttatgtataagagtgaggcttctagctctaggcattctacccatgttaaaatgcctaanaagaaatctcctattgcatcaaataatcataatatttcatttaagacttttgatgcatcctatgttttaactaacaaatcaggcaaagtagttgccaaatatgttggggccaaacacaagggctcaaagacttgtgtttgggtacc

SEQ ID NO: 34546 - DNA, 227 bp, Zea mays
  unsure (1)..(227): unsure at all n locations
taaaactcagctgagaagatcttgaatagtctgaagaatggatgtctcttttgaaagtttctcactgaggaatatcccaagaggagaaaatgagcatgcanaattactagctaaatcagcggcacaggggctcccactccctttggaagtattctttgaaactctaatagcaccttcaatcgagctcatggagcgagcggtgcttacaatctcaccagaacacaacg

SEQ ID NO: 34547 - DNA, 418 bp, Zea mays
  unsure (1)..(418): unsure at all n locations
agcttctaaaggaggcttacagcgaaaaataaactctgattccgctgaagtaaaaggcgaagaagctcctaagggaggcttgtagtgaaaaaacgtcgatcttcggcaaatatcattttgcataacatcacatcatcacatcattttcatagcataacatcatacatcatattgcatcaacgacgcaagaaaggggtctcagtattgatattcgaagattgtttcaaagaagtagtgccacggcacaaaaatagctattgaagaactataccttcgtcaaactctgaaatgaaaagatctattggttattgattttacgtggattggttactgattttatgcgaacacggatattatttacgaagcatgaaaagaanggaaggtgtttnttcgccgaatgctcanaaacggtatgtat

SEQ ID NO: 34548 - DNA, 400 bp, Zea mays
  unsure (1)..(400): unsure at all n locations
gacattaaaactaacttggccctaaagatgctatttattaaggcatgttccatgtttagattatgaagctacatattatatcctgctaattatactaagcacaatattatgataattcatgctatgaaacctcatactgtttctcaccatgcatacatgtataaaattgacgcatctacctctaggaaaaccactcatgttaaantgcctaaaaagaaaattcctgttgcatcatatgacactaacatttcatttaaaacttttgatgcattttatatttaactaacaatccagcaaatgtttccaaatatgtggggcaacacataactccaaacttggtttggattcaagtgctgatctacattaaggaccagactgttggtaccaatacaagctaatc

SEQ ID NO: 34549 - DNA, 352 bp, Zea mays
  unsure (1)..(352): unsure at all n locations
atatactttgcttctcaaggtcttagtgtactacagaacacacatacacaattggagaatgtgctgtatgctctnttgatagcctccaggaagcttaacactattttcatgcatacaatataattgttccttcttcacaaccgtggactgatattatgagaaatagacaatcttctggaagggatataaaatgggctgcggaactcaatgaatgcctgaatgattatgtgcatagatcttcaattcagtaccaaacattggcatacttcattgctgactggacgccaagggctcacgaagaagaaacgactacagatgccgaagttaggacagtgttgtgctatggatcttg

SEQ ID NO: 34550 - DNA, 345 bp, Zea mays
  unsure (1)..(345): unsure at all n locations
agcttgtgaatggcttgtcgaagcaacagaagttgcatgttggttgcccacatattcttgtatataaggagagtggcacgaagcagtatgtaaaactagcttcggctgattctgccgagcttctgcttctgcaatctctttttcttcagaatagtgatctggcacgttcttgtagtgtggcccttgtcctcaccatagaataagcaatagatnttcctgtgctgatccccatacanttctccgaggcccttgccgcctcggccccttgaagctggtggcctgaaggagctcacctatggtcctgaagattgtgagctgtgttgtggcctctgaaactggcctcct

SEQ ID NO: 34551 - DNA, 462 bp, Zea mays
  unsure (1)..(462): unsure at all n locations
tgccttcgccttagtgtaccacccacaatccaacggcgtcttggagcgcgccaacggcaagattttaacggcgatcaagaaaatgctcctcgacgacaagaagggcaaatggttcgacctgctaccagaagcagtctgggcactaaacacgaccgagtttcgagcgaccggattcactccctttcgcctgctatacggatcggaggccatgaccccacagaaaatcaaacatgggtccccgtggacaagcgcttcagcagtacccgacgtcgacgagccaacttccaaagacctcattgacggagaccgtgtcttcgccctgcaggccctcgataaatatcaagcccaaacgaaggcctggcgcgaccacgcggtcgtcccaagataattcaacaaaggggacgctcgacttgtccgcacaacccggatagagtcatngggtaagctggaaccgaagtggga

SEQ ID NO: 34552 - DNA, 340 bp, Zea mays
  unsure (1)..(340): unsure at all n locations
ncaagctttaagtatttgaaagggcaagacaaacttatctgtcgccatgccaaatgggttgagtttatcgaaacatttccatacattgtgaaatataagaaaggtaaggacaatgtggtcgttgatgccttgtctcgaaagaatgtgttgttgaatcaactagaggtaaaagttttgggtcttgaaaatttgaaggaatgtatattgatgatttnaaattttacaaacataccatcatggaaagatgaaaaaggtgggaaaatatatatccatgatggattttgttaaaactaacaacttggtacaaaattttgggtgattgttttttgcgggatcacat

SEQ ID NO: 34553 - DNA, 100 bp, Zea mays
  unsure (1)..(100): unsure at all n locations
agctntagtgattagagagagtgattggtgtattcatttgagctctcgcgcttggattgcttctttttctcattctttcttgcgaacatctcaattggta

SEQ ID NO: 34554 - DNA, 445 bp, Zea mays
  unsure (1)..(445): unsure at all n locations
cttgtcaaaacaacaacatgtaccagcacagctactgcataccataccagtgacttggcccttcgcgtgctatggactggatatgattggacctttcaagaaagctcaaggaggatacactcatgtactggtagcaatcgacaaattcactaaatggatagaattcaaacccattgcctctttgacctcagctaaggccgtggaattcatacaagacataatattcagattcaggataccaaacagcatcataactgacctatgatccaacttcacaagttcagagttcttcgacttctgcgagcaaaaaagcattcagatcaagtatgcttctgtagcacatccaagagccaacgggcaggtcgagcgagccaatgggatgatactgtatgcactcangaataatgtctttgataagactgaacagttcgcaggaaaatggata

SEQ ID NO: 34555 - DNA, 355 bp, Zea mays
  unsure (1)..(355): unsure at all n locations
agcttagtattggttgttgttaccaatcgatactatcatggactttttattatcaattgaagccacaaaccgtattaatatgtgctcgagagattagtacctgttgatggcttcaaccagtaataaaaagggacatttgtatctgttcgagccatcaaccagtattaatactccctctagagcgccttgttatcattcaaaaatactactagactagactacacacccaatcacaatcacatggtgataaacacacacaacatcatttgacgactaaaanatngaatgatggagagaaaacaagcacctagatgttgtttatttttcctctcaccatgcgtggatatgcacaaca

SEQ ID NO: 34556 - DNA, 496 bp, Zea mays
  unsure (1)..(496): unsure at all n locations
ctaagcttgcacaatcgagcttgcattgtgagcacttggcacgttctatttgatagtgcctatagataattaccaagaaactttattacatatatatgaattaacttgcaactctctatgattttgaataactgaaaatagtcctaactattcaatggaaacaacaaaaaatgttgacttatgtgagtaacaaaaagaagactcaactgccgtagggctctaccactggttcttaatctgtattcctagaaacaagctagaccacataatagatcttcaaaatattatgttgactctgcaagccttccactgaaccaagtaaaacaacattattgtgagcaaatattatttgtttataataaccaaaatatggttacttcgaaacacaagttaaggagttacttgcaaagtccttgacatagtttgcacagaagctcatcatcaatggaccaaccctatgtgtactgtctctctttacaangtgccatacacaaca

SEQ ID NO: 34557 - DNA, 441 bp, Zea mays
  unsure (1)..(441): unsure at all n locations
agcttgacagntgctataatattctttcctgcaaattattctgaagagacttttgtaatattattatggaaaaactcatgtaaatttgtacataccttgtaatatatttttgtttccgctatctgtgtacagtctgctttgttgtggacgaaacttcttttttgagctgaaggcgaaaaacaccttcccttcttttcgtacataacgaagcataaaaaatnttcctttntcgaagtctttcctcattgccgaagcgcctatcttttntgtgtgatatgatgatggttctatatatgtctaaatgaatgtttatgagtgcaaatgacatgatgaaatgtattgtggagatgaatattgggaatgattcanatcttttcacttttcagcttcatcgtttacttttcagtgtatcagcgttgacttttcgctgtaagcctccct

SEQ ID NO: 34558 - DNA, 99 bp, Zea mays
tgtgaatctgtatatgcgaattgagatatagggtatattgctgcgaattattaatagccgcacaaaaacctgtcttgggggggaaccatcaattttcgt

SEQ ID NO: 34559 - DNA, 442 bp, Zea mays
agcttaaaggatactattcaactaaagtaagaagatgttgataagatgttcttgtatgaaaacttcctctccttcagttgttttagtattctatccttagtgggatgtaccatagtataggttaaattccttgcaatataaaatgttcaatagtgcatataactttgacatcaactatatgtgtgcactaatttaaaggaatatagtctatccttttgggtttcaataatgatgattcatttgccatccacatataaggatcatcatttgtgaaacccgctcttgtgtttctaatgctctcttttctaagtgtttcaacaaggttctcccaagttctttgaagatgaattcaaaatctacaaatataagagtcttggttgtttcaatcattgagtttcaatggatatcatatcaagtatgatcgaaccaagcacagatgaat

SEQ ID NO: 34560 - DNA, 481 bp, Zea mays
  unsure (1)..(481): unsure at all n locations
ctataaaactaagcttgnggtgactcgccgaagcaacagagactgcagggtggttgcctacatattctgggatgtaaggcgaatgatacgaagcagtgtgcatgacctgcttcggctgagcctgttgtactgcagcttcggctatttccttttgcttctggatggtaacatggcacatcctggtggtatggcccttggtctcaccacagaataagcaaaaaattcttcttggttgatctccaaatcttccgccgaagcccctggcgcctctgcctcttggagctggtggtcggaaggagccttgctgttgccccgaagcctgtgaggagcactgtggcctttgctgctggcttcccctatcatcattntgagtagagttatggattgacctaacgtgcctcggatagaatcttccttcgaagcccctggtcatttcagagtacctgaaagcctcctcccttctttggcgaaaatcattatc

SEQ ID NO: 34561 - DNA, 433 bp, Zea mays
  unsure (1)..(433): unsure at all n locations
agcttcagggaaatggatgccttgaaaggaaggtaaacactgtgcacaaaagcatttcttgttacatcatccgcatctgtggtgtgatatgtgctgctccttctgttccacgccaggcaccagaccaccaagggcatttggatcgccaaggctgctgggatcgagccgttcactgttgtgctggacctggaagggaccgactggagggagcgagggcangtgaaaattattctacttgcagctatttctccacttaaatgttcccggacagtgttcttctttctcatcaaattgtgttgtccatgttcgacattgctgtttgactgatgggtgatggtcctccgtgtatagcatgttcgctgtgttgtgccttgcgcattaccattactcattatgtgctgacggcttgcaaatcacaatttcaagtacctga

SEQ ID NO: 34562 - DNA, 500 bp, Zea mays
  unsure (1)..(500): unsure at all n locations
taagcttgtgggctnggagataacaagaggagtggtagcctagaactatcctcaacatggactaagtgaccagcaagtcaccaaaccacgagtaaaacattgcatgtcatcctctacattatggtttgtatatgtgaacacaagtttacttcatcataatatcatgtattgggttgtttagcttgtgcttagtgttggccactttctcactactatatgtaggagctctagttttcttacatgtgctctagttgcctagattgtttgatcttgcaaattcgaattatttaggtaagtttccattggctcgatgcccttagttgttctagttcaatccttttaagggtgctagcaaatctagatagaatggtgttgtactattgtcgtggctagaccattcacttctgcatttaaattgtttgaagtgttgcgacttaatttataaataactaattaccctcacctaatcagccatgtcaatgctacacccactacatctg

SEQ ID NO: 34563 - DNA, 333 bp, Zea mays
  unsure (1)..(333): unsure at all n locations
agcttctaaagggagaacatgtgatatgtctaaccaatgttcatttcgaaaaagatagaccttgtgcagcttgtcaagcagggaaacaggtgggaggagcgcatcacagcaagaatgtgatgaccacttcaagacccctggagctgctgcatatggatctcttcggacccgtcgcctatctaagcatanggggaaagaagtatggtctaattattgttgatgacttttcccgcttcacttggggtgtctttttgcaggataagtctgaaacccaaaggaccctcaagcgcttcctcangaaggctcaaaatgagtttgagctcaaagtgaaaa

SEQ ID NO: 34564 - DNA, 254 bp, Zea mays
  unsure (1)..(254): unsure at all n locations
tggcgcgcggntacgtggcctacggcgtggcatacttcttaacgctgatgggatggctcaaacgaattacggtgacactgtagacaagcttggccacgcggcggatgaccgtcgaccggagatggggaagaaatgcgatctgagggtgcgctggcaagcctacggcggtcttctgtgagggcaccattgccgcttaacccaagcgcgccaccgaggtaacttttgccacgatacccattcactttaccgcgggc

SEQ ID NO: 34565 - DNA, 433 bp, Zea mays
  unsure (1)..(433): unsure at all n locations
agcttctaaagggagaacacgtgataggtctaactatatgttactttcgaaaaagatagaccttgtgcagcttgtcaagcagggaaacaggtgggaagctctcatcatgccaaaaatgtgatgacaacatcaagacccctggagttacttcatatggacctcttcggacccgtcgcctatctgagcataggaggaagtaagtatggtcttgttatagttgatgatttttcccgcttcacttgngtattctttttgcaggataaatctgaaacccaagggaccctcaagcgcttcctaaggagagctcaaaacgagtttgagctcaaggtgaagaagataagaagcgacaatgggtccgagttcaagaaccttcaagtggaggagtatcttgaggaggaaggaatcaagcacgagttctccgctccctacacac

SEQ ID NO: 34566 - DNA, 390 bp, Zea mays
  unsure (1)..(390): unsure at all n locations
tagaagcaccttcgtttcttagtccccccgacatgatcttttcctcacgcggntaagcattagaacgaggattatgctctgataccaattgaaagttgcctagaaggggggtgaataggcaagttaaaactttntcaacaaaaactagaagcaaactgggtaaaactgaattgatctcgaaattcacccagttaactttggaaatgagatgttctaaatgatccacagggttcaaagtagtagatcagagaagggcacttctcaaaatccacacaccaaaaagatataaacaatcttccacggaatggtgagagaacgaagaacactaacaaacacattgagcaagaacacaagagacacaagatntatcccgaggttcggtcacaccac

SEQ ID NO: 34567 - DNA, 428 bp, Zea mays
agcttaagcaaaaaagaaaaagaattaccaaaatatattgaaactagggcttagatttcccatggttaagttgagatatttgaggtagacttaaattcttattacgagggtctctttgattaagtagccttttattaatattgacctcttactaagtagctagaaaaatgatgtatgcatgctcgtcctaagcgacctcacatcaagcatatagggatagagaaatcctccatccatatcatagcagcctgtagggcatattcaaatagccacctagctacccatctagtatcctaaggcttcacgtcctaggtctacccttatcgtcttaccgatctatccaacattggtttctaagtaagttttacttgtgaaaaggttggtaattacgatttattgattcctctatagtggtacaagctccgata

SEQ ID NO: 34568 - DNA, 482 bp, Zea mays
tcatcccatattattaaagatgtagtttgaatcagttcacacaacattgttccacgtgtaatgtcacatattggtccttcatctaattcacatggtattttgaaacgagaatgtgctgttcggccgcctggtaggagtaaagaagccacacctgaagaagcgacagataacactatgtgtttgcagctacgtaagaatgttatgatggagttccatagatacgttttgcctgtatcaccgtaaccagagacaaagtagaagcctggtctctttgttagaacaatttctgtaatagttttgaaagcatgtagctgatcatcgtttagccttgagataagcatttctgactcagatggcatagcatcaatatcatatgtaaggtcatcataatttagacgatttgacgcactataaaagatgaatttgtctacttggtaagtgaaatcttgattcacttcctctttgctgaataagttcaagct

SEQ ID NO: 34569 - DNA, 436 bp, Zea mays
agcttcttcggccaccgaagctgaacagccaaccttgctgccagaaactgcagagatggccgaagcaccatccacagaaaaaatggaagaagcgaaaaagccgactaaggaaaaaacattagaagttttgagtcctgcagtaaatattgaaacagcaaaaaaccaaaaaaggggccatcagtgaccccaaaaaggaaaagaatggtaaatgtactagacgtcttggagacaattaagtcttcaagcacaattccaaaaaagagtgttgaagttgctgaagcttctactgaagcttcggctcaacaagctgaagctgaagctgggccttcagagccctacaaggagcaaccttttgaagccgaagcaataaaaattccagaaccagtattagttgaagaaactgacaccgccatccccgaagcacctgccagcatgc

SEQ ID NO: 34570 - DNA, 485 bp, Zea mays
  unsure (1)..(485): unsure at all n locations
tgccattctttanagtgttgaatccagcccaagtattccaatgatggcgagcccagcaaaaagcttttgaagaacttaatattttattcactatggcctccactattattgtatgtttctgctctccattccactatgagtgtagcactattccacgagaaagctagaggagggatgcaaataaacaaaagccaatatacttcgtcttagatgtgcttggaccatctaaaagaaactacttagagatggataatgtgctctatgtattcttaatggttttcagaaagcttcggcattactatcagccatacaatatcattgtacctgaaagtcgtctagaggggggggtgaataggcgaaacctgtaaattataaactttgaacacacactttacctgnggttaaggctagaaataaataatagtgaattaggagtgcgggagatagttcttcttgctatgagtcgctcaatcaatgcgggtaac

SEQ ID NO: 34571 - DNA, 331 bp, Zea mays
ggaagagttcactaaagaacaggggagcttaaatgctctcatgttgatttggtccaaaggtatgaaactatttcaattgagtaagacaactccttattatgtatcagtcaattagtaaatatgaataccttgcttaaagaccaagtagaaaggctaaaaattgaaaatctagcttttcaaaaaaaacatgatatgcttctatgttctcatgaaaatcttatggatgattatatcactgtaaatattactcatgaggttgtgatagcaaacttaaaatttcaacaacctcactcatgcacatgtgttcaaattgaaactatattgccatgtc

SEQ ID NO: 34572 - DNA, 401 bp, Zea mays
  unsure (1)..(401): unsure at all n locations
tctanaatgtttctaaccctgtgctaacaatattcctatttttccttctaatattgagttttgagtaggtttcttatttaattcaaaacttcagaaagaaatacagaagccatgggttctattatttttatctgatagttcatgaattccagaatctatcaaaattggtttgaacatttctggatgattattcttcaagttatgcatttatttagctatctgttataacaaaagaatagaaattaaaaatgtgaaaagaaaaacagggttacgctgatgcccctgnnggtttttcttatcttttctcacagaacagcccttggtccactattggcttgngtcactgacattgcgcacagccccctgtacttaactgaaatctaacccgcgctccctgaccg

SEQ ID NO: 34573 - DNA, 313 bp, Zea mays
agcgagaggaggttcttcatacccatatgtgcttatctgcgaagccacagacagcgcatgcgagggttagccatgaagcatgcatctagaccggactcttcttagcaaaatcaactaaataaagtatgcctgctaatacacccttaaaagctagtgaaccatcacatctattaaagacagacacaactatatttgtgaattgacagttttatcccatatgacataattgactaacagatagctagtgatattcaagactctccactatagacacattatagattgaatgctcattggagattgcaatttacct

SEQ ID NO: 34574 - DNA, 392 bp, Zea mays
cggatgaggagtcgtcatcatcattatcattcgaactatcattcgagatccatatcactatagaggctttgccatctttcttcttggtgtagcaattatttgtcttcttgcactttcatctttgcccttcttcttcttgcttgggcaattcatggcaatgtgaccgggttccccacactcaaaacactttctatcattgagatcatttcttcttgatgttggacctcttctaggttgacctctcttcatcttcatgaatttattgaatctccttacaaatagagccatgtcaccatcactctcactttcatattcttcatcattattatcctcttttaaaatgccttgaggcctaacttcagagcagtgatcatttttcgcttctatgcaac

SEQ ID NO: 34575 - DNA, 337 bp, Zea mays
agcttatgaagattcttcattccaacatgggctattcggcggggccagagccaacccaagttagtcttagctattaagcaagtgtcgagttcagctctatcaaaatccaccaagtatagctgaccctctaacactcccttaaaagctattgaatcatcacttcttctaaagacagtgacacctacatcagtgaagagacagttgtagcccatttgacataattgagatacggaaagcaaattgttatctaaagaatctacgagaaaaacattggaaatagtatggtcaggtgatatagcaattttacccaatcctttgaccaaaccttgatttccat

SEQ ID NO: 34576 - DNA, 355 bp, Zea mays
ctgagaaggttcttcatccgcacatgtgctaatctgcgatgccacagccagcccatgcaagtcttagccattaagcatgcatctagaccggcctcttcttgtgcagaatcaactaaataaagtttgccgtctaaacacccttaaaagctagagagccatcactgcttctaaagacagacacatctacatttgtatatagacaggtataccccatatgacataattgactaacagatagcagattatattcaagactctctactaaaaatacattagagatagaatgctcattagatatcgcaatgttacctaaccctcttaccttgccttgattccatcaccaataaattgaatc

SEQ ID NO: 34577 - DNA, 425 bp, Zea mays
  unsure (1)..(425): unsure at all n locations
agcttgtgaagattcttcatcccaacatgggctagtctgcgatgccatagccaacccatgttagtcttagcaattaagcatgtgtcgagttcagctctattaaaatccactaagtatagctgaccctctaacacacccttaaatgctattgaatcatcacttcttctaaagacagtgacacctatatcagtaaaaagacagttgtagcccatttgacataattgggaaacagaaagcaagttgtaatctaatgaatcaacaagaaaaacattggaaatggaatggtcaggtgaaatagcaatnttacccaaacctttgaccaacccttgatttccatccccgaatgtgatagctcgttggggatctnttgttttctcatatgaggagaacatccttttctccccggtcatgtggtatgtgcaccc

SEQ ID NO: 34578 - DNA, 431 bp, Zea mays
tactcaagcttggtatacaacatattcgaagatgaaaggtcgaaccgtcttatatatataatgaccttttagcccataaaggtctgagtcaatgttgtaaacttctatgaggcgcatgattgtaattcctcacaagctgtgtcctgtgcctataaatagtgaacaatattcctttactgttcacgcattcctgtaattgcaattgcatcactcggagattattctttgccaaagcagagagataaatgtatctaatatttgaagatatcaagttcatataatatgtaaatgatgtcgcttacttataatttacttgtctttaatgctttatatctcgcattattttatataatctctgagagttcaattacgaagattcaaccttcgtaattgtattgtgttaaccttcgtccgaagtcattaaacccttg

SEQ ID NO: 34579 - DNA, 439 bp, Zea mays
  unsure (1)..(439): unsure at all n locations
agctntaccttgattcccgacaaaccaacatattcttgagagtcttttctttagtcgggtaagtcttgctgagtaattccatactcagggttttattccctgttgtttttcaggttgtaattttgttctgttgtggatggtgctaagtgccggtgggctcggccttcttatataagtatatcccttctatagtttctttaacgaggattgtcacttaagctagcatgtattttcaaatttacgaatactttataacatttcaaattgtaattcttttgaatcactttcttttgtaatcttttgtaatcacttcgatgaggtataataatatcttgataaacttgtaatcattttgtaataaagaatttatttccgctgcaagtgtttgtatgtgagttgtgtttatttaatcctgcgatcttggcggtaagtggtttat

SEQ ID NO: 34580 - DNA, 424 bp, Zea mays
tgatcaattgaaggagaggctaatgtcgccaccagtattggttatgccagatctacagaaggggattgacatttattgtgatgcatgtggccaaagacttggatgtgtgctcatgcaagaaggacatgtgattgcctatgcatctcgtcagttgcggaagcatgaactgaactaccccactcatgacttggaaccggctgccgttgtgcatgcacttaagatttggagacactacatcatgggaactaagtgccaagtatacacggatcataagagtttgaagtacatattcactcagaaggatctcaaccttaggcaatgccgttggttggagctcattaaggattatgatttggagattcactatcacccgggcagggcaatattggttgtagatgccttgagtcgaaaggagcatggtcat

SEQ ID NO: 34581 - DNA, 452 bp, Zea mays
  unsure (1)..(452): unsure at all n locations
tgccgcatgcaagcttgagaagggtcttcatccccacatgngctaatttatgatgcctctgccatttcatgctagtcatagcaatcaagcatgcatctagaccgggctcttctgttgcaaagaccactaagtaaagtttgccgtctaatacaccctctaaagctagtgaaccatcacttgttctaaagacagacacatgtacatttggccatagacaattatatcccatattacataattgactgacaaatagtaaactgtattcaagagactcaactaaaaacacattagagatagagtgctcatttgatattgcagtcttgcctaaacctttcaccttgccttggttcccattaccgaatatgattgaatcttggaatccttgagcttgacgtaggatgtgaacatcatcttctccctcgtcatatggattgtgcatacgttggcgataa

SEQ ID NO: 34582 - DNA, 357 bp, Zea mays
ttaccaaatggacgtgataagtgccttcctcaacggaccattctatgaataggtctatgttgaccaacctcccggcttctaagataatgagtaccctaaccatgtgtataaactctctaaggcgctttatggactcaagcaagccccaagagcatggtatgaatgcctaagagattttcttatcactaatggctttaaagacagaaaagccgatcctactctatttactaaaactcttgacaatgatctgcttgtatgccaaatttatgtcgatgatattatattgtggtctaccaacgaatctacttgtgaggagattagtatgatcatgacacattaatttcaaatgtccatgat

SEQ ID NO: 34583 - DNA, 431 bp, Zea mays
  unsure (1)..(431): unsure at all n locations
agcttgcgctttntattaattggtacattgactttctccatgcaccttcaagtgcgcaagtatgaaagtgatggttttctcccaacccacttctcataaggggttttctcttctttgcccataggaattctattcagaacatgacatgaagtcaggactgcctccccccaccatgccttatataaaccacaagtgtctaacatggcattcaccaggtcagtcaacgtacggtttttcctttcagcaatcccgtttgactcgggtgaatagggaggagtcctctcatgaataatgccatgttctgcacagaaatcatcaaagactttgggaaagaactcgccaccacgatctgatctaagacgttngatctttctctctaattggttntcaacctcagccttatagattttaaagtagtctaaagcctcatc

SEQ ID NO: 34584 - DNA, 435 bp, Zea mays
tcggccttcggaagccgaaagttgaaatgaatgaagctgtctataaatgccagagggccttcggcgcagtgtgctctttcattggaacaagagacttagttcaagaacatattgccttcagggtatggccacttgcggagaaatgggaaatgccacaagaaaccgttaaagaaaccgacgaaggtggacttatcagattgaagtacactcttaaatttggagatagattcgttgagccagatgatgactggttgaaaagtattgaaaatctaagcgatgaactgcttggggcttattcgaaggccgaagacactgcaatgtcagcagccttcggaggccgaaaaaagaaaaggctgaatcgggtatttgatgccatcgcggttgtctaccctgactattgctatcccattcgaaggcagaagagaaaaaacacaa

SEQ ID NO: 34585 - DNA, 259 bp, Zea mays
agggatgaaatctgctatcgcctggactgaatcggagatctatgcacataatcaatgcggaactcattgagttccgcatgccactttccaatccttctatgggcggttgtgtgtctcataatatccttcacaggctgtgatgaaggaacaactatatggtatgcttgaaagtaatgtcgaagctatctggaggccagtgaaacatcatacaacaccgtctccaattctgaataaattttctttgagaaactgagaactt

SEQ ID NO: 34586 - DNA, 229 bp, Zea mays
aataatagatcacaatttataataagttcctcaatgccatgcaatgcaaatgacagtgtatagttaattccatatgatactcatgtgagggtccgagctgctcatgaccatgagcccacgtgatatatcacttctacacactatagagggtgcacatctttacccataaatcgcgtataagtcatagaactttgccccaccatgatgtgtcggccagacaatacacact

SEQ ID NO: 34587 - DNA, 432 bp, Zea mays
agcttctaaagggagaacacgtgtattgtctaacttatgtaactctcgaaaaagatagaccttgtgcagcttgtcaagcacgtaaatatgtgggaagctctcatcatgccaaaaatgtgatgacaacatcgagacccctggaggtacttcatatggacctcttctgacccgtcgcctatctaagcatatgaggaaaggagtgtggcctctgcatagttgatgattattcccgcttcacttgggtattctttttgcaggataaatctgaaacccaagggaccctcaagcgcttcctaaggagagcccaaaacgagtttgagctcaaggtgaagaaaataatgagcgacaatgggtccgagttcaacaacctctcagtggaagagtatcttgaggaggaaggaatcaagcacgagttcttcgcttcctacacac

SEQ ID NO: 34588 - DNA, 498 bp, Zea mays
cggacacttgaaactaagctcgggtgcaccatcactccgacttctcgcttacatctcatcacatcttatcgaaaagtacaaatcgctctaacttggttgaagaaagtacaaatcacaacactttattgttttttatgtacatgccgtccatactacaaatgtagtagtgttgtgtactggatacatcaaggttggacggcagcttcgatcatatctatagtctgttcttcttagccatattcctgtagtacatgctgcattgttgtgacaccaagaagttttgcttctcttgggccttggcagtggtattggctatgcactggctaaccttgtactccattcctacttatatgaactgcattgtgattattattcatgagataaaaaaacattacactgaataaactgtcatctaagcaaatgagaagaaatgacacctaaatgtctacacccaacacatgacccattatttgtaaacaagttcaatcaaaaaacaat

SEQ ID NO: 34589 - DNA, 424 bp, Zea mays
  unsure (1)..(424): unsure at all n locations
agcttgagcagtaaccggcttcgtctaaaacccttgtaaactggtgatcaacatgtccttcatcttctgccatgatgtgattgtttctggccgaaaagaggagtaccaggtttgtgcaacattcttgactgccatgacgaaagatttcgccatgactgcagtatttcctccatatgaagatatggtagcttcgtagctcatcagaaactgcttcggatctgagtgtccatcatacatggggagctgggtggtttgtaagacggnggctaaggtgtagcatgcagttctgatgacaaaagagaagcatcatcaaaagcaaaatttccatgatggaaatccttataccaatcatcctcgttgaagaagccctcttggtgaagctctctgtgttggggccttcggttttgctcatcttgagcaagat

SEQ ID NO: 34590 - DNA, 368 bp, Zea mays
  unsure (1)..(368): unsure at all n locations
tctatagggagagcacatggtatgatcaacaaatgttcattttgagaaagacaagatgtgtagcgcatgccacgcatggaagcaagttggagtccatcatccacacaagaacatcatgacgaccgacaggccgcttgagctactccacatggatctattctgcccgatcgcttacataagcatcggagggagttagtattgtcttgtgatagtggatgattatgctcgcttcacttgggtattctttntacaggagaaatgctaaacccaagagaccttaaagggattcttgagacgggctcaaaatgagttcggcttgaggatcaagaacattagaagcgaccactggacggagttcaagaactctc

SEQ ID NO: 34591 - DNA, 429 bp, Zea mays
agcttccacaaactaaggagtatagcttcgcattgtgtaatattattggtacattgaaactccaacttggctgcatatgaggtcttcatcttcgaaggtgagataagaacggcaattgctcctgctctgaaggaaccctaagatccatcataaaaaagtgtccacaccgcttcatctgacacacttgcttcatcttgacatcctggcgtgtccaaccaatgatgaaatatgctagcgcttcggactggattgatgatcgatgtacaaagtcaatgacaaacttattaagcttagcagcccattttccaattctgttagttgcttctctatttcttatgatatctttcaattgctgagatgaaggtataataatgttgtatgattggagataatgacaaagcttcctagaggccattagcactgcatata

SEQ ID NO: 34592 - DNA, 434 bp, Zea mays
  unsure (1)..(434): unsure at all n locations
tgaattgtttgtggatgtatgtgaactacaagaccggtggtagccattgggttattgacagtggatgcacacaacatatgacaggcaacccacggatattcacctcactagatgaaaatgttgatggtcaagataaaatcacatttggagataattcaaaaggaaaagtgcaaggacttggcaaggtggcaatctcaaatgatntatcaatatcaaatgttctcttagttgcacctttaagcttcaatttattatcagtgggtcaactctgtgatcttggacttcaatgcttattcactccaacagaggttattgtgacaaagatggatggtgaatcaatggtattcaagggatntagatacaacaacctctacttagtggatctcacttcagaagatgcaaacttaagaactngtctcttcaccacagcttct

SEQ ID NO: 34593 - DNA, 433 bp, Zea mays
  unsure (1)..(433): unsure at all n locations
agctntgcaggaaaaggagatggtatgaagctttttgtgcttgagagagtcaattcaatttttattaactcaagctatcaatcttcaatgatctatatccaagattgacccaaagttattttgaattgttatatctaaaactcatacaatctcggggaagatattgatgttgtaggaaataaagaattaatcctatgccgaaaagtcaaggcctacaacatggaggaaagccaaaggatggtaacaattatgcttttaagtgcaagtatcttaaaattatcatttcttatatgtcttgtgtagtcacatagaanaagaaagcacttcaaatgtttttaaattatgtcaccattctttgaaggaattcctctcatatggtagattgtacattcattacttctataccatggcatgctttaaattgttgtaagta

SEQ ID NO: 34594 - DNA, 435 bp, Zea mays
  unsure (1)..(435): unsure at all n locations
tgaagccatggtgagtagcataagctaataatatgcgaattgactcaagcctagctacaggtgcataggtttcaccgaaatccaaaccttcgacttgggagtatcccttggtcacaagccgagctcggttccttgtcaccacaccatgctcatcttgtttgttgcggaagacccatttggttcctacaacattgtgattacgacgtggaactaaatgccatacctcattcctagtgaagttgttgagctcctcttgcatcgccatcacccaatccgaatcttggagtgcttcctctaccctgtgtggcttaatagaggagacataagagtgatgctcacaaaaatgtgcaacacgagatctagtagttacccccttatgaatgtcgccgatgatggtgtcnactgggtgatctcgatggattgcttggtggactc

SEQ ID NO: 34595 - DNA, 393 bp, Zea mays
  unsure (1)..(393): unsure at all n locations
agcttgtcgagcttggtcgatggtggctggtgcttcattcgctccttggggtggtcgtggctaaagcccctgagcccctgcaacagcgacttcatcccctgctgtgagatcagagagttttggtctgttatttacataatataggcacctgctgttacaaataattgcacagttcttgtcccattatgctataaaatatgatgtgctgttcttagctcgatatgcggtagggtcttcttaactattgatcatctacctatgccttaattcatatacttcaaattttcaaaataatcttcactattagtcatgaaaagtttctatctgtgcatctggaacaaagaaaaccaacactctcaggataaantatctactatcttgctagataaaatc

SEQ ID NO: 34596 - DNA, 271 bp, Zea mays
  unsure (1)..(271): unsure at all n locations
tgatatatgatcacgggcaaacaatggtgntcatctgcctttattgtggctccaatcaaggcatacctggccattactaagagtgtccacgtgacatgcacatgaaatgttgaaaacaaactcatttagacaacaggggcacacacatgtgtaacactggatgagacgggtggtggcaacgatgacacctccacttagtacaccatcacaaatccgatggcgccaatagattaagcactatctgaacaccgttctaaacatttattatgaa

SEQ ID NO: 34597 - DNA, 341 bp, Zea mays
agcttgacattgtctccctgttggaagccaatgccatccttaatgccagggtgtctcccattataaagcatgctacgagcaaatttaaaattttcattttctagttcatgctcgacaattttagcatctagtttagctatatgatcattttgttgtttaatcatagcaatgtgatcatggatagcatcaacattaatgtctctacatatagtacaaatattaacatgatcaacactatatgtagaaggtttgcaagcatttaattcatcaatcttagcatgtaacattgcattttcatttctaagaatagaaatagaaacattgcaaacatttaaatcttt

SEQ ID NO: 34598 - DNA, 377 bp, Zea mays
tgagccgaggtattgcctcaccggagaagcacgttcaccctcgccgaacttcggtcttccaccgccgcgtgtggatcgagctaaccagtgagtcttcgtctaattccttgcacccacatcttccctggcatcccatgaagctccctgacctgttcaattgaactatcgcgccgtgagtaggccggactcctcgccgccgacgagcatctcatcctgcgcacgtggaccggccgactccgaccatccccgacggtgacccgcacattgttgtgatccctgagacctcccctacgtcctcgaccacctcaccggagcaacctcgccgccggtaagcccctccgccctttcttccgccgcggttactgtttaagttggga

SEQ ID NO: 34599 - DNA, 386 bp, Zea mays
  unsure (1)..(386): unsure at all n locations
agcttaccttttactccgaaatgtgatacaccctttattggtgagaccttcangtagacataatcttcaacttgaaagtacaagggcttgtgtcgtttgtctgcgtaactcttttggcgagcttgggcttctttcaaattatgtattattcgctgaaccttctcttctgtttcttttaccatatcangcctgaaaaaccatcgctctcctggttcagaccaattcaacggagtatgacaccgtcgtccatataaagcttcaaagggtgccattttaatgctttcttgatagctattattgtatgagaactctgctaatggtaaacagtcatcccattttgtgggagtccaaacacatgctcgcacatattttcaagatctaattta

SEQ ID NO: 34600 - DNA, 365 bp, Zea mays
  unsure (1)..(365): unsure at all n locations
atggacgtgaagagtgccttcctcaatggacctatcaatgaagaggtctatgttgagcaacctcccggctttgaagatagtaagtaccctaaccatgtntataaactctctaangcactttatgggctcaaacaagccccaagagcatgatatgaatgccttagagatttccttttatataatggcttcaaagtcggaaaggccgatcctactatatttactaaaactcttgacaatgaattgtttgtatgccaaatttatgttgatgatatcatatttgngtctactaacgaatctacatgtgaagaattaatatgatcatgacacacaaattctagatgtctatgatgggggagttgaagtat

SEQ ID NO: 34601 - DNA, 448 bp, Zea mays
  unsure (1)..(448): unsure at all n locations
tggacgtgaagagtgcctttctttatgattcaatcaagaataggtctatgtggagcaaccttccggctttgaagatagtgagtaccctaaccatgtgtataaactctctaaggcgctttatgggctcaagcaagccccaaaagcatggtatgaatgccttagagattttcttatcattaatggattcaaagtcggaaaggccgatcctactttattcactaaaacttttaacaatgacttgtttgtatgccaaatttatgttgatgatattatatntgggtctactaacgagtctacttgtaaagaatttagtacgatcatgacacannaagtcgagatgtctatgatgggggagtngaagtatttcttatgatntcaagtgaagcaacttcaagaaggcatctttctaagccaacgaaatatactcatatatctaagcaagttggga

SEQ ID NO: 34602 - DNA, 474 bp, Zea mays
  unsure (1)..(474): unsure at all n locations
gtcttancaacaagaaaaggttaggataaaggatcttgctcttgtgtggagaagctcccaagagactaatactttcaagagaggaagtacaccacatccgggcaaaggtacaaaggaagtattgatcttttgcgtctatgtaccttaactttcctccaaatgcttgtgatgcatttgttgaatgagtaagggggagtattgctagtgtgtgtttacctactcaataccctgctgtcccttaacatcattctatgttcttgcttgaatatggttttggtgtttgatgtcaaagggggagaatctgtgcattaaagcttatctcaacctgagaggaaagcttatcctaaggggtgatgtgttagttcgagctttgctagtgtgttattcatatgcttcctgcagtattatatgtgttgcatcatatggactagtgcttncgctgctatgaaataattggcatctattgtgttcatt

SEQ ID NO: 34603 - DNA, 392 bp, Zea mays
aatgatgaataacgaatactgcttattattctgtaatggacaacaacaaagaattgtgaacgagtttaacagaagaagaaaaaaaagtagttctaggtaaactgaaccgaatgctctttgctctctacaaaacattcaatcaattgagagctccgcgaaatgagggaagggggtgtcatttctgaattacaagtcattataaagagtatcttaatggcaacaagaaatggttggcttgctaaaccactggcatgtactggtgcaaaggtaactcaacaccccattattgcacagttgtaaacaaagacgcctgcacgtttcttcaccgagagaacctcccagtcagcaccatcttccccaccttcagggcaccaggaatgcagcaatattac

SEQ ID NO: 34604 - DNA, 467 bp, Zea mays
taaaggatactattcaactaaagtaagaagaagttgatattatttctatgtatgaaaacttcttctccttcggttgcaaatatgttatgccttgaccatgatatgtaatgtactcctcatgagactcttaactgaattgaaagtgcatgtggcaagtcattcaaatacttgatgcatatatctagtgggagaacattatatatcttgtgtcgtagagaataagtttcccttgagtaagctatattaagacaatccaaaatggtaaatttgtatctcattcatatggattgtaatctttattttctaaatagctactcttgatgcagtttaaaattcccttatcgttaaaatctaaaagtgcataagaatccgttttgttgatattcatcacatacatatgaactaacatggatatgatttttaaactgtaaaaggtacaattagtgatccatactctctaaattttg

SEQ ID NO: 34605 - DNA, 429 bp, Zea mays
  unsure (1)..(429): unsure at all n locations
agcttgtcatttgcatcatcaggcttgtcctagacctttctgaaatgttggngccaatttgtaaggaaaatggaccccgggccatttggctaaataggttntggtgtttgatgatcaacataacttatggactaatgtgtttgctagagtttgtgtttgtagttcacatgatgctaaattngcttagaccaaggcattgaggaaagcaacacctcagaagaagacattatgaagaacaagcgaagtccaagaaacaaaggaagtgtttcctacagactgtctggtctggagcaccggactgtccggactgttcggtgccacacgccggactgtccggtgcaccagagaacagtagcccaacggctagttccagatggcactgtggagagaagaccaccggactgttctatgtgaagtccggagtgtccg

SEQ ID NO: 34606 - DNA, 480 bp, Zea mays
tggatggttcgaccgggtccaggggcaccgatctgccaatcattgacggcgaaggtggtatttggcctggatatgagttcatcggcgtaccatataatggctggggctgtgaatcctcatttgtcgccgatgtattagacatagatatcctattagtagtttcatatgttggaaaactaggagcaacagacttctccaacgtacgcgttaattttctaattgatttttctaaccctctaatctgttgtttcatttgattctgttgatgatctacatactgtttaatagattggatgtcgtcgggtttacttacgttggggacttgaagcgaagatagaacagatgtgacgtcagtctctccatgtttgacaactttcttttggcgatccaccgtgtattgtgataagaatttctccttcgcttgacgcatatagtcctcatattgctgttgttcatcgaccgtcagactatcaacagccc

SEQ ID NO: 34607 - DNA, 361 bp, Zea mays
  unsure (1)..(361): unsure at all n locations
tgagctgcaacttatactcgctgcgttgttagaggccggtttatctgtggagggctcttgagtgctccctccagtgcatgaataaattctgctcctgtccctgcagcttcagcgagccatcgaatcattcgccatactttgggttatggatatccggtcttgctgtctgccctctgatcgaagtaaccaggcttgatttgatgctggcaggtctgactcgattcatgggacccaactcgcagccacttggtttcagcaatggtccttgtggaaaagtcgctttgaaaacattctctatgacttgggcgcgaagtgngggtactgcggcattagagactgcttatactctgaccgagatctt

SEQ ID NO: 34608 - DNA, 417 bp, Zea mays
  unsure (1)..(417): unsure at all n locations
cttgaaccgcaccagctggttcctaatcttgccatcaaggaagctgtgcatgcgtttttgagtgagcatggttgggcttacaaaattagatgatcgctttggaatacaggttctggatactgtccgatgtgacagtgggatttttttgttcactgttggggggcagattttaatctgggatggctgcgtacagattcaccttcttcagttgtgtacatatgagatgctcattatgatagtaattgtgaacagtacaccaaaggaagttgaagtgagcgtctgagttcctgactgcatcttcagttntaaattgtgtgtgagggagggcgaactgtgctgtccaagcacccatagaggagaactgagccgactgcgtgaagaactgaagaatgcacacatgggggatcttttcacgcg

SEQ ID NO: 34609 - DNA, 309 bp, Zea mays
tgtttttgtggcactcctgaggggagatattttgggggacgcaaattacatataacccgagctcctgtgaactggaatcccggccaacaatccaaaagacatactgttttatacaagtgggatacaactatactgatgaaactttagacaatgcgtagacaacacatggcatggtatggttccattaactagcagcaatatttacggggatatatatgcttgcgctaaatctattactgaagacagctgcatatttaaacatgtggatttgccaagagacaatgctggtcaattagtcagggaggactg

SEQ ID NO: 34610 - DNA, 433 bp, Zea mays
  unsure (1)..(433): unsure at all n locations
gcaagctntatgtgcttaaaacatatgcccataaatgctttgtcgccttcaatggtattatcaaagctnttatgtgctcctggtatatgtgtgaatgtcacccatcgtgctgttacttttatttgcaggttctggaaacctccccgtgcaggggaggtgctgccgaatatttttgttgacagacttgtttatttttttgcagaggtcttcctagccgctgcgggtctgcctcgcgtcgccactgcaccgacccgccacagcctcactagcctgactccaccgtcaccctangtataacctctatttccgcatcatggtcgtagatcacgtaacccagttaggcgtctcccgttcgaaagagatacggtgtagatatgcagatctttgcatatctacaaatgtatcagtttctaattgtccacgttttttggac

SEQ ID NO: 34611 - DNA, 449 bp, Zea mays
tgtcggagagaaaattctacggctgggtggcggaatacactctctctaaatcttaagatgaggagggggccttatcggtttgcctgttgagtggatacgggaagaacacacgagagtttagagtggttcagaccaccagagcgtaaaaccctaccaccactgtgtatgctgtattgcgtatgtgtgtctgagagctagtgagcgtgtgagcttgagttgggtccgccttgtaacgttgtgtagcttcccttttatagctcaagggaggcacatataatgatgttgagccccgacatatgggcccacgagcataatagaaggaatacattataggagtaactaatgcaagtaacgcctgagcaacctccaggcgccatgatatccgcagtccacgcagtattgatacgtgacagctgcttccttggtaacgtgcaagtaatgatgagcgt

SEQ ID NO: 34612 - DNA, 469 bp, Zea mays
  unsure (1)..(469): unsure at all n locations
tgcaagcttcancagaatgacaaccaggattcttcattctcagataggcagaaatgtgctaacatatgttgatgacatcatattaaaaagcacgaagcaagagaatgatatcactgatctgcaagagacatttgctaatttcaggcaagctggcctgaaattaaatcctgaaaaatgtgtttttggagtaaagaagggtaagttccttggttgcctagtttcaacgaaggggatcgaagccaatccaagcaagatcgaagccatacttcgaatggaaccgccaagtacgaagaaggtggcccaacggttggcaggaagattggcttcattgaacagatntatatctagatcagcacaaagaaacttgtcattctttgaaatactaaagtcgggcgaagtctntcagtggggcccagctcaacagaaagactccgaagagctgaagcatacctgattgtctaacacatta

SEQ ID NO: 34613 - DNA, 476 bp, Zea mays
  unsure (1)..(476): unsure at all n locations
tcttctcgtcatctatgagcgacgacaacgtgaatgtctttgctcatggagnttgttcggggtttgaagtangaaacatggattcatgcttggcgttggtttatgaaaatgactcacaagtctgatccatggaaaaaatattacgaagaaaaaatttcacacatgcaaaaaagggaatttaagtataatgcattattcaaacaaaagaaatagcacgcaaagctcttctttaaataatattacctccatccaaaaatataattcaagaatatcggtgatacttatctactactacgcattgtgcaatggtagcaagtgagcttggagagagatgtagtagatgtgtttcctgtcatagatgtagacataaacacatataggtgggtgcccgtgcgttgcaacggaaacatttaatatcatgataacttatgaacacatgtgtgttatactgttatgtgacaatgtttcgtacttaa

SEQ ID NO: 34614 - DNA, 465 bp, Zea mays
  unsure (1)..(465): unsure at all n locations
agcttatgaagattcttcatcccaacatgggctattcggcggcgccagagccaacccatgttagtcttagcaattaagcaagtgtcgagttcagctctatcaaaatctaccaagtatagctgaccctctaacactcccttaaaagctattgaatcatcacttcttctaaagacagtgacacctatatcagtaaaaagacagntgtagcccatttgacataattgggaaacagaaagcaagttgtagtctaaggaatcaacaagaaaaacattggaaatagaatggtcaggagatatagcaattntaccaagtcctttgaccaaaccttgattttatccccgaatgtgatagctcgttggggatcttggttctttctcatatgaggagaacattnctttctctcccgtcatgtggtgtgtgcacccgctgtcagtatccaacttgagcccccggatgcataaacct

SEQ ID NO: 34615 - DNA, 430 bp, Zea mays
  unsure (1)..(430): unsure at all n locations
ngcaagtacttgtcgaaacaacaacatctaccagcacagtttctgcagaccatatcggtgacttggccctttgcatgctgggggctagatatgattggacctttcaagaaagctcaaggaggatacactcacgtgttggtagcaatcgacaaattcactaaatggatagagttcaaacccattgcttctttaacctcagctaaagccgtggaattcatacaagacataatattcaggtttggaataccgaacaatatcataaccgacttggggtctaacttcacaagttcagagttcttcgatttctgcgagcaaaaaagcattcagatcaagtatgcttcggtagcacacccgagagccaacgggcaggttgaacgagctaacgggatgatattggaggcactcangaaaaagggtcttcgacaaaatg

SEQ ID NO: 34616 - DNA, 465 bp, Zea mays
  unsure (1)..(465): unsure at all n locations
gcttgtcaagcatattatggtacctatctctttatgtgtccatcaaggttagtcaacaaagatctgggaacccaagagtcctttgtgttagcactaggtaaactcattacctttctagcacaagttgcaattttgggttgcctagttacatgagaattaattgacaagctaggagtgggattgttaccaatgggacaatccttgcattgatgtcccttctttcggcatatgtagcaaaggcgatcttcaagtcttgaagatttcttccttcctcgtttcttgcttgctacatggttagtaaatattttcttttctagccctatgcctttntgtttcaaatggggacaagatttaataaagtgtcccttctttgagcatataaaacaaagtttatcatcctttgtaataatcaagccatttttaatatagggatatgatctaaccacgtgcccntnttcaaagcat

SEQ ID NO: 34617 - DNA, 472 bp, Zea mays
  unsure (1)..(472): unsure at all n locations
taatggccctaagagattgtctaactttgtgaatggctttgctcccatggttcaggatagtgagggttacattttatatcctgcaaactatcacgaacacaaaattaggaagattcatgctcagaaacctcacactatatctcaccatgtatttatgtacaaaaatgaggcttctagctctaggcataccacacatgttaaaatgcctagaaagaaaattcctgctgcatcaaatgagcataatgtttcatttaagacttttgatgcatcttatgttttaactaacaaatcaggcaaagtagttgccaaatatgttgggggcaacacaagagttcaaagacttgtgtttgggtacccaaggtgcttgtttctaacatcaaaggacccaagactgtgtgggtacctaagaacaaggcctaaaaatgttttgtanggttatgcatctggtggttcaagatggataatcgatagc

SEQ ID NO: 34618 - DNA, 320 bp, Zea mays
  unsure (1)..(320): unsure at all n locations
gtgcttttgtgaaagcttttgcgaatcacttgaagcgctactacttttgtgaatgattttgtaaagtgcttgcaaatatgtgcaaaacataataacatgtgtaggttctgtgaatgatttaggcgaggcgcttgttgatggtttatgtgatgtggatctatcatngtgccatactaattaaatttgtatatctatgcgattatgtgtatacaaatcggcgatatgcgatgctttcgtatatataacagttgttaacgctaattaatgtatattatcactactaacgactattactatgggcaactttctgtggttgctaa

SEQ ID NO: 34619 - DNA, 447 bp, Zea mays
  unsure (1)..(447): unsure at all n locations
tactcctccctgngaagggccattcatcatcgccatgattttgaagcccggaacatacaagttggccaacagtcaaggcgaggtctacaacaatgcttggaacatacgacagctacgtcgcttctacccttaagatgttttcaagtcgctcatatacctcgttctctttacatacacaaataaaagtctaaccatcaaggaagggtcagccttgccttggcaaagcccgaccctccctcgggggctagaagggggaaccccctctgcgtcaaaatttccctcggaaaagtctttctgtcagaacgtctttcgcgcttttcgactacttcgatagtggaatcctgaaaacgatggagtacacgtaagcggcaaggccgaccgagccgagggactcatacgcctncgggatacagatacctcactcatcaccttctgcgataagaactc

SEQ ID NO: 34620 - DNA, 396 bp, Zea mays
  unsure (1)..(396): unsure at all n locations
tctccanagtttgaggaggcttcctggcgaagtactgatcttctgacctggccgaagccccttgatcatggcctcgatgacaatttcattgggcaccgttggtgcctgtgcccttaaacgcaagaaccttcggacatatgcctaaaggtattcttcgtgatcttgagtgcactgaaacagagcctgagcagtgaccggcttcgtctgaaatccttgaaagctggttaacaacaaatccttcagcttctgccatgaagtgatcgttcctggtcgaagggaggaataccaggtttgagcaacacttctgacagccataacgaaagattggccatgaccgaagcattgcaccatacgaaacactgtgcttcgagctatcaaaactgcttcgatctgagt

SEQ ID NO: 34621 - DNA, 429 bp, Zea mays
  unsure (1)..(429): unsure at all n locations
gctttgagatgccttgatggaaatgccgctcctattaagaagatcgccgcatctactgccgcgagtgaatgtgaagntccaaattctgacgtatgctanctagtatagtcaagatcaacagttggtgagtggcattctctcgtcgaggaccgaggaatttcttcatgacgttaccagtgccatgtcttccaagaaggtcaaatactccctctagaagaaatgnggcaagctatttcgcttagtaagttcatacgctgtttaaaagtggtagacagtatatcaaaaccactaatgctacactacgagtatgaaccagcaacatattacttttattacaacaagtcaagtgtttactgctaaacacatngacattaagtgttagattataaatgagaaagcccgctgtcaaacaattgaagtttggcatat

SEQ ID NO: 34622 - DNA, 402 bp, Zea mays
  unsure (1)..(402): unsure at all n locations
ngacacgcaagcctcacttacttaacggtagttagcatgttcattcatgtcaacattacatcgctcctagctcacacgccatgcagctagcaggcatttccgctccggtccttaggttaattagcagtgctcgctttcacactgcttcgatcacccacgcgattttttcgtcgtggtgctgccagtgccaagcatgcaaaaatgagaacgagagtacttcatgacaagtgatatatacgatcgatgcaggccagcggcgcatcgaagccgatgctaccgacgtttggagtgcagatcatggaccccgacggccgcgtccctccgccttcggctccggcgatggcagcatgagcggcgttcagcggtgaacggcgcggcgactcacaaagtggaagcggaagc

SEQ ID NO: 34623 - DNA, 289 bp, Zea mays
gagggggctgcgcctttaaagatgaagaaatactccccctgacagagatcctctgcttacgaaaaagcatgtgaaaatgacacgtgcatgacatgacttgaacagactaacttccgctgtgcatacgtaacagaatatgagtgcactacttatgcattgttagccacatgggagcatatgatatgaactgtagactcctcaaatattggagaagacctgtagacgatactgaatgtcgtctcacaaagataccagatggaagtcactggtgagcttgagagacatgaca

SEQ ID NO: 34624 - DNA, 426 bp, Zea mays
  unsure (1)..(426): unsure at all n locations
tctgctgggagaacacgtgatacgttcgactgacgtacagttcttttaagagagaccttgtgcagcttgtcaagcaggtaaacaggtgggaggagcgcatcatcagacgaatgtgatgaccactctgagagccctgtagctgctgcatatggacctcttcggacccagcgcctatctgagcatagggggaagtcagaatggtctatgtattgttgatgactttctccgcttcactggtgtgttctttttgcaggataagactgagacccataggacccttaagcgctacctaaggagagctcanaatgagtctgagctcagagcgacgaagatgaggagcgaccacgggtccgagttcaagaaccttcgagtggaggaattccttgaggacgaatggatctagcgcgagttcttctctgcctacac

SEQ ID NO: 34625 - DNA, 426 bp, Zea mays
  unsure (1)..(426): unsure at all n locations
ttggcagctttattcctcttatgggatctntatttttccctatattgcgcctacgtgtgaagaatctgtgcgacattttttggcctctttggaagacagcagcatatggattttggcccaaccctgagccaagctttcatggggatctcgtcccagccttcgaacgccaggcaactatcccgagcagcacgccgcctcttttcgcacaagaatattggcttaatgaacgttcgatccgctgcgccgccagcatacactgtgtcgatggggggcgattgctatggggagatgaccgcgacggatcgattgcgatgcctccatccgctgcaccgacgttcgattcaccgtcgtccatagtgccgccatccccaaccatcacgagcatgacattcttggccgtcgtgcacagcgtgtcatccccgtccc

SEQ ID NO: 34626 - DNA, 485 bp, Zea mays
  unsure (1)..(485): unsure at all n locations
ctaagctanattgccttgcaggtttatgcatccgggggctcaagctggattatctacagcggatgcacgaaccacatgacaagggagaagaagatgttcacctcctacgtcaaaaacaaggatttccaggattcgatcactttggagataggaaccaaggcaaggtcaaaggattgagaaagatagccatcacatccgatcattctatctctaatgtgtttttagttgaatcgctcgggtataatttgttatctgtgagccaattgtgcaacatgggttataattgtttattcacaaatgtagatgtatctgtttttagaagaagtgatggttcactagcttttaagggtgtactagatggcaagctctatttagttgatttttcgaatgaaaatgtcgatctagatgcatgcttaatagctaagactaatatgggctagctttggcattgccgtctagcatatgttgggatgaagaaccttcat

SEQ ID NO: 34627 - DNA, 442 bp, Zea mays
  unsure (1)..(442): unsure at all n locations
agcttctaagggagaacacattntaggactaacaaatgttcattttgagaaagactgggtttgtagcgcatgccaagcacgaaagcaagttggtgcccatcatccacacaagaacatcatgatgaccgacaggccgcttgagctactccacatggatctattcggcccgattgcttacataagcatcgacgggagtaagtattgtcttgtaatagtggatgattattctcgcttcacttgggtgttctttntacaggaaaaatctcgaacccaagaaaccttaaagggattcttgagacgggctcaaaacgagttcggcttaaggatcaagaaaaatagaagtgacaacgggacggagttcaagaactctcanatngaaggctttcttgaggaggagggcatcaagcatgagttctcttctccctacaccccacaacaaaat

SEQ ID NO: 34628 - DNA, 449 bp, Zea mays
  unsure (1)..(449): unsure at all n locations
tgtgcaaagtccagtcgagctaactntcggagaaacccgacctcactgcaacatgacaccagagggtcaaactcaacgggcaatggatgaattcagaatcattgcagagcatattggtaccagggatctggttcaagaattcttagcattcaaagttttccctactctgaaaaaatgggaaatgccaaagttaaagggggagaagaaggaaggggatcttgtccggcttccttaccacttcaaattcaagaaatattttaagaagccctgccaagagtggctggatacagttgaggtgatgtgtaatgaaattcttggaaattattcgaaaaaagaagatcaactgatgacagcagccttcggtacccgtccgaagcgaaggctgaaccgagtgcttgatgcactgngcttcgaatatcctgactatgcgcagctgaacaaggatgctg

SEQ ID NO: 34629 - DNA, 464 bp, Zea mays
  unsure (1)..(464): unsure at all n locations
gcttggtgctgatggagaagcggaagtctttgatatctntgttgtctaactgcttgctgttcgccaccgtgagttcggacggtactccgaagcggcaaacaatatattgccagaagaatttctgggctgtcttcgatgtgatggcggatactgccctcgcttcaatccatttggtgaagtattcaacggcgatgaaggtgaacttgaggttcccctgagccgtgggcaggggcccgacaatgtctaggccccagcgctgaaggggccacgtgtgggcgatcagctccgtgaactgcgaggggcgccccgagcgtggggaaaatttctgacatgcttcgcaggatctgacgacccgatttgcggcgcaaataatggcgggccactataaaccttggcgaatcacctttgccgctanggccctaagccctgcgtgngagccgcangtccccttgtggacttcgtgc

SEQ ID NO: 34630 - DNA, 475 bp, Zea mays
agcttgtcacagcccttaactagtactaggacacagaagcatccctggttattctccatgccctttggcgagtgtttagagactatccaatctcatagactgtgacatgcaattgaactcatataggtttgaatctcaaaagatatttgttggggacttgttctcaaatgctatgaattaagaacaaggcaacatagaatgttaaatgttaatgcccttcgtccgctgaagcattatctccccaaaggatttaatgagcttcggacgaaggtcttggataaaatatcacgaaggtcacaccttcgtgataagagataaaacaatgcgaaatgaaatattaaatattaaatattatagaataacaagaataaataacattattcacttattttataatataaatttaaatattaaaacacaatatttaggtacatttataccttcgccttgacagagagtaattccagcgtaatgt

SEQ ID NO: 34631 - DNA, 374 bp, Zea mays
  unsure (1)..(374): unsure at all n locations
ccgaggcaagagacaccaatcgtgtggaggtccttgcaggaactttgtgttccgtttgattgagaagagaagctcacttagtctaggtgaccgtttgagagagggaaagggttgaaagagacccggtctttgtgaccacctcaacggggagtaggtttgcaagaaccgaacctcggtaaaacaaatcatcgagtctcgctctttatttgttcacgatttgttttgcgcactctctctgcgactcgtttatatatctaaacgctaactcagcttgtagttgcgctgaagtntataaatttcagattcagcctattcacccccctctaagcgactttactaatacctttaatgtttatctattgacaagatgagtg

SEQ ID NO: 34632 - DNA, 266 bp, Zea mays
gtgaattggcacaccagggcaatctgttgtgcaccggacacaacactgttcactgtccggtgcatgacacgacactggaccagtcggggttggagcttgaccatctaagacactatgctccgttgcggtatccatacagtccagtggcacacaagcttgtcgcgtgagtgctgacactgcggctggctctgacttctgacggatatactgtactgtaatcgacctttagcaaagttgatcagtactgtagtgtcgcaatgtataca

SEQ ID NO: 34633 - DNA, 449 bp, Zea mays
  unsure (1)..(449): unsure at all n locations
ntatatgtgtcgtcatcactctcccggaggtggagtatgtatgtgcattcctcccttatgtgaggattggtgatctggattacaacacattgaacggtctaacgagtttgctaagtgttgggcaggatattcttgatgacgaacatacttgcatcttgtataatgatcagtgaacaaaggttcagcacgaggctaaatagccgatgagacaatgcaaatggatataatatgatctctatattggcttgcatatgtggactatacctgataaatcactacgtacatatgaccagaatagaggacaacgtgacttatacgattggtcaagctcgacataatctatgtgatgaatcgagaattggcttgaccatattactatcaggccgtatatgcttgtatgagaatctaactagagcttgaatgatcttatcatgtatatctagaagacg

SEQ ID NO: 34634 - DNA, 368 bp, Zea mays
  unsure (1)..(368): unsure at all n locations
agcttnatattatttagaagccttgggtaaatgttggtatgnattggaccatatttggtgcatagaacccataaccatagcctcctgccctatgaacttcactatagactccaaaaaccctagtttcctggagatccgtgaaggaaaattatattcaagacattagataatatacttttattatctttgcattttcatgagcattacatgagcattcatgattatatatggctatatatagaaaacgaagaagagatagaagttgaagaagcaaggactacaccaccaccaccacctgaagaaccccaggttgggaactgcttttactttgacatccgtggagcagagcctgactcacctataacaca

SEQ ID NO: 34635 - DNA, 458 bp, Zea mays
tcactacagaaagtatcttacctatttgcatgaatgatggaatacattggttatatggcgcattgtgctgtatgcactcaagagatatttctagtgtcacctataataatcaaactaacatgacatatatcatgctcagcatatttctaggaagcttttgccagacaaactttttagcctgtaatattaggcagattcatattttaatagaagttcctcaagcagtatataagactcctttttctcctttgtagtatatgctatagctgaatgttctgtgctttaaccagagcataagtgtacaaaataactgttgaaatgacttgtgggtagtgagtcatcaatttgaatactcgtctacttttctaatccaattctccttgacctttcacaaataataacatagtggagtaaatagtgccccttttcttctatagagaatgtttccttacgtacat

SEQ ID NO: 34636 - DNA, 379 bp, Zea mays
agctactatctactatacgtctagtatccggttgttttaaggagcacttgtagtttctctaatgattgtgagcagagctgatgcccttgaatatcgtccaccccataagtctcttgagctgggattacggatcgtcctgacatgcctagggtggagtcttccttctaagcccctaggcatcttggaagatttgtaggcttcttcccttctctgtcaaaatcattgttagctctggatactcttccatcttatgtataagcttctccaaaatctgtgggggcttcctggcgaaatctgcactgatgatctggacgaatccctatgatatattttcaataaaatctcatttggactgttggcgcctaagctttgaacatat

SEQ ID NO: 34637 - DNA, 465 bp, Zea mays
tctatagggagaacacgtgataggtgtgactaacgtgcatttcgaaaaagatagaccttgtgcagcttgtcaagcaggtaaacaagtgggaggagcacatcacagcaagaatgtgatgaccacttcaagacctctggagctgctgcatatggacctcttcggacctgtcgcctatctgagcataggagggagtaagtatggtttagttattgttgatgacttttcccgcttcacttgggtgttctttttgcaggataagtctgaaacccaagggaccctcaagcgcttcctcaggagagctcaaaatgagtttgagctcaaggtgaagaagataagaagcgacaacgggtccgagttcaagaaccttcatgtggaggagtttcttgaggaggaagggatcaagcacgaagtctccgctctctacacaccacagcgaaatggtgtggtagagaggaagaacaggac

SEQ ID NO: 34638 - DNA, 342 bp, Zea mays
  unsure (1)..(342): unsure at all n locations
atccttatagtcacctgcggcatgcaagctatctaatggagagctctatttaggattaacatatgtccattctgagaaggacaggatctgtatcgcatgccaagcatggaagcangttggtgcccatcatccacacaagaacatcataacgaccgacaggctgcttgagctactccacatggatctattcggcccgattgcttacataagcatcggcgggagtaagtattgtcttgtaataatggatgattattctcgcttcacttgggtattctttttacacgaaaaatctcaaacccaagagaccttaaaaggattcttgagacgggctcaaaatgagtt

SEQ ID NO: 34639 - DNA, 429 bp, Zea mays
tctaaagggagaacacgtgataggtctaaccaatgtttatttctaaaaagatagaccttgtgcagcttgtcaagcaggtaaacaagtgggaggagcacatcacaacaagaatgtgatgaccacttcaagacctctggagctactgcatatggacctcttcggacccgtcgcctatctgagcataggaggaagtaagtatggtctagttattgttgatgacttttcccgcttcacttgggtgttctttctgcaggataagtctgaaacccaagggaccctcaagcgcttcctaaggagagctcaaaatgagtttgagctcaaggtgaagaagataaggagcgacaatgggtccgaattcaagaatcttcaagtggaggagttccttgaggaggaggggatcaagcacgagttctccgctccctacacacc

SEQ ID NO: 34640 - DNA, 378 bp, Zea mays
tgtagagtccaaatattatacagaaacgtggtggctttctttctaaatattattgcaaaaatattatgtagtagtaacacatttggactcaaactccgggtgcagaacgacagagatatatggtatatagcctaagacaccatacatacatgtataataataaaaatatacaaatatatcacgtcgtaccattattgttattctttgtttgattcgattaatcgaagctcatcagtagattcagatgcaatgaacggcgacgtggtgtactggtatgaccacatgacattgaagagaaaaggcggtgagcacgaggatgaccatgaccaacgcggcatcgtggtgcacacgccagacaagaagtgtggcatgagtcgg

SEQ ID NO: 34641 - DNA, 440 bp, Zea mays
  unsure (1)..(440): unsure at all n locations
agctnggcatacagctgacaatctcgcagcctctgaagtacttttctcatatgctcctcatgctcttgctcattctaggaatatataagaatgtcatcaataaacaccaccacgaacttgtcgaggtagtccatgaacacactgttcatcaagtacatgaagtaagctggcgcattcgtcaaaccgaatgacatgaccgtgaactcaaacagtccatacttggtgatgaatgctgtcttcggtatatctgagggtcagattctaagctgatggtagcctgccctcagatttatcttcgagaacacactagctcctctcaactggtcgaataaatcttcaattctgggcagggggtacttgttcttgatagtaacctcattcaaggctcggtaattaatgcacatcctcttcgtgccatcctttcttttcacaaacagcac

SEQ ID NO: 34642 - DNA, 459 bp, Zea mays
tatgtccgacagttctctaggaggccatcggacataagggagttttttgacttgtaggggtttactgtagtgagagattcatctaaagttagtctcgggggctacatccataggatgcacaaggggctcataattattccttatgatgataagagcaagggttccacctatctaagaagatgattcagcaaagtaaaactcggggcttatgctgaaggatgtgtaccatggggtaccaccaagacacttggatattgagtaaaagacccacaaaacccgacacggttctactctggatttggactgctttagtaactcagactcggctaaggacctcagactcggatagcttatccatgtaaggtttgttgtaactagaatcccgcataaagggagagtcatgatgactagaaggccatcttatccatgtaagattcgttgaacaaacaacaccgagat

SEQ ID NO: 34643 - DNA, 435 bp, Zea mays
  unsure (1)..(435): unsure at all n locations
ttatgtgtagcctgatgtaatcttttttattcttttctatggcacccttttcctttccaaagggggagaaaggtttttaatggggccataacatgtaatttctctttttcttatatcagctctacaagagcaatatcccccgaagatgtaaatgtaaaaactgagcatgcaccatcgagtgcaaagagaaaaaggaaaaacagggagaagctcgaaagacgtccctaaggggatgcagagcacgatgaagctacaaaaagccgttcctaagggagcgcagcgtaagttttctgctcaaaagtcgttcctaagggaatgcanagcttacagcgaaaagtcaacgcttattccgtcgaaagtaaaaggcgaagaacttcaaaagacgttcctaagggaatgcagaacttatatcgaaaagtcagcgctgatacaccg

SEQ ID NO: 34644 - DNA, 467 bp, Zea mays
  unsure (1)..(467): unsure at all n locations
tgcggtacaagaaggaaagtgggagcgctcgtgtatttctgatcttgtatgtggatgacatattattgattgggaatgacattcctatgctggagtccgtcaaggcttcactgaaaaagagtttttctatgaaggacttaggggaagcagcatatattttgggcataaggatctatagagataggtcgaagaggcttataggattaagtcaagatacgtacattgacaaggttttgaaacggttcaacatggaacagtccaagaaaggtttcatacctatgtcacatggtaaacaccttagccagatgcaatgtcctgcgacggctaatgagcgggagcgcatgagtaaggtaccatacgcctcagcgattggatcaatcatgtatgccatgataagtacacgcccagatgtttcatacgctataagtgctacgagtagataccangctgatccaggtgaggatcac

SEQ ID NO: 34645 - DNA, 453 bp, Zea mays
  unsure (1)..(453): unsure at all n locations
agctntcagctnttctactgccatcttcggttttggctcttctgctgattctgccttagtttcagtaggagtggagtgacttgactcaaaagcagaagaagactctctagcaggcctcggctcttcggtcatctcagcgcttgggacgatgtgtcaaaactttaacttttttcggcttcgacttattagagatagccgaagcagcagctcttcttttctttccttgctttcatgaaggataacagtaatctgggtatacgaacccaatgacatcaaaaaccctattcagcctctttttgcctcgacccccgaagcccgctgtcatagcatcatcttcggcccttgaataagcaccaagcaattcatcactnggttgcttcaatggcatctagccagtcgtcattggctcatcanattggctcatgtatgtgaacatatacttccaagtaaata

SEQ ID NO: 34646 - DNA, 482 bp, Zea mays
  unsure (1)..(482): unsure at all n locations
tgcgaagattcttcatcccaacatgggcaagtcggcgatgctatagccagcccatattagtcttagcaattaagaagtgtctagttcagcattgttatcattaaaatcaactaagtatagctgaccatctaacactcccttaaaagctattgaatcatcactttttctaaagacagtaacaccaacatcagtaaagagacagttgtagcccattttacataattgagaaactgaaagcaagttgtaatctaaagaatctacaagaaaaacattggaaatggaatggtcgggagatataacaattttacccaaaccttgatttccatccccgaatgtaatcgctctttggggatcttaattnttctcatatgaggagaacatcattttctcccctgttatgtggtttgtgcacccgctatcgattatccaacttgactcgccggatgcataaacctacaaaacanaattaggtcttgttctta

SEQ ID NO: 34647 - DNA, 477 bp, Zea mays
  unsure (1)..(477): unsure at all n locations
agctngcatngcatgtntaaatntcttgtattgcatctagggcttgtctaacctagttgagataaccgccaacaaagcgagtgaaaaagcttaactcgggtcaaacttgacaagtcttagttttaagcttttagcacttaaattcttacctgttatgcaattgttggttcttgaaatatgcatgaggtactgcacttagggggggtattcaacactcaaatcactcatgaaaacccctagtgcaagccaaaatgcaaatttcaccatttgcctattttctctaaaaattatctagcctatggcaaaatattttgaaaagtatatgagggtgccaatacctgtcccaacaagtgttattttgtgtgattataagttgggaattggttcggttggaaattagataaaaannaattaaaatttccaatcttccctctgtctgggctcaccggacagtccggtggcaccggacactgcact

SEQ ID NO: 34648 - DNA, 468 bp, Zea mays
  unsure (1)..(468): unsure at all n locations
ctcagcttcacagtactgggctgattctagcccagacggcccaaggccacatataaacgcgcgcgcgcccgtgcccgtgctggcagccttgcggaaaggccctcggcgttctggtttaactcgaagcaggttctttcactattttcctaagtcgctgacagtttgtagaaaagcccttgaggttctattcctttaccgcccgaggtccacgacgacgggcagcgcaggggatgaactccggtgaggttgtgccggtggattcacgcaacgaccggtgctcccgagcggctatcgccgaattgaaccttccccgagtgtttcccccaacttaatttgaagattggtaacctaatttgccctggccacggtgaccgaagaccatgcggacaaaggaacgtgttcccggcgataggtgatggtccagttcaattgaaggggtcgaagagcttaaggaggacctanggatgc

SEQ ID NO: 34649 - DNA, 452 bp, Zea mays
agcttctaaagggagaacacgtgataggtttaactaatgtgctattcgaaaaagatagaccttgtgcagcttgtcaagcaggcaaacaggtgggaagctctcatcacaccaaatatatgatgaccacatcaagacctttggagatgcttcacatggacctcttcggacccgttgcctatctaagtataggaggaagtaagtatggtcttgttatagttgatgacttttctcgcttcacttgggtattctttttgcaggataaatctgaaacccaagggaccctcaagcgcttcctaaggagagctcaaaacgagtttgagctcaaggtgaacaagataaggagcgacaatgggtccgagttcaagaaccttcaagtggaggagtaccttgaggaggaagggatcaagcacgagttctccgctctctacacaccacagcaaaatggtgtggta

SEQ ID NO: 34650 - DNA, 480 bp, Zea mays
ctaagcttcgaactcagctatccgaagctgaaggtcgaaccactttttatagaatgaccttctaactcataagggtctgagtcattgttgtaaacttttatgaggggcataattgtaattcctcatgagctgtgtcccgtgcctataaatagtgaacaatattcctttactgttcacgcatttcggtaattgctaacgcatcattcgggaattattgtttgccaaggcaaaggtataaatgtacctaaacattgtgttcaaatattcaaaattcgtttaataagatatgtgaatgatgtcgtttattttcaatgtatttaactttaatatttcatgctttactttactttgtattatttttataagttcacttacgaaggtgaaaaccttcgtagtattatgtgcgtaaccttcgtccgaggatcattaaatccttgtgaaaataatgctctgacggacgaagtacattaatatttaaca

SEQ ID NO: 34651 - DNA, 454 bp, Zea mays
  unsure (1)..(454): unsure at all n locations
gcttactcctccctgngaagggcccttcatcatttgtcaagatttgaagcctgngacatacaagctggccaacgattaaggcgaggtctacagcaacgcttggaacatccaacaactacgtcgcttttacccttaaaatgtttcaagtcgttcatgtatctcgctctatttacatgcataaataaagtctaaccatcaaggaaggatcagccttgcctcggcaaagcccgaccctccctcgggggctagaaggggggaacccccttctgcgtcaaatctttcctcggaaaagtcttttaccagaacgtctttcgtgcttttcgactgcgtcgataacagaatcctaaanacgacaagagaacacgtaagcggcaaggccgaccgagccgagggactcctacgcctncnggatacngatacctcactcatcaccttccgcgaaagtaactcacac

SEQ ID NO: 34652 - DNA, 438 bp, Zea mays
  unsure (1)..(438): unsure at all n locations
ggtgcanagtccacttgaactaatcttcggagaaacccgtcctcattgcaacatgacaccggaaggtccaactcanaaagcaatggatgaattcagaattattgcagagcatatcagtacaagagacctggttcaggagtttttggctttcaaggtttttcctagtttaaaagaatgggaaatgccgaagctaaaggggaaaagaaagaaggtgaacttgtgcgtttacattactatttcaagtttaagaaatactttaaaacaccttgccaagagtggctggatacaattgaagtaatgtgtaatgaaatacttggcaactactccaaaaaagaagatcaattgatgactgcagccttcggcacccgtccgaagcgaagactgaatcgagtgctggacgccttgggttttgaataccctgactatganaatctgaac

SEQ ID NO: 34653 - DNA, 396 bp, Zea mays
  unsure (1)..(396): unsure at all n locations
ccaagaaacatcggacttgatgtacagtggttggnggtttccactccaaaatatccttgactttgttgggatccaccgcaatccccttggcagataatacatgtcccagaaacttaattccctccatccagaatgcgcacttactgaacttagcatacaattggcgttcccttaagcgcgttaatacgattcgcaagtgtggagcatgctcctcttcattctttgagtatatcaagatatcgtcaatgaataccaccacaaatttgtccaactcgggcataaataccgagttcatcagatatgtgaagtgggcaggtgcatttgtcattccgacagacataaccagatactcaaattatccataccgcgtggtgaatgcngtctttggtatatctt

SEQ ID NO: 34654 - DNA, 462 bp, Zea mays
  unsure (1)..(462): unsure at all n locations
gccgaaagtcattatctgctcttatatattcacccatcttctgaagcagcttctccaaagtctgaaggggtttcttggcgaaatattgggctgtaagtcctggccgaagccccttaatcatggcatcaataacaatttcattatgcaccgttggcacctgtgccctcagtcgtaagaaccttcctcctgaggcgttggactggtgaccttcctcttctggcttcgggcttctcgaagagaaagggtctcctggttcgagtctagcggctgcagagcagcagcccctgttgctgaagctttctttggcggcatgacgaaagtcaatgcttgccgaacgtggtcaaaaagggttcaccggaggtgggtgccaatgttggggacttgttctcaaatgctatgagttaaaaacaacgcaacacanaanatgttaaacgctataatcctttgtccttcgagcattat

SEQ ID NO: 34655 - DNA, 432 bp, Zea mays
  unsure (1)..(432): unsure at all n locations
agcttcgtccccagccagctctcggtcgcncttcttccagaattgggtaataaatctgttgcctatgctccaggcttcggccggaatatcaataaagtcagatggcgacaggccgaagtttggcctattgacggttctcacatgattgcatccagccttcatgaaagttgtagccgttccacgagaagccaccagcgcacagaaatcaacgtgcccagttatgacttcatcaagggcatcaacttctttttcaatatgttcaagagctccgggaatgacttcggcggaaggggtaacttcttcagatgcggctcagaattaatatccccttcaaccgagcaatgcattgagtagcaaagccgaagcatctatcccgaagaattgtgattatctcgcttagtttaacgttcttttcaatttctgcttcaactc

SEQ ID NO: 34656 - DNA, 479 bp, Zea mays
  unsure (1)..(479): unsure at all n locations
tctanagggagaacacattntaggattaacaaatgttcattttgagaaagacaagatttgtagcgcatgccaagccgggaagcaagttggtgttcatcatccacacaagaacatcatgacgactgacaggccattggagctcctacacatggacctattcggcccgatcgcttacataagcatcggcgggggtaagtactgtctagttattgtggatgattattctcgcttcacttgggtattctttttgcaggaaaaatctcaaacccaagagactttaaagggattcttgagacgagctcaaaatgagttcggcttaaggatcaagaaaataagaagcgacaacggaatggagttcaagaactcacaaatcgaaggctttcttgaggaggagggcatcaagcatgagttctcttctccttacacgccacaacanaatggtgtagtggagaggaagaatcgaactctattggacatgg

SEQ ID NO: 34657 - DNA, 296 bp, Zea mays
agctagagtattagagagagtcaccttcttagttagtcgtaatcacagacggtagtgtgctctgtgctatacagttatgcgcgcacagatgcacactacatgcgatgcagaatcgtaaagagtagacccagagggggcttatgagcgagcttactgcatacattgcattgcacggactgacgctttaagtcggaaaacctgtattgcactctgctttagataatagaaccagtctagactgtggcggacatcagtgaagatgatcacctgctaagtgcgagagaagaaattatact

SEQ ID NO: 34658 - DNA, 421 bp, Zea mays
  unsure (1)..(421): unsure at all n locations
gctcccgtcaaaagagtaaacttctcataccctgtctgttatttactttaattntgctcatggagctcacttagggcccttattaagggtgcacattcttacctttcttttaacagactcaatagtttcgatcatgacgcttccaagcatatatactaggagaagcctttattacttaagataagcggatgctgatgcttactctgattcacatgaaatactggttcttgagctggtattgtgcgagataccctatgtgacacttgagggccacatctggcgacccgagggtgcgtccgctcatggagggagtccagcggcgagacgtaaatcctccggggtcggctgcccttgcccgaggctatgctcgggcgaagcgagatcgtgtccctcgagtggaccgatcctttaatcgtaccca

SEQ ID NO: 34659 - DNA, 389 bp, Zea mays
tgtaaatcttcaatgagattttctgaattctctgtcttgatcaccacatcatccacataagcttccacacgcttgccccagtggtcggctaagcatgtctgaatagctctctgataaatcgctccagcgtttttgaggctgaacggcatggaggtatagcacaaggctccaaatggggtgatgaatgactatttttcctcgtcttcttttgccaagctaatctgatgatacccggagtagcaatccaagagagacaacacagaacacctggcggtcgagtccaccacctggtctatcctacgaagtccgaagggatccttcgggcaatggttgttgagatccgtacagtcgacacacatgcgccaatccactttattctttttgagtac

SEQ ID NO: 34660 - DNA, 413 bp, Zea mays
  unsure (1)..(413): unsure at all n locations
agcttgatattgtgtctttatnaccgccctcttaatgcggtaactatcacgaacaagtatccattgcctcgtattgatgtccttattgaccactcggtccgggctaaggtgttttccacaatagaccttcgctccggctaccatcatatcaagatacgagccagcgatatttcgaagacgacattctcaaccagatatgggctatatgaatacttggtgatgtcattcgggctgacaaatgcaccagcatatttcatgtatctgatgaattctgttctcatgcctgaattggacaaattcgtagtggtggttatcaatgatatcttggtgtactctaagaaccaacaagaacatgctgtgcatttgcatgtagtgtttcaacgtctgcgagagcaccactctttataccaagt

SEQ ID NO: 34661 - DNA, 448 bp, Zea mays
  unsure (1)..(448): unsure at all n locations
ggactcaggtatccacacatgaatccttaattcatttttttcgtctcctggacaaggcatcctccctagatccaagtccatagaccaatatatatcccattatcaagatgaatacaatcaatttctgacctcgcgcgagtgctataaaaatcactcgacttctaccgagatcctgattagcaagcagctactcgacctagcatactagtattcatctcaaaaggaatcctaagttcatgcaactagaggtttcaagcaactcctacacttaagtgcacattacagtcctacaagcattaagtgtagtaaagtatcatataataaacatggttatgcatataacccgggctcgccttcaattgctggggctgctgggagatcctcantaccacctttggagcctgctcctggcctcctcttgacaggccttgcttgggataaccctact

SEQ ID NO: 34662 - DNA, 479 bp, Zea mays
  unsure (1)..(479): unsure at all n locations
gccggatcttaaccacctgagctgcagcttctaagggggagcacattntgggactaacaaatgttcattttgagaaagacaggttttgtagcgcatgccaagccggaaagcaagttggcacccatcatccacacaagaacatcatgactagtgacaagccactggagctcctacacatggatctattcggtccgattgcttacataagcatcagcgggagtaagtactgtctagttattgtggatgattattctcgcttcacttgggtgttctttttgcaggaaaaatctcaaacccaagagaccttanagggattctcgagacgggctcaaaatgagttcggcttaaggatcaagaaaattagaagcgacaacggaacggagttcaagaactctcaaattgaaggcttccttgaggagganggcatcaagcatgagttctcttcttcctacaccccacaacanaatggagtagtggag

SEQ ID NO: 34663 - DNA, 437 bp, Zea mays
ttagcgataggggctgctgcgctgcaaccactggacccaaaccatgaaaatctttctctccgagaagctcaaagccagaaaaggaaggccaccagtccaacactccaggaggaggagttggaccaagaaatcagggacatggagatcatccatcagcaagtacagagaaagaaggagaagatggcgcgactggctgttcttcaaaggaagatcgacgaagccactgaagaagtgcatcatcttgctcaagatgaacaagatcgaaggccccaacacaaggagcttcgtcaagaaggcttattcaacgaggacggatggtaggatgattataatcatgatgcctttacttctgatgatgcttctcccttggcagcagaactgcaggctaccccatggcccccgtcatacaagccacctcagcttcccatgtatgatgg

SEQ ID NO: 34664 - DNA, 403 bp, Zea mays
  unsure (1)..(403): unsure at all n locations
agctttgttctagtgcacacaagatcacgaagaatacctncatgcgtatgtccgaaggttcttgcgtctgagggcacaagcgccaacggtgcccaatgaaattgtcattgaggccatgatcaaggggcttcggccgggacctacggcccaatacttcgccaggaaacccccttagaccctggagaanatgcttcaaaatatggatgaatacatctgcgctgataacgactttcgtcaaagaagggaggaagcctacaggttctctgagatgactaggggcttcggagggagagtccacccaaggcacgtcagatcaatccactcctcccagaatgacgacagaggaagtcagcaacagaggccacagtattcctcgcaagcttcggggcagcagcaaagctat

SEQ ID NO: 34665 - DNA, 480 bp, Zea mays
  unsure (1)..(480): unsure at all n locations
tgcataccannagtccccaaccaaaccctactggtggcacattaccgtacccccagctgacaacccacaattagaccctaatccacatttatgcttgcccttagaggtagcatgtgtgctcgaatggagtttgaccccctaatttttactccacttctcattttataaattaagggaggagatagatttacattagtaggaccaagtgtttgattggctaagacctaacaaccccgatcttattatgttcatgaagtcatacgtagtgccatgccttcgatcagggcagggtgttggagatgtccttctttagtggtccccatacttgttgcaggagcgggtatgttatatcgttcctacaaatgttagggcccatgccattaggtatgacgtagttaatcgatgcaccaatctatatttgataatacttcatggtacattgacaagtgcacgcatggttatagggttcatgctcatagt

SEQ ID NO: 34666 - DNA, 395 bp, Zea mays
  unsure (1)..(395): unsure at all n locations
agctttggtcatgcttctcctcactgttcttgttattatcttctgaaccactgtaaaccagnacatctgtatcatcatcattattgtcataaccacctgcagcaacaatacatattgcaacagaatcatcctcgtcaccaaacttggcagtcatatagtcaattccggccatgctaggagcatgcagcccaataatacatagctccatcctgaagtagaaaatgtcccctatttcaactccaggaacaacccctatcctcttcccagggttagccctgatattactggacatcaagatagcactagccttcagatctgcacgcttgctagtctcttgtgcctcantccaatggagatgcctacgccgcaacgcctcaaaggtcatgagaaactgc

SEQ ID NO: 34667 - DNA, 396 bp, Zea mays
  unsure (1)..(396): unsure at all n locations
tcatcaagtggcttggttaagatatcggctaattgatctttattattaatgtaagaaatctcgatatcccccttttgttggtgatccctaagaaaatgataccgaatggctatgtgcttattgcgactatgctcgacgggattgtcggccatcttgattgcactctcattatcacatatcaaagggactntggttaatatgtaaccgtagtcccgcagggtttgcctcatccaaagcaattgcgcgcaacaatgtcctgcggcaatgtactcggcttcggcggtggaaagagcgaccgaattttgcttctttgaagcccaagacaccaaggaccttcccaagaactggcaagtccctgatgtgctcttcctatataatttgcaccccgcccaatcg

SEQ ID NO: 34668 - DNA, 469 bp, Zea mays
  unsure (1)..(469): unsure at all n locations
agctatccaaannaatatttttcacttatttttggataaataacgtgtgagttataacggaaacaaggaactcctatgctgttgtcccaaacatgttgaatgtgattgattgctctactatgttgttgctgtcttgagtcgactgcttgtttgttttgggttttgactgaacatgagtaataataacaatgactagtataattggggttatgtataagtaagtagtacacatctcactaagttagtgaactaaattggttaaggtctaataagtagcttagcataatcaacagttagcaagtgcagttatatattatggaaacaaaatgaataatgtcctgtctttggttttntgctaatactactaagtaaccaacgtcattgaagtagtataatatgtaattgtgattaaactatctcctcctgtgtgttctctggggtgtatacttgcagtagaatgttgtgagtg

SEQ ID NO: 34669 - DNA, 480 bp, Zea mays
  unsure (1)..(480): unsure at all n locations
tggagccgaagcaactccagctntgaacgaagccatcagctcagaaagtggaagtgagttcaccggaggtgggcgccaatgtcggggacttgttctcaaatgctatgaattaagaacaaggcaacacaaagatgttaagtataaatgcccttcatccgctgaagcattatctccccaaggatttaatgagcttcggacgaaggtcatgagtaaaatatcacgaagattttaccgtcgtgatcatatttgtaaaacaacaaacaatgagaaatgaaatataaagtatgaaatatattcacatgttttattatatgagtatataagtattaaaacatattatttagacacatttataccttcgccttggcggaaagtaataattcaagcgtaacgtgccagtgattacaggatcgagtgaacagtgccgggatactgttcacctatntataggcacaggaatgcaacctgcgcaaaatacat

SEQ ID NO: 34670 - DNA, 384 bp, Zea mays
agcttgagcgaagcaatgcaccccggacatcagttatgtataaagatagtataagatacccgttgataagcatcagaaataccgtaacaatccagctaatcacctgatgagagcgtagaatgaatcaatacagcacatttggatgagcagtgttactaaactagttcaaatgagcttcataccagcagacaaattatagcaaagtagcaaaataaaacatctacaatcgcttcataggtaggcaaaccatatatagatatacggagtcccaatgacagggcaatggtatatgtgataacatgtcgatactcagtaggtagcctaagttccatagtatgaaacactaaaaaatcatgtgaaggcatctcgattttgataaatcta

SEQ ID NO: 34671 - DNA, 482 bp, Zea mays
tctgagatagtaacagggtctgattctttttcatcaaaatttttaactattcaagtacccaatgagcttgatccatcacaagttggcatgcctaatccagtgtttacaccttttcttattggatcaccacagcataggcaagctgatagctctggacttacttttgttccaacaggtccaccagttccttttgttgtgctcccgtttgttccagggaataatgatggttctggcccccagtttgagagaagcgaaggaattgatcagcttcctgccaatactgtacgtcaattatttggttcacttaatgatgttcaccaacaagattccagtgctatctcaacagtatcgtccagtactatgactgagccatctggtgaacacaagcctgatatcttgcatagtgattttgtcagccattggcacaatttacagtatgggcgactctgtcagaatcctcgtgccatgggtcctgttctata

SEQ ID NO: 34672 - DNA, 283 bp, Zea mays
  unsure (1)..(283): unsure at all n locations
atgagctagaccaagaaatcagagacatggagatgcttcatcaacaggtgcagaggaagaaagaaaagatggccacgctagctgaactgcaaaggcagatagacgaagcccttgaaaaaggtcgtcatcttactcaggatgagcagaaccgaaggcctcagcatagaaaccttcatcaggaggatttcttcaacgaagatgactggtatgagaatntccaccatggaaaatttgcttttgatgatgcttctcctctgtccgctgagttgcaagctacaccttg

SEQ ID NO: 34673 - DNA, 448 bp, Zea mays
  unsure (1)..(448): unsure at all n locations
aactcaagcttcaagattgcgatagcaggacgaccgttggattatcatttaattcttcgaagcaacaaaacgtcattccactgaacgcagagtatgtctgctgaagtcacaaacagcgcgtcctcaaggagcgcatggtaagttaattgctactacgctgttccttagggaatgcaaagcttacagataatagtcaacgctgataccgcctatgtgaaatgcgaagcagcgaaaagtcaacgcgaatatcgctgaaagaaaacgcgaataatctcctaacggaggcttatagcgaaaaataaacgctgattccgctgaagtaaaacgcgaataagctcctgagggaggcttatatcacanagacaacgctgattcggacacatcatgtgtgttatcacaaggatgtgtgtgcatcttctgaatatacaccatcttacatagcataaca

SEQ ID NO: 34674 - DNA, 380 bp, Zea mays
gctggctatattgggcaccaactatatatattgcttgtgtatccatgtcagcttctgtacaactttacattcacaagctacatttgtctgaaagaaccacgaagcaaaaaaaaaggaacaaagcctttgatttcctctaaagcatgcaacaaccaaaatcttatcttctatctatatgccaactggttgaacttgaattgattggccccaaagaacgagaggcagccctatgtttggtccttggggttcacgtcaccgccattggacgtgtcgatcgcctccgccagggacaccacctccgccatcttgggacgcttgtccaggtttgtgtcccagcattgcacgttcgctagagagctaggacaacaatgcgatatctc

SEQ ID NO: 34675 - DNA, 453 bp, Zea mays
  unsure (1)..(453): unsure at all n locations
agcttgaacccggctattccatacattatatgtttatcgcgcactgngagcggagagatggcgagagtggcacgtaccctcctggcaaaggaccgcctaaatagggtggtgtgctctctggtggcgcggacctattcatgcagtggaggatccgcgggaatggtagacatatgcaaggtttaccagaaacatatgtcgtgtggttagagatcctcagctgagtaaatcgatttgaatcgttgttatatccccagacagtggagacttgatctctgacctgcaacctaggtcaggatgtaaacattatgaataaaaataatgttgtattgatgagatggtgaaattagactacatgcaaccagattctattaatatttaatctggcgcttaaatatttgaaagtaggactcactttagtaagctatttctgcagaagtatctaagttgattctt

SEQ ID NO: 34676 - DNA, 335 bp, Zea mays
  unsure (1)..(335): unsure at all n locations
tctccaccatgtcgctgctatccaagatatcgcaatttcttacatcggagancaaacgacctgaacgctccttaatgacacactacgnttgaaacaacgtatgtcactgatactgatgcgccttctccatttgtgcactaaacacaccctgtacaatgaagctctcataatgctctgcattatctgcaccaatacgaacgtccggaggtaccttagagcctgcatagtatcggcgcaaacatggttgccgaacttgcggcaaatacacgtggcatgtaaactgaggaatagtagggcactggtataatatgagactgagaaggtgataacgtact

SEQ ID NO: 34677 - DNA, 453 bp, Zea mays
  unsure (1)..(453): unsure at all n locations
agctntataaatacatagattatgctaatggtttggtggctaccccagtgtatgtcctgtgtgttatatgatgctatgtctcacgtttttgtatgtgtatatttttgtaattctgtgattcgggttttacatgtgtatgttgtttggaaaaattctatatgagcacttgttactctttctgataccctgttgagcacatactgattcagaatgatattctttcaatgtatatgctattcaccaatatgtgtatctgctttaggaagacctataaatctataatttaatcattcatgcacatactaacatttaatgactcatggtcaggttgatatctctatggatgtggcctttgatagtttgcacgaagatgcacatactaacatttaatgactcatggtcaggttgatatctttgtggatgtggcctntgatagtctgcatgaagatgtga

SEQ ID NO: 34678 - DNA, 397 bp, Zea mays
  unsure (1)..(397): unsure at all n locations
tggcgcgcccatattcgccatttcctgcgtatctacgggtgcagccaaataagtctaggctgtactagtacatacatgtccagtcttctgagtgcaacacactaaacatggactgaggtcaatgcatacagagagtttggctctcttgaggcgggtaaccagacacacgcataatgaccgaaaacaaccctgtcagtccgatataatttttttttgaagaatcagtagggaaggcccctactgagaattntattaaggaagcgaaacgaaaacgttaaggcaaggtctttttacaaacgttaaaaagtaatgaaaaagggaacactactcctatgactgccacaggctcagccaattcgggatagaggtgtcaaatttcacccgcgctctgtgcatg

SEQ ID NO: 34679 - DNA, 410 bp, Zea mays
  unsure (1)..(410): unsure at all n locations
atgtctatatntaaataaatgataataagtctagacatatttacaaacacatatacattaagtgtagtttgaatctaagtaatttgttaaaacgaattttatcgtatgacggaggtctgcggtcaagaaaaacagttgctgctttcagcattctctacagaaaaaggttgcatggaagtgcgtgccgatgcaaaggctagccttccttgtccatgagtccatgacgagtcgtcgatgatggcttggctcctgctgctcatgagtactatattattggatatagtatatcttatcttatctccacgcaccgattcttgggagaacgtatttgtttatttctaagaagaagaacagacgctcgagaagcgtctaatgcagacatgtgtagacacgccaccagaattgtctac

SEQ ID NO: 34680 - DNA, 470 bp, Zea mays
  unsure (1)..(470): unsure at all n locations
ngagaacctagcaacagctgccatgctttcttcaatgcagttggccatatttccatcttccataaaatcatcttccttctcttcagtggcatcaggtattggctcatcttgttgaaaactttgttcagattcaacgtatctggcactgaatggagtgatgactccttcatacagctgtgcacttccgtcctccagggaccgctgatccctaccatgctcattctcgtgaatcttcttcgcaatgaactcagctgcaacagcaacattcacattttcattttccattaggctctgttcattntctccagcgccatcagctgtctcttcatttccatgaactctatctgcaatgccttcatctgcaaatacaagaatatcactgacatgaatacaattgctcatgttgctgtcttccatacaacccntcttccatttctgagtgccatcagnttttaaatcttcatgcatat

SEQ ID NO: 34681 - DNA, 428 bp, Zea mays
  unsure (1)..(428): unsure at all n locations
agcttctctggcatgtctcgatatcattcccaagagcggcggctggcctcctgatgccgaagcgagaccaaatggggcgttggataatcccctttatgtcttctctttcgatcagattattcttaacataaaaccattcctccatccaggccccgggtcaccattttcaaaaggttgggacaggatagctcacattggagcgaggaacgaagccataacaaccgaagttgttgtgatattgctctttaccagtggccttcgtctcgtatagtagttcgtgcatgttgcagaagcacttcgtgctcggctccagcccttggctcctcacggcccanataaaaacccccattctaatgatggcttcggnggtaatntaatgtacgaaaatttcgaaggtcttcagcacttcgaccaggaatctgcttaat

SEQ ID NO: 34682 - DNA, 455 bp, Zea mays
tgaggctatgcatagattaccgcccacttaacgcggtgactatcaagaacaagtatcctttgcctcttattgatgttcttttcgattagttggtcaaagccaaagtgttttccaagatagaccttcactctggctatcatcagatcaagatacaagcaagtgatattccgaagactgccttctcaaccagatatgggctatatgaatttttggtgatgtcatttgggctgactaatgcaccagcatatttcatgtatctgatgaattctgttttcatgcctgaattggataagttcgtagtggttttcatcgatgatatcttggtgtactcaaagaacaaagaagagcatgccagtcatttgcgtgtagtgcttcaacgtctgcgagagcaccgtctttatgccaaattgtcgaaatgtgatttttggctaaaggaaatcaaatcttgggtacac

SEQ ID NO: 34683 - DNA, 470 bp, Zea mays
  unsure (1)..(470): unsure at all n locations
agcttgattagaagttagcctagtaaagccaagtggctatagatgagttcttgcaaaacacaataaccataagaagatcaacacagatagacacagtggtttatcccatggttcggccaagtccaacacttgcctactccacgttgtggcgtcccaacggacgagggttgcactcaacccctctcaagcggtccaaggacccacttgaataccacggtgttttgctatttgtttactatatcccgctcgcgaggaatctccacaacttagagcctctcgcccttacaatttgatgttcacaaagaagcacagaagtaaggatgggatgagcaacgcactcaagacacaaaatcagagcacaacacgcacacaagtcacaactcgagctcacaacacaacccgaagagttcactactcanatggagctctagtngctatcacaaagaatcgaatgcgcggaattggagtct

SEQ ID NO: 34684 - DNA, 479 bp, Zea mays
  unsure (1)..(479): unsure at all n locations
tcggctccatctatgttatggatagctattgaatctatcttatttctcttcgcctttctggcagcttcctcacttccatgaatagcaataggcccttgatccgaaggtatcttcatgcaaagatatgctgggtgaagaattgcttcgaacgcattgagtgttccacgaccaatgattgcgttgtaaggtattccatgtcaataatatcaaacacaacttgttcagtccttgtattgttgataaatccgaaagttactggcattgtgatcttgccgagtgctacaatctgccttcctccgaagccacaaaggggatgtgtagcatcatggatcttatcttcnggctcttgcatcagtctgaaggccttagcaaatataatatccgctgcatcgcctgtgtcaaccaatacattgtggaccataaatcctttgattacacaagatataaccatagcatcgttgtgatggtaatccttgaga

SEQ ID NO: 34685 - DNA, 424 bp, Zea mays
  unsure (1)..(424): unsure at all n locations
agcaagcaccggtacatganaccaattgccaagaatatctaaattcatctcagctatagcttcagcaacaagagtagcaatatgagaatcaagcctcaccactataggaattaaatatggtccttatatggaagaagactcataatacccttactaagtgaagggtgttatgatattggtgatattggaacattacactaatagtggtactgtaagaatgcggaggagaatcaaagcctgagtcaacaataactggagtgagaacagagtgttcataaaggaacagatccaaggaagttagcaaaataagactacaccagcaggtttgaaccatgggaataagtttatcacatatacagctaagaaagttatgtatgggttctattggagatgatgganatccctatggcttagaatctactat

SEQ ID NO: 34686 - DNA, 446 bp, Zea mays
tcactgccggaaggtcgcccagatgattatgagggttttctttatcgtagtgcacacaagacaacacaattagttaagcaagttgcggtctacaacaatctcattacagagtaatctgaaagatagagctcgatcggcccgtttgtactgatttaatgttgaacagatgtgtcatcttatatattatttaaaactgagccgatctgggtcgtatctcaaagaaccacggtgccctttctagcgtttgctttcaaggattacaatgtagttacagttacatcgggtgtttagatactatataggagtattaaatatagattaattataaaattaaaaatcggaggctatttaaggagacgaatctattaggcataaatagcctatgaattgacaatgtgtgctacacagtaaacatgtgctaaataatggattaattagacttaata

SEQ ID NO: 34687 - DNA, 454 bp, Zea mays
  unsure (1)..(454): unsure at all n locations
agctntgtagttgacaacctcttcatttgaattcttttactacctcaaatagtcaatttatacttggattgttgtaatatgtaggcaacaaactgcaatatagagagacaaagtaagtgataggcatagtggtagagggggatgtgcgtgaggatgatgttgtgtgggtttcaattcccaccgaccacatagttgcgaattttgcgcgaaaaatgctgcaacctacaattcgcgacttcaatggagacgggcggatggggcctangtcangcctcccctaaaagaaataactttttactatttttagaccccattntatgtttcatgaaaaagattttcactggcagttgtattatcttgaccgcaagtgtaaatcgattttcactggtgtcggcgtttcaaccaccgggggtccctggacnggttggcgcnggatggaacacaagatgtggga

SEQ ID NO: 34688 - DNA, 478 bp, Zea mays
  unsure (1)..(478): unsure at all n locations
ggcgcccgagctgacatgttaggcaaccaatcctggtttataaatgcactaatgacttgtttggaggatgaagacatgtatcattgactagaaaaattcaaacacagctactatagcgttagctcaagtgctcaacactacactcagatcggatcagaatcataaggcaaaaggcttaaggttaaaagtagacatgtatttgttgtcatgtatttgttttcatgttgagacatgtagacatgtatttttgtcatgtcgagaatgttgcttgttgaaggacatgtatatttgtttaaatttttattaaattttaagttatgtatgatgttgaattgggaagaaatttgattatttatgttattcaattgctgaaaatggttctttgtcatatctgatggatatccaatggatatccganacccgatgggcatggatatggatgtgaatttctatccacggatatagtcgcgggcggata

SEQ ID NO: 34689 - DNA, 458 bp, Zea mays
  unsure (1)..(458): unsure at all n locations
cctganggatgcaagcttctagatatgtcgaggtgacaaatgatgatgttgaatttgtttttacgaaggtcgtagctaagcaatttcgtcggttgcccatcattcctcggctctcaaggttgttcctcaataaggaaatagctctgcatatgacgtggccaaagaatggtgtacgtctcgtcactgagccagacataatggtccatccgtcggacggtgatgcgtggaaggcatttgacgagtttgatcccgaatttgcaaacgaacctangagtgtacggcttggtctatcgacggacgaattcacacctttcaataccagtgcaagcccttactcgtgttggcctgtctttgttgtgccatataatcttcctcctgagttggtcaataaataagagttcatgttccttgcactagtcatcccaggccccgagcatccagggccaaagctgaatatg

SEQ ID NO: 34690 - DNA, 464 bp, Zea mays
  unsure (1)..(464): unsure at all n locations
tactcagctgccacatagctcattgataccttgatcatatctctttttatgctatgactaatgtgttttcaagtctatttcaaaccaagtcataggtatattgaaagggaattggagtcttcggcgaagaaaaaggcttccactccgtaactcatacttcgccaccactccgagcaactctctcttctttgggggagaaatgagcatcaaggaaaaggacttcatccttgggggagagagtaaaagctcaaacgcaaaaggaccggatttcgtctttggtataatcttaactcattcatttatgaccaaagaggaggaacttacttcaagggctctaatgattccgtttttggcgattcatgccaaanagggggagaaatgagctcaaagcaaaaggaccgcaccaccaccaccaacttcaaaaacttagtgctttccaaaagtatttatcatttggtatccta

SEQ ID NO: 34691 - DNA, 487 bp, Zea mays
  unsure (1)..(487): unsure at all n locations
tgaggcatgcacgctcattcttaaacaactctaagttcgagcgatatgaatcttctatattggttgaaaaaaaagaaaaaaatagccttaactccaacaacaacaggctgcaagctagaatacgcaacctgccacgtacgatattgatgacatagagttgtttgaagtccatctagtcaaacttataatacttagagggtatttgggatggctccaggttctagctctagtgtgaagctgttgtttataatatcaatctaaatagttttaaaaatatttttaatctaaataataaataaaatgacttatctaaatatcttttagagatttacagctctagctccataattttctggaacacctaatgatctactctactaactccacttaattttttagagcgggagctgtcctaaacaagaccttactcatctatcttgtnggccgtacagtacacacatgccgatacgggttgtcatgagtgaca

SEQ ID NO: 34692 - DNA, 462 bp, Zea mays
  unsure (1)..(462): unsure at all n locations
gactatatcttggtttaacataacattcttttcttagatgatgaaaattaaacccatttaaagttttagaactgaaagtatatcaattgaaattctgaaggggtaagcatgctaatatgaacttcaaacctcataatgaaggatatcaaataaatatgtcactacatcttcattatttggttgacaaaaagtgtaactcccttcttgaatcactatgatttcttttctctttatgatttcatccaaccaggcaatcttgaacttcattcatcttggcatggttcaatcatacatgatatgagacccatcgaaactcaatgattgaaataaccaagactcttatatccgtagaatttgaatccatcttgaaagcacttggaaggaccttgttcaaacacttataanagagagcattataaacacatgggaaggtttcacaaatgatgatccttatatgtggat

SEQ ID NO: 34693 - DNA, 457 bp, Zea mays
  unsure (1)..(457): unsure at all n locations
agcttctcctttaccctgaaacgttataccttctttattggtgaaactttcaagtagacataatcttcaacttgaaagtgcaagggttgacatcgcttgtctgcataacccttccgtacaaagcttcaaagggtgccattttgatgctctcttgatagctattattgtacgagaactccaccaatggtaagcatccatcccatttctgcggaaattctagaacacatgctcgcaacatatcttcaagtatctgatttactctctcagtctgtccactagtttggggatgataggccgaactgtggagcattttagtacccaaggatctgtgaagttcttcccagaatttggatacanattgaggttcacgattcgacactatggtcttcgaaacaccgtgcaaactgagaatgcgagctatgtacagttccacatatgtgaatactgggatacttac

SEQ ID NO: 34694 - DNA, 477 bp, Zea mays
  unsure (1)..(477): unsure at all n locations
taactaaagtcatctaagagtcggctaactagagaatcaatatatgccgctatacatcacacgcgtcggctagtctattattatcgaaatctgagacacaacatgtatatgacaatcgcttaacgaaatcgactcctacttaacatgagttggttaatcgcagttttggacttagcgaaccattttagacatcacaactcaaaaacatgggttggagcagattaatcagcttttcctaatcattgctcaacttaaagttgttactacacaggtcacttaaaatggcacatttttgggatctaacatagaggcaattacacatggcgtaaaactccataagactacatttgctactggcatcaacaatacccaccgacctattattcaccatacgaacgcaattacacgccgcctactagttnttaacataatcctcatatagctcggaattctaactactcactaacaataaatcac

SEQ ID NO: 34695 - DNA, 451 bp, Zea mays
  unsure (1)..(451): unsure at all n locations
ccttagcacatcttcatttctatgaagtattctccgaagatcgacttcgtattcaattcgtgtcattgatgcaatatgatgtatgatgtgatgttatgcgaagtgatgtgatgatatgatgcaaaatgatgaggatgtcgaagacacacacccacatgcccacactgaaacgcacaagctctgcatctccttagtaacgactttggagccttcttcaccgcttatttttcggtgttcaccgtttattttttggtgtaagctctgcatccccttaggaacgtcttttgaacttcttcaccttctatttcggtggtataagttctgcatccccttatgaacgactntggaacttcttcgccttatatttcggcggtatttggctctgcattccctttggaacgacttttgagcaganaacttacgctgcgctctcttatgaacgactttctgt

SEQ ID NO: 34696 - DNA, 418 bp, Zea mays
  unsure (1)..(418): unsure at all n locations
agcttgtggaggaccagatcatcatatcttattttttctggataagaagtggtcacccaagttccgttgatgaagcaccacaagaacaatcaaggaaggaatccatgtgggagttcgcaagagaaaggtttgtgtgttggcatctatgctccttcaataagcaagctgccaagcgaaagctagaagcctgaagatgatctttgagtagccagaatcagtgttttcaatcagcaaccagatgttcctcaaaggccagactntgttgaagtttcatctcctcgaagagttgcaaagtgaagatatgtagctgaagtaaagctatacccataacccttctaaaccgaatctcgaggacgagattccttttaagtggggtagatctgtagcatcccaaaaattcaaatatttgaaatttctc

SEQ ID NO: 34697 - DNA, 342 bp, Zea mays
ataaactcagacaggggaggagcgccaataaaccactcccaaatcagagattattggttattggattaatcttattagttcacttctatactttctattgcaaattatatatgtttggttttatcgacattggtttactatttatataataatgtattctaaacgcatagcaaaagttatgcatctagaaaaccaaatgtcttatttaatatagaatgagaaagtacaaatctacttactcacttggatgtacatgttggatagtactagataaagaaacacatcgcatacaatggactcatttggtggctaaccttatcttaactgtgctatgtatgtagc

SEQ ID NO: 34698 - DNA, 458 bp, Zea mays
  unsure (1)..(458): unsure at all n locations
ntaccaaatggacgtgaaaagtgccttcctcaacggacttatcatggaagaggtctatgttgagcaacctcccggctttgaagatagtgagtaccctaatcatgtgtataaactctctaaggcgctttatgggctcaagcaagccccaagagcatggtatgaatgccttagagatttccttatcactaatggcttcaaagtcggaaaggtcgatcctactctattcactaaaactcttgacaatgatttattcatatgccaaatttatgttgatgatattatatttgggtctactaacgaatctacttgtgaggaatttagtaggatcatgacacaaaaattcgagatgtctatgatgggggagttgaagtacttcttaggatttcaagtaaagcaactccaagaaggcaccttcattagccaaacgaaatacattcaagacattctcaacaagtttg

SEQ ID NO: 34699 - DNA, 452 bp, Zea mays
  unsure (1)..(452): unsure at all n locations
agctnggcgcgtgcatatgaacgacgttctcaagtgcttgatggcaacgtcatagcagcacccaccaagccagtgagaccgccccaaccaccatcagttccaatcccagcaacacagccaacagtgccaaccataggcaatgcagcgccgcagcgaccattcaagaagctcacacctggcgagatggcagaacgccgaaagctagggctttgttacaactgtgatgaacaatatgttcgcggccatcgatgccctcggttattctatttggaagtagctgacttcgaagaggatactgccatagaagaagttgatgaggagccagaaacagttatctctctacatgctctgacagacattagatcaaaggacaccatgcggattcaagaaaaatgaaggcagattgctactgctgtatactcnagttgatacaagaatataggagagagctc

SEQ ID NO: 34700 - DNA, 466 bp, Zea mays
  unsure (1)..(466): unsure at all n locations
taacaactattttatgtcaagcgtaaagatcatgatttgtcatatgttacatctcaatgatgagaattctctaagcgttgctaacttttgtggtctcatatttccagcgatcagagtctaacactctatgaccagcgcatgtcatctctagctagaaagctaataatgaaggccagttgattctcatctttggaatcctgataaatgtacatcttgttctagcttctgttatttacatactgaattgttaagtctgcaactccaacattgaggaactgatgttgtgttccctctttgtaattttaatctcgggcgtgcttgacaaagaaagtttgtggcgtacaacaacaggatacaagaaacttgagtggttttgtgaaggcttttgtgaatcacttgaagcattagttntttgaatgatttctgtaagtatttgcaaatgtatgcaaaacacaataagatgtgt

SEQ ID NO: 34701 - DNA, 455 bp, Zea mays
  unsure (1)..(455): unsure at all n locations
tgtgaagattctntatcccaacgtgggcaagtctgcgattccagagtcagcccatgttagtcttagcaattaagcaagtatctagttcagcattgttatcataaaaatcaactaaatatagctgaccatctaacactcccttaaatgctattgaatcatcactacttctaaatacagtaacaccaacatcagtaaaaagacagttgtagcccattttacataattgagaaacagaaagcaaattgtagtctaaagaatctacaagaaaaacattagaaatagaatggtcaggagatatagcaattttacccaaccctttgaccaaaccttgatttccatccccgaatgtgatagctctttaaggatcttcattnttctcatatgaggagaacatccttntggtcatgtggntggtgcactcgctatcaattatccaacttgacccgccggaagca

SEQ ID NO: 34702 - DNA, 440 bp, Zea mays
  unsure (1)..(440): unsure at all n locations
agcttctacacttctggttctattctatagccctatattcatctactaaaaggttcctcagctgtgagcctgtcatttttccattgacttgtcttggtagaatgagtgaaaccatatgtggtgaaaacatagtgtntgttgatactaaacatgcttttggatataatgcatgcgtgtagatatatggttttgattaatgtaaacttgtgtatgtgtgttaacatgtgttntgatattgttgtatcacactangtggagtggtgtgacgtggattaaccttagtcaagtcacagacttgtgctcgtatacggttgtgtgtgttattcatgtgcacgtgtttcttacagtacaatataatcggtgatatgttgaaactacgttcaggaggaactgacggttcaagactaagttaaggaggaaatgccctattggctataata

SEQ ID NO: 34703 - DNA, 381 bp, Zea mays
  unsure (1)..(381): unsure at all n locations
ntctcgactaagtcggggacagggcctcatggactggtgtaagtacgcgtaagcggcaaggccgaccgagccgagggattcccacgcctctgggatgcggatacctcactcgtcccttccgcgaaaagcaactctcgctcacacaaacatccctgttaccgacagagtccagatgctcgaaacaagagaaaaaaaggcgcagcttcgtaagcgtggcgagggtgtgttttttttctggcctcggcggccgcagaaagcacacgctacaagatgatctgatcctgcaggctcgggtcttcacgctgaagggagccgtagcaccctcggcatcgacgacgtcttcagcaaagcccgacccagcctcgggcggcgaacgcggcc

SEQ ID NO: 34704 - DNA, 469 bp, Zea mays
ctgcagctttgatctcttgcttgaacttttgtaacatggccagaaattactcgggaatcatttttgagaaccgcccttcttatacccattgccttcaactttcgaagaccgcaaagcaaagcttcatatttagcaatattatttgtacaactaaagtcaagtttcactgcgtaacatgttctgactttggaaggtgcaattaaaacggcagctgcacctaccccgaacgttccccatgaaccatcgcagaatactgtccaagcttgggcatctttagttgcttcttcttcctgagcccctggcgtacagtcagcgataaaatctgctagcgcttgggactaaatcgaagatctatgcacataatcaatgcagaacccattgagttccgcaacccactgtccaattctgtcagtagcctctctgataccataatatccttcaaaggctgagaagaagggacaattatatg

SEQ ID NO: 34705 - DNA, 477 bp, Zea mays
  unsure (1)..(477): unsure at all n locations
taatgccnctaagaacagactgtctaactgtgttaagggttatgctctcatggttcaggatagggaaggttacattctatactctgagaactatcctgagcataaaattagaaaaattcatgctaggaaatctcatactgtttctcataatgcttatatgtatagtaatgaggcttctagctctaagcattcaactcatattaaaatgcctaaaaataagattgttgatgcatccaatgaatataacatttcattcaaaatttttgatgcatcttttgtgctcactaacaaatcangcaaggtagttgccaaatatgttgggggcaaacacaagagtcccaagacttgtgtttgggtacccaagatgcttatttctaatgtgaaaggacccaagaccgtttgggtacctaagaacaaggcctaaaatngttntgtaggtctatgcatccgacggaataagttggataatcgatagcg

SEQ ID NO: 34706 - DNA, 413 bp, Zea mays
  unsure (1)..(413): unsure at all n locations
tacacaaaatctnccgctttgacatttattactttataccatactcaagcaatgtcacacccggttttagaaggcaaaccgaatgcgaaccatgtacgtgctaggatcagttattcacgtacacagcagttacataacatggacatcatcacacagtgctcaaaatagtattaataagggaaatagtcgattacatcatacgtctgagacgtccatatagttcttacaataaatcaaagtgcggaaaagaaacgtagataacgcggccttcacaggcagccgactgggggttgccgctaacccacacctagaactcgtcgtagtcttggaactactggaagtctccttccacagcttcatcttcgcctgagcagtgagtgcaatgctgacacctcggggggggggggttggtg

SEQ ID NO: 34707 - DNA, 398 bp, Zea mays
  unsure (1)..(398): unsure at all n locations
agctgactctcgaatcaacgaagctccagctgagcctgtttttataaanaaaacttcgaagaaaaagtcttaattcccacaaattcagaattaaatggccagagtgtgttctaccgctagggttgagcgtgagggaggcgaanctgaaggttcggagactattcccatctccgaagcaatgcagcgatccgggctggtaacttcggagaagatccccagtgccgatgcagaacaagcaactgccgaagtagaagaagaaaacattgaggaaaccgatcctgaagatgattatcgtattgctatgccaagtaagcccagccacttggacttcggaaagtctactgtttcgaaggctgatctctccaagatggtaaagtcgggctttttcagtgaaagtc

SEQ ID NO: 34708 - DNA, 394 bp, Zea mays
  unsure (1)..(394): unsure at all n locations
gcttcagcttccgtctataaccttcggttgtctggagctcgaagttctttntctcgaaagcatctgattgctcttttattctgctttccaaattttcaattataacttcgcgcttcttatcttcgagatcttgttgcatttgtaaggctttgctcaacagcatgctctgcacgaaaacaaccttcgtcagacatgttttttattattagaaacaataaaagttaagggacaagttattcaccttgaagttggagtaaaataaactaccaacgacatgttgtcgtcggtagcggctgatgtctgtttctagcttctggaatccaatactcttggacagagtactgataactttggcccctggttgatctcgaatgcactctaatttctcatcatc

SEQ ID NO: 34709 - DNA, 479 bp, Zea mays
  unsure (1)..(479): unsure at all n locations
tcggatctcttgctctactgctnttatcaacatgacatgtgatgacctgtgagtcagatntgagaactgcccttcttattccccttgccttaagctntcgaagccccaaaagaagagcttcatactctgcaatgttatttgtgcagttgaactccaatctggccgcatactangttttgatgttggatggtgagattagaatagtagctgcacctgcgccgaaggttccccatgacccatcacagaacactgtccaagcttcattgtctgttatgcttccttcatcctgagcccctgtgtccaattagcaataaagtctgctaacgcttgggattggattgaagatctatggacaaaatcaatagtgaattcattcggttctgtgtcccattttccaactcttcttgtggcttctctgtttcttataatgtccttgagaggctgggacgaaggtactataatgtggtatgactagatat

SEQ ID NO: 34710 - DNA, 444 bp, Zea mays
ctctaagcacctgagctgcactgtaacatcaattcaaaggagaatcagcttctcatatcagccgaagcctatgctcttatgtgaggacatagcagagcagaaggtgctgttaggctctcaattatccgaagagcaggagaaaaccttgataaggtttttattcaacaacaaagatgtttttgcatggtcagctaatgatctttgcggagtaaatagggatgttatcgaacactcgctcaatgttgatccatccttcagagccagaaagcagaggcttcgaaaaatgtcagatgataaggctgaaggtgctcgtaatgaagttaaaagactcctcagtgcaggagtcatcagagaagtaaaatacccagaatggctggctaacactgttatggtaaaaaaggccaatggtaaatggagaatgtgtatttgatttactgatctcaa

SEQ ID NO: 34711 - DNA, 478 bp, Zea mays
acatgaagaggaaccttcggtcatctcatacaaacagcttcattctatagccgcttctgccttgaagaccttacgcgacgaaacatagacccaacagtagcccctttcgcggtgctagatcgtatctcgtaacgagctcgatccgagaaaaaagtctcttaagcttctgggagccgaaagtccaaagaacaccttccctgagctcgatgccgagaaacgatttaattttccagcacatagcggtcccaccttgcgaagttactgcttgtgcctgcggaccaccgcgcagcgagcgcaagcgggtgtacgtctggtgttaaaattctggcgcttagccttcttacctgcagcactatataaacagacgggtacgtgtgaagttaccacaacattcattgctatctgcactgtgctcctaccaaaatctataaccatcgccgaagcttgtctgtcggaatagaacaaagctccagtttga

SEQ ID NO: 34712 - DNA, 466 bp, Zea mays
  unsure (1)..(466): unsure at all n locations
agctttctcagcacgccaacactacgcggacactgttgtcatttttcttgaagattgctccagcagccaactattgttgccccaagtcatacatacattgagctcctgagcccacatgtcggggcttatcgctcttgtacacgcccccttgtgctataaaaggggggctcgatctttagactcagacccaagtcattcaagacaactcaagctctcaagcaatacaacacatagtggagtagggtattacgctctgacggcccgaaccactctaaactctngcgtgttctcgtgttcattcctacatctctcaacaagcaaaacgcttaagccccctccacatcttaagacttagggcgggtgcactccgccacccggccggagaatatcctctccgacatttggcgcgccacgtagggggcctangcattangattttgcttgttntcttgctcaccatgatggt

SEQ ID NO: 34713 - DNA, 443 bp, Zea mays
  unsure (1)..(443): unsure at all n locations
ntctttgtcgagaancaccctagaaaaagtacaccaagttattatattgttgctacatttgcaaatcaagggtaatcatcattaagtngatggctcatataaatctaaacaccaagaacctcttgaacattgcgagccataatttgatgcacctcatagagttcatcgttcaattttgcgaggtttctctgagttcttgtatccaaatatagtttcttagtcttatggatgaatgtatctagaacagaaagaggcataagttttaaagtggtagaatttgaaatgaaaaatgaagcaatgctgtcaagtgaactctggaaccataccaaacttgataaaagcatatggccttgcagcagtttcaatntggttgccattgaccctccatgagacttcaccatccaaaggtaaagatccttttgttttctgcactgtaatacatg

SEQ ID NO: 34714 - DNA, 469 bp, Zea mays
  unsure (1)..(469): unsure at all n locations
taatcttccttccattgttacatacatcaagcgtttcatattattattacaataaaatctattcttcttacagaactttttctgcaacttcgttcagaagtttatcgacgacttcgtcaataatggagtccgccatgcttataatttccaacgcttccttcatttctggatcagctaggggatcatatggctccggaggcggngacacttcagctgaagtaggtaaacagattagttcgaagccacaaagcaagtaccgaagctaaataatcaagaaataatacctatacgcctttcgcgttctacaagttcttcagctcgcttcgcttctgcccgggcgtcgtgggtgtctttttcactctttnttataatctcgtgggccagctctcgaccaccgttcaccgagacattgttataaaatttccgccattaaagtgcttcggctaaggatccttcgatcatctatgga

SEQ ID NO: 34715 - DNA, 338 bp, Zea mays
  unsure (1)..(338): unsure at all n locations
tggaattanggttcaaacgagtcaggttgatgtgataaaaatcaatgaggccaccgaacaaacgagatattggaaggccgatgccgcggagaaggaaaggagcgtaaactactgactcgtgggtatcttcagttgggacggtagtcccgtggcaaaccccccaagaacagagttcccgcggaggaagaaccccgatggagacaagatggaggagctcagcttccgaaataacagacgtatggttacctgcgaagggtaactgactgttggggtccattgcggngatcactgcagcagatgagttcgcggttctcctcttgggcgccatcttgcttctc

SEQ ID NO: 34716 - DNA, 467 bp, Zea mays
  unsure (1)..(467): unsure at all n locations
ntgngagaaggtangtcccaagctgagtatgccactggttcaccaacgtttgaaactttacccctgaggatcatctcaagtcggcttaccaagtcaacagaaggaattctcctattggtaactcgggttgagtcggccagccctcgataaagatatgccggataggccctgtctttcagcggctgaatgtttttgaaaacaaaatctgtgaccacagcttcggcagtcagacctctctctttcagtaacccgacttcagtaagcaacacgcctgcctcggccacttcttgatccgtgggagactcagtccaactcggagtacgaacgtccggctgtcttcctgaccgggaggggagagaatttccataattatcaactataaaccactccagacgccaacctttaatgctgtctntgaggggtatctcgagatactcggtctttcgcccacgacgcatctccaaact

SEQ ID NO: 34717 - DNA, 467 bp, Zea mays
  unsure (1)..(467): unsure at all n locations
agcttanngttttattagggataacatattgtattttctttgccttcatagatatttgtggacaaatttacaaaggtcttacgatgacatcaatttccattattccttttnctttctttaatttccatttagggtttctagtgcaggtttgaactacgacagtgttttaagaagttccaaaaattctgtaaaaatttcagtgggctgccactggctattttagcttgttttaagaaattgaggcttaaggtataacagttaggccttaaacaaaaataacaaaaggttaggcaaaaaggggcactttacactatacctcctaattaggggtaggttctgtcctaaagattattcttgttggcatcctctggtaataatagatntttgtgccaaanatcacacgaaactaacgggtggttatttagctatgctcttcttaaggttcatgtcacagaggctctatctac

SEQ ID NO: 34718 - DNA, 475 bp, Zea mays
  unsure (1)..(475): unsure at all n locations
tcggatctttagctntgcaacttatgtcaacatgacccgtttccacctgggaatcagttntaagaattgcccttctgattcccattgcctttaatttccgaagacccaggagcaaggcttcgtactcagcaatattatttgtgcagctgaagtccagttttgctgcatagcaagttttaaccttggatggtgaaaccaaaacagcagctgctcctgctccgaaggttccccaggagccatcacaaaacactgtccatgcttcggcatctttattcacttcttcgccttgagcccctggcgtccagtcggcaataaaatctgccaatgcttgagattggatcgaggatctgtgcacataatcaatgtaaaattcattaagctccgcagcccattttccaattcggccagtagcttctttatttctcatgatatctttcaacggctgcgaagaaagaacaataatattatatgcctg

SEQ ID NO: 34719 - DNA, 433 bp, Zea mays
  unsure (1)..(433): unsure at all n locations
agctatantaggagtctcagagtattttatctgtttttatagcaccatggccaagccaattcacgatgtctcatatcttattcactgtggcttgagcaatcctcttaatcacttcaacctctattatgatcatattgatgcatagtcgattctcacgacttgtccatatattcaaaccaatatagagaccatattatatccatttgcattagctcactggttatatcaccttgtgttgaaccttgttcactgatcattatacactattcaagtatgttcatcatactgaatttcctgttcaacacttagcacacttgttagacctttacatgtgatgttatccacatcaccaaaactcacaagagggatgaatgcactttcaatctccccttttggtgattgatgacacacattaaagcttacataacattga

SEQ ID NO: 34720 - DNA, 277 bp, Zea mays
  unsure (1)..(277): unsure at all n locations
tgtatcattntgtattggaacaattggatttataccattattatatccaaactttagatatataccatggaccccacatgtcattgactcatgtggacccacatgtaagtgagataataatggtatgaatccaaagtggtgatcttttaatggtatggatccaaatttcccttttgtattttatgttatgcaaaggaaagatatcttatttgttggcaattaataacagaaactagtcattggcctatgatgtcctggctcctaagatggtgatgtc

SEQ ID NO: 34721 - DNA, 430 bp, Zea mays
  unsure (1)..(430): unsure at all n locations
agctngcgatagtccaacatagtcttttctacctgattaaagctcgagtgctcacaacgctaagcgcagcagacccacacaattaagagcgtgtgcagccacgtagcacatgaaccacacagccaagcacacgcgaagcatagcgtgcacagttcgttcctccccgaatattaccaacggaaccatgtttaccgaaccgtaccagtcggcagtcgacataacaaaacaacgatacatctaagggggactgatcgatcgggtgtgaaagtgtggaatgatgcggaagcgtaccttggaggtaccgcggtggtgttttcatgagccccaagccgatgcgtatggctcgccgatggtgtatgggaagtgcttgagtcccgatacggatcccgcgaccacctccttgaggaacttgaacatattgcgctacgcc

SEQ ID NO: 34722 - DNA, 368 bp, Zea mays
tggacgtgaagagtgccttcctcaatggacctatttatgaagaggtctatgttgagcaacctcccggctttgaagatagtgagtaccctaaccatgtctattaactcttttaggcgctttatgggctcaagcaagccccaagagcatggtatgaatgcctaagagattttcttatcactaatggcttcaaagtcggcaaggccgatcctactttattcactaaaaccattgaaaatgatttgtttgcatgcccaatttatgttgatgatatcatatttgggtctactaacaaatctatttgtgaagagtttaataggatcatgattcaaaaattcgagatgtctatgatgggggagttgaagtatttt

SEQ ID NO: 34723 - DNA, 384 bp, Zea mays
gcttcagcttctgatagctagtaatctctattttatatcatggtcaacacaattaattcattaactcattaggtgctaaagaactgactgaatttagagaaattgcagacctgtgcattgtacatcttcatgagcgtacatagtacgcaagatttaactactcgagataagttacgagtacacatgatcagtggtttcatgtgttggtagagctacattttggtgcatgagaggtttggtactcaatctcattcccccccccccccttgcaggcaagggacatgccctgcgaactctaaacaaagatacatattgcaacaagggcgtggttcacttactttgaagagaaaagcaacaagatgtcccacttacaacagatgggtt

SEQ ID NO: 34724 - DNA, 413 bp, Zea mays
  unsure (1)..(413): unsure at all n locations
ggtgaaggttcttcatccgcacatgtgctaagcggcgattctacagccagcccatgctagtcttagcgattaagcatgcatctagactggcctcctcttttgcaaaatcaactaaataaagtttgtcgtctagtacacccttaaaagctaatgaaccatcacttctcctaaagacagacacatctacatttgtgaataaacagttatatcccatattacagagttgactcacagacaacaagttatatccaagcgactcaactaaaaacacatttgaaatagagtgctcggatgaaatagcaatttttcctaaccctttcaccttgccttggttcccatcaccgaatattattgaatcttgnggatccttgttcttgacgtangaagagaacatcctctnttcccccgtcatg

SEQ ID NO: 34725 - DNA, 349 bp, Zea mays
  unsure (1)..(349): unsure at all n locations
agcttgactcatgtattcacacattaatccttaattcctttnttccgtctcatggacaaggcatcctccctggatccaaatccatagactaacatctatcccgttatcaagatgaatacaatcaattcctgacctcgcgcgagtgctagaanaatcactcgacttctaccgagatcctgattagcaagcagctactcgacctagcatactagtattcatcccaaaaaggaatcctaagttcatacaactagaggtttcaagcaactcctacacttaagtgcacattgcaatcctacaagcattaagtgtagcaaagtagcatataataatacggttatgcatataaacc

SEQ ID NO: 34726 - DNA, 464 bp, Zea mays
tgtgaagattcttcatcccaacgtgggctagtcggcgatgccagagccaacccatgttagtcttagcaattaagcaagtgtcgagttcagctctattaaaatcaactaagtatagctgaccctctaacactcccttaaatgctactgaatcatcacttcttctaaagatagtaacacctatatccgtaaaaagacaattgtagcccattttacataattgagaaactgaaagcaagttatagtctaaagaatctacaagagaaacattggaaatagaatggtcaggagatatagcaattttaccaagtcctttgaccaaaccttgatttccatccccgaatgtgatagctctttgggagtcatggtttttctcataggaggagaacatccttttctccccagtcatgtggtttgtgcacctgctatcaattatccaacttgagccccttgatgcataaacctac

SEQ ID NO: 34727 - DNA, 475 bp, Zea mays
  unsure (1)..(475): unsure at all n locations
agcttgtaccagacggggctctcttctccttcggacagtccatagtgtaaatgtgagttttgcatagtttctgtccgaggcacacctcggtatcgcggacggtccgccggaagggcccgaacgatccgcgcacacatgcattttccaaaaagcttctcctgtccggaataatctactctatcagccgccgaccgggcgtgacacgcgtggtcacaggcatgcaggcacgtcacggtcacgcagtgtttgctgtgcaactgctgctgacgcctgactgttgtgtttgtggacatgtgctaacaccttttgcctgcaccaatgcaccatgcggttcanaggtttatgtgcttggtcaaatggtgtaggacgggacagcagcttcagcgagtggccagtgctacggacaacagcttcagcatgccttctttatggtgtgaacacaatagagaccaaagagtagagatggatggtttct

SEQ ID NO: 34728 - DNA, 440 bp, Zea mays
  unsure (1)..(440): unsure at all n locations
tctanagggagaacacgtgataggtttaactaacgtgcaattcttataagatagaccttgtgcagcttgtcaagcaggtaaacaagtgggaggagcgcatcacagcaagaatgtgatgaccacttcaagacccctggagctgctgcatatggacctcttcggacccgtcgcctatctgagcataggaggaagtaagtatggtctagttattgttgatgacttttcccgcttcacttgggtgttctttttgcaggataagtctgaaacccaagggaccctcaagcgcttcctcaggagagctcaaaatgagtttgagctcaaggtgaagaagataaggagcgacaacgggtccgagttcaagaaccttcaagtggaggagttccttgaggaggaagggatcaagcacgagttctccgctccctacacaccacagcaaaatg

SEQ ID NO: 34729 - DNA, 389 bp, Zea mays
  unsure (1)..(389): unsure at all n locations
tgcagcttggacatattctgcgatggttcttggggtatctttggtgcangtgcaactgccgtcttaattgcaccttcaaaagtcagaacatgctacgcagtgaaacttgattttagttgtacaaataatattgctgaatacgaagctttgcttttgggtctttagaagttgaaagcaatggggataagaagggcggtcctcanaactgattcccatgttatttctggccatgttgacaaaagttgcaaagcaagagatccgaagcttgaaaaatatttggatacagttcgaagacttgaagcctctttcgaagggttttctgttaagaatattccacgaggagaaaatgaacacgctgatctactagccaagtcagcggcacaggggct

SEQ ID NO: 34730 - DNA, 464 bp, Zea mays
  unsure (1)..(464): unsure at all n locations
cctataaatctcagcttcgcagnagaagaagagnttttatgttgtgcatatgaatataagctntggcaaanagaggaagcgaccgtttatgcttcgttgtgtacgaaaagaagggaaggtgttttttcgccttcggctcaaaatgctgatttcgtccacatcaaagcgacttaatcgaagggtaaggatatattacaaggtatgtacaaagttccttgagaacagttcaattgtatttacaaaacttgttacaaaagtatcctgagttttttcctatagtacatttctactgatcttcattaagcttcagcttcggcgacagtttcggcgacataacttatgcatcaccttcaccttcgtcaacctacataaatcaaggaatcgtgagtaaaaatcaagtgcaaagaanaaggtaagtacgaagtattatctcttactggttcaagatggcttcgtgcttcatc

SEQ ID NO: 34731 - DNA, 367 bp, Zea mays
  unsure (1)..(367): unsure at all n locations
agcttcanagccacagtctgaaactgaagccgggtcttcatagcccgctaaggtgaaatccttggaaactgaaaaaacagaaatggcagaacaaattctgagtgaagaaactggcactgctgcccccgaagcatcttccanaatacgtgattatattgtacggcatgcttcggggaagaaattatctgaagaagagatttttgaagctaatcactatgcccgagaactgaagtatccgaaggggaccttagtgttcaacggcacagacgaagatgacttcttatactgcctcccagacaacaaagaattatctgtctaccgggagatggctagaagtatgggattcccgaagcttgaagctgggctc

SEQ ID NO: 34732 - DNA, 333 bp, Zea mays
atgaattaataaaggtagtgtggaaccacaacacttgtgtctcaaggtcaacaagttttactccattcaagctcttgttcggtgacgaagcaataacactggaagaagcaagaacaggatcaataagaaccaaagcttcgacggaggatgaagttgattgcctaataacaaaagacaccatagaagggaccagacttcaggccatagagcacatcaataagtaccagactgaaacaataaaatggcgcgatagaaaagttcgattgaaaaatatcaaaccaggccatttggtgcttcgaaggatagctaacccagatacagtggggaagctgc

SEQ ID NO: 34733 - DNA, 420 bp, Zea mays
  unsure (1)..(420): unsure at all n locations
agctngccacggacgtgctcactgggctggccatgcacgacttctgcaaggaggccatcgtggccacgggaggcgtcgtcaagctgctgctttcgatattcttcaatgtccaagacacggaactcggtcgcgaggccggcgaagcgctggcgatgctggctctggagagcgaggccggatgcgcggcgatactcaggcagaccgacgtgctggaccagctcgtgtcggcattgcaggacggcgacgcacggcggcgcctcaacgcggcgagggtcctgcggaacctgtgcgcgtactcggggcaacagcagagggagcggctgcgcgtggtgaccaaggccttgccggcggtgctgaacgccaccaaggtggacaaagacagaatactcgaggtgtccgtcggcctgtcgacggagatct

SEQ ID NO: 34734 - DNA, 480 bp, Zea mays
  unsure (1)..(480): unsure at all n locations
ntagcaagcatcaacatcaaccacaagcgctcactcttcgattcttcatcatgcttcatagctaagggcactaaggtatatctagaatgatgagaatccctcanaagaagtatttggcaattgagaggatctcattcatactcacgaagagctaaaagaagctcatacttatattcttgctcaaaggaaggggcctatggaaaagataagcatatatatttcatgcaacttcattgatgatactattattgcacctatcattgttacttccacaaaattttcatcacctatgagtaatgacactaaaattatcccacttaaaattgagaatgcaacacttaaaaaggaagtaaatgagatgactcatgtcttggaaaatattatggtggagaggtcgattgctaaagtgcttgggtagccaacatntttgtctcaacaacgagagattaggctacgcccccaagaatggcaagacaacct

SEQ ID NO: 34735 - DNA, 477 bp, Zea mays
  unsure (1)..(477): unsure at all n locations
agctngcttaagggttgtctcgggtctgggatgcttgcccattatgttaattgggcagccaccgctgatcttggtcggcccgagcagcagggtggtcaacggtgagcgcgtcgtaatcttgggtcagaagaaacaaaaaccaggggacctctgtgcatttgtcagtgagacaatgaatagtgactaagggctcttcaccagttatttaatttaacaggggcctttttgcaagaccggcaacgcaagcacgggcgcgcgtgttttcgcctgggcatgggttgtattgngccagtttcagcccaatactattcatggttttcctttttctttttctaccaggattagagaattcctagaaaattgtagaanaatgctaaaaatactagaccaatcttgttatattcctaaattcctatagtatttaataaaatagctttatgatttctagtccacataacgaattatggagtatttaaa

SEQ ID NO: 34736 - DNA, 428 bp, Zea mays
tgacgtgccgtccggtcccgtacatcggaggctcaagctcctcttatcttgacgtgcaggtcagatggcagctaacacagtaacagcgcgatcgaacaacagagaaaagcagaaccactcaaccacacacagtgctcgttcgcaggctcacctcaacacggccgtccgatggcgacagctactgtgccgtcccctgacaacggtcacgacaaggctaccacgtcatcctcacctcaccggttggctggcgctggccataaccgtcgtcttctctctagctagctaacccctcctcattccttgcgcacctcaaaaccagcgcctctcattcattcctcctctgctttcttcttcccaagcaacgtactaaccgatgcgactggcggttctggtgctcccggcggcggcggcggcgcccatcgtgctct

SEQ ID NO: 34737 - DNA, 477 bp, Zea mays
  unsure (1)..(477): unsure at all n locations
tctanagggagagcacattntatgactaaccaatgttcattttgagaaagacagggtttgtagcgcatgccaagcacgacagcaagttggtgcccatcatccacacaagaacatcatgatgaccgacaggccactggagctcctacacatggatctattcggcccgatcgcttacataagcatcggcgggagtaagtactgtctagttattgtggatgattattctcgcttcacttgggtattctttttgcaggaaaaatctcatacccaagagaccttatagggattcttgagacgggctcaaaacgagttcggcttaaggatcaagataattagaagcgacaacgggacggagttcaagaactcacaaatcgaaggcttccttgaggaggagggcatcaagcatgaattctcttctccctacacgccacaacaaaatggtgtagtggagaggaagaatagaactctattggacat

SEQ ID NO: 34738 - DNA, 351 bp, Zea mays
gttgtgcttcgcggacatgctcagcgccgaactcaccccgtgggggttcgtctcgctcggtgatcattcaaggtctcggtctcggcctctgccgcggacgcatcgacctcgccagacacggccttgccccgaaggcagcttcaccgccgccttccactgaaaagacacagacatgcaccatatcgtctggatgatatcaacaactcgtgcgacaggcatgcatatatgcatggtctgttggcaccagctagcttaattaccgcagcacgtccgcatggtgacctgtctcgcccgcgcggggggcggtggcgcaccgggctgccgcgctggaacgcacctggatcgctcacc

SEQ ID NO: 34739 - DNA, 440 bp, Zea mays
  unsure (1)..(440): unsure at all n locations
tcttcggtattctcttcaacattaataatgttggttccacgaatccaatcattggcacaaatcaagcgctcgaccattgttggtgtgagcgagctcctaaaatcatctagtgttcttccacccgaactaaatgctgactcagatgctactgttgatatcggaatagctaaaaggtcacgggccatgcgagcaagtattggcagtctagtagcattgtccttccaccaattaagaatgtcaaaaccagtcttatcttcctcactgtcctcagataaatacttatctagttcagacttgacagtaatatttccactcccattattgttcatttgttgagcaactatagacctcatcaaccgtttgctatgtgatggctgctctntagagtcatttggttgtggtgtcttctcagctggagcatacatatctttgtactcatc

SEQ ID NO: 34740 - DNA, 434 bp, Zea mays
agcttcaaagctaaaagatcagcatatctcagtgttctatagctaaaaattttagtgggccgaagcagagggcaagtgtgcgtaccaaatcagttcgcgatgtgatcttatttatacgcctagggcgttgaaaattgaaaggccccgcttgtcagtagatgttgctattctagcaaagggaaggtgttttttcggaccttcggctcaaggccttcgtccatatcgcaatctgaatttattatttacaaattaatattgcgaggggctactgttgggggccttcgtcctccgaaggtcctcaaaaacatgatttgacaatgttttccgagtggattatgtgaacatgtattttcggatccagaattatgaatatggagcacggccaggacgaagcctgaaccatacgaaggtcgagtgtaaccgaagctgtgcgc

SEQ ID NO: 34741 - DNA, 412 bp, Zea mays
tgaagccatggtaagtagcataggctaataatatactatttgactcaagcctagctacgggtgcataggtttcaccgaaatccaaaccttcgacttgagagtatcctttggccacaagtcgagctttgttccttgtcaccacaccatgctcatcttgcttgttgcggaagacccatttggttcctacaacattttgattaggacgtggaactaaatgccatacctcattcctagtgaagttgttgagctcctcttgcatcgccaccacccaatccgaatcttggagtgcttcctctaccctgtgtggctcaatagaggaaacaaaagagtaatgttcacaaaaatgtgcaacacgagatctagtagttacccccttatgaatgtcgccgaggatggtgtcgacggggtgatc

SEQ ID NO: 34742 - DNA, 419 bp, Zea mays
  unsure (1)..(419): unsure at all n locations
gctggacaacaagagttgatttctttattataggatgtgtctatcaatatagggaagttaataggtgtcgagaatgttctttgtcaccttaccaactaagaaaaaatgggttgagtagttattgtttgggcaaatccactttgactcattttatagtttacatacctccatactacctttgattactgcgtatttatgttgatgcactctccaatgatacataagaaaagtatgtcaagtccttatagggaaggcatcggttcattcactgtattgaatacaaatataagatttgtttccctaaaaattagaggtctctttcaacctttgggctcctctttggtcaaaaagaattctgatggctaagttctaagaaactgattagatcgngaacaaagagtgtgttgtctgacagatat

SEQ ID NO: 34743 - DNA, 479 bp, Zea mays
  unsure (1)..(479): unsure at all n locations
tgctgctntctgtccatgcgtgacctactaggtagcttgtattatgtgcaccgcggcagaacggcgaatcgaatcagacgggccgtatattattggttgcatcccgaatccgcgccacacgcgtgctggtatgggtgggcgcacgggcagatagagacagggttgttcaggacaccaccccaacccactctcgttctacgtacataaaaaaaagagagcacaccataactcaacctcaactcgtgttggggattagccggatggataagctgacacggagccgccgaaacgaaaggcatggaaggaagacactcgacaacctaccagataatggccgaactgagagcgaccgccacgcgcaccgcacagcactgcaccgtacaggtacctcgtccggcgcgcatncacgccctggcctgcacacagacagattcgaccgtatcctgctcggcgacacccgacagcactcacatgctgcc

SEQ ID NO: 34744 - DNA, 337 bp, Zea mays
gcaatagtaataaatgttgtggtaacttcacacctacccgtctgtttatatagtgctgccggtgggaatgtaaatcgtcaaaccgctcgtacccgcttaacaatcgcccgcacccactgaacggtggaccatagtgcgcgagaaggcgaatcaccagatcgcgcgtacccgttgtatggtgggaccaccttgcactcggaatatttaaatcatttctcgacaacgagctcaggaagggtgtttttggaccttcggcattccgaagcctaagagaattttcacgggtcgagctcgtacgaaaaacgatctgtcaccttgaggggctactgtgggggtt

SEQ ID NO: 34745 - DNA, 441 bp, Zea mays
tcggcttcaccgctgatccactcaattacgccctcttgttcttccagtatgaagttgtcttcgcttgagtacgcgtctatgttggcgaagctagtttttatcttttttacacattccacagatttttcaaaacatctttcttttgatgagcgaagttctgcaactgttttttcacaataatttttctagtactcactggcatctcattcggcttcggcaacagcgcattttaatttggcttcagccagttgtttttgaaggtcttcaatatcattcctttggattttagattgagccttgaagttagcttcatccccctttactttgtccaccaatgtaagtagaattttgtctttttccaaggcttcgtttctcatcttgataacctctgttcgaaggttgttgagagcaatagtgcagctctcgtttttgcattctttt

SEQ ID NO: 34746 - DNA, 458 bp, Zea mays
  unsure (1)..(458): unsure at all n locations
agcttcggggcatcagcaaagttcttttcggccgtcatcgccaaggggcagaggcgccaggggcttctgtggaaggtttggagatcanccaagaaaaatttacagcctattctgtggtgaagacaagggccataacaccaggatgtgccatgttaccatccagaagcagaaggagatagcagaagcagcagcgcaacaaagttagccgaagcaggtcatgcatactgcttcgtatcattcgccttatattccagaatatgtangcaaccaccctgcagcttctgttgcttcggcaagccaaccccaagcatcttggcagcagcctccacccgcaccaccaacacaaagaggtcagcagccagaagggagtcagcgcaataaccttcagcgggacttcagagaggagtccgaagctcgcacagtcaatagcactgtgctagagtcgaagaacatttact

SEQ ID NO: 34747 - DNA, 412 bp, Zea mays
  unsure (1)..(412): unsure at all n locations
ntcanaccctctacatctagtgttgatcatgttactatttgtactagatgtagagacattaatgttgatgctatccatgatcacctagctttaattaaacaacaaaatgatcacatagctcaacttagtgctaaaattaatgagcatgagatagaaaatggaaaatttaaatttgctagaagcatgctctatagtgggacacgccctggcattaaggatggcattggcttccaacagggagacaatgtcaagcttaatgcccctaagaaattgtctaatttgttaagggtaaggctcccatggctcaagataacgagggctatattttatatcctgctagttatcttgagcacaaaattaggagaattcatgctangaaatctcataatgtttcacatcatgcttttatgta

SEQ ID NO: 34748 - DNA, 445 bp, Zea mays
  unsure (1)..(445): unsure at all n locations
ctctcgcgagatctttccccgcctctttctaaccatggtaaattcattattgtatgtgatattctatgcatgtttaatctacttggtctcttggatggtgtattggtggcttcctaatttcaatggatggatgtatgtatgtgtgcactcgcataaagaacgatccggttgaagagcccgaggaactcgcangagaagcccctgagcagcagtcggttggtggaggcaagtgtcctttgacctatctctgtcctattcattatttaattcacctcccgctntacacatttatgcctaaggattgagctagctttgttatccatgtccttgattacctatttggngtggattattattgtttagctntatgctattgctcanactctaatcaatgaacatgatgagaatatctatgatacgctgttntcccttctcttattatgat

SEQ ID NO: 34749 - DNA, 464 bp, Zea mays
  unsure (1)..(464): unsure at all n locations
cggtgggattgagtgacacagaaggcctanagtgctctttatcctanaanaccctanattgtgacctatgaagtgatttcaatttctatacacttttggaccaaagtgtatgtatcaaagtggtagaagaaaaacaaccaagcaacttttacattggaggatttttaagtattatggagtaatttggacttaattgcaaaaagacccaagaacccctaaggggctaactctgaatttcagtggaattaggtcacctttggagctttgtatctcttgattcatgaagatttttctctaagtcaatacatcaatcttgtagagatatgataggagtacaactntgcttaagtgactaagcattgatgctatacaaaaattggagataaattgacatgataatggactgtcagtcaccactgaagactgaattatgaccaccagtgaaattggaagaacatggagat

SEQ ID NO: 34750 - DNA, 417 bp, Zea mays
  unsure (1)..(417): unsure at all n locations
gggccttcatcttccgaaggtcctcaaaaacacaactaacatgttttccaagtataatacattcacagggacctttggccttggaatgaagctatacacaatatgaaaagcgtggtctgggagaaggatgaaccagttccgaagctacgcgtggagaagcttcggcttagcggtggaaaatgaaaccgacttaaagagtaaaaggctatctagtcctcgatagattgtacttaagtcaatagtaaatataaagggcatggatgtaattntacacaggctgcgtcctgtgcctataaatagatgaacagtaacaccgtactgttcatgatgacttgtattcactcgcatgtcactcttgagctcacatcttttctgtaagctgaaggtacanatgtaattcactggtatttcatgttg

SEQ ID NO: 34751 - DNA, 439 bp, Zea mays
tgtcgacagctatgtcaatagcatcactagcgattatgattatatcatgcgcctccttgacggatgggttagcttcagggttatatggctcgaggggcagtgaaagctcagctgcattgaaacacaaatatctatcagtgccaaagctaaaaaacttacgaagatgagttataaagagcataccaataagtctcgcccgctcggcaacttcttcagctcttttggcctcttctaaagcctcatgagattctttctcattcctcttaatagcttcatcagcaatttctcgcccacccttcagccatatctcggaataaaatttcccacctaaggtagtagcttcgactgaagggtttctaacatcattagctgagaaggcaaagtttggctgagccacaaccttggcatgatcacagccaaccttctccaaaatggacgt

SEQ ID NO: 34752 - DNA, 275 bp, Zea mays
  unsure (1)..(275): unsure at all n locations
agtcgctntagagggcagtgtccccgcttggccaagtttgagctctggtgatggtactgagttggcttctgctggtttgttgcacactgcctcgggtggcgaccttacgcccggtcatcaattgatctctcatgatttgggagtcccttcgttcttctccaatctccaggtactgtaatatatcttgtctcgacttttgcaccgtgtaaactgctgttattacactcatctgttctccttatcaggctttggtggacgggatgactagccagctg

SEQ ID NO: 34753 - DNA, 475 bp, Zea mays
  unsure (1)..(475): unsure at all n locations
tacgttgctaacagcgacatatatccacgttgaaatcacgtgcttttattgttattggaacagagagctcatggcggcagctttgcatgaggcagtgatagagactcgagctctgaaagtgcatgtgaagctacatcattgcggatctgccagactgccttggcccatgggtacggtcgtagatagcctggggccgcgcgagcgtcatgggacagggtcacagggataatatttgtaatcagttgtcgtggcacgttggagctcgttgagaaccacaacaacgcggtggcagtgagctactgtccaaccttccggatcgtgcaagattttctctctctctctctctctctttgtgtctcactgctggttggaatatcggcaatgctacgcgaatggctaatatggtcaccatggatgatgctattgctcacctatcttanaatgggttaacgaaattccaaaatctcttacaatt

SEQ ID NO: 34754 - DNA, 423 bp, Zea mays
agcttctatgagaagacattgcggctagcctattataagtcgatgagcatgcttctctatttgtaagagagcactgccccgatgcgaatgcgcttatatgtgtcgacaacatcgatcgtgacctactttgtgtcctcggtagactatgaaggtgttgtagccagtcttgagagcatttgggcaccctaagggcagacttctaaagctcggctaactctcttgtcatggccagtgtcgaggcgagctcacagttggcttgctcgcaagtgtaagtggacttgaatgatgcatacactgtgatgatcccacgcgtgccgagcatcttcagcttgaagtatgggtagttggagacgaccatgaacttggcgtaacatggtctcctgagaatggagttgtacgaccctagaagtcaccacctcgact

SEQ ID NO: 34755 - DNA, 405 bp, Zea mays
tctttttctggttctttttcaatttccaagaattccttcttggtaggctctgaaagcccactttcagttccgcttgactttggcagcttctgccttaattttgtgtctttggaacttcggcagctatcttcgaagtagcgcttgaagattttatcggttccagtacatctagcacgttaaccattcttttcctcttgggggttggagtaaggtctttttgtgccatcggcattggcattggcacctcaactcttgctgaaggacttataatttccgatgtcttagtctcttcagccctcagttctcttctttttttccatctctggcattttagccggctcttcaatattcgacaggggagtccgctcctttgtttcggtggctgaagaggtctcaccgacaaac

SEQ ID NO: 34756 - DNA, 412 bp, Zea mays
agcttaccaaagtcactacgatgaatgtctcaagttgggtctcctcaagtctcaagccctcaagcatatatataaccaatattttagtccttttgtagacagtatgacaaatcattagtttaatcataagatgcataataagcataaattcaaaactatccatttgtttcatgtagtacacgcatgtaatgccaaaggttggggagtaggtaaatgacatggacatctgatgtttggaatttagttgttggtgttagtgatgctagtatgaacttgcaagattgttgtcaattcgtccaatctatttaactatttccatgatttgagggccaaatcatattgttctgcatttctattagcgttgtggtcttgaaaaatatggtcattttttcaatggatacactatcgacat

SEQ ID NO: 34757 - DNA, 444 bp, Zea mays
  unsure (1)..(444): unsure at all n locations
ntntaggtctagcatgccaaatggacagccaaaatggcttctttgtttcataccagattatcctatgcttatcttcatgcttactatagcgatctatcttcttgtaagttgccaacttcaaacccatctcattacttattgggaaagaaaattgtttcattgaacagtcataaaaaggatactcatttcattatctaaggggtgtttggtttaaagaataaatccattcgagaatgatgtggtgcatcatcatgagtccattccacaaatttggtggaatgaactcattcccccatttcaaaaatagtaacaatttccttatcgattttttcttagcagctaaccactangtcatgtgggtttctttttaggcacatgagaggcgcacaaccgaatcaacagtgagctagaccattggaaatatggggaagatattgtactatg

SEQ ID NO: 34758 - DNA, 436 bp, Zea mays
  unsure (1)..(436): unsure at all n locations
agcttgtttatcaaagaagatattgtaacatcatattctttacagcanaggtctgcaacacaagtgacatttccacttgtctggacaaacacctgctgtagccatcctctctaccgcgagtcagagttgattgaggaaaattgtgcaggtatatacatgttccttggagagtgagaaaccaatccatactttatagatttgtatgcaccatccatattgttacttgcactctactcatcaccagccacaatcatttattctgttcaggggtgagaaatgcagcccaacgcaaactatntgatgaactgngaatagttgctgacgaattacctgttgaccagttcatcctccttgggaggatgctntacatggctccttcagatggaaaatggngcgaacacgagtgtacatacttgatttaccttttgccatcaca

SEQ ID NO: 34759 - DNA, 427 bp, Zea mays
  unsure (1)..(427): unsure at all n locations
tactcctncctgtgaaaggccgctcatcatcttctatattttgaagcccgggacatacaagctggccaacgatcgaggtgaagtctacatcaacgcttggaacatcaaatagctacgtcgcttctacccataaaatgtttcaagtcattcatgtatctcgctttctttacatatataaataaagtctaaccgtcaaggaaggatcagccttgcctcggcaaagcccgaccctccctcgggggctagaaggggggaacccnctctgcgtcaaaattttccttggaaaagttttctaccaaaacgactttcgtgcttttcgactatatcgataacggaatccttaaaacgacgagaggaacacttaaacggcaaggccgaccgagccgatggactcctacgcctncgggatacngatacctcactcatc

SEQ ID NO: 34760 - DNA, 436 bp, Zea mays
  unsure (1)..(436): unsure at all n locations
agcttgccttcgcttcagtctatcatctgcagttttctgggtcgnggagcgcgccaatgggaagatcttcacagctgtcaagaagatgctcctcgatgaaaaaaaggcagatggaccgatttgttaccagaggcagtctgggcgctaaacacaactgagtgcagggcaaccgggttcactcctttccgccttctacacggatcggaggccatgaccccgcaagaaataaagcatgggtccncgcgtacagttccgtcagccgtccccgacgtggatgagccaacttcaaaagatctcattgacggagaccgggtcttcgccctacaggccctaaacaaataccaagcccagaccaaagcatggcgcgaccacgcagtcatcccgagggagttcagcgaaggggacctcgtactcgttcaaacagctcggacggagt

SEQ ID NO: 34761 - DNA, 434 bp, Zea mays
  unsure (1)..(434): unsure at all n locations
tctanagggagaacacgtgataggtctaaccaatgtaactttctaanaagatagaccttatgcagcttgtcaagcagataaacaagtaggaggagcacatcacaccaaaaatgtgatgaccacatcaagacctttggagatgcttcacatggacctcttcggacccgtcgcctatctaagtataggaggaagtaagtatggtcttgttatagttgatgatttttcccgcttcacttgggtattctttttgcaggataaatctgaaacccaagggaccctcaagcgcttcctaaggagagctcaaaacgagtttgagctcaaggtgaagaagataaggagcgacaacgagtctgagttcaagaaccttcaagtggaggagttccttgaggaggaagggatcaagcacgagttcttcgcttcctacacaccacaac

SEQ ID NO: 34762 - DNA, 370 bp, Zea mays
  unsure (1)..(370): unsure at all n locations
tagatcagcaagccaacaatcggtacgggccttaatcgactcagatggagacactacaaccagactcctttctcgtgcaaagcaagccaacaatcggtacggtccttaatcgactcagatggagacactacaaccagactcctttctcgtgcaagtcacccacccggtctcagctttataatataaacccaaagtttggtacctggcagaggtacatcttttccgatgttgaatccatcaaggccctgatggattcaccatcaagttctatttntgaaaactttccatccaatctgtagcatcacttttgttgtaaaacaaaacatcttgttgttctaaagccaggctgagcatcacaaaaatattttgt

SEQ ID NO: 34763 - DNA, 481 bp, Zea mays
  unsure (1)..(481): unsure at all n locations
tgctatcaacgtggacgtgaaggtcattacttccataactgttctaagaagagttcactacagatcacctccaagataaagctatcccagtcttcagacatggaatatgaacaaaaatgcacataaacttctaccaacaatgtaaagacaactccaccatgtaacttatcaagtcgtgcttgctttggttgtggtgatattggccatctttttaattgttgtcctaagaaagatgtggagatcaataaggtccaaaaaaaagacaacaccctcaaactcatggatcaacaacgaataaacaacaaaaaaagtacatgggaaggataagttatgcagtgacaggaaccattccatatgataatgcagtaattnttggaacactagtcattcacacaaccatcgctaccgtgttgtatgatcctcgtacaacacattcctttatcagtgcccagtttgcaacaaagtatggtatctttaagtg

SEQ ID NO: 34764 - DNA, 431 bp, Zea mays
  unsure (1)..(431): unsure at all n locations
agctagctacagnccttcttctatttctccatattaagaaccttactggaacactaccccacttaaaaagaatgagtgtagaactctcgaatcttgcggatttgaactccttgaagtacctcataacaagggtgttacaaggccttcttctgctgttgctgcttgaacaggctgtagagaaatgactgacacacggttgattctgggagaaccttcttcttatcttctcttcactatcttcttttctcttctcacttttcgcttttcactgcctctttctttctctttgctcttcccactggaggattctatcaaagagtattaccatcatacagaggaggaaaccgaagactatgaaccatgtgcaacagtcttcaacccaagaatcaccaagcattgtgatcttacgggcgagggagtggaaaatggag

SEQ ID NO: 34765 - DNA, 418 bp, Zea mays
  unsure (1)..(418): unsure at all n locations
ggctgcgtcgtacttnccttgaattatgtcaaagattttctattaacaaaagtcctgtaataattgatagtattcgaaatcaaaangttagctgtgttgttgaggaccttcggaagacgaacgcccccaacagtatcccctcacagtattagtttgttcctttgtaacaaattcagactgcgaaatgaatgacggcctttagccgaatgtccaaaaaacaccttcccttcgctagaatagcgagaccttctgtattgtggagcccatcgtgcagtggtgctctgcgtatatatgattgttcgcgttgaaaatatttgtcgggctatcaagcttgtgttgggtttgtcgttatagctttctgattctataaccgtgatagctttgaagcttcgactcttgtgttcaatcaacgctgaaa

SEQ ID NO: 34766 - DNA, 468 bp, Zea mays
  unsure (1)..(468): unsure at all n locations
agcttgtgaagattattcatcccaacatgtgctattctgggatgccagagccagcccatattagtcttagcaattaagcaagtatcgagttcagctctattgaaatcaactaagtatagatgaccctctaatactcccttaaaggctattgaataatcacttcttctaaagacagtaacacctatatccgtagaaagacaggtggagcccattttgcataattgagaaacagaaagcaaattgtgatctagagaatctacaagacaaaacataggaaatagagtggtcacgtgatatagcaatattacccagtcctttgactacaaccttgattccatccncgaatgtgatagctctttgcgtatcatgaattttctcgtatgaggagaacattctcttctcctcagtcatgtggttggtgcacccactatcaatgatccaacttgatgccccggatgcataaaccta

SEQ ID NO: 34767 - DNA, 463 bp, Zea mays
  unsure (1)..(463): unsure at all n locations
ntaccanatggacgtgaagagtgccttcctcaatggacctttcaagaaagaggtctatgttgagcaacctcccggctttgaagatattgagtaccctaaccatgtttacaaactctctaaggcgctttatgggctcaagcaagccccaagagcatggtatgaatgcctaagagattttcttatcactaatggattcaaagtcggaaaagccgatcctactttatttactaaaactcttaacaatgatttgtttgtatgccaaatttatgttgatgatattatatttgggtctactaacgaatctacatgtgaagaatttagtaggatcatgacacanaaattcgagatgtcgatgatgggggagttgaagtacttcttaggatttcaagtgaagcaactccaagagggcaccttcattagccaaacgaagtatattcaagacattctaaacaagtttgggatg

SEQ ID NO: 34768 - DNA, 148 bp, Zea mays
tgtcaagggaggacacacttcgggacttgccactggtctttatgataaagacagggctggcatcacctgtcaaggatctggactaggtagtggtcaccgaccacagcggaacatcactagcatcgactcgtcgtttgagctactccac

SEQ ID NO: 34769 - DNA, 348 bp, Zea mays
gcttattattactattatatgcccacaaaaattacccttatgacagaacccaccctagtttagaggtgtagtacaaagtggcccatttacacaacttttggtatttttgtctaaggcatagcctttttattttgaacctcaaattcctagaacaggctatattgaccaatggcaagtcactgtaatttgtacagaattttttggaaaaagtaaaccactgttgagttcaaacctcactagaattcataaatgaaataaagaaggaaaatgataatggaaatagtgtcatctaaacccttgtaaatgccactgaatataaaaggtataccatcactatgcttatctaac

SEQ ID NO: 34770 - DNA, 435 bp, Zea mays
  unsure (1)..(435): unsure at all n locations
tcgtcatccgaaagacaattaccttggaggaaagatataatttcagtcctccaatcttcactatgtactgnggaaattgcaagcactgctctctccataagttcaaccgaaggtgcttttattgtttcaaaaaatacttccaaaggtagagggagcccctgggccgctgatttggctaacacaactgcatgctcattttctcctcttggaatatttttgacagaaaaacctttgaaagaagcctccaaccttcgaactgtatctcgatatttttcaagcttcgggtctcttgtcttcctacttttgtctatgtggcctgaaatgacttgagaatcagttttcaggatggcccttcttattcccattgcccttaacttccgaagctccaacagaagtgcttcatattcagcaatattatttgtgcaactaaagtca

SEQ ID NO: 34771 - DNA, 425 bp, Zea mays
  unsure (1)..(425): unsure at all n locations
gctggatagtcttctgtgatggntcctgnggaaccttcngcgcaggagcgactgctgttctaatagcgccctctaaagtcagaatatgccacgcaacaaggttggacttcagttgtacaaataatattgctgaatacgaagctcttcttttatggcttcgaaagctaaagacaataggaataagaagggcaatccttaaaatcgactcccaagtcattgctggtcatatagacaaaagtagcaaggcaagagatccgaagcttgaaaaatatttggatacagtccgaagactagaggcttcctttgaaggattctctgtaaaaaatattccaagaggggaaatgagcttgcagatctgctagctaagtcagcagcacagggacttcctctaactntggaagtattcttcgagacaagcacctttg

SEQ ID NO: 34772 - DNA, 430 bp, Zea mays
  unsure (1)..(430): unsure at all n locations
tcaccgaggtacgcanaggccatctcgagggtctgatggtgcgtggaatggcttggttggccggtctacgtggccgtggctagcgcggccgctagcaccttgctcacggngcgaactccgccgaactcgagctctggttgggtcagtggcacgcgggggtgtacggtcgaggtcgggatggcttttataagcgcangcgtggacaaaaggttggcgcggcgcggggctgcacgcgtgggcagagcgccgagggcgtgctctggcgcgccagaacgcgtcaaacacgtggtcgtttgtttctgcctctgttcaaacgcttgcagggatcacaaacgtgtgaatctcgccaagggtcttgcgcaaatctcttcctggcacctanggctagctattttgtgtgagttccattgggagatatgccctaagtcac

SEQ ID NO: 34773 - DNA, 451 bp, Zea mays
  unsure (1)..(451): unsure at all n locations
agctntatcaaatagatggaaaaggccttcttattggacccatcaaggaagaggtctatngtgagcaaccttccggctttgaagatagtgagtaccctaaccatgtgtataaactctcaaaggcgctttatgggctcaagcaagccccaagagcatggtattaatgcctgcgagatttccttatcactaatggtttcaaagtcggaaaagccgatcctacactctttactaaaactattgcaaaagatttgtttgtatgccaaatntatgttgatgatatcatanttgggtctactaacaaatctacttgtgaagagtttagtaggatcatgatacaaaaatttgagatgtctatgatgggggagtngaagtatttcctaggatttcaagtcaagcaactccaagacggcaccttcatcagccaaacaaagtacattcaagacatacttaa

SEQ ID NO: 34774 - DNA, 452 bp, Zea mays
  unsure (1)..(452): unsure at all n locations
agctntccatctcatctgttatctgtcatttatatttattacatatgaaattatttgtttgagttatgtttatgccatctgtctcctcaaagcagataagattntctttttgattgggttatgttgtgagacatcaggtgctggtggtacagcgacagataaatcaaataaaaataagcggaaggctcccctcaagagatcaaaaggaagcttaggtagtctggatgttgttgcagtaaaaaataacaagtcaccggcaaagccttcaacttcttcctccaatgaaggttcttcacaaaggtaatttctttaatttttttgttatactaacagataaattattgaatccactatctctaatatagtgagagtggaagcgggagttctgaaggaagtagtacaaattcaaaaagtgtatgccattccattatattactctaacatttacttca

SEQ ID NO: 34775 - DNA, 439 bp, Zea mays
  unsure (1)..(439): unsure at all n locations
tggtgatggagctaatacccttttctggaaggacagatggttggatgggagatgtattaaggacatagctcctgctntgtttgagttggtgcctttgcgtcttgccaatggtcggttggtcaaagatgctctccctaatttccattggctctccgatgtgcaaggggcaatctcagtcagagtcatcgctgaattcctggaactttgtgaagtacttgatgctgttgtgctccagccacgaataagggatcatcatttatggaaattcagcgcttctggtgattattcttctagttctgcttataatgctctgttccttggttcagttcagttcgaaccagcagagcgggtgtggaaatcttgggctcctgggaagtgcaagttctttatttggcttgtggaacataataggtgctggactgctgacacgctcagaaaa

SEQ ID NO: 34776 - DNA, 440 bp, Zea mays
agcttttcagacagtaacaaatgtacatattactacgctgtacatttgagatattcactgcttcaggtaagaagtagctgaatgcaaaccttactgggggatgccaacgcctcctcaccacacacgacggcggcacaagcgtgattgaatgcacacttagcttttcctccgtcgcaacagcagtttgaagaacatcataggtagaaacaacttcgtcacttcgagaatatgtggcacaaaagtcatagctacaaccgccgccgtaaacgaagcacttacggtgtcaggagctgcatcaacggcagcggagcacttcagagcacacgcacaaagctcagccgccgcattcatggagccacggacaggagacagtgaagctagggttacagaccaggcaaaaatgggaaacgatgttgcaatcttaccgacaggtacatgga

SEQ ID NO: 34777 - DNA, 439 bp, Zea mays
  unsure (1)..(439): unsure at all n locations
ngaagccatggtaagtagcataggcaagtaaaatgcgaattgactcaagcctagctacgggtgcataggtttcaccgaaatccaaaccttcgacttgtgaatatcccttggccacaagtcgggctttgttccttgtcaccacaccatgctcatcttgcttgttgcggaagacccacttggttcctacaacattttggttaggacgtggaactaaatgccatacctcattcctcgtgaagttgttgagctcctcttgcatcgccaacacccaatccgaatcttgaagtgcttcctctaccctgtgtggctcaatagaggaaaccaaagagtaatgttcacaaaaatgagcaacacgagatcgagtggttacccccttatggatgtcgccgaggatggtgttcacggggtgatctcgttggattgcttggtggactcttgg

SEQ ID NO: 34778 - DNA, 418 bp, Zea mays
  unsure (1)..(418): unsure at all n locations
agctntaaaggttaatcttcacctaaaaggattatttgaatgttcttggcaaaggtatggaacaaattgtttcatttggtatgtgaccaataatagttcctttcaagtggcattctttcaattggtaataatctattttatggaaagaaatgccaatatgaaggttaaattccttttggcttaaatttgtaaattggtgcatattattaattcactcatccatgtgcattaatntaaaaggaatttaatttatgcctttatgcctcataaatgatgatttgtttgccattcatatatagatatcatcattccttaaatacttccttgtactactaatgcctcttttcaaagtgttttatcgactagttntaaaaggaaaagagatacaaagaaggaagtcttcacacatgatgaaaat

SEQ ID NO: 34779 - DNA, 466 bp, Zea mays
ggtaactgttaaaaaaatgtaacattgactacagttgattgcttacaatctgcaactttattatcttcacatcttgctcaactgtcacacccggctttaaggaacaaagccagatgcatctcatacatgcgccaagaagacaacatatataataacagagtgtatagagataaatgtcacaataatcagattatttattacatagcggaagacttattacaaaataaaataataaatataaaacgaactaaggttcgtcggcgccaatgtcaactgagaaacgccacctagatcatatcatactcctcgccttgtggctcctcctgaaccacctgttcttctcctgtgggggggtgtgagacagtaagggtgagctcacatatgttcatcgctcaacaagttgtggggaataatgtggcatgaactcaccaaaggtgggagttcatgaagtgtaaggctgatcaac

SEQ ID NO: 34780 - DNA, 363 bp, Zea mays
  unsure (1)..(363): unsure at all n locations
agcttccaaagccaatcccacaccacatnagattgattngagctctaagagacttacaaactggcacattttagagttgcaagttcttgtgatcttgacttcaattntcattntatctccctccccanttctcttgattgtaaagcgaggcaagagactccgttctttgtgtggaggtccttgtgggacttggtgtccctgagatagtggagaaaactcatatgatcttcgtgactgtgtgtgagagagggaaagtgttgatggagacttgtcctttgaggactccttaatggggacataaactctttggagttgaacctcgggaaacaaatcacctatgtctttgcattgagcacaatcttt

SEQ ID NO: 34781 - DNA, 383 bp, Zea mays
ttatagatcaatgataggatctctactagtattgtgtgcatctaggccggatatcatgcttagtgtgtgcatgtgtgcccgttttcaagctaacccaaaagagtgtcacttagtggtcgttaagagaattttgagatatctagttcacacccaaaatctatgtctctggtatcctaagggctcctttttcgatttatttggctactctgattcagactatgccggctgtaaagtagatcgaaaaagcacctcggggacttgccaattccttgggcggtccctggtgtcttggagctctaagaagcaaaactgtgttgcacattccactgccgaggccgaatacatagctgcttgtgcttgttgtgctcaattgctatggatga

SEQ ID NO: 34782 - DNA, 315 bp, Zea mays
atcaccgtaaccatcaggtgcggggggggggtatatattacaactgctctaaatcctatcatattgtgatgctcaaaagacaaacttgtgttgccccaacccgatagttcctcctgatgagtgaccttgtttaatgaaatccaaaacaaccagcttccacacccaattctaaaagtgtttactataggatggtcagagttcgaaatctttattggttgcgctggtaccttctgcacccatataaatggagaacttctttcgttctgttagttccctaatcctttgactaccaccatgtcatttgtgatggtttgc

SEQ ID NO: 34783 - DNA, 382 bp, Zea mays
acttggtgaacagtggttgggggtttccactccacaatatcttttaccttgctaggatctaccgcaattcctttagccgataacacgtgccccgaaaattgaatttcttccagccagaacgcgcacttgctgaacttggcatatagctgatgttccctgaggcgcgtcaatacaatccgtagatgctgagcatggccctcttcattcttagaatatatcaatatatcatcgatgaagactaccacgaacttgtccaactcgggcatgaacaccgagttcatcaaataggtgaagtgggcaggagcatttgtgagcccgaaagacattaccaggtattcaaacaatccataccgcgtagtaaacacggtcttcggtatatcct

SEQ ID NO: 34784 - DNA, 463 bp, Zea mays
  unsure (1)..(463): unsure at all n locations
agcattgagcatnttggtggtattattcaccataagtgtaagcttcttgtcatcaatatcatcatcacttgagctctcatcttctacttgcacttttactttgtcctccttctcaggattacctttaagagccaaatccttcttatttcaagaagaggtatgacttgcgggattcaaatacattgagaaaccaagtgggcggatctatagttcattgatgtcgtcaaagatcctggtgctccagctatttaggtaatcataacagtaaaccttcctctgtattgatgttcggattggtgtagctgttgaggaatcagggctccgacgattgatgatggccggctccaatgacgacaccattgaggtcgactgcaacgaggagaggtggttgtgtgggttggccaaagatgacaatgaggatgacctatgggatgatgctacaaagcttctttgtcttaacact

SEQ ID NO: 34785 - DNA, 435 bp, Zea mays
  unsure (1)..(435): unsure at all n locations
ntatcaaatggacgtgaaaagtgccttcctcaatggaccaatcaaggaagaggtctatgttgagcaacctcccggctttgaagacagtgagtatcctaaccatgtttataggctctctaaggcgctttatgggctcaagcaagccccaagagcatggtatgaatgcctaagagatttccttattgctaatggcttcaaagtcggcaaggccgatcctacactctttactaaaactcttgaaaatgacttgtttgtatgccaaatttatgttgatgatatcatatttgggtctactaacgagtctacatgtgaagagtttagtaggatcatgacacagaaattcgagatgtcgatgatgggggagttgaagtattttctaggattccaagtcaagcaactccaagagggcaccttcgtttgtcaaaccaaatacac

SEQ ID NO: 34786 - DNA, 450 bp, Zea mays
  unsure (1)..(450): unsure at all n locations
agctntgccaaataggacgtataattataccttttatgtcttctcgngctgataagtcattcttcacataaaaccattctgtcatccaatccccgggccatctcttccgaaaggttggtacgggacagcttgccccggaccgagaaacgaagctgtagcagccaaagttgttatggtactgttctttgccccaaggctttgtttcatacaataattcatgaacattacagaagcttcgtgcgtcaggcttcagaccttggctcctcgcggcccacacgaagatatttagccttataattgcctcgggagtaagttgatgaagatagacttcgaagattttcaacacctncacgacgaagctgctcaaggtgaatcgcaatccagctttcanaaagcttcggtacaccacaacttcattttcttcagggtgtggacaagttttttcccctt

SEQ ID NO: 34787 - DNA, 447 bp, Zea mays
  unsure (1)..(447): unsure at all n locations
tcagggtatnggntatgtaatgtgatgtattactatgaagcctanatgctgttttcagaaacatgatagttttttttcagaaatacttgtttttcagtttgtccaaaacttctgtaatgtgatgttttactatgaaatgtaatgtgatgcatcaaaagaaaattagtggaccaaataaacactgattgcatttttcttcatttcatgctaccattgtctttccagggagcaacaattgtggaccaaattatgaacataacccctgctgaagattacatctacatccctgttactgaacaagtacactactaagctaattagtttatgtaaatgcaattggtccttaattttaactgagatatatattntaaaaatcatgcagcaacttatggtccatgaggtgacaagtagaagttcagcttctactgcagaattggagtactcctc

SEQ ID NO: 34788 - DNA, 383 bp, Zea mays
  unsure (1)..(383): unsure at all n locations
agcttagtggatcctttattcttaagtcaanttgatgctcatgcttaattnnggntcacataagatgatggttcttgggttagcacttgagagaaaccctaggtgacactggggtgtcacagtggcctcctcaacgaggactagtttctttggaaccgaacctcgataaaacaaatcaccgtgtctacttgctttgatcctcgcttgatttgtttgccctctttcctctctctaacgtgtccttgctattattaatttgagtttgctcccatacgtcatccacatcctttgagcaactcttagcaagagaaacattctttcgagcttaaatataattctaacgctaatccctgccctagtgtgtggttatgtttataaaattc

SEQ ID NO: 34789 - DNA, 259 bp, Zea mays
ttgataactcatttttatacaaaaccctgtgcagactggaagctgggaaacaagagggaggaacgcataacggcaagaatgtgatgaccacctcaagacccctggagccgctgcatatggacctcttcagacctgtcacctatctgaacataggagggaggcaggtcggtgcacttattgatgaagactatgcccactttacttcggtgaactttctgccgataagattgaaacccaaaggaccctcaaacgcttcctc

SEQ ID NO: 34790 - DNA, 352 bp, Zea mays
  unsure (1)..(352): unsure at all n locations
agcttgagaaggggacaacttgttcatgcactttcccgcttcaaaataatgctaagttccctaagaaaggcatgagcaaacatcaagagaagaaagccaaagctcatgacaagtgcctcaaccatgcctccacatgctccacacaaggtaacaaacaagccactcttccaaataagagaatatgcactagaaagtgttatcaatgtcatgagaagggacatgagattaagtcatgtccctacataaaagatagtggcttaactttagaaagaaagaggctcactaaccatgtagcaaacaaaaagcaaggcaagaaggagtcttgcaaaattaaaaatcagatntgctacac

SEQ ID NO: 34791 - DNA, 448 bp, Zea mays
  unsure (1)..(448): unsure at all n locations
ctgtcatgcatattttgatccccgtctcttgattggtccatcaagggtagtcaacaaagatctaggaacccagatgtcctctgtgctagcacttggtaaactcattacctttctagcacaagttgcaattttggattgtctagttaatatgaatcaattgacaagttaggggcgggatagttaccaataggacaatccttacattgatgtcctttctttcggcatatgtagcaaaggcgatcttcatgtcttgaagatttcttctttacttgtttcttgcttgctacatcgttagtaaatattttcttttctaaaactatgcctttntgttttatatagggacatgacttaactaaatgtcccttctcagagcatctaaaagaatatntatcatccttgttaataatcacagccatttctttaatatatggacatgacctaatcaagt

SEQ ID NO: 34792 - DNA, 391 bp, Zea mays
  unsure (1)..(391): unsure at all n locations
agcttgtatttatggttacaagcgggcgagattggaggagaggctcccaaagtcttggcttggcggcggccggcggngctccggcctctgggttctcctcttgttcgtcaggggttcataagtcatgagtgctctatggtctaaggggatcgtangctatgagtgggaagaggactgacgccgcagttgtgactcagtgccaggcgcagttaatgcggtcagtcacttatgatggaccaatctcgggtcaggtgagcgatccactcgagtggtttccattcggtatgcccagcccctgttagaataacctcaagatagagggatcctganatttggaaattttanggtggtgacaagagattagttaaagaacaacctcaagagtgagtag

SEQ ID NO: 34793 - DNA, 267 bp, Zea mays
  unsure (1)..(267): unsure at all n locations
ggccttaaatctcagctaaggctattattaacaatggcttngttactatcatcagggcgtgcagacaagctgtgatgcttgctgaaatgtctggttatgtgagctatgtgtaccctcgatatcgtttggattatatagtatcttatgttaataattggttaaataaaaacctctatagtaatagttctcctagatcaagtagtattttcccacattctcacataatagcttaaccgtaatttgatacctttattagaaacctttttt

SEQ ID NO: 34794 - DNA, 440 bp, Zea mays
  unsure (1)..(440): unsure at all n locations
ttttcttttnntggtcgntgaccttaagtttaagtgaacttnntagtcaatgtgatccctnntttttgtactttctttgtttttggcccaccaataaggggaggcctctnntaaagtctgtannattcttgtattgtgtccanncttggacnncttaatcnntctttcttcnnttaatataatnngaagcacagttcttcctgccgttttcgagaaaaaaaaaaaaactactagctatttgtaacaaggggcagagacagggccagtgctcggggtgctggagcaccagtcctatagcctgttagtcttagggtgaatcatataatatctggtataaaaccctagtatttntactcatttcaatttagtttagcacctgctcactagatagcacacccttgaagggttttcttggtctgccctgatttgaaaattgtaac

SEQ ID NO: 34795 - DNA, 431 bp, Zea mays
  unsure (1)..(431): unsure at all n locations
tcatgaatgatggcttcngcgtcacgtacgagcggcttcattcgaagctgtttctttntgcaggaccttcggcgacgaagcatggtcccaacagatatgaatatagaaatagaggttgctggctcaaaggttaaggatgagtatgaccatctttacgtcgatgatggacaaaagaaagacaatcaaagaagacctatcctatataggaaggggtcttgggacattatggagattgctcgttgagtatgtaagtgaacatatcaagttggaatccatcttaaatccataatgaaacaaagagtgaaaaaggctacagatggaggagaaggcgagtgaatcagagagtgaggtgtgtgaacgaacccaaataccctctctttttgagggtggattcaagttatntttggttttttaaatccaatggtaaaatg

SEQ ID NO: 34796 - DNA, 377 bp, Zea mays
  unsure (1)..(377): unsure at all n locations
agcttctaaagggagagcacattntagggctatatcaatgttcatttgagaaagacagggtttgtagcgcatgtcaagcaggaaagcaaattggagcctatcatccacacaagaacatcatgacgaccgataggccgcttgagctactccacatggatctattcggcccgattgcttacataagcatcggtgggagtaagtattgtcttgtaatagtggatgattattctcgcttcacgtgggtgttcttttgcaggaaaaatctcatacccaagagaccttaaagggattcttgagacgagctcaaaatgagttcggcttaaggatcaagaaaattagaagcgacaacgggacggagttcaagaactcacaaatag

SEQ ID NO: 34797 - DNA, 427 bp, Zea mays
aaatgctcccaagaatgaatttgaatcacatttatatccctgggataccaaaaaccctaaggccttgttcgacacgctagtatttaatacatattgggatccaatacacggtgggattgagtgaatccatcccatgtcacttaaaccatgtgtgtttcaattacagctggaatttaatacatggctaattttccattgtttggttacaccacatggatacattaatttgttgcatgcatataaaaagatcagtgcccatcgtattatgtctgtgaagcggatgaaagcatcaaaatcaaaagttggccactcattgtctcttattacattacaatagagtgtgtgcatttagattaagaacaaaccaaagggagagagctaatgtttcatttgaacaacataacatactgtctatccaacaagcaat

SEQ ID NO: 34798 - DNA, 415 bp, Zea mays
  unsure (1)..(415): unsure at all n locations
atgcaagctttgaggttcttcatcccacatgtgctttatggcgatgttctagccagcccatgctagtcttagcaattaagcatgcatctagaccggcctcttttgcaaaatcaactaaataaagtttgccgtctagtacacccttaaaagctaatgaaccatcacttcttctaaagtcacacacatctacattggtgaataaacagttatatcccatattacaaagttgactcacagacaacaagttatatccaagcgactcaactaagaacacattagaaatagagtgctcggatgaaatagcaatttttcctaaccctttcaccttgccttggttcccatcaccgaatatgattgaatcttggggatccttgttcttgacgtaggaagagaacatcctctnttcccccgtcgt

SEQ ID NO: 34799 - DNA, 393 bp, Zea mays
  unsure (1)..(393): unsure at all n locations
tctcttggacaagtgccgcacttaccgctgagtgcgaagctgccacatattacaacagaggagcccctggcgttggtggagttaacgtcgctaggtctatcaaatattgcttccgctcttcgaaggctctctgctgaactggtccccattgaaaaacttcggctgactttagcacttcgaagaatggtgaatntctctctgctgatctaaatatgaatctgttgagagatgctagtcttcctgtcaatcgttgagcctccttctttgtgcttggtggttccattcgaacgatagcttccattttatttggattaacctcgatccccttttgttgaaactaagcaaccaaggaatttgcccttctttactccgaagacacacttttcttgattc

SEQ ID NO: 34800 - DNA, 407 bp, Zea mays
  unsure (1)..(407): unsure at all n locations
gcaagctttataggcgatagcttctgcgctgctttttagatgacctgtctaaggtgtttctttctttangatcttcggctacgaaacatacccccaacagggaggatataagctcatttacaggggatgacatagttttgttctcttctttcatttcatcactaactttcataactatgtcatattttgcatttaaaaattcattttcatctttcaacttatcacatttagctctttacttcctaatgattggagtgtattctttaagcaagtcagctagttcatcataggaaggtgaagcanattcatcatcactatcactatcatcaataatatcattatagatttgtaccttccattaacctctagccatgacgcatatgtgagaagtctatgatggtgatggt

SEQ ID NO: 34801 - DNA, 407 bp, Zea mays
  unsure (1)..(407): unsure at all n locations
taatacccctaaaagtttgtctaatattgttaagggtaatgctcccattgctcaagataacgagggctatattttatatcctgttggttatcccgagcacaaaattaggagaattcgttctaagaagtctcattctatttctcatcatgcttttatgtataagaatgaggcatctagttctaggcaatccactaatgttaaattgcctaaaaagaaaactcctactgcatcaaatgagcctattgtttcatttaagacttttgatgcttcatatgtgctaactaacaaatcangcaaagtagttgccaaatatgttgggggcaaacacaaggggtcaaagacttgtgtttgggtacctaaggtgcttgtttctaatgtcaaaggacccaagaccgtttgggtaccta

SEQ ID NO: 34802 - DNA, 367 bp, Zea mays
  unsure (1)..(367): unsure at all n locations
gcagcttgtaaaatcactccacccaaatccgttatccctggtgtgatgaaaggagnattnggggagcccgtgagagccccaccttaaaaacaagtgtggtgtccaaaacctaaccatcttatgaacgcacttgacatcctacctgacatctctagtgatcctttttctagagcctcccaaccacccaaaaagaactactcccacaaacatatttcacccaagtcagaggtgaggttccatcgcgaatattgtgaaagggatggacatttggctgtgttttgctttaggaggaagagagatgagcaacatggttctgagttgagtagagggaatatgaatcgtccatctcatggtgttcatgagcttt

SEQ ID NO: 34803 - DNA, 463 bp, Zea mays
tatgaagattcttcatcccaacatgggctagtcgacgatgccagagccaacccatgttagtcttagcaattaagcatgtgtcgagttcagctctatcaaaatccactaagtatagctgaccctctaacacacccttaaatgctattgaatcatcacttcttctaaagacagtgacacctatatcagtaaaaagacagttgtagcccatttgacataattgggaaacagaaagcaagttgtaatctaatgaatcaacaagaaaaacattggaaatggaatggtcaggtgaaatagcaattttacccaaacctttgaccaacccttgatttccatccccgaatgtgatagctcgttggggatctttgtttttctcatatgaggagaacatcttcttctcccctgtcatgtgggttgtgcacccgctgtcgagtatccaacttgagccccggatgcataaacctac

SEQ ID NO: 34804 - DNA, 379 bp, Zea mays
  unsure (1)..(379): unsure at all n locations
agcttcatgggctattggcggagcgaaccgttctggtggcactttctgcaagtgaccgggggaggctggccacggtggccgaggctcanatagcttggcgggcgatggcgcancgtgctcggggcgcattacggtgatctttggctcgggcaggacttgtgagtgcgcggggaggtatggccgaagctcggggctgctttatatgcacgacgcggtgcacgggcggtcatggaccggcgagcgcgcacgggcgtgcactgaggagcgagggtgcacgaaccggcgtgaactgggggagtcagccacgatcgaacacgtggaaccgttgcttctgcccgagttctaacgctgattgggcgcacatctttgcgaatttggg

SEQ ID NO: 34805 - DNA, 381 bp, Zea mays
cttagaaactcaagctttacagaagaaagaggagccttcggcagccaagaagtatgctgggccttaatagcggaggattgttattgtgattgaagctattgaagaaacaccaccgccggcctcagcgtcaaaaacaccagctgccgaagacgctacagctaccgaagctgcccccaccgaagctacaactggcgaggctgatacgggcgaagccacgaatctggagagcacattttttgatattgataaaatgctcttgaatatggccgcggaagaagctgctgccgttgctgaagagaccctagccacaatgcctggaaaagggaaaaagatcgccgaagatactttgaaggaacatgaccttcaattttaaagcataat

SEQ ID NO: 34806 - DNA, 452 bp, Zea mays
  unsure (1)..(452): unsure at all n locations
agctngagtattnnccatcatgataagtatgcttatcctcgngacatacaaaagaatttcttcacgaagcatgaaaagaagggaaggtgttttttcgccgaaggctcaaaaaatggtatgtatgcaaaatttcatgcatcgtaaagaattgaactataaatagattatatattacattcaaagttacaatgtattacacatgttacgttccaaatgtttctacaatagcatttagtccttcttaagaactatttctgcagcttcgttcagtagctggtcgacaaccttgtccatgatggctcttgccatttttctaatttcatcgtcccccttcgggtgggggcccagggatgcctcaccaggttctgagggaggagaagnacggctatattactattancaaaccgcgaacaattctggaatcaaaaattacaacagaataaaaaccacta

SEQ ID NO: 34807 - DNA, 425 bp, Zea mays
tctcctataaaagtgccgcacttactgcagagtgcgaatctgtcacatacaagagccaaggagcccctggtgtgggtggagttaacgttgttagatctatcagttattgcttcagctcttcgaaggctttctgttgagctgatccccattgaaagactttggctggtttcagcacttcgaagaatggtaaatttctctctgctgatctagatatgaatcgattcaaagatgccaatcttcctgtcagccgttgagcccccttctttgtgcttggcggctccatccgaagaatagcttcaattttgttcggattagcttcgatccccttcattgaaactaaacaaccaaggaattttcctttctttactccgaagacacatttttctggatttaatttaaggccagcttgcctaaaattagcaaat

SEQ ID NO: 34808 - DNA, 452 bp, Zea mays
  unsure (1)..(452): unsure at all n locations
atgcaagcttctaagggagaacatgtggtangtntgtcttacgtgctattcgaaaaagatagaccttgtgcagcttgtcaaacaggtaaacaagtgggaggagcgcatcacagcaagaatgtgatgaccacttcaagacctctggagctgctgcatatggacctcttcggacccgtcgcctatctaagcataggaggaagtaagtatggtttagttattgttgatgactnttcccgtttcacttgggtgttctttttgcaggataagtctgaaacccaagggaccctcaagcgcttcctcaggagagctcanaatgagtttgagctcaaggtgaagaagataatgagcgacaacgggtccgagttcaagaaccttcatgtggaggagttccttgaggangaagggatcaagcacgagttcttcgcttcctacacaccacancaaaatggtgt

SEQ ID NO: 34809 - DNA, 442 bp, Zea mays
  unsure (1)..(442): unsure at all n locations
tactaagcttctnagggagaacacgtgataggtctaactaatgtaactttctaaaaagatagaccttgtgtagcttgtcaagcaggtaaacaggtaggaagctcccataatgccaaaaatgtgatgacaacatcaagacccctggagttacttcatatggacctcttcggacctgtcacctatctaagtataggaggaagtaagtatggtcttgttatagttgatgaattttcccgcttcacttgggtattctttttgcaggataaatttgaaacccaagggaccctcaagcgcttcctaaggagagctcaaaatgagtttgagctcaaggtgaaaaagataaggagcgaaaatgggtccgagttcaagaaccttcaagtggaggagtatcatgaggaggaaggaatcaagcacgagttcttcgctccctacacaccacagc

SEQ ID NO: 34810 - DNA, 373 bp, Zea mays
  unsure (1)..(373): unsure at all n locations
agcttcagcacaaataatatataaatatggcgatagaggatcaccctgccaaagcccccttggtggccatatagttcttgtaaactccccattcactctgantttatatgatacagtagtaacacagagcataattaagctgatccacttctccgagaaacccatcctcctcatgattctttccaaaaaggaccattccaccctatcatattgcttactcatgtctaatttaaaagcagctagaccataattcccttctcttttatttcgcagatggtgagtcagttcatatgcaaggagaacattgtccgttatgaggcgacctggcacaaaggcgctctgtgatggagcaataatctctggtagaatggac

SEQ ID NO: 34811 - DNA, 458 bp, Zea mays
  unsure (1)..(458): unsure at all n locations
tatctcaacctgagaggaaagcttatcctaatgggtgatgtgttaatttaagctgggctagtgtgtaattcatatgcttcttgcagtattatatgtgttgcatcatatggactagtgtttccgctacgatgaattatttggcttctatagtgtaatagatagtcatgtggttaatggtgctttaagattaaaggtgctttaagattgctttaaattggtatcttagtttaaactggtatcttaatggtgaatagtggtaggttgatattcctgtgatatatccactaatttgaatggtgtttaactctgattatgtgcatttgtgtgttatagcatcatggtttgattcttgacacaatgcatcctanaaagtgctaaggtgtaganaatgttcgaattgcctaagtatgtgcanattggcgtctgaggccacaattatgtttctgaagtaagcacat

SEQ ID NO: 34812 - DNA, 347 bp, Zea mays
  unsure (1)..(347): unsure at all n locations
agcttgaaggagagaaaaatatgaaagaactctttcagctgccttacatttcaagttcaagaaacatttcaaataaccctgccaagaatggttggatacaattgaagttatgtgcaacgagattttaggcaattatacgagaaaagaagatcggttgatgactgcagccttcggcgctcgaccgaagcgaagattgaatcgggtaatggatgccctgaattttgaatatcctgactatgagcgattgaacaagggcgccgaagggcaaaaaagaaaaaaagttgtcagtgttgtgggcagacaggccgctagaatggtaaaacaatatgaagaanacctaacaaaga

SEQ ID NO: 34813 - DNA, 415 bp, Zea mays
  unsure (1)..(415): unsure at all n locations
tgaagcttcctttgaagggttttctgtcaaaaatattcctcgaggagaaaataaacatgctgatttgctagccaagtcagcagcacaggggttgcccttacctttggaagtatttttcgaaacaataaaagcaccttcggttgaacttcttgaaagagcagtcctcaatatatctcctgtttatagtgaagactggagaactgagatcatctctttccttcagggtaactttctttcagatgacgaagcttataacaagagaatagaggcaagagctcgaccatatgttataatagaaggggagctgtacaagcatggggtttgttctccactactcanatgtntatccagagccgaaggtatagaattaatgaaggaaatacacgtaggcctgtgtggatctcacattggatct

SEQ ID NO: 34814 - DNA, 394 bp, Zea mays
  unsure (1)..(394): unsure at all n locations
agctntaaattaatcaatgatatggttgtcattttattttttcaccaaattaatgaatgagatgaccaatattaatcaatgacaggttgtacccctctgattatcttgtactagtaaatgatgtgcgccctgcgtgcaatatcaaatacgtgtgttagaagtatgtttttttagtatgctggtaatataactcttgcagaactgtagtaacattccaaaaacaagatcatagaanattatgttaacagtgtttgtaaacatttatacatctccagtaaagttgtttgttctagttgtctaaaagatcgacatgtatatacatataanaggggtcgtccatgtntacatatgtccaaagtgcatatgcatacaaaatactttagtggcatattat

SEQ ID NO: 34815 - DNA, 417 bp, Zea mays
tatcaaaattcaaagactatgtttgccgaatagcttactatgagtggatccttaaaaattcatttttattatcaggttaagtagttacatgcatctagagttctttctatcctagatcaggcacttggtctaagctagccgtcttttgtcattccttcagttcacttgattgctacgtgtagggcagtgaccaagtcttcatgtccgagaagtaacgacgatccgaatcgattagtacccagcttgggatctctaaccacacgacatatgtagcacttaacccttgcatatgtcaacttgccaccaggtttctcaagaccagaatgggttcacgccaaccgagagcacagatacaccaccgtccagcctcttgccacggagggtacacgctactctcgccatctctacactcccatt

SEQ ID NO: 34816 - DNA, 438 bp, Zea mays
  unsure (1)..(438): unsure at all n locations
agctnttatagggagggcactttttatgattaatcaaatgttcatttgagaaagacaggatttgtagcgcatgccaagcaggaaagcaagttggtgcccatcatccacataagaacatcatgacgactgacaggccactggagctcctacacatggatctattcggcccgatcgcttacataagcatcggcggaagtaagtactgtctagttattgtggatgattattctcgcttcacttgggtattctttntgcaggaaaaatctcatacccaagaaaccttaaagggattcttgagacgggctcaaaatgagttcggcttaaggatcaagaaaataagaagcgacaatgggacgaagttcaagaactcacaaatcgaaggctttcttgaggaggagggcatcaagcatgagttctcttctccctacaccccacaac

SEQ ID NO: 34817 - DNA, 436 bp, Zea mays
tctaaagggagagcacattgtaagactaacaaatgttcttttcgagaaagacatgagttgtagtgcatgccaagcaggaaagcaagttagtgctcatcgtccacacatgaacatcatgacaactaacacgccgctcaagctactccacatggatctatttggcccgattgcttacataaacatcggagggtataaggactgcctagttattgtggatgactattctcgcttcacttgggtgttctttatgcaggataaatcacaaacccaagggaccttaaaaggattcttaagacgagctcaaaatgagttctgactaaggatcataaagataagaagtgataatgggaccgagttcaacaattgtcagattgaagggtttcttgaggaagagggcatcaagcatgagttctcttctccctacacacctcaacaa

SEQ ID NO: 34818 - DNA, 441 bp, Zea mays
taaagcaatggtcagtagcataggcaagtaatatgcgaattgattcaagcctcgctacgggtgcataggtttcaccgaaatccaaaccttcgacttgtgaatatcctttggctataagtccggctttgttccttgtcaccacaccatgctcatcttgcttggtgcggaatacccacttggttcctacaacattttggttaggacgtggaacaagatgccgtacctcattcctcgtgaagttattgagctcctcttgcattgccaacaccccatctgaatctcttaaggcatcttctaccctgtatggctcaatagaagacacaaaagagtaatgttcaaaaaaatatcgccgaggatggagttcacagggtgatctcgctgtatcgcttgatggactcttgggtgaggcggtctttgaccctgttcttcttgaccatcttc

SEQ ID NO: 34819 - DNA, 446 bp, Zea mays
  unsure (1)..(446): unsure at all n locations
atttcgtatccgaggttcttagtttatcaaagaaaaattatacagaattggagaaggtactgtatgctgttttgatagcctccaggaagcttcggcattattttcaagcttataacataattgttccttcttcgcaacctttgaaggatattatgagaaaccgagaagctactgaaaggattggaaaatgggctgcagagctcaatgaattttgtattgattatgttcatagatcttcgattcagtcccaagcgttggcagacttcattgctgactggacgccaggggctcaggaggaagaaacgaataaagatgccgaagcatggacagtgttntgtgatgggtcttggggaaccttcggagcaggagcggctgctgtgttggtttcaccatcccaaagtaaaacttgttatgcgacaagacttgatttagttgcacaaataata

SEQ ID NO: 34820 - DNA, 392 bp, Zea mays
acatgcctctaccaagaccacccatatggtgcaatgatacacacgccatatatcacatcacgagcgatcttgataacctagctaagcgagaacagtatcatgtgacacggtgcaagtgggcaacatggcaagtttgcaaataaacacattggttcctattatatcaatactatacatgacctctcgctcttaacaatgttctttatgttcccaaaaattctaaacaccttattttagctcatagattatcctatataacaatatctatttgaatttcatccgtggcattatctcgttaaggattgggcaacacataatctactcatgacaagatattgtgaagctagcctctatcaccttaagtcatctaatattgagttcaaagcactagt

SEQ ID NO: 34821 - DNA, 483 bp, Zea mays
  unsure (1)..(483): unsure at all n locations
agctttctttgaacacccgatcatcaacgccatgtttcgtcacacttatgtttaagtgtaaatccagatacaccttttatatatgtcaggatcaaattttacatatatatgacgacttggtgtatatagaaactacacataacgaaatgttttacaaaaataactaaataaaataaactgcagtaagataacttctccacagacgtggttgactggcggacaacggactaaatctcatctagctcgccatggtagtcctcttgtgacggtacatgttcttgtccttggctttatttatagcaagtgtgaggtatcatacggttatctgttatctagctcaccatagtagtcatcctctgacggtacatgttttngtccttggcattatttatagcaagtatgagatatcatacngttatcgttcagcaagtgtttagtaacaagtgttctgaaaatatatttttagataaaggaagcttatat

SEQ ID NO: 34822 - DNA, 447 bp, Zea mays
  unsure (1)..(447): unsure at all n locations
aagtgttagcacaattatggtctagtggtcttagtggagtccaaacacagtaaccacaagaaatcaatcacagagatgacacggtggttatcccgtggttcggccaagtacaaaacttgcctactccacgttgtggcgtcccaacggacgagagttgcactcaactcctctcaagtgatccaatgatcaacttgaataccacggtgttcttgcttttcttttctcaatcccgtttgcgaggaatctccacaacttggagcctctcgcccttacaaaagatgttcacagagaaacacggagcaagggagggattagcaacacacacaaatccacagcaaattgcgcacacacacggccaagaatcgagctcanaagactatctcgaagttctcactagaacagagctcgaatcacttagaatgacaaacaaacgcgcaaagactgagt

SEQ ID NO: 34823 - DNA, 423 bp, Zea mays
agcttattacttgacttaatgatatattgaccttttgtttggtcgtttatatgtgacaaacccttgattgtccaaagtggttatttcacagaattgctttggatagttctttgagcatttgccgttcttcatgcaaggagagtgtggattcaatgaaccgcaaggaccatgtatcatgtgctctgcaactaagcaataagctagaggatcaactagcaggtctggtatttcagcattgatgaatgagtctattatagcaggtgttggttgcgtagtgtcagtggagacccaaaatataatatgtgaatgaggaagacctcgtttttgaaattcagttgtgtataaaactgtaaggaaaaatattggaacatgtgttaggataacttaaagtacatgaatgtgaatgatgtacataaaaggtat

SEQ ID NO: 34824 - DNA, 447 bp, Zea mays
ctctacgctcgcctaagccaagaagataaggcggtcatgctcaaacttctagaaagagcgaaagagcaaagcgaagctcgtcaaaggctagaagatattctctccataaagatgcaacactttgacgagttgactaaagaacatgaggagctaaagtgctctcatgatgatttggtccaaaggtatgaaactatttcaattgagcaagataacacttcacattgtatcgctcaattagtaaataggaataccttgctcaaggaccaagtagaaaagctaaaagttgaaaatctagcttttcaagataaatatgatatgcttctatgttctcatgaaaatcttatggataatcatatcatattaaacattgctcatgagattgtaatagagaacttaaaatcccaacaatctcattcgtgcacatgtattcaaattgatactatatta

SEQ ID NO: 34825 - DNA, 417 bp, Zea mays
  unsure (1)..(417): unsure at all n locations
agcttgacccttaattgctaagtgtaccaagaaaatcttcagtatttaaaataagccctaccttattaaattgatcatccccccatcaaatcttaattgtaattacatatcatgccatgcatatatcttactcattgcattcattagattgcaatctcgctgacggagagtacgtgctcatccctgagcaaggagctgtccacgaggaagaccaggagcaagctcccgagactgccatcgaggatctcctcatagccccagctattgaaggcaagccccggttttatgcataaccatatctatatatgctattttactacacttaatgtttgtaggattgtaatgtgcatttaagtgtangagttgcttgaaacccctagttgcatgaactcaggattcctttttgagatggatact

SEQ ID NO: 34826 - DNA, 450 bp, Zea mays
  unsure (1)..(450): unsure at all n locations
tggagcggcttattntctatggtggtatacgtntttttgcgtttgattgttgcagacgattataatctacgagttggttggggtgccaccgatgccatatggaacccctcgctggcgggtctggtcgagtctggtgcgcttgtacgcgtatcgtggcattggtttggcccaatcccggcgtggtggctgctaaacttcgtggagctcgaggacatgtggatcctcgacacctcgcacctctccgaggactccatcgccaacgtcaagcgcgtcctccacaccgtccaacctgacaacgtcgtcgtctagctctgccggagcaggcaaggacgtgcctccccttaaatgttatgccgcttaaacaagtgttgtcagatctttttccgggagcggggcttactgacgtcgttgcagagccatcacttcagagctggaatcatgtactcgtct

SEQ ID NO: 34827 - DNA, 338 bp, Zea mays
  unsure (1)..(338): unsure at all n locations
acctgaggcatgcaacgnccatgtatatatttcggattaanaacaagatccaactcttactatctatggnnctagagntatcttggtcttgcaggcgagattgccataagactggtgtccacgctgaggtgagcggtacgggtgctgaatcccgacgggagcgggggaaccaccatccaagtgacgacgttccgcgcgctcagcccgcagcaaggcgatctcagcacgagccctactcagctcgtctaatgcatggtccagctccgtgtttagcacggcggctaggtagactgtgctgctcaacctaagattgccctcaccgataggtgagacaatca

SEQ ID NO: 34828 - DNA, 242 bp, Zea mays
cttgaaccaacccagatggaaacaccctagtgtgggggcactatctatgtcatacaagtgctgactctctatacctcgataaccatcacggggcctgacctttctgtactcgacatttaattcaacaatatcactgccttttattactgaattgcatgctttatatatacgactcaaaggaaatcgttcacataactaaatcattttgtgttgacgacaccaccaccatgggcttctagatg

SEQ ID NO: 34829 - DNA, 419 bp, Zea mays
  unsure (1)..(419): unsure at all n locations
agcttgggaaggggcttcattcttacatgtgttaatcggcgatgccacagccagcccatgctagtcttagctattaagcatgcatctagaccggcctcttcttttgcaaaatcaactaaataaagtttgccgtctaatacacccttaaaagctagtgaaccatcacttcttctaaagacagacacatctacatttgtaaaaagacagntatatcccatattgcataattgactaacagatagtaaattatatcccaaagactcaactaaaaacacattagaaatagagtgctcattagaaattgcaattttacctaacccttttaccttgccttgattcccatcaccgaatacaattgaatcttgggaatccttactctngacgtaggaggtgaacatcttcttcttccccgtcatatg

SEQ ID NO: 34830 - DNA, 456 bp, Zea mays
  unsure (1)..(456): unsure at all n locations
acactataactactccagctctacctaaagaacctatgtggaggaccaatttctcctttcttgaatcntgtatttcaccatggggaaccaccttggcacagaagcagcaaaaatctgctacttcctcacctaacaacaacgaagggattaaccctgagtatggaattactcagcaagacttacccgactaaagaaaagactctcaagggtatgctggatatatgggagtcaacgaaaggcttttcaataatcaaagactctgttttgcagaaatgcttactaaagtggatccttaaaaatccaatattatttgtccagttaagtacaattacctgcaactagaagtctttctaccctaggtcaatcactggtcctgcactagccaatttgttaacaaaagcccatcatctttagtggaatgctacgtgtaggtcagcgactaaagtctcataaccg

SEQ ID NO: 34831 - DNA, 407 bp, Zea mays
  unsure (1)..(407): unsure at all n locations
acctgcggcatgcaagcttgacatngcttccctgttggaaaccaattctgtggcggtactgcccgaattattccaacttaagtgcctaagccccgccttagaggctagaccacacttaaatgggaataacccgtcaatccctcggatctagtccgacacggccactgacaggatcaagtaccacaatctcactcgatggtgagtcacagagcaaatacaataaagcacaaaaccatgcatgtaagagtattaaattattacatcaccatcggagttttgcaaaagtagtcatcattgttcgaagtgcagcggaataaaactaacggtaaataaacagagagatggggaagcctgtcccatcactcctcatgctcctcctcagccgaggtagggtcccactcgacagt

SEQ ID NO: 34832 - DNA, 354 bp, Zea mays
gttggcactcatcatccacacaagaacataatgacgactgacaggccactggagctcctacacatggatctattcggcccgatcgcttacataagcatcggcgggagtaagtactgtctaattattgtggatgattattctcgcttcacttgggtattctttgtacaggaaaaatctcaaacccaagagaccttaaagggactcttgagacgagctcaaaatgagttcggcttaaggatcaagaaaataagaagcgacaacgggacggagttcaagaactctcaaatagaaagcttccttgaggaggagggcatcaagcatgagttctcctcttcctacacgccccaacaaaat

SEQ ID NO: 34833 - DNA, 372 bp, Zea mays
  unsure (1)..(372): unsure at all n locations
agcttctaagggagacacttttttgactatctttgttttcactntgagaaagacagggtttgtagcgcatgccaagcaggaaagcaggttggaacccatcatccacacaagaacatcatgaaaactgacaggccactcgagctactccacatgaatttattcggcctgataggttacataagcatcggcgggagtaagtactgtctatttattgtggatgattactctcgctgcacttgggtgttctttntgcaggaaaaatcacaaacccagagaccttaaaaggattcttgagaccggctcaaaatgagttcggtttaaggataaaaaagataagaagcgataatgggacggagttcaagaattcacaaa

SEQ ID NO: 34834 - DNA, 346 bp, Zea mays
atttaactactcctcaagatgcaaccaagccttcgagcaactgaaggtgttattgaccactgctctggtattggctcaaccggacattgaaaagccttttgatgtgtattgtgacccatcaagcaatgggctcgggtgtgtcttaatgcaaaagggccgagttataacatatgctttaagacagttgcgccggcatgaggaacattatccagctcatgacttagaattagctgttgtgggtcatgcctttaaattatggcgtcattatctgctaagaaatatctgccatatatatacagatcataaaagtttgaagtacatttttacccagtcagaacttaacatg

SEQ ID NO: 34835 - DNA, 451 bp, Zea mays
  unsure (1)..(451): unsure at all n locations
agctntatcatctcttacgctcagactagagctcatcaagcaggccacccgtctgcgtcgccatgccttccaccagctttgtctagttcaattaacactgtagcttcgtctccaccagtcaggactagaggtgcataacgagccagctcggcttgttcgagtttgagctgactcgttaagctaatgagccagctcggatcggctcgttaaggtaacgagccacagagtcagctcgactcaggtcgtttacaagctggagctggctcgtttagctcgcgagccagaacagaaaaaaataatatgtacataataattattttttagttaatttcaaactaatttaacaatagaaaatagaaattatactcatagtttcacaaaccacgtcaatggtaaaccaacatagcactatttatcactcattaattcacaattcacatacatgttcatc

SEQ ID NO: 34836 - DNA, 439 bp, Zea mays
  unsure (1)..(439): unsure at all n locations
gcatgcagcttatggaatgagttatcttaggngggtgctttgttagtcactngntattaaatgctgtgaatcaagaacaagacaacacaattgtgaagtattaaggtcctttgtctttcgaagcatcatatcctcacggacataatgatcatcagacgaaggtcatgaaggacatgtcttcatcattttatagataagcgagaatgcaaagagacgaagacaacaagtgtatcccattgattcattcgtatttgcatttcacggaatcatgcatgaatattaacaagatttatatcacaatgataccttcggctttgttgaaggtgttgacgtgagggagaatacaaatcagcgtgaacagtacggtgctactgttcatctatttatatgcacgggacacagcccccggtaaaagtacaattatgtcccctatattcac

SEQ ID NO: 34837 - DNA, 245 bp, Zea mays
ctacattgacaaaggccttaattgacttataccgagacactacaccgaaactctttttcttgtgcaagatacccgccccggcttagcttaatcatttaacccccaaaggtgggacctggcagaaggacattctttcctatgttgaaatcatcaagggctttgacaaaatcaccatcaagttttattttgaaaacaacccttccactttgccaaacatcttttgtaaaacaaattcttttgttttg

SEQ ID NO: 34838 - DNA, 438 bp, Zea mays
  unsure (1)..(438): unsure at all n locations
agcttgcccccctcgccagctgtgccgacctgttagctccgctctggctcccctgcccatgcgcctgggccccatgcgcctgggtccccgtccacagctgggccgcctccaccgcgtgagcactcctggccaactccgccccgtgcgcctgggcctcgtgagcctgggcccccgttcccagttgggtcatctccgcccagatcgtctgggcactcggcgcctgggctgcttctgaaagggaaatgtgcctctgggccatttctaagtattttggtgattaagtgtcaacacaagtgcttaaatgtgaatcaatacccatggatgaacaaagtgcanatctagagcaaaggtatgtttctaagtcttagtacattggttctgtgtactaatatacatgtctaagtattaaaaacaggaagaagaagaagagaagaaagt

SEQ ID NO: 34839 - DNA, 275 bp, Zea mays
cacatctcggtcacatttatttctccgtcctattcgacccaaattaaaatccctactgtttcactgaccttggcttggtttgcatgggtcggtggaattgccaggtcccttctcacaaagggtgctgctcactctggaagaaaaaaaagacccttaccggatgaggctcattgacctcaataaccaacctggatggtccggctcggttacttttcctgtttatttaccagagcaatatcctgtaaggtctgacaactaagtagacaagtactact

SEQ ID NO: 34840 - DNA, 388 bp, Zea mays
agcttctaattggagaacacgtgataggtctatctaacgtacatttcgaaaaagatagaccttatgcagcttgtcaagcaggtaaacaagtgggaggagcacatcacagcaagaatgtgatgaccacatcaagacccctggagctgctacatatggacctcttcagacccgtcgcctatctaagcataggaggaagtaagtatggtttagttattgttgatgacttttcccgcttcacttgggtattctttttgtaggataaatctgaaacccaagggaccctcaagcgcttcctaaggagagctcaaaacgagtttgagctcaaggtgaaaaagataaggagcgacaatgggtccgagttcaagaacctttatgtggattaccttga

SEQ ID NO: 34841 - DNA, 342 bp, Zea mays
  unsure (1)..(342): unsure at all n locations
gcttccggagcggccgggcgaggcggactgctcctactacctccgcactggcgcctgcggctacggggagcgctgccgctacaaccacccccgggatcggccggctccggtcagcgccagcctcacccacgcagcctcgctgtccgcttgttcccctacccctgctctagtgctctgccaagntttattctgttccttttcttttgtctcgtgctcatctcgatggttactggtgagctaagcgctcccgacaatgaccgacactgcgtgatgttacatctggttggtgggtgacgagtttgttcttaaaagtgaaggtattcagcgaattgatgattatat

SEQ ID NO: 34842 - DNA, 460 bp, Zea mays
  unsure (1)..(460): unsure at all n locations
tntaaagggagaacacgtgataggtttgactaacgtgctattctaaaaagatagaccttgtgcagcttgtcaagcaggtaaacaagtgggaggagcgcatcacagcaagaatgtgatgaccacttcaagacccctggagctgctgcatatggacctcttcggacctgtcgcctatctgagcataggagggagtaagtatggtctagttattgttgatgacttttcccgcttcacttgggtgttctttntgcaggataagtctgaaacccaagggaccctcaagcgcttcctcatgagagctcaaaatgagtttgagctcaaggtgaagaagataaggagcgacaacgggtctgagttcaagaaccttcaagtggaggagttccttgaggaggaagggatcaagcacgagttctccgctccctacacaccacagcataatggtgtggtagagaggaagaac

SEQ ID NO: 34843 - DNA, 480 bp, Zea mays
  unsure (1)..(480): unsure at all n locations
agcttctaaagggagaacacgtgatagggctattttatgttactttctaaaaagatataccttgtgcagctggtcaagcaggtaaacaagtgggaggagcgcatcacagcaagaatgtgatgaccacgtcaagacctctagagctgctacatatggacctcttcggacccgtcgcctatctaagcataggaggaagtaagtatggtctaattattgttgatgactnttcccgcttcacttgggtattctttttgcaggacaaatctaaaacccaagggaccctcaagcgcttcctcaggagagctcaaaatgagtttgagctcaaggtgaagaagataaggagcgacaacgggtccgagttcaagaaccttcaaatggaggaattccttgaggaggaggggatcaagcacgagttcttcgctccctacacaccacaacaaaatggtgtggtagagaggaagaacaggacacttatataca

SEQ ID NO: 34844 - DNA, 482 bp, Zea mays
acttgaaactcagcttctaaggggagaacacatttgtgactaacaaatgctcattttgagatagacagggttgggagcgcatgccaagcaggaaagcaagttggcgtccatcatccacacaaaaacatcatgatgacaaacatgccactcgagttactccacatggatctatttggcccgatagcttacataagcatcggcgggagtaagtactgtcttgttattgtggatgattattctcgcttcacatgggtattatttttataggaaaaatctcagacccaagagaccttaaagggattcttgagacgagcccaaaatgagttcggattaaggatcaagagaataagaagcgacaacgggacggagttcaagaactctcaaattgaaggctttcttgaggaggagggcaacaagcatgagttctcttctccctacacacctcaacaaaatggtgtagtggagaaaaaaatataagtcta

SEQ ID NO: 34845 - DNA, 424 bp, Zea mays
  unsure (1)..(424): unsure at all n locations
agcntttatgatctgtataaatatgacagatattttccagcagtttgtgacgcctaattttcagggcatgaaccacagcagctaactccagatcatgagtcgggtaatgctcttcatgtcggcgtaactgccgtgaagcatacgcaattactcggccctcttgcattaatacacagccgagtccactgccagatgcatcacaatatacatcgaaaggcttggtgatgtccggttgagccaataccggggcagtggttagtaatgtcttcaattgtgtaaaggcttcatcacactgtgaagaccaactgaacttaacatcattcttcaataaacttgtgattggcttcacaagcttagaaaagtctggtataaatctgcgataatatccacccagtccaatgaaacttcggacctgatgaacagt

SEQ ID NO: 34846 - DNA, 359 bp, Zea mays
ctagctatgggtgcataaggttcatcagaatccaaaccttcaacttgtgaataacctttggccacaagttgggctttgttccttgtcaccacaccatgctcatcttgtttgttgcagaatgcccatttggtacctacaacattatgattaggacgcggaactaaatggcataccttattccttgtgaaattgttgagctcctcttgcattgccgccacccaatccggatctcttagtgcatgttctatcctgtatggctcaattgaagacacataagagttatgctcacaaaaatgtgccactcgagatctaatggttatccccttatgaatgtcaccaactatggagttgaccgggtg

SEQ ID NO: 34847 - DNA, 429 bp, Zea mays
agcttctaaagggagaacacgtaataggtttgactaacgtgcaattcgaaaaagatagaccttgtgcagcttgtcaagcaggtaaccaagtgggaggagcacatcacagcaagaatgtcatgaccacttcaagacctctggagctgctgcatatggacctcttcggacctgtcgcctatctgagcataggaggaagtaagtatggtctagttattgttgatgacttttccctcttcacttgggtgttctttttgcaggataagtctgaaacccaagggaccctcaaacgcttcctcaggagatctcaaaatgagtttgagctcaaggtgaagaagataaggagcgacaacgggtccgaatcaagaatcttaagtggaggagtttcttgaggatgaagggatcaagcacgagttctcggcttcctacaca

SEQ ID NO: 34848 - DNA, 424 bp, Zea mays
tccgaggctgctatcgaggatctccccgcagccccagctattgaaggcaagccccggtttatatgcataaccgtattattatatgctactttactacacttaatgcttgtaggattgtaatgtgcacttaagtgtaggagttgcttgaaacctctagttgcatgaacttaggattccttttttgagatgaatactagtatgctaggtcgagtaactgcttgctaatcaggatcttggtagaagttgagtgatttttctagcactcgcgcgaggtcaagaattgattgtattcatcttgataacgggatctatgttagtctatggacttggatccaaggaggatgccttgtccatgagacgggaaaaaggaattaaggattaatgtgtggatacctgagtcaagcttttgaacgtactaagcaca

SEQ ID NO: 34849 - DNA, 327 bp, Zea mays
  unsure (1)..(327): unsure at all n locations
atcttntaaagggagaacacatgcnagcgacgtatatnatgtacacttggcaaatgactatattagcagcgcatgtcaggcagggaagcaagttggtgctcatcatccacacaagaacattatgacgactgataggccactcgagctcttacacatggacctattcggcccgattgcttacataagcatcggcgggagtaagtactatttagttattgtggatgactattctcgcttcacttgggtgttctctttacaggaaaagtcccatacccaagagactntaaagggatacttgagactggctcataacgatttcgggctaag

SEQ ID NO: 34850 - DNA, 357 bp, Zea mays
tgtggagcttggtggtgacgctttatgggtccatcattatcttggtcttatggagcttcttcacgtactacgtcttcaaatacttgagcctcttgcatatctttggggtcactgacttcttcttgatctagattaattgaagctgaaagagttgctcttttggtgttttgatcatcctccattcttgcatcttcatgtacagcttcattagtcatctaaaccaattcttcatcttcatccttttctttgggcctcactttacctatggctagtttcttgattgcttcatagggtgatacatcattttctgtcgactcattatcaacatgcccttgcgagccattatatttataaaat

SEQ ID NO: 34851 - DNA, 419 bp, Zea mays
agcttgtgaaggttcttcatcctcacatgtgctaagcggcgatgccacaaccagcccatgctagtcttagcaattaagcatgcatctagaccagcctcttcttttgcaaaatcaactaagtaaagcttgccgtctaatacacccttaaaggctagtgaaccatcacatcttctaaagacagacacatctacatttgtaaacaaacagttatatcccatattgcataattgactaacagatagcaaattatatccaagagactctactaaaaacacattagagatagagtgctcatttgagattgcaattttacctaacccttttaccttgccttgattcccatcaccgaatattattgaatcttgggaatctttgtttttgacgtaggaggtgaacatcttcttctcccccgtcatatg

SEQ ID NO: 34852 - DNA, 383 bp, Zea mays
aagaccttaccgactagtgtcttggatgctgcctgtattacacattgcccagcatggacctcatccagaagttgcttaccggtagatgagagaatgtacttcatgaagacaactgatgcaccccttctggattatgtctccccaatgagtgtgtaacgagcccactgtctggcgatacgctcggctgcatttatgacatctggatcctcttcattctttatataccagatgattggccttctctagtcatgagagtctgactctggttgatacacgagattacactcatttgcttgatacatggaaatgctctgctggagtatatcttgcacaaagactccatgtgggacctgagattgactggatcctagcttggacaatac

SEQ ID NO: 34853 - DNA, 398 bp, Zea mays
  unsure (1)..(398): unsure at all n locations
agctngccaaacacaaccatacaacatggagtttccaggttctcgctaccatctgnggcgctcgtcttgaaggctatctcaccggcagtgctaagaagcctgccatgatgatcgacggcaaggacggtgacatggtcaccaatccggtctatgaagattggctagctgcagatcaacaagtcctcagcttccttctctcctctgtatcaaaggagatcttgattcaagtcgtgaccaaggagatcgcggcagaggtctggcaggcgattgaaaccatgttcgcatcgaagacacgggctcgcgcagtgaacacacatctggccctggccaccacgcagaaaggtaacatgacggtaactgagtacattgggaagatgcgtnttctangtgacgagatg

SEQ ID NO: 34854 - DNA, 264 bp, Zea mays
  unsure (1)..(264): unsure at all n locations
catacggacacttaaaactaagcttctgtatagatagagctgggccagattatggatttatttcggtaccacgtcggtgccacgacgtacttttgtgccaacgcaacgcgtacctcggcgnnatanattatanaattgaattcaaataacattataatagatatatttgtaccgataacttactataataataaacagtaaaaattactgcttattatatgcaaatattatatacttatacataataatactacataataaaaa

SEQ ID NO: 34855 - DNA, 389 bp, Zea mays
  unsure (1)..(389): unsure at all n locations
agcttcatcacatntaaagttttacctttcttctctagtgaagaagaggtttcactaacttggagaagccttcgatgaatcttctgtaataacatgctaatccaaggaaactcctgatctttgacacatcctttggttgtttctaatttagtatttcacttatctttcctggatctacctaaattccaccatcagtgataatatgtcctaggaaagcaacttcctttagccaaaaatcacatttcgagaactttgcatacaactggttgtcacaaagcttctgtagaactagtcttagatgatcttcatgtgtttcttcatttagcgagtataccagtatatcatcaatgaatacgaccacaaaccagtcgagatattccatgaatact

SEQ ID NO: 34856 - DNA, 412 bp, Zea mays
tagctcaacaaaattgtatcaatatgagcaattagattcttagcctgccataacatcatcatgtacacacaaaacacaataatgatgggtacaatctagcaggtatactaatgaagctcaaaatactacctgacaacagatataatacatgaatcaagaaagaagacttaaatctacatgaaaaagtagaagagagaaataaaaaccaaaagggagcccacgatcaaaaagggaagcaaacaccaaactctcctcgcaaatgtgcaaaagtagactgatcaaggggtttggtgaaaatgtcagctagctattgatcggtatcaatgtggcgcaaatcgatgtcgcctttctcagaatggtcacaaagaatgtgaaagcgaacatcaatgtgcttggtcctcgaatgcaacat

SEQ ID NO: 34857 - DNA, 428 bp, Zea mays
  unsure (1)..(428): unsure at all n locations
agctngaagtttctgcacgtctattggctattgttgtgctgcttgtctagcaaaattcttgcagtgcaagtagggattgatagtttgttgagattgttgggtttttgtcgaggatggcctcacaacgacctttaatcaacttttcaacccagccatacttgaccttctaaacaaattaataaaaaaaggagcaaacctacttacagaggtttccctatcaggtcttagactggtttgaacaacgtattcaatatctattctctatatctgtcatttacagtctcttctaaaagatttcattcactatgtctccttcctctctaataacattctttaaatcacattctttatacgcaaataactatattagagatatttttttatttttaaatttntgtatatacatatttggccgacttctaaatata

SEQ ID NO: 34858 - DNA, 370 bp, Zea mays
  unsure (1)..(370): unsure at all n locations
taatgcccctataaaattgtctaacattgttaaagacaattcttctatggttcaagatagtgagggttatattttatatcctgcaaactatcccgaacttaagattagaaagattcatgctaggaaacctcataatgtttctcaccatgcatttatgtacaaaaatgaggcttctagctctaggcataccactcatgttaaattgcctagaaagaaaatccctactgcatcaaatgagcataatgtttcctttaagacttttgatgcatcatatgttntaactaacaaatcaggcaaagtagttgccaaatatgttgggggcaaacacaagagttcatagacttgtgtttgggtacccaaagtgcttgtt

SEQ ID NO: 34859 - DNA, 417 bp, Zea mays
  unsure (1)..(417): unsure at all n locations
agctttgtatgcacccccgacacccgttntcttaatgggtgacttgcggcaacgaaattgcgcgaaaccaccccaaacatgagttttggacctaaagtagtggattgggcatgttcgttgtgaaaaacgaagaaatggttccggtggcgaaaactcgtgctttgtatgcacccccgacacccgttttcggaatgggtgacgtgcggcaacgaaattgcgcaaaaccaccccaaacatgagttttggacctaaagtattggattgggcatgttcgttgcaaaaaacgaagaaatggttccggtggaaaaaaactcttgcttgtatgcccccgacaccctgttttggaatgggtaacgtgccggaacgaaattgtgctaaaccccccaaacatgaattttggacctatagtagtggatt

SEQ ID NO: 34860 - DNA, 199 bp, Zea mays
catgccccatccactactttatgtgcaaaactcatgtttggagtggtgttgcgcaatttcgttgccgcacgtcacccatttcgaaaacaggtgtccgggtgcatacaaagcttgagttttcgccaccggagaccatatctttttgtttctcaacgaacatgcccaatccactacttttggtgccaaactcatgtatggg

SEQ ID NO: 34861 - DNA, 410 bp, Zea mays
agcttgtgaagattcttcattctaacgtgggctagtcggcgatgccagagccaacccatattagacttagcaattaagcaagtatcgagtttagctctattgaaatcaactaagtatagctgaccctcgagtactcccttaaatgctattgaatcatcacttcttctaaaggcagtaacacctatatccgtaaaaagacaattgtagcccattttgcataattgagaaactgagagcaagttgtaatctaaagaatctacaagaaaaacattggaaatggaatggtcaggtgaaatagcaattttaccaagtcctatgaccaaaccttgatttccatccacgaatgtgaaagctctttggggagtcttggttttctcataggaggagaacatatttttcttcccagtcat

SEQ ID NO: 34862 - DNA, 441 bp, Zea mays
  unsure (1)..(441): unsure at all n locations
actcagctgagaaacaactgccaacctgaagaaaatatctgtttgggtagaaacccctgcacaagttatgagcaagctattcattagaaacttgactactcagagacagaagtacaatgcacaagcatgcaacatccaaatgctgctacaactattgcacattcataggtacaaaaacaattagcaagagccaaattatcatgtgaaaggctagacagtagacaccaaaatatttcatacgagataagttgagcaagtggaagttattctatggccaacaataaaacaaaaacagggctatcacagctaaactacttcccctgcttcattntagaggtgcattaagattcaaataaggctntaagtgtactttgaccataaatttctcttaagccccgtttgtttcgttggaattgaattccattntaataattataattt

SEQ ID NO: 34863 - DNA, 459 bp, Zea mays
  unsure (1)..(459): unsure at all n locations
acctgcggcatgcaagcttgttgtgtttccttatttggatcagngttgttttgaaacgcatacaacgatcagcagacacgactggggctacacagtcagtttgcaaaataggacataaatatatgtaccaccatattttcaactaaaaaaagaggataataattacacattcagtttgcagatcatagagaaaatctgaacatattcagtagagtacgacagatcatatattcttgaaacgcaacaaatttccaaaactagaatagtagtatttaggaaacaaatatttgaacagatctataagcacaagattatttaagaaatcattcagtggaaattttaccttttagcttatgagttggctttgataaaggattatcgtccattttgaccctaatgggtggaatctactgcaactcatctatggtggtacagatgtcttgtaaagttcttatatac

SEQ ID NO: 34864 - DNA, 360 bp, Zea mays
agggaaacactaatactcacgctaaacggggaaaactcaaaatcgtatcaatccaaatgagtactcgattcaagcgcctaaaaaccaatttttctaaaaccagagttatgttcatacggtggatcgaataatatgcaccggataaacccaaaaaatactttatagagaacagttcccagatcgcgccaaagagagaaaatcggggaccaggacagggtcgagacacgcacccacagtctacgcgcctccggatcgagccacaccaatgcccagctagacgtctgcggcgccctccctttctgcgcggcggatccggcggcgcgccttacgcagattcgaaacgcacggcggcgcgctccc

SEQ ID NO: 34865 - DNA, 480 bp, Zea mays
  unsure (1)..(480): unsure at all n locations
agcttctaaagggagagcacatnttgngactatcaaatgttcantttgagaaagacaggatttgtagcgcatgtcaaacagggaagcaagttggtgttcatcatccacacaagaacatcatgacgaccgacaggccgctagagctactccacatggacctattcggcccgatagcttacataagcatcagcgggagtaagtactgtctagttattgtggatgattattctcgcttcacttgggtgttctttttacaggaaaaatcacaaacccaagagacattgaagggattcttgagacgggctcaaaatgagttcggcttaaggataaaaaagattagaagcgacaacgggatggagttcaagaactcataaatagaagacttccttgaggatgagggcatcaagcatgagttctcttctccctacacatcacaacaaaatggtgtagtggagaggaagaatagaactctacttgaca

SEQ ID NO: 34866 - DNA, 427 bp, Zea mays
agttctagatgtcgatgatgggcgagctgacattctttctatgatgtcaagtaaaatggcttaaggaaggcatcttcgtctcccaaacaaagcacacgcaatacatcctcaagaagtttggaatgaaggatgcaaagcccatcaagatgtcgatgggaacgaacgggcacttggacattgaagcgagaggtaagtccgtagatcaaaaggtatactggtctatgtaggatccttgctttctttatgtgcaagtaggccgaacattatgctttccatatgtatgtgtgctagatttcaatccgtcccaaggagtgtcaccttgtggcagtaaagcgttaagatacttagttcatacacctcacttcgggctctagtatcctaaggggtctaccttcgaactaattgggtattcagatttcgattatgt

SEQ ID NO: 34867 - DNA, 162 bp, Zea mays
ttgggcttgtgactggctactgctaaatccaagggtctcaaagagaagagcaacgatggaaaaatgactgacaagacaatccctttaagcgttcatcctttatatgctgcttgaggctgagcagggataggcaaaggttgactagaatccattttctactac

SEQ ID NO: 34868 - DNA, 482 bp, Zea mays
  unsure (1)..(482): unsure at all n locations
cctgcacgcatgcaagcttatgaagattcttcattccaacatgggctattcggcggtgccagagccaatccaagttagtcttagcaattaagcaagtgtcgagttcagctctatcaaaatctatcaagtatagctgaccctctaacactcccttaaatgctattgaatcatcacttcttctaaagacagtgacacctacatcagtaaatagacagttgtagcccatttgacatatttgcgaaaaggaaagcaaattgtaatctaaagaatctacaagaaaaacattggaaatagtatggtcaggtgatatagcaattttacccaatcctttgaccaaaccttgattttcatccccgaatgtgatagctcgttggggatcttggttnttctcatatgaggagaacatcttcttctcctctcgcatgtgggttgtgcacccgctgttgagtatacaacttgagccccccgatgcatatacctac

SEQ ID NO: 34869 - DNA, 323 bp, Zea mays
actcagctttgcgcattgggcctggcccgtattccatccaccgccctattgggtcacttccacccccacctgacaatgcaaagctccgtctccgtctcaagggaagcaacggccaccatttgacgaagcttacacgcaggcgcagcacagcgtggcaggaagaaaagggaagcatccagccaacattcttcctatgaagaaaggaacccaccaaagcttctaaaaaagaaaaagagctgcacactggtcactggaaaacgaaggcgaaccctaatcgctactccaccgcagcgcccactacaccgatcgggcttccatggact

SEQ ID NO: 34870 - DNA, 369 bp, Zea mays
  unsure (1)..(369): unsure at all n locations
agctntgntgacaatagactgcagaagatcatctgcaagaactttttaagtggggacaaaggatcaccttgtctgacaccgcgtctgcagtgaaatcttttcctagggactccattcaaaagaacttgtgaagaaccggagccaagaatcatagaaacccagtagatccatttatcaccgaaccccttgtgtcttaagatctccataagagctgcatgctccaatntatcaaatgccttctcaaaatcaagctttaaaatgaccatttcctttctggaattgtggcaaagggaaatatattcaaaagcccacgcttagcaatcatggatcgatctatccttgatgaaaccatattgattctgatggact

SEQ ID NO: 34871 - DNA, 388 bp, Zea mays
tgtgtccacaagacagtctacaagctgtcctttagataatgtatattattcttggtcgagcttcggatagccaacactatccatcgtgtttctagccacatcaattccttgctatccagtaggcaatataagtaatcttcatcaccccattgaatatcgttgccctaccgaatacctcaaatcctcggcataagtttgtagctcaccaatttgctctgtgggtaattccccgctagctgcatgaaaaggacgtattctctcggtttttgttcctttggcttatccaagccttcaaagtatagaatctgttcttgaatgagagattccactttttcttctacttccatctcatccacttatttagtgctgatttctttggcgtgagcta

SEQ ID NO: 34872 - DNA, 450 bp, Zea mays
  unsure (1)..(450): unsure at all n locations
cctcagagtcacctgngctgcagctgactctttccctttatacaccggtatgtcacttcaagggcggagaggaggtcggaagccttccgtgtcttgactacgatgtcatcgacgtaggcctatactgtgcgaacgatgagttcgccgaacacatggttcatgcaccgctggtacgtcgcgcccgcattcctcaagccgaacggcatggtgacatatcagtacatgccgaacggcgtgatgaaagaagtcgcgagctggtcggactctttcatccggatctggtgataccccgagtaggcatcgaggaatgacagggtttctcacccagcagtggaatccacgaattggtctatgcgaagcagagggtagggaaccttccgacatgctttgttgagaccagtgtattacacacacatccgccaattccccctttctttctacaagcacagg

SEQ ID NO: 34873 - DNA, 463 bp, Zea mays
  unsure (1)..(463): unsure at all n locations
agcttgtgaaggttcttcatccncacatgtgctatacggcgatgccacagccagcccatgctagtcttagcaattaagcatgcatctagaccggcctcctcttttgcaaaatcaactaaataaagtttgccgtctagtacacccttaaaagctaatgaaccatcacttcttctaaagacagacacatctacatttgaataaacagctatatcccatattacaaagttgactcacagacaacaagttatatccaagcgactcaactaagaacacattagaaatagagtgctcggatgaaatagcaatttttcctaaccctttcaccttgccttggttcccatcaccgaatatgaatgcatcttggggatccttgttcttgacgtaggaagagaacatnnnctctttccccgtcatgtgggttgtgcattcgctgtcgataatctagcttgacccccggatgcat

SEQ ID NO: 34874 - DNA, 445 bp, Zea mays
ttctatagggagaacacatcttaggactaacaaatgttcattttgagaaagacaggatctgtagcgcatgccacgcaagaaagcaagttggagctcatcatccacacaagaacataatgacgaccgacaggccactggagctcctacacatggatctattcggcccgatctcttacataagcatcggcgggagtaagtactgtctagttgttgtggatgattattctcgcttcacttgggtattctttatacaggaaaaatctcaaacccaagagaccttatagggattcttgagacgggctcaaaatgagttccgcttaatgatcaagaatataagaagcgacaacgggacggagttcaagaactctcaaattgaaagcttccttgaagaggagggcatcaagcatgagttctcttctccctacacgccacaacaaaatggtgt

SEQ ID NO: 34875 - DNA, 425 bp, Zea mays
  unsure (1)..(425): unsure at all n locations
agcttcatgatctgccgcattattagacgctgttaatagtaactgaagagcatatntgagttgttcacctctgggtgcaatgaagaggattcctgcgcctgccccttgcagcttcaacgagccatcgaaatacatccgccatacttctgtggtctccgggttatccggcacatgttgctcggtccattctgatacgaagtcaactagtgcttgagtcttgattgcagtgtgaggtcgaaattcaatgtcgtgagctcccagctcgcaagcccacttggctattcttccgatggcttctntgttgtggagaatatcccctattggaaattcagtgactactatgaatttgtgatcgtcaaagtagtgacagagcttgcgtgtagttagaagtactacatacacatagttctgaatttgaggatatt

SEQ ID NO: 34876 - DNA, 294 bp, Zea mays
gctatatgctgccttttggcacttctgaaacttcggcgctactttcaagcattccatataattggtactttatcacacacctttgtacgatattatgaaggacccaaaaactactggaaggattggaaagagggctgcagaactcaacgaattcaccattgattatgtgcatagatcttcaatccagtcccaagcgttagcatacttcatcgatgactggacgccacgggctcacgaagaagaagctacgtaagatgtcgaatcttggacagtgttctgcgacggctcctgggg

SEQ ID NO: 34877 - DNA, 374 bp, Zea mays
  unsure (1)..(374): unsure at all n locations
cgctcttgacaaaacaaattctctatcctactattttcaaaatctctcaagnggnagctgatccatttatcgctttggcctttattttctccccctttggcatcaagcaccaaaacgggatcaatcttggccttttaaccccattgcctcaccaaagtcttcaattaagagcaaatggcaataagatttcatgagatgaacttggaattatttaccctctcatcggagtgcagtggaagtctttcatgtgccaagtccaccttttccctttcaatcctccttcgagactaaatcaagcaaactcaagccaatggttagtctcaaagggtcaagttgtaacacatctccccctaaacatgtgcattactttgcaa

SEQ ID NO: 34878 - DNA, 359 bp, Zea mays
  unsure (1)..(359): unsure at all n locations
tnctacgggagaacacattataggactaattcttgntctttttttagaaagacaggatttgtagcgcatggtaagcatggaagcaagttggcactcatcatccacacaagaacataatgacgactgacaggccactggagctcctacacatggatctattcggtccgatcgcttacataagcattggcgggagtaagtactgtctagtcattgtggatgattattctcgcttcacttgggtattctctttacaggaaaaatctcaaacccaatagaccctaaagggattcttgagacaagctacaaatgagttccgcttaatgatcaagaaaatatgaaacgacaatggaacggagttc

SEQ ID NO: 34879 - DNA, 429 bp, Zea mays
  unsure (1)..(429): unsure at all n locations
agcttctaaagggagagcacattntangactatcaaatgttcattntgagaaagacagggtttgtagcgcatgccaggcaggaaagcaagttggcactcatcatccacacaagaacatcatgacgaccgacaggccactggagctcctacacatggacctattcggcccgattgcttacataagcatcggcgggagtaagtactgtctagttattgtggataattattctcgcttcacttgggtattctttttgcaggaaaaatctcaaacccaagagaccttaaagggattcttgagacgggctcaaaatgagttcgccttaaggatcaagaaaataagaagcgataacgggacggagttcaagaactctcaaattgaaagctttcttgatgaggagggcatcaagcatgagttctcttcttcctaca

SEQ ID NO: 34880 - DNA, 454 bp, Zea mays
  unsure (1)..(454): unsure at all n locations
tatattactcgcaccgatatgcctgcagtatggattactttctctgcgggagaaggaaagcccccaagtccctgggactgattgaggcaagtgccaatatctaaagactggaggaaaactatcgagtgttcgtctgccctttggaggagctacgactgccctatttatacacctagaagatgtacgttgtttgagccgggggccgtcgtgttttcaaagaagtcttggcgtcctgtgggtgacatgacgatgcactgcgttgttaacttgggcttgatgttttccaactgagagccgaggccgaggggttggccgtacgcccgagcccccacgggaggggatgcccataccgtagtggttgtaacagcgcttcggtatgggtaaaaagcctgcttacgggatgcgttcagcgtcctgtgctgtgtgacgttggngttcctcgatgcggatatca

SEQ ID NO: 34881 - DNA, 378 bp, Zea mays
  unsure (1)..(378): unsure at all n locations
agctngtgcatctcaaagtacctatccttcgtctcatggaggactntgctaacgtaatagactaacttctggatggttcgaacccctacggttggtcccaagccctcaaactcttgaccttccatcagcaccgtggtggtcggaccaccaccttctcctatgggaactttttggctcccctggagatgttgtgccgtcctttcgacgaccagcaccatgctcaccacctctgtagccgctgcaatgtataagtacaacggctcccctggctctggagctaccagtattggcagggacacaaggtgctgcttcaactcttgaaaggcctgttctgcctccttggtccaagagaatagggtggacctccgtaatatcttc

SEQ ID NO: 34882 - DNA, 449 bp, Zea mays
  unsure (1)..(449): unsure at all n locations
tctaaagggagaacacgtgataggtctaactaatgtaactttcgaaaaagatagaccttgtgcagctggtcaagcaggtaaacaggtgagaagctctcatcataccaaaaatgtgatgaccacatcaagacctttggagatgcttcatatggacctcttcggacccgtcgcctatctaagcataggaggaagtaagtatggtcttgttatagttgatgatttttcccgcttcacttgggtattctttttgcaggataaatctgaaacccaagggaccctcaagcgcttcctaaggagagctcaaaatgagtttgagctcaaggtgaagaagataaggagcgacaacgggtccgagttcaagaaccttcaagtggaggagtaccttgagcaggaaaggatcaagcacgagttctncgctctctacacaccacagcaaaatggtgtggtag

SEQ ID NO: 34883 - DNA, 313 bp, Zea mays
catgcaagcttacacttttggaccaattcggcagcatctttcttcgctgttggccaatagaaaccagatctgaaagccttcccgaccagagtcctggacgccgcatgtaccccacactgcccggcatggatttcatccaacaattgtttcccggtagtcgattgaatacatttcatgagggctcctgctgcacctctcctgtccagtaaaccccctatgatggtgtagtgggccgactgcctcgcgatgcgttccactacagccttgtcattcgactcttcttcattttttatatacctgataataggctctc

SEQ ID NO: 34884 - DNA, 441 bp, Zea mays
tatgaaattcagaacaataatttatgaaatggtttttgtgtataaaaatatatctagaacttatttaattcatagaaaatccatttttactctttgtaacccattccagttgcaataattttgtattaatattgtctatcagatagtaacactgtgtagtcatgaaactagaattaaaattattcattaggattaatctattctaagcactaaataattttggaaattcataacttaataatcgtaactccgaatttagtggttcttgttctcacgatctcgtagcaacgtgtagattattattatacagtttgttcttatgtttggtgtaatgttaatttcgcctataccatgtttgtctgtattgctacgactagcagcgaggttacgagtcacatgaagagcaagttggtacctggaatcccaagtcccacgcaagtt

SEQ ID NO: 34885 - DNA, 453 bp, Zea mays
  unsure (1)..(453): unsure at all n locations
agctntatctgtaaagtttagagctataaagcttatatgagaatttccaaacagggccttacatatngagaggttaattctgcccatgggcattctcaaaaccaacaattaatgtccagtttcatttacaaaatatcaaggcaggagcacatataatttatacaaggattcagctggctataatatagcaatagaaactaaaatagcacaatgatcttgatgtcagtagagtaaaatcgtgatggcatacaaaactgtatttctatgaaggttgttattagatttttcttttcaacactntgtcattagactacgtgtgctgaactgctgatagagcatgaataggaaaaatatttaatacaaactcaaaaaatggcagagatagtccattcaaagaagaaaaaaagctcaaacatttgntatcagatacagtgtgctgatatagcatgaaca

SEQ ID NO: 34886 - DNA, 450 bp, Zea mays
tccttgtcgtcatccaccttgacatagaaccactacgacttccagcctgctgcccatttgcttcggtagctgattacaggaaactatgaggtttttcgataagcaaaattatatcaaccaaaattgtcatgcaatccatcttttctagccttcgtctgatagtgcaattcgtgaacttgacaaaagctgttcgcatacagctccaccgcttggcttctgagggcccagatataaacactaagcctaacaatagcgttaggagtcaactgatgaaaatagataccgaacctcttcaatacctctgcaataatcccatgtagggggaatcttaatccagcctttataaagcttttgaaaataacaatttcatccttctacagctttggggaagttccttcttcccgagcgtaatagcttctttgattttattaaaaagccgacttaccattt

SEQ ID NO: 34887 - DNA, 475 bp, Zea mays
  unsure (1)..(475): unsure at all n locations
agcttgactntcctttcgacttcagtcacaatgtcatgtccaaatatttctctttctccaggctgagactaattgaggggtgttcgagaccttcttccatatagggtttcgaaaggtgccatctttaggctagattgattactgttgttataagcaaactctgccaaggagaggtacttttcccagttcttgccacaatcgatcgcacaagcccttagcatatcttcaagaatttgatttaccctttttgtctgaccatcagtctgcgggtggtaagctgaacttcttattagcttggttcccaaagactttngcagttgttcccaaaatctggcaacaaattgtgctcctctgtcagagacaatggttcacagcaatccatgcaaacacacgattcggtcaatgtacaactctgcatacttctgagccttatcagtggtgtgcactggaagaaaatgtgccacttttgtcaatc

SEQ ID NO: 34888 - DNA, 370 bp, Zea mays
  unsure (1)..(370): unsure at all n locations
actcagcttgactacctttcccgagaggggtnttcctctatcatgtgggaggtacttaacacagctaggtcacccacaccacctctgtacatggtgcagctatacgaggagcaccgggtgccacgctttagggtttggctaaccctggagccccaccctctccagccccggtggcgttcgctggactcccaaactgtcggattaagggcggatgacaccactgaggccacaacactaaaggccttgacgaccttctacggataccacccactagagatgatgatgcacccgctcggactctttcccgccgagaagagggatgatccgatgtggtgcgaccgagtgtgccatgccaaagatgtgtgggcta

SEQ ID NO: 34889 - DNA, 351 bp, Zea mays
  unsure (1)..(351): unsure at all n locations
gacctcggcggcgccttctgtggtcgatgtccnanagatctctnctcacgcacggttgatcatggcccggagcgggtaagtatcttggaacgtcttcgtcctggcttctcattcatatgtcccgaccgcgactnttctttcctcctcagtaagcgaagccatagcttgaccgatctggctccccggaaagcccttaagacggcgtcggctttcacagccggtgccgcgccnggcctcgctgttcagctgaccttctcgcaaggcgctccacagcggggggctcaggcggcaccacgtcgccgggagcgagtttaccaagccggctcttctgtcgaggctggcatcttgctt

SEQ ID NO: 34890 - DNA, 399 bp, Zea mays
  unsure (1)..(399): unsure at all n locations
ctaagctgtgcccctncggagctcctcagcaggaatcggtagtttcttctccggagaagccagtccacgctcgccggagctctcgaccccgccggagtacgtggaccgggtaaaccactccaccacccttcgattccttgggcacacagtcgctgcgtgaccccgtgatgctcaccgtgccctcggattgaaccagttcgccgtggtttggccggtatactcgctgccgacgaggacacccgcctgcccgcgtggaccgggcgattccggccatctccgacgtcgagccgtacctcgacgtgaccgccagagtcttcccgagccgaccccaccctttgccggaccttcctcgccgtcggtaagccgcgccccccttttctttcccgcggttactgtttc

SEQ ID NO: 34891 - DNA, 360 bp, Zea mays
agcttaatgcccccaagaaattgtttaattttgttaagggtaatgctcccatgactcaggataacgaggttacattttatatcctgctggttatcctgagcacaagattaggagaactcatgctaggaaacctcataatgtttctcaccatgcttttatatataaaaatgaggcttccacctctaagcaatcaacccatgttaaattgcctaaaaagaaatctcctattgcatcaaatgagcctaatgtttcatttaagtcttttgatgcttcatatgttttaactaacaaatcaggcaaagtagttgccaaatatgttgggggcaaacacaagggctccaagactttgtgttaggtacc

SEQ ID NO: 34892 - DNA, 425 bp, Zea mays
  unsure (1)..(425): unsure at all n locations
ntaataatatctttaccttcgttattgagagcacctagaggggggtgaatatgtgatcctgtaaaaacttaaaacttaaagccacaaacttgattgagtgttagagcaataaagccaagtggctagagaggagttcttgcaaggcacaataaccacaaagatatcaacacagagaggcacagtggtttatcccgtggttcggccaagtacaaagcttgcctactccacgttgtggcgtcccaacggacgagggttgcactcaacccctctcaagtgatccaatgatcaacttgaataccacggtattcctttttcctttactatatcccgtttgcgaggaatctccaccacttggagtctctcgcccttacaatgaggatcaaagtgaaagcactagagttagggagggaagcaacacacacaaa

SEQ ID NO: 34893 - DNA, 328 bp, Zea mays
  unsure (1)..(328): unsure at all n locations
acctgcngcatgcagcttgatattaattgtatgagtgaagtttttaaaccctttctttgttcatataaatgtctttaccaaaaatacatgaataaaatcaatttgattgtcaatctatcaaagtgaccatccttgagaaccgccaaagataataaaagatggatgaaggtcggcttcacaacttgactgaatgtgtcatcataatccccatactactgcttgaaacctttgacaaccaaatgggccttgtaacgatcaattgatccatctatgtatttgagtttgaaaatctacttaaagtcaatgactaccaaaatcttggcaaaaa

SEQ ID NO: 34894 - DNA, 428 bp, Zea mays
aaactcagctaatgcccaaagatttctacttgttaagggcatgttcccatttctcatgataacgagggttacattttatatcctgttggttatcctgagcacaaaattaggagaattcatgctaataaaactcattctgtttctcaccatgcatttatgtataagaatgaggctcctagctctatgcaatcaacccatgttaaattgcctaaaaagaaaactcgtactacatcaaatgatcataatgtttcatttaaaacttttgatgcaccctatgttttaactaacaaattatgcaaaatagttgcccaatatgttgggggcaaacacaaaggctccaagacttgtgtttgggtacccaaggtgcttgtttataatgtgaaatgacccaagactgtatgggtacctaagaacaagttctaaattgt

SEQ ID NO: 34895 - DNA, 453 bp, Zea mays
  unsure (1)..(453): unsure at all n locations
agcttgttgatcaagctcttttctcangaatttttatgatggagatgggttcaattacatcaaagaatcttttgaaaatggtactcttcaccttattangttgttgagtgatggtggtgtccactcccgccttgaccaactacaggtttgctaataatatttcttcaatttatattagttaagttacaagcgtaccacaagatttacttttatttgctctatccagntacttctgaaaggtgtcagtgagagaggagcaaaaaaattcgtgtgcacatccttaccaatgggcgtggcatttttggatggaagcaatgttggtttcgtggagaccctacagaatgatctnttggagcttccaggcaagggtattgatgcacagattgcatctggtggtggaaggatgtatgttaccatggaccgttatgaagtgaatgtttcttgtcgtattca

SEQ ID NO: 34896 - DNA, 363 bp, Zea mays
aaatatattgcctattctcgggtgaagacaagggccatactacctggatgggccatgttaccatccagaagctcaatgaaattcggaagcatcagcgcaacagagttcaccgaagcagggcatgcatactgcttcgtatcactcaccttacattgcagaatatgtatgcaaacaccctgcagcttttgttgcttctgcgagccaaccccaagcatcttggcagcgacctccaccgccaccgtcaatccaacgagggcgacagccataatggagccagcacaagcatcttcagagggatttcagagaagagtccgaactcgcacaatcaacaacactgtgccatagtcgaagcacatctattga

SEQ ID NO: 34897 - DNA, 329 bp, Zea mays
ctctgaagtagctactggattcactacagagactattctttggtaaggaaactcattcttcggacacgctttattaaaatctatgaaatccatgcacattcctcactttccattagccttcttcaccattacagtattggccaacccatttggatatgttacctctctgattactctggcactcagaagcctttttacttcgtttcctgcaccttcggttttatcttcaaacatctttcgaagcttctgccttcttggcctgatagcaggatctacaattagtgaatgctcgatgacgtctctgttgacaccacagaaatcattggttg

SEQ ID NO: 34898 - DNA, 375 bp, Zea mays
tacacagtaacgcggaggccaatatttcgtagtctgctcttctgtccgagataactctcttgcacatagctgacaggagagatagcttacactctgaagcgctagcccgatatgctcatggacatagccttgaaccatcgcacgaagaattccctcaatccatatgtggaagtcatgactcttcattcctaagactcgcatagtagataagttcaccccccttactcacgttagtagcatacccatcatggaacatcaacatcttgagccactgaagtacttacttcctctgggccctgcttaggacgaaaccggcctgaggccttctccatgtctttcccgcacttggcggcttattctttagtttagggctat

SEQ ID NO: 34899 - DNA, 322 bp, Zea mays
agctttatgcacacatctgtatttaggtctttttatcatccgcagacagatggccagaccgaaaggaccaaccaaattcttgaagatatgctgagagcctgtgcgttgcaagatcagtccggatgggacaagagattgccttatgcagagttttcctattacaacaattaccaggccagtttgaagatgtcaccatttcaggcgctctatggaaggagttggagaactccgttgcattgggatcagcctgtagaaaagcatgtgttcgggccaaacattcttgcttgagccgaagagaacatcaagatggtccgagaaaatc

SEQ ID NO: 34900 - DNA, 438 bp, Zea mays
caggcatgtgaccagttaatggttctctgttctcaagcctacatcgacacggtccttaatcgactcatacagagacactacaccgagactctcttctcgtgcaagacactcgcccggtctcagcttaatcatttaaaacccaaagtttggtacctggcagaggtacatcttttcccgatgttgaacccatcacggccatgatggatccaccatcaaggtttattttcaaaaacatgcttcccactttgccaatcatcttttgtaaaacaaaccttttgttttgctagagcaatactaagcatagtaaaaccttttgtaaaaacagggtttcaaggaagggaatcaagttcaaggaacgtaatgcacgaattgttaatcattcaactcctatcacctaatgcattaatcaagtgagagagattttaaaacatcacgagg

SEQ ID NO: 34901 - DNA, 354 bp, Zea mays
  unsure (1)..(354): unsure at all n locations
agcttgagactgacataagttgctaccgacgttaacatcttgtctgtagatnattctattccaatttcaaggtaaaaacttttctctgactttntgttgctttgagcaacgaaggtgttttctaacgaaggttgcttgtgcacagagtatgctgntgagtaaagctttgagaatgcaacaagatcttgaagataaaanacatgaagttataattgatggtttagaaagcaaattaaaagatcaagcagctgctcttgaaaagaagggatttgagcttcagacaacaaaaagtttattggcagaagccgaagcttaaaatggcaaagttaaatacggaacttctctcgaagtcag

SEQ ID NO: 34902 - DNA, 282 bp, Zea mays
  unsure (1)..(282): unsure at all n locations
acttannaaactcaagcttatcccgagactttatgcgaaagacaaacagctaaccgtttttcttattccccgccgcntcntactccggcatgcatggcttcctttgttacgtatatacagccgcatacccttcattgcataaaaaccattctacttgtcattcttttttcagatgccatgccgcacatttgtatacctcacaatttttggcatcaccatttctacataaaaatatcataaatcaatatcaacagttgtaggaaaccaaaatggtcgtgcgga

SEQ ID NO: 34903 - DNA, 383 bp, Zea mays
  unsure (1)..(383): unsure at all n locations
agcttgccgcagttgtgacagccgtcgtctcttgccggcttcttgttgccgacngcgccgccttgggcacctccacgggcaccaccctcagcatgtcctcgcgccccggcctgggcgcctncacgcgccttgtgcggcttgccgcgtttgcggcctcgtgtcgaggaggactcccccttcttcttgtcaccctggcaggcctnccactgctcccgagtgagatgtagcttcccgccgatagtgataggcccagagagagcatgtggttcgtcgccgtcgatcaccttgaggcgaccaatcgcctcttcgatcgtcatcatggagaggtctagcagagactcgatcgagcgagcaatctgcctatacttctcggggatgcaacg

SEQ ID NO: 34904 - DNA, 391 bp, Zea mays
  unsure (1)..(391): unsure at all n locations
tatgagatcaattgtttccgaagttntcactgatgcttttggttctccaagatccaccacaaggcaggggggcatatgttggacaccaaaatgagcggacggtccggcccttgggcccggacggtccgcgtatctcgagattagattaaactccaatgtttatccttatctcgtgcgtggntatccatctaatcacgcgagagtttgttggctatctcttatgaaaaggtccagacctcctcccctataaatataaaggggtacggccgattgaggaccccccgaacacattccaatcgaaccaattaccttatttacttttcctgccctaggagtagatgtagcataattctagttgtagtcttccgcatatctaccttcacccctattc

SEQ ID NO: 34905 - DNA, 436 bp, Zea mays
agcttcttaatggagaacacattctgggacttatcaatgttcatttcgagaaagacagggcttgtagcgcatgtcatgcagagaagcaagttggtgttcatcatccacacaagaacatcatgacgactgacaggccactcgagctactacacatggatctattctgcccgatagcttacataagcatcggcgggagtaagtactgtctagttattgtggatgactattctcgcttcactcgggtgttctttttgcaagaaaaatctcatacccaagagaccttaaagggattcttgagacgggctcaaaacgagttcgccttaaggatcaagaatataagaagcgacacacggactgtattcaagaactcacatatcaaatgctttcttgaggaggagggcatcaagcatgagttctcctcttcctacatgccaca

SEQ ID NO: 34906 - DNA, 229 bp, Zea mays
  unsure (1)..(229): unsure at all n locations
attgcccaacacaaatattggactacctaatttgctctagattataagttctacaggtcccaaaggttcacancaaaccattacanagataatagatagggttcaaatcaaaggagcaaagaaaaccanaggctgccctggtctggcgcatcggactgtccggtgtgctaccggacagtgtccggtgcaccaaggagatcaactccgaacttgccaccttcgggtttct

SEQ ID NO: 34907 - DNA, 432 bp, Zea mays
  unsure (1)..(432): unsure at all n locations
taaagcaatggtaagtagcataggctagtaatatgctattttattcaagcctcgctacgggtgcataggtttcaccgaaatccanaccttcgacttgtgaatatcctttggctataagtcgggctttgttccttgtcaccacaccatgctcatcttgcttgttgcggaatacccacttggtttctacaacattttggttatgacgtggaacaagatgccgtacctcattcctcgtgaagttattgagctcctcttgcattgccaacaccccatctgaatctcttaaggcatcttctaccctgtatggctcaatagaagacacaaaagagtaatgttcaaaaaaatatcgccgaggatggagttcacagggtgatctcgttgtatcgcttgatggactcttgngtgaggcggtctntgaccctgttcttcttg

SEQ ID NO: 34908 - DNA, 421 bp, Zea mays
agcttgacaacatcatttgacatttcacataatatttctgagatcttgaatatttagttcattcctcaacatgcaaaagcgggtcttatcaagtggcttagtgaaaatatccgctaattgatcttccgacctcactccttctaaaatgatatctcctttagcaacatgatctctaaggaagtgatgacggatatcaatgtgcttggtgcgagagtgttgtataggattattagcaattttaacagcactctcattatcacacaacaaaggtactttttttagaactacgccatagtctagaagagtttgtttcatatataaaatctgtgtgcaacaagcacctgcggcaatgtattccgctttggcagatgacaaggcaacactattttgctctttggatgtccatgaaactagtgatcta

SEQ ID NO: 34909 - DNA, 448 bp, Zea mays
  unsure (1)..(448): unsure at all n locations
tcactaacatatgggaaaatggcggccgatgaatggcccatgaaataataaagaanaacgaaaaagatattcatgacactccagagtcaataaaagcagttgaaaaggctgcggagcttgagagacgaatatgtattactgaatggttttaactttgttgtttattattgtgacttcgaactgatttatgttttctaccgcagctgaactatctcctcccctagagcccttcgagtcactggcagacccagaggcaaaggaatcaacagaaattattaagatggctgaaactattgtagacgaagtcgttacccaactgctaacgaagctgcagataaagttttgaaagaagaagaatagctattgtaaaaacattgctagaatattaatgtaacatttggtggatagtactttgaatattgagtgctcatgggttttgaatgtaata

SEQ ID NO: 34910 - DNA, 413 bp, Zea mays
  unsure (1)..(413): unsure at all n locations
tgacgcatgcaagcttcagttggccgccagggtcatcgttgcctttgagaatcctcangacattatcttgcagtctgctaggccctatggccagagggctgtcctcaagtttgcgcattacactggtgcccatgccattgctggcaagcacactcctggtacattcaccaaccagttgcaaaccttcttcagtgagccacgccttcttatactgactgacccgaggactgatcatcaggtaaaacttatatctgttgaaagaaaaactacagcgtgcaactcggtttgctgattcacaggactntaaaatcttcttatccaaactttgtacagcccattaaggagtctgcgcttggaaacattcccaccatcggcttctgtgatactgatatccctatgcgctatgttgatat

SEQ ID NO: 34911 - DNA, 419 bp, Zea mays
tgcttacttggtaagatgaccaaggcgcccttcacgggtttaccggatatgactttagatttattggaactcatacatactgatgtgtgcggaccaatgagtacgacagctaggggaggattccaatacttcataaccttcactgattaatagatatgggtatgtctacttaatgaaacacaagtctgaatccttataaaagttcaaagagtttcacaatgaagtagaaaatcagcgtggcaagaaaattaaagcactgcgatcagatcgtggtggtgaatatttgagtcatgagtttagcaatcatctaaagagttgtggaattgttccacagcttacgccgcctggaacgcctcataggaatggcgtgtctgagcgacataatctgactctattggatatggttcgatcaatgatga

SEQ ID NO: 34912 - DNA, 411 bp, Zea mays
agcttatgaagattcttcatcccaacatgggctagtcggcggtgtcagagccaacccatgttagtcttagcaattaagcatgtgtcgagctcagctctatcaaaatctactaagtatagctgaccctctaacacacccttaaatgctattgaatcatcacttcttctaaagacagtgacacctacatcagtaaaaagacagttgtagcccatttgacataattgtgaaacagaaagcaagttgtaatctaaagaatctacaagaaaaacattggaaatagaatggtcaggagatatagcaattttacccaaacctttgaccaaaccttgatttccatccccgaatgtgaatagctcgtggggatctttgtttttctcataagaagaagaacatccttttctcccggtcatg

SEQ ID NO: 34913 - DNA, 406 bp, Zea mays
  unsure (1)..(406): unsure at all n locations
ggactntagttgcacaaataacattgccgagtacgaagtcttgctnttatgtcttcggaagctaaaagcaatgggaataagaagggccatacttaaaactgattcccagattgtttcgggtcatgttgacaaaagttgcaaggctaatgacccgaagcttgaaaaatatctggatatggttcgaagagttgaagcctccttcgaaggtgtttctgtcaaaaatatccctcgaggacaaaatgagcatgctgatttgctagctaagtcagcagcacaggggctgcctttaccttcggatgtgttcttcgaaacaataaaagcaccttctgtggaacttcttgaaagagcagtccttaatatatctcctgtttttagcgaagattggagaactgagatcatctcttac

SEQ ID NO: 34914 - DNA, 343 bp, Zea mays
  unsure (1)..(343): unsure at all n locations
acctctaagctctntgacaatagaaccactttatctagttgtatcttagatgcaataatgcatgagtgaaagtttaagaggttaaactaggtatgaagcagagataaatgcaaaggacatgctttctcttcctattacacaagatatgtaaagaaagtatagaaaaaggaagatgtaggtacaagtttgaatgaaaggaagtggttttacccttttgtaccttcacatagagacgctctcttcattgtgctttgtccttagtcttagttgcttaagacctatacttaatgacaatatgtggaaatactttgcacaagagagagttctataacacatagtgatc

SEQ ID NO: 34915 - DNA, 395 bp, Zea mays
  unsure (1)..(395): unsure at all n locations
cctatgaaactcaagcttacanatgactctgataaatgtacaaacaacattgcgaagtatgctacgatcgttctaggcctgcgcaagctaagagccctcggcgttcggacctgcatcctcaaaacagactcgaagatagtcgcaggccaaatcaagaaagattgtgcgacacatgtgccaggtctcctgcaatacctatccagaatgcggagtcttgaaaagcaatttcgaggcttcaccgtccaacacattgaccgctccagaaattaagcggataccatggcaaacgctgctgcaagaggagaccccttaccctccgacgtgttttactaggtcattgaaacacccttcgtcaggcattcagacttaaaagcaatatctgtcagcatgatatg

SEQ ID NO: 34916 - DNA, 439 bp, Zea mays
  unsure (1)..(439): unsure at all n locations
agcttctaaagggagaacacgtgatangtctaaccaatgttactttcgaaaaagatagaccttgtgcagctggtcaagcaggtaaacaagtgggaggagcgcatcacaacaagaatgtgatgaccacgtcaagacctctggagctgctacatatggacctcttcagacccgtcgcctatctaagcataggaggaagtaagtatggactagttattgttgatgacttttctcgcttcacttgngtattctttttgcaggataaatctgaaacccaagggaccctcaagcgcttcctaaggagagctcanaacgagtttgagctcaaggtgaaaaagataaggagcgacaatgggtccgagttcaagaaccttcaagtggaggagtaccttgaggaggaagggatcaagcacgagttctccgctccctacacaccacaaca

SEQ ID NO: 34917 - DNA, 450 bp, Zea mays
  unsure (1)..(450): unsure at all n locations
tggaactnccatactgaagatagaggcagattttgagatggtatcttacaagataccgaagatagatgtggatagaatatcgcgacatatagagacaaaatgcagcgatcattntgagagaatatccacaaaagatagcacatcagtatagtctcgtaatggatcacgactactaactgtgataccagcgcgtgccgagcagctcaaccatgtgtgcaccatagtaggctctcggtttcgtcgcggcaccatcagtcattagtcatgacaccattaccaaacgtaaccaatgaaaaattcacgtggcataattagatggagcccatgagagtatggctcagaaaataagaatgtgaccggagttgaagcaaagattgttggcaaaagagcatcacatgagaattntattcaactcagagaactattttatgatcatcacgggtattatca

SEQ ID NO: 34918 - DNA, 491 bp, Zea mays
  unsure (1)..(491): unsure at all n locations
gtgatcctctgagtcacctgcngcatgaagcttgtgganagacgtggtaaaatattntgtgattctttagtctcgnttcgctatcgntaggggccagctcgtttctgggacgagcacactcttggactaatcatgagggcttgtatcattatgcacaatatgatagtagaggacgagcgtgaggacgaagatgatttcaattatgatggggtgggagaaaagctgaagatttctcgtgacgaaacaccagaactagatgagttcatacaaaattataagaaaataaaggataaacatactcacagtaagcttcaagatgatctcattgagcacttgtggcaacatcatccagacctctacaaaaatttctttatgttcatttgttctttggatacttttactttaaataattcacatacattttgtaattttcttggatntatgttctagtttaataatatttatggttcacatacttagtcctttatgtg

SEQ ID NO: 34919 - DNA, 429 bp, Zea mays
  unsure (1)..(429): unsure at all n locations
ccccaatatatttcgtaccaaggttcttagnttatcaaagaaaaattatacagaattggagaaggtactgtatgctgttttgatggcttccaagaagcttcggcattattttcaagcttacaacataattgttccttcttcacaacctctgaaggatattatgagaaaccgagaagctactggaaagattggaaagtgggctgcagagctcaatgaattttgtattgattatgtccatagatcttcgattcagtcccaagcgttggcagacttcattgctgactggacgccaggggctcgggaggaagaaacaaataaagatgccgaagcatggacagtgttttgcgatgggtcttggggaaccttcggagcaggagcggctgctgtgttggtttcaccttccaaaagtaaaacttgttatgcggcaag

SEQ ID NO: 34920 - DNA, 394 bp, Zea mays
  unsure (1)..(394): unsure at all n locations
agctntgtggaaaaacagactaagcgcgaaccgtccggaccctngcggcggaccgtccgcgacaccaaggtgaccctcggacaggaacactgcataaacgcgagtctacactacggaccgtctgatggaaaagcaagcaccgtctgagaccaagcgcggaccgtctggcctcaggcgcggaccgtccggtcggcgcagaaccgaaaaacccgaaggtgacgggttcggtaaaatgaattatagcgtcctcgcggaccatccggggtgcacgaccggaccgtccgcgactgcctttatctgacatatgacgacgcattaaatgctatatagccgttgatatagccattactgctgatcgttgcgaattcagtcgttgatgtgcaggggcggatca

SEQ ID NO: 34921 - DNA, 455 bp, Zea mays
  unsure (1)..(455): unsure at all n locations
tctacaaagtantatattagcctggtgcgtgtacggtgttgtgccctggacccctggtggccgtgttacgacgttagggtcttatggttagcaaataacgagagcaaatttattttatatgagacatataaatccggacccacgtgtcatatattagcgggttccccatcgggtagcgggtatggggaaacatagaacatacccacgcccaccgtacccgatgggcatagcaaataacccaataaaatactcatgggtatcaaaatctgccatacccgtgccctaatagggtttttgcccatcgggtttcgggtttcgggtacccattgccatccctagacgtggcactggctaaagactggtagagagacgcatctgaggcaacggcgagcgcagacagctaccgcgtgctgtatcaggagccagagtcggatctctcaggagagaatttgtct

SEQ ID NO: 34922 - DNA, 443 bp, Zea mays
  unsure (1)..(443): unsure at all n locations
agcttcagcagaatgactgccanagttcttctctctcagatcggtagaaatgtgctaacttatgtcgatgatatcatagtaaagagcatgaaacaagagaaccatgttgctgatttgcaagaaacatttgccaatttcagataggctggtcttaacttaaatccagaaaaatgtatctttggagtgaagaagggcaagtttcttggttgtctggtatcgacaaagggtattgaagccaacccaagcaaaatcgaagctatccttcagatggaaccgccaaatttgagaaaggaggctcagaggttagcaggaaggctggcatcattgaacagatntatttcaagatcagcagagaggaacctgcctttgaagagctgaagcagtatttgatagatctaacaactctaaccccacctctcgtaggaaccccattacttctatat

SEQ ID NO: 34923 - DNA, 451 bp, Zea mays
tgccaatacttgtcaaagcaatagcacatgctatcacatcttctacagaccataccagtgacctggcctttcgcatgctggggactggatatgattggacctttcaagaaagctcaagggggatatactcatgtattggtggcgattgacaaattcactaagtggatagagttcaagcccattgcttctctaacctctgctaaggccgtggaattcatacaagacataatattcagattcgggataccaaacagtatcatcactgacctaggatccaacttcaccagttcagaattcttcgacttctgcgagcaaaagagcattcagatcaagtatgcatctgtagcacatccaagagccaacgggcaggttgagcgagccaacggaatgatattggaggcactcacgaaaagggtcttcgataagaatgaaaaattcgcacgaaagtgga

SEQ ID NO: 34924 - DNA, 342 bp, Zea mays
  unsure (1)..(342): unsure at all n locations
agctntggatatccgatattatccatcataaagtggcacacatcgatctccatgttatccatgcaacaataaagataatcatcttgtcctctaccaaaaacagtcgcccttggcgaatatccctgtctctcggcaaaagcatgtgttttggcaatttgctccaaagtcatctttttgtcgactacatggtgaatcacaaattgtccagggccagttttcctttntccctctgaagggatttcttctttggagattttttcttccttcatttcttttggctctttggccccctgaccttgtcccctcattattctttgggatagctaactgttctggagtatt

SEQ ID NO: 34925 - DNA, 444 bp, Zea mays
  unsure (1)..(444): unsure at all n locations
ngccccgagactctggtctgatggttctggtgagtactaagtctccttctttgaactctcttgggatgacggtgttgtcacgccatgccttattctgtgcttggtatttgtccagtgcttccaaagcgaggacacggtctccgttgataaggtcttttggaggttggttcgtcgacatcacgggtggttgttgggcttgttggtggggatccgtgctttagctcttgcggcatcattactttggatccgtacatcaagcggaagggtgtgaacctaggtgctctagattctgttgtgtttaatgcccatatgacttctggtagttggtccacccatttgccctttttgtaatcaagtagccttttcttgattgcgctgaagatctttgtgctggcgcgctcgactacaccgtttggatgtgggtgctagacggaagcgaacact

SEQ ID NO: 34926 - DNA, 412 bp, Zea mays
  unsure (1)..(412): unsure at all n locations
agctntatatatagnaatgagctcggctccaatatctatggcgccgagctcggtgccacgtcggcgccacgacgtctgtttgtgccagcgcagcacgtacctcggcgccatagtctatggcgccgagctgtgttacctcggcgccatatgctacggcgccgagcaaagggtccaaaaatgacattaaaattttttagggtctaaacatgaattatttttcgagaaaaggctaaaatgcaaaaaaaatcgggagtttttgccaccggaaccatttctttgttttttgcaacgaacatgcgcattccactactttaggtccaaaactcatgtttggggtggtttcacgcaatattcattgtcgcacgtcacccatttcgaaaactggtgtcggggtgtatacaaaatcgatatt

SEQ ID NO: 34927 - DNA, 457 bp, Zea mays
tgcacttacgaacaaaccgcacccgcattcatatcacattttatggctcaacaatagtggtaaggtcaaggtaaccaagctgggtcgaattaattttgctattggttcatatcgagatgttgttgactgtgatgttgtgcctatggatgcttgtaatattctgctacgtagaccatggcaatttgattcagattgtttgcatcatggtagatcaaatcaatattctctcatataccatgataagaaaattattttgcttcccatgtcccctgaggctattgtgcgtgatgatgttgctaaagctaccaaagctaaaactgagaacaacaagaatattaaagttgttggtcataacaaagatgggataaaattgaaaggacattgcttgcttgcaacaaaaactgatgttaatgaattatttgcttccactactgttgcctacgccttggtatgcaag

SEQ ID NO: 34928 - DNA, 339 bp, Zea mays
  unsure (1)..(339): unsure at all n locations
agctntctattggtatatattgacgtgatcggattgtatgaaaagttataaaatataatttactctcttcgattcaaattgtaagtcgtttttgttttgtcctanatcaaacttatctaaatttgatcaatttgattggaaaattcaaaaaatacattagaatttacactattaaaatttgcccctcatatgagcaggataatgagaccatcgaacacatcctttgtggctttgtgtttgcgagacaagtgtggtctctcatctttcgtcattatgggcttcgtgacttctcacctttcccagatgacagtatcttctgtgactagtggatgagaatac

SEQ ID NO: 34929 - DNA, 441 bp, Zea mays
  unsure (1)..(441): unsure at all n locations
actcagcttctaagggagaacacgtgatagggttaactaatgtgctattcgaaaaagatagaccttgtgcagcttgtcaagcagggaaacaggtgggaggctctcatcacaccaaaaatgtgatgaccacatcaagacccttggagatgcttcatatggacctcttcggtcccgtcacctatctaagtataggaggaagtaagtatggtcttgttatagatgatgatttttcccgcttcacttgggtattctttttgcaggataaatccgaaacccaggggaccctcaagtgcttcctcaggagagctcaaaatgagtntgagctcaaggtgaaaaagataaggagcgacaatgggtccgagttcaagaaccttcaagtggaggagttccttgaggaggaagggatcaagcacgagttctccgctccctacacaccacaac

SEQ ID NO: 34930 - DNA, 401 bp, Zea mays
  unsure (1)..(401): unsure at all n locations
cggtatattggtccttttcctgttcttgaacaatatggagcagtgtcataccgactccagttaccctaaaccttggttgcagtacataatgtgttccacgtgtctcaattgaagaagtgtcttcnggttcccgatcgaaccattgaagtaacggatattgccttataaccagacttgacatattcagaacaccctattcgagtcttggatcaaaaggacagaattacctgaagaaaaactctcaagttttacaagatacagtggaaccaacattcagaagatgaggctacatgggaaactcatgactttttataanagaatttcccaggctttttagcctcatgtaatttgtanagtatgcacattttgtataatagaggaatgaaccccataccacccct

SEQ ID NO: 34931 - DNA, 374 bp, Zea mays
  unsure (1)..(374): unsure at all n locations
aaccttttggagaggtggattcatcatttggtctccatcgntcattttcttcttcttccttaacaaggtagtatcacaaataccaaaagaagtagaggcacaaaaagaactatcattgttggactcatcaactttatttttaattctagtccaaatatcatgcgcatcataaatggattcatcattatttgatatgaaggcatgataatcctcattgctaagagaattgcttaagatgtcataagctacgtagtttaagcgaaaacatctttgatcctcctcggagataatttttccattataactaggagggaagatactcttgtccataatttgttctaattgtggatctacgggtctaaaagcatttatca

SEQ ID NO: 34932 - DNA, 455 bp, Zea mays
  unsure (1)..(455): unsure at all n locations
gcttcggaacactacgacttcattctcttcgtgtgtgtggacaagtcttctccccttcgtcggcccttacaacggacaaatcccggaaataccttcctctcatgttaacaagatgattctctttgatagttgatttaccataaactgaatggcttggtcgccaaggacgatcttcggagtcttcgccaccgctgtccacatcataactttcactgtcaccagtatcttcagacagcccttccagaatctccttggtgattttttctgtgttggtcttcgacatcgctataagaaatcctaagttcttctcttcatcaagattcagcttcatctcagcagcagccttcttagcagcttcagacatcttcngaaacactaaaaaacttgttttaaagccgaagcttcaagctganagcttacanatacagcgcacaaagctaaaaattagtgagcga

SEQ ID NO: 34933 - DNA, 451 bp, Zea mays
ttgaaagagaacactgagtatattatccgtcatgcttcgggaaaaaatctttctaaagaagaaaagcgagaagctcaatactgtgcctagaaactgaaatatccaaagggggcattggtattccacggcagcggggaagaagatttcttgtattgtctcccagacaacaaggagatttctgtctgccggaagatgagcagaagcttcggattcccgacactagaagacgggctttctgtgctatcgaaagatgaattggccgacagcttagcatataatagtttaaaggtgtgagaatgaattttttgtacttaaagacaaaatttttttatacttaataccgcacttcttttgcagggcctgattcttagcaatgccctcagggcgcagaaaagtgtcgaagacgaaggatgcactatacctctgaacaaccttcgttcccaagtaattg

SEQ ID NO: 34934 - DNA, 447 bp, Zea mays
  unsure (1)..(447): unsure at all n locations
agcttatgtttcatatatatgtgnaacataatttgannaggctatgattntnnttgttacagcagtttatttaccaatataaaagtaaccaaactgatgcctaccacaagatccttttttagaaaataaaatgtaaacatcatattacgagaagacaaaagagaaaacttcaaaccttcgagcagctcttagttttcccctatattccgatgtagtacttaaggtgtagcagccaataagaaattcccaaacttccgctcgaatagaaggatccacaccctgcacatcatcaatagagatagaacttattacatggccattttcattttttttcataattcagcattctgttgataacaaaaaaaaaatccactgatgcaagtggcaacaccaatgggtatanttgagtcaatttattagttcaattctatcccatatccccattta

SEQ ID NO: 34935 - DNA, 358 bp, Zea mays
actctccttcaattgggttagtattctatccttagcgggatgtaccatagtatacgttaaaatccttgcaatataaaatgttcaatagtgcatataactttgacatcaactatatgtgtgcactaatttataggaatttaatctatccttttgggtttcaataatgatgattcatttgtcatccgcatacaaggataatcatttgtgaaaccctcccttgtgtgttaatgctctcttttctaagtgttttaacaaaggccttccaagtgccttcaagatggattcaaaatctacaaatattagagtcttggttctttcaatcattgagtttcaatggatctcatatcaagtatgatcg

SEQ ID NO: 34936 - DNA, 438 bp, Zea mays
  unsure (1)..(438): unsure at all n locations
agcttctaaagggagaacacgtgataggtctatccaatgttactttcgaaaaagatagaccttgtgcagcatgtcaagcaggtaaacaagtgggaggagcacatcacagcaagaatgtgatgaccacatcaagccccctggagctgctacatttggacctcttcggacccgtcgcttatctaagcatagggggaagtaagtatggtttagttattgtggatgacttttcccgcttcacttgggtattctttttgcaggataagtctaagacccaaggaaccctcaagcgcttcctaaggagagctcaaaacgagtttgagctcaaggtgaagaagataaggagcgacaacgggtccgaattcaagaaccttcaagtggaggagttctttgaggaagaanggatcaagcacgagttcttcgcttcctacacaccacaac

SEQ ID NO: 34937 - DNA, 460 bp, Zea mays
tcggcatagcccattccttcatagttggaaatactctgaaagccagaaattcctgcaccaaatccctagtgccaatgtgctctgcaataattctgaattcaaccaacgccgtttgggttggaccttctggtttcatactgcactggggtcgggtttctctgaagattagttcaagcggactctgtacaagcttctccttgtcgtcatcaactttgacgtagaaccattctgatttccagcctgccggccacttgcttcgatagctgatcataggaaattttgtagttttccgatatgcaaaattgtaacaaccaaaattttcatgtagcccatcctttctggccttagtttggtagtgtagctcgtgtactcggcagaaaccttcggcaaatggctccaccccctggcttctgagagcccaaatataaacactaagcctaacaatagcgttaggagttag

SEQ ID NO: 34938 - DNA, 112 bp, Zea mays
agcttcgtctagaagcaaccttggccaaattgtctctccaaccgaccgtatcgtaggcgcattcaatgcgaggatcgcctgacaccttattctgacacatgtgcctcaatcg

SEQ ID NO: 34939 - DNA, 354 bp, Zea mays
  unsure (1)..(354): unsure at all n locations
gttgataccaattgaaagtagcctagagggggggtgaatattctacacctgaaatttttcactaaaaacttcgagatagtgtcaaattcaagttgcactggtgcaaaccggttcagctgattttgtttacagctgaacaagtttgaacctgctcaacttaaattagataaatagttaaacaagtgtgacaaagtaatgatagatnttgcttaagacttgccatagagaaaaaccactcgaataggtgacaaatcggtatgaattgttttcacacgatttgcacacgatatacttgcatatgaactaaccaacaaattatagcacttatcaagaacacacaagaacacacgattt

SEQ ID NO: 34940 - DNA, 389 bp, Zea mays
  unsure (1)..(389): unsure at all n locations
agcttgcaggaaattggcacttactacagaaattataaanataaacacattcacctaagatgaaaactaccattaaataagcgaattcgggtggatctgatgcgaatacaataacgccttctactagtaccataacctaattaacttatagcatcaataaggtgctaattaaaaggtcaacgggcatttccccacctggaacagccagccaagttcaaagggacaaggagaagatttcacctctcagcgaggaacaagagatggtcctcatcagcaaactcggggagcaacacggcctcgatccgcccttcggccaacttggcggcgacctccangatgccgacgagcgcggcgtggacggatacgccagagctggagtgtcaggtctc

SEQ ID NO: 34941 - DNA, 460 bp, Zea mays
tgtgaagggtcttcatgcccacatgagctaagcggcgatgtcccaaccagcccatgcaagtcttatccattaagcatgcctctataacggcctcttcttttgccaaatcaactaaataaaagttgccgtctaatacaccctttaaagctagtgaaccatcacttcttctaaagacagacacatctatatttgtaaacagacaggtatatcccatatagcacaattgactaacagatagtaaattatatcctagtgactctactaaaaacacattagagatagagtgctcattagaaattgcaattttacctaacccttttaccttgccttgattcccatcaccgaatatgattgaatcttgggaatccttattcttgacgtacgaggtgaacatcttcttcttccccgtcatatggtttgtgcatccgctatcaataatccagctttgaccccccgatgc

SEQ ID NO: 34942 - DNA, 462 bp, Zea mays
agcttgaccgtcgattcctctaagctcgaatatggatcgcagtctattcgcgacgcgaagcgaagacgaacaagcatcagcaaacaaacatatacatatgcataagaacattacaccatacaaaggaaaataaagtcaaaacatgcaatatgaaatagagcgtgttactacagtcacgcgaggaaagaaacgcgatcgtcgaagctacggtctagaagttataacgtttacgccacgcaagtaatagccaggacatttaattcgacattataaaatataaattataactgctatgtagtttgattcaatctgctacactaacaactgtcaaataaataactaatataattagcacgagagattctaagcgagggtaagttacgatgcgcgaaacagcacgccagcttgcgaacgacacgcgcgacataacgcgcggacgacgcacgatacagcacgacagtg

SEQ ID NO: 34943 - DNA, 346 bp, Zea mays
  unsure (1)..(346): unsure at all n locations
agcttggtcattntattgcttactgtcccgtttatgatagtgaccaggagcaagggaaaaatgggaagagagagaacaagaaggtgtacaagaaggccaaaggcgaagcacaccttggaaaggagtgggatttggattgctcttcgtcagactccgacgacgaaggactcgccgccactgccttcaacaaatcggctctcttccccaacgagcatcacacttgcctcatggcaagggaaaagaaggtaatcactcgtaatgaaaatacttatgattcttctagtgatgatgaatctagtgaggatgaaattgattactctagtttattcaagggattggatagaac

SEQ ID NO: 34944 - DNA, 453 bp, Zea mays
tgtaagcctcaaactaaatgtactcaaacaagacctccttcctaaggtaacttgatccacgccaaaaacctatcacaggaatgctggtggtattccaagactttgtatagatcgactgcttagatctaagcaaattcatgaaatcacaaccatgcataccacaagcttagagcataccaaaacagtgaaatcgtatggaaacgacggtgagtaatgcgatccggggttccatcgccgcgcggagcgaatgcagggagccggggacatccgatgctaatatagcaattgcctcctacttgaccttggagaactccttgagagttcagatgggctcattggcagcacgtacgttgttgtaagaaacccagtcttcaccatggatcacctgatacgaatatagattaagaaaaatgcatagcaaaatataatgcagttgaagggaaatgcttatta

SEQ ID NO: 34945 - DNA, 347 bp, Zea mays
  unsure (1)..(347): unsure at all n locations
agcttcgacnatctttgttgtcttttcaccctgtacccctggcgtccaatcagcaatgaagtctgttaacgcctgngattgaattgaggatctgtgtacataattaatggtgaattcattaagttcagcggcccattttccgatccttcctgtagcttctctgttcctcattatgtctttcaggggtcgtgatgaaggcactattatatgacatgcttgaaagtaatgcctaagcttcctagaggccatcaataccgcatacagtaccttctccaattctgtgtaattttttctttgataggttgagtacttcggagatgaagtgtaccggtgcttgtctttttact

SEQ ID NO: 34946 - DNA, 335 bp, Zea mays
aggaccttaaaactaactttgcctatctgatattaacgaaactaacccttggttataacatatcaaacaactttgggtgctacaactattgagctcgctctggaacaaactgtcccgtgccaacctttctgaagagattggccggagaatggattaacaaatgggtctatataaaaaatgatttgaaagcttccagaaaatattaacgatgtcatcatgtgccccatcttggaagtgcttcggactcccgaaaccgataggataaatggatgaagtaaccgagaaatgcccatggacctctcgcggagtctgctcttttattgggacaagggatt

SEQ ID NO: 34947 - DNA, 343 bp, Zea mays
  unsure (1)..(343): unsure at all n locations
agcttgctctagcatcaaagtcattaagtacatgtgcaaatatgtttacaaaggccnnnatnntncatcattctcagttgaccctgctcataaagaagatggagtaatcaaggggannntgcagtacagggatgccagatacatatccccacctgaagttgtacataagattcttggttttccattgtttggtgtcaatccatannnnnnnnnnnnnncatgccatttaccaggtatgcagtctgttattattgacgagacaactaaactacaagacattgtcaatgagccaacttcttnnntnacaacactcacagagtacttcactaaaaatcgtgctgat

SEQ ID NO: 34948 - DNA, 451 bp, Zea mays
  unsure (1)..(451): unsure at all n locations
ggacctatgaaactcagcttcagaactatcgtaaaggacaaggggcaagctcttttatgccgaagcaagtcttcccggactcgctcgccaagacgatgaaatgaaaagacgtcctcatctttaccatgctaaatagctcaaatgtataggcttgaagatgtaattntattaaagttatactctgtgtctataaatagagaaacaatgtcatgtattgggacactcttttccgatcggggaaagtacgggcatctctcatctatgaagatgtaattcttccttcgtcttgtaagcctcacaaagtcgaaggtacaaatgtaatctctgatttagtattgaacaacgatgaagtaagtaaagcatggttaatttatgagattacgtgatatgggtgatggtcatatatacattcttcaaaatactattttgttaataccgtgcttattaaata

SEQ ID NO: 34949 - DNA, 378 bp, Zea mays
  unsure (1)..(378): unsure at all n locations
cagcttatatattctctgagatgtaccagggcttctgaggaagaatccaccctaggcatgttagatcaatccacagctccagtcagaatgatgacaaaggaagccatcttcagaggccacagtacacctcacagtctntagggcagcagcaaagctccttcatgccgccagctccaagggacagaggcgccacgggctgttaagaacttggtatcaactgcttcggctttgatagaaggtgaaaatccgggcgttgcgcaccagcaagtacaagatagcgtgaacagtacaagggtgctgttcatctatttataagcacacgacgcaacctgtgagaaattacattcttgccctttacaaatgaatacaatcataata

SEQ ID NO: 34950 - DNA, 447 bp, Zea mays
tactctgcaatgacagacgagagacgtgttctataatcctatatacgaggacattcggagagccggctactagagaaacttggaccatgatggatcatctcatcaacacacctttatggctcccctacaaaggactccatctaaatctctggacaagaataccttcaagggggatggctgtaacacgctaagcccattatcacatgtcggttagtttgagcaaaggactccaaacttggaaatcatcaccctaagtaagtgcaacccatcctaaatgtcatgccttggcgtatcatgcacatataaaggagagatatttccaaaccctaaagcaaaccccctttggacaataggagcactataagagaggatgaccaaaacgcttataaaaccacatgatcatgacttgggcccattataacaattgttatacacataatactctac

SEQ ID NO: 34951 - DNA, 395 bp, Zea mays
  unsure (1)..(395): unsure at all n locations
gatcttaagcacctgagctgcagcttatttttggacgtgtaaagngccttcctcaatggaccaatcaaggaagaggtctatgttgagcaacctcccggctttgaagatagtgagtaccctaactatgtttataaactctctaaggcgcttatgggctcaagcaagccccaagagcatggtatgaatgcctaagagatttccttatcgccaatggcttcaaagtcggaaaagccgatcctactctcnttactaaaacacttgaaaatgatttgtttgtatgccaaatttatgttgatgatatcatatttgggtctactaacgaatctacatgtgaagagtttagtaggatcatgactccaaaattcgaaatgtctatgatgggggagttgaagtat

SEQ ID NO: 34952 - DNA, 356 bp, Zea mays
tgcacgaggaagcacgatgtcctctgccctaacaatggaagcatttaccactcagtcttaccacctagttgtctctggccgaatgtgatggcagcgaccgcctggtggttggacgtcttgaatgctcgcgggcaccatacgagcgcttgcgccggatcgttgtccatccatccagcacatctttggcgacgtggtcatgcctgccgcagctcgcgggtgtcccatggacggaggacagacgcgatgtggtcgcagtgaggggggccgcagtgaatgtggatctgctgccaaatgcgcgtggcgtggcggagatgcattgcataggaggagtaatgtgcaagcgcacacgtttggtg

SEQ ID NO: 34953 - DNA, 386 bp, Zea mays
  unsure (1)..(386): unsure at all n locations
acacagctgaaagtgtgatattttggctttgcattagggtattcttgttatggcgaactgttctgcggtaattcttactgcaattatttgcccattctttgtttggcagggtctaattctctaaaagctcaaaagacacagaggatgaaagctaccacatgacacttagaaaccttcgaacggaggttataactttgaggaaagaaactctggaaaaggataagattcctctttctttggtcgaaagggtaaaaatcagtgaaaccaacctgtctactcaagtanaactggctatatcttcacgtcaagaattacaaaagaaacttggcgaagtaacctgaaatctcatgtggcgctaacaaatgtgagattctgatatcaacgat

SEQ ID NO: 34954 - DNA, 402 bp, Zea mays
gcttacacccttatgtatccaagctcgggatctactgcaaatgcgagtgtcagagcatggaacaacgcgtatctaaaatcttttatgaaatggagatatttacgaaaataatattaaatattttattcaatctaacatgtgtaaccacgtcaatctccctgtcacagtcaaaccgaaccgccgaaccgacccaccaaatgtgctaccatcatggtacgccaaacgcttgttcaccggtgatgtgtcgcctattgcagcaccatcgacctagatgtcgcgtcacctcaaatggcacagcaaggaaaaaatacacagccacgccatagcctcctctcttgtgttttctctagacgtgcgacatagtgacccgatacaatcgtcgcatgtcctctaacaacctac

SEQ ID NO: 34955 - DNA, 385 bp, Zea mays
  unsure (1)..(385): unsure at all n locations
ttccgcacaagacgtacagcacagcactgcactcgtgggttcactttttgccagngcgnntcttggttgatccacgcttttcatcccagtagtagttaacagtgctcttcttggttgcacttgtttattgcagcggtcgaggtcagggtccctcgaagccgatgccaccgcaggctcccccggctgaagcaagcgaagcgaggcagcaaagcgacggcctcgccacgtcgcggaaaagccccagagccgtcccgcgagaaaagccggctcgggataacttgagcattaatccagtaaccaacgaacgagaccttcctgggtgtgcaaaagaacaagcggatgcgtccgccataaacgcacaagattgtgcggttgcacgcggacc

SEQ ID NO: 34956 - DNA, 457 bp, Zea mays
ccttcgatcttattcatctttatcaagatgacacacttcttcagtagcttcatcgatcttcctttgaaggtcagccagtcgcgccatcttctccttcttcctttgtacttgctgatggatgatttccatgtccctgatctcttggtccaattcctcctcctggattgttggactggcagccttcctcttctggcttcgagcttctcggagagaaagagtttcctggtttgggtccagtggctgcaatgcagcagcccctgtcgctgaagctttcttcggcggcatgacgaaggtcagtgcttgccgaaggtggtcgaaagagttcaccggaggtgggcgccaatgttggctacttgttctcaattgctatgaattaagaacaaggcaacacacaacatgggttaaaggttaatatccttcgtccttcgaaacattatttctctgaagatataacgat

SEQ ID NO: 34957 - DNA, 407 bp, Zea mays
gcgcatgtcacgcagggaagcaagttggtgttcatcatccacacaagaacatcatgacgactgacaagccacttgagctcctacacatggacctattcggcccgatagcttacataagcatcggcgggagtaagtactgtctagttattgtggatgattattctcgcttcacttgggtgttcttattgcaggaaaaatctcacacccaagagaccttaaagggattcttgagacgggctcaaaacgagttcggcttaaggatcaagaaaataagaagcgacaacgggacggagttcaagaactctcaaattgaaggcttccttgagaaggagggcatcaagcatgagttctcttctccctacaccccacaacataatggtgtagtggagaggaagaatctaactcta

SEQ ID NO: 34958 - DNA, 464 bp, Zea mays
  unsure (1)..(464): unsure at all n locations
gcttgaagaactagcaacaaaacacaccgtgaatgttgttcttaaattgtaggcgttggtgatagaacatatggaacaagtaccatattgcattctacatttttcacaacagattcatggagcagcatgtaaaaaagtggtttctgctaaatntcacgagaaccggatcaaactgctacgaacagaacaccacaggataaacctgcatccagtttctctgtaacttattagcatacgaaatcaggattaaagttctatgaatttaagattcagaggtcccgacaggtgcactgccacattaaccgatgccaaaactctagctttacacaattaatactactagcaaaaagcaaatgacacccaactagacagaccaagcagcttgagttctacaaactgacaaggatgtgcctatcaagatgagaaacaagacgggaacaaacgcacggaaaagaggcccatca

SEQ ID NO: 34959 - DNA, 460 bp, Zea mays
  unsure (1)..(460): unsure at all n locations
actaagcttgtccttaaacggaggatataaaagctggagggtgtctgtttcttntgacgcttgaacattagtgtagctttgggctttgtgactgatcaactctggagcagctagagtgatgtagttgtgggcttttgaacaatagctggagtgatatgaaacattagtgatgtagttgtgggcttttgaactgcttcaagctggagtgatgtcgctgtggtgcttttgtgactgatcatctctagagcttttgtgaatgatctagctagctatatgtaaatgatctagttgtgaatgatattataattgtgatgcttttgtgaatatataattgtggtgtctttgtggttatgtgatggatctatgactgtggtatactgattaactgtgtatgtctttatgatttgtgtataaaaatttgtgatttgtggtgcttaattaaatgtatattattattaat

SEQ ID NO: 34960 - DNA, 425 bp, Zea mays
agcttctccaccatgtcgctgctagccaagttgttgcagctacctccatcaatgatcaaacgacatgaacgctccttaatgacacactttgtttgaaacaacgtatgtcgctgattctgctctgccttctccatttgtgcactaagcacacgctgtacaatgaggctctcataatgctctgcatcatctgcaccaatctgttcttcgggtggttccttagtgcctacatcatcagccgcaagcaaagcaagtgtagcttcatccaaatcactagcagaggaatacccaccatcgtcttttaccaccaaaacacgctgattatgacaataacgctgcacgtgtccatagcccttgcatcgataacacagaacatctcttgttctacctgtggaagctactgaagaggcactacctgcgggtttctg

SEQ ID NO: 34961 - DNA, 406 bp, Zea mays
  unsure (1)..(406): unsure at all n locations
nnttatttctactacatgtcatcctcaaactgatggtcaaactgaagttgtgaatagaactttgtctactatgttaagggcagttctaaagaagaatattaagatgtgggaggactgtttgcctcatgttgaatttgcttataatcgatcattgcattctactacaaagatgtgcccatttcagattgtatatggtttgttgcctcgtgctcctattgatttaatgcctttgccatcttctgaaaaactaaattttgatgctactangcgtgctgaattgatgttaaaactgcatgaaactactaaagaaaacatagagcgtatgaatgctagatataagtttgctagtgataaaggtagaaaggaaataaattttgaacctggagatttagtttggttgcatttg

SEQ ID NO: 34962 - DNA, 369 bp, Zea mays
  unsure (1)..(369): unsure at all n locations
tagctctaaaatgcaccatctctataccttcttactgatgtatgcaagactatctgcgagatcggccttcgtcatggcgcagagggcagcttcnagcttatggaaacccatacttctggtcatctcccggcagacagataattctttgctgtactggaggcatgactgaacgtcatcttctgttgtaccataaaacacttggccccccttcggatactgcaattcccgggcatagatgtttggcttcacatatatcttgttcggatagtctgtttccctaagcatgtctaaggatataatcatatgcttctgagagtgcttctagagtcacagattacgcttctttggacacattcttcttattagcta

SEQ ID NO: 34963 - DNA, 449 bp, Zea mays
  unsure (1)..(449): unsure at all n locations
tgtactntgcctcaacatggcctgattggtgattggcgcttttgtttagcacgcctgctgacgcgcccactttcaatccgccttcggtcacatcaactgccatatctgtccccacggctgactgacccacggccccatgcctggtggtttcgtcgggccacgtgctgggcgccttggggccgctgcagaagactattgcgtgcagcggttcgctccttccgcacctgaaatccggcacacaaactgtatgacttgtggacccgggcccccgtgtcacagactgggtgtctaggtcctatgtgcccgtcgaacgggatttcctgcggcgattcaggagcacgcgggagagtttccctaaaaaggattcaccccgcgcgcagcagttgcctttcgcattctcttccaatcgactacgcncctttgccttcgtgctcctctattacacgccc

SEQ ID NO: 34964 - DNA, 454 bp, Zea mays
  unsure (1)..(454): unsure at all n locations
agcttctaaagggagaacacattntatgattaacaaatcttcattntgagaaagacaggatttgtagcgcatgccaagcaggaaagcaagttggtgctcatcatccacataagaacatcatgacgaccgacaggccactggagctcctacacatggacctattcggcctgattgcttacataagcatcggcgggagtaagtactgtctagttattgtggatgattattctcgcttcacttggatgttctttttgcaggaaaaatctcatacccaagagaccttaaagggattcttgagacgggcgcaaaacgagttcggcttaaggaccaagaaaattagaagcgacaacggaacggagttcaagaactctcaaatngaaggcttccttaaggaggagggcatcaagcatgagttctcttcttcctacaccccacaacaaaatggtgtagtgga

SEQ ID NO: 34965 - DNA, 423 bp, Zea mays
  unsure (1)..(423): unsure at all n locations
tgagggtctcggcgtagatgatgttgaggcagctgccctcgtccatcangaccttggtgagcctgacatcgccgacaacggggtcgacgacgagcgggtatttccccgggctcggcacatggtcggggtggtcggcccggtcgaaagtgatgggcttgtcggaccagtctaggtaagctggcgccgccaccttcaccgagcagacctcccggcgctcttgcttgcggtgccgagccgaggtattcgccgcatgccctccatagatcatgaagcagtcgcagacctcggggaacccccctgctgggtgatcttcgttcttgtcgtcgtcgtgggccctgccaccctcggcgggtggcccggccctgtggaaatgacgccgaagcataacgcactcctcgagggtgtgcttgacnggcccctgat

SEQ ID NO: 34966 - DNA, 496 bp, Zea mays
  unsure (1)..(496): unsure at all n locations
atccttgagtcacctgcggcatgcaagcttaccttgcggagagatatcaactctatacaaaacctagattgcactttctagtttgattatttgcataggttttgctctacggatttaattgtggcctagtttagtaaaagtttgagaagtcctaattcacccccctcttagaagtcacccgtttcctacaagtggtatcaaaggccggtttggctcatttgaaacgctttatcttcaccgctaaaagagccatcgctttttagaggaagggatggatacccataggccaccacactttgacggcactaacttcccatattatagtgctagaatggcttgttacctagaggtcgttgatctangtgtttggagagtcactcgtgatgggatgaaacccctcatgaatcccgagacacccaccacgagtgaggaagaagaaattcatttaaatgctagagccaaaaatngcttggatgaatctcttagcatggatact

SEQ ID NO: 34967 - DNA, 465 bp, Zea mays
  unsure (1)..(465): unsure at all n locations
actaagcttgtggcctgtctcgancgagccgccatcttttattattttcttcctgataacctataccggatttctggctggtttcctccattgtcactgatgggattagttaccaacggaagcttacatagacaatctgacattggttttttatagcgtccgtacatacagtgtacatagaatctgtcctctgcggctcatagatgtacaaaaagaaatacgcgggttggtttaattctatatatattgtcaaagatttgttccacaatgtgtcgaacaatggccgcatttttgttcaagtgttaccgtgctgtggcggcatacaaaaattcaatgaattggtgacgtcctgcccaatcatatgcttnttagaaaagagaatatataatttcagccactgcatgtaaatattctcattatccaacatacaacgattaagatatatgctaccaacagcacatacat

SEQ ID NO: 34968 - DNA, 412 bp, Zea mays
  unsure (1)..(412): unsure at all n locations
attatagagcatacttctagcaaatttgaaattttcattttctaagtcatgctcattaattctagcactaagctgagctatgtgatcattttgttggttaattaaagctaggtgatcatggatagcatcaacattaatatctctacatctagtgcaaatagaaatatgctcaacagtagaagtagagggtttgcaaacatttaattcatcaatcttagcatgtaacatggcattttcatttctaagattggaaacaacatcattgcaaacatttaaatctttagccttagatattaatgnttcattctcaattttaaggctagaaatgaggcattcaacttatcaatcttatcaatcaaactagcattatcatttctaagaatggtaatggaatcatcacaagcatttaact

SEQ ID NO: 34969 - DNA, 462 bp, Zea mays
  unsure (1)..(462): unsure at all n locations
tcagtcttagcgctagtctcagttttagatagtcttagtttgtcttggtagcttgctatatcctgtgcgtttatgtttgtcatgatgaactatgtttggtttggatctctgtaatgattgtcaccagagtgtgggtatcccctgcctttcggtttacctattatgttaatggagttaggtatatagttgggaaaccctttattctactttcctctgtatctganaagctgggtggtctgtgttggagatcagtgaagatgctcatctgttcagtgctgttgaaggattctatactcttttcttatgctgcaagattagccagatcagatctgatgtgtggttgcattctgcagatgtcaaagaacacgcgtaaaggacgaacgcgtgctcagcatgagctagccgctcaacaagatgaggtgccccagcatcagcacctgctcgccacgcccccgatgtgca

SEQ ID NO: 34970 - DNA, 386 bp, Zea mays
cagcttacactacctttagcatctaagtttttcttatatttagaatcaaagggcaggtgggggtggggtttttgattacctacccactcctttgggcagaaaatcggggaagcgagaacgtagaaaatcctcagtctcccatgtagcctcttctactgaatggtgactccactgaaccttatacattatgatcgactttgtccgcgttgatctctccttttggtccaataccttgacagggtgctcttgataagacaagtctggttctatctcaatttctggttcaggtagcactttagtggggtagcggacacattttcgtagctgggatacatggaacacatcatgaactgctgacatgtgggatggcaacttcaattgatatg

SEQ ID NO: 34971 - DNA, 406 bp, Zea mays
  unsure (1)..(406): unsure at all n locations
taatgcccctaaaagattgtctaattatggtaagggcaatgctcccatgcctcacgataacgagggctatattttatatcctgctggttatcctgaggataagattaggagaattcatgctaagaagactcattctgtttcccatcatgcttttatgtataagaatgagacatctagttctaggcactctacacatgctaaaatgcctaaaaagaaatctcctattgcatcaaatgaacctaatgtttcatttaaaacctttgatgcttcttatgcgctcactaacaaatcaggcaaagtagttgcaaaatatgttgggggcaaacacaagggatcaaagacttgtgtttgggtacccaaggtgcttgtttctaatgtgaaaggacccaagaccgtntatgtacct

SEQ ID NO: 34972 - DNA, 451 bp, Zea mays
  unsure (1)..(451): unsure at all n locations
agcttgtcgaaaggactacaggtatgtttttttatctcttgngngnagcactggttgaattntacattatgttccatttataatctgtatggatcatgcagactataaaaaatgatgatttaaaggaaattagagagctgggttcacgtacttatggggcggtctatcatggtaaatggaggggatgcgatgttgctattaaaagaataaaagcaagttgctttgctggaagaccatctgaaagagagcgtttggtatgtttaatttgctttgttgatagatccctcaattttagattntgtgctttcaaatgtttgcactggccttacattattggttcgtcaaagtccttgacagtatattctgaaaatatttggaggtattaaaatgggctgaggagagtaaatctgaacttatgcttcagtgcanaatgattctagttcagctttat

SEQ ID NO: 34973 - DNA, 459 bp, Zea mays
tctaagggagagcacattttaggactaacaaatgtttattttgagaaagacagggattgtagcgcatgccaagcagggaagcaagttggcactcatcatccacacaagaacataatgacgactgacaggccactggagctcctacacatggatctatttggcccgatcgcttacataagcatcggcgggagtaagtactgtctagttattgtggatgattattctcgcttcacttgggtattctttttacaggaaaaatctcaaacccaagagactttaaaaggattcttgagacgggctcaaaatgagttcggcttaaggatcaagaaaataagaagcgacaatgggacggagttcaagaactctcaaattgaaagcctccttgaggaagagggcatcaagcatgagttctcttcttcctacacgccacaacagaatggtgtagtggagaggaagaat

SEQ ID NO: 34974 - DNA, 436 bp, Zea mays
  unsure (1)..(436): unsure at all n locations
aacacattntttgatttacaaatggtcattttgagaaagacaggatttgtggcgcatgtcaagccgggaagcaagttggaacccaacatccacacaagaacatcatgacgaccgacaggccgcttgagctactccacatggatctattcggcccgattgcttacataagcatcggagggagtaagtattgtcttggtattgtggatgaatattctcgcttcacttgggtattctttttacaggaaaaatctcaaacccaagagaccttaaagggattcttgagacgggctcaaaatgagtttggcttaaggatcaagaaaataagaagcgacaacgggacggagttcaagaactctcaaattgaaagctttcttgaggaagagggcatcaagcatgagttctctctctcctacactccacaacaaaatggtgtagt

SEQ ID NO: 34975 - DNA, 450 bp, Zea mays
  unsure (1)..(450): unsure at all n locations
tcttctccccttcgttcttgctcaccaatcaattcattatgttaaagctctctagcttcgtctgttccttgcatgctgttgtagacgaagggtaacttcgctacctgttagtaatacttggaacatgtttgactgttagtacgtgcaatgttttgaggaccttcggctataaaggccccaacaccacaacaatcttttattgcttccatgttgcatagttttatagaggatttgccacttcattttccacactccaaataacctttntatcacaatgtgtatcgatggcacctctcccttatatggcgctagatacccaatacgaattggatatcccgcatcaacaacataatatttatctacacaaaataaactccttacattcaggcagctaatattactatttttattaaaaaatagtaaaggttttggtgttcactgcagcattgg

SEQ ID NO: 34976 - DNA, 476 bp, Zea mays
  unsure (1)..(476): unsure at all n locations
gcttcgcctcgcccgaccttaggcctcagcctcttaatgaggtctccgcctcgcccgaccccagggctcggcctgaggagaagtctccgcctcgcccgaccttgggctcggatcgaccacaccacaggggatacatcattaccctaccctagctagctcaggctacgagggaacaagaccggcgtcccatctggctcgccccggtaacaggcaatgatggttccccgcgtgcgtccatgacgtcagtggttctcagtcccctacggaagcaaggagacgtcagcagagtcccagccgcaccaccagttgtgcttctacagggctccatcacttctccgacggccacgttatcgtgtacacagggctcaagcacttctctgacagccacgttggcatgtacacagggctcangcactcctctgccagacacgttagcgtatagctacacccnccattgtacatctggaccctctcct

SEQ ID NO: 34977 - DNA, 454 bp, Zea mays
tatacagcaagttcaggaaagtaggaagcttctgctttagtaaaaaatttcaacagcacaatggcacagtagcaaatgaatgttgtggtaacttctcaccagctcatctgtttatatagccccgaaggtgaagaaggcgaaccgccaagacgcccgtactggctgatcggtggaccggtaagcgccgtaaattttatatttgtttttaataacaagctcagggaaggtgtttttcggaccttcggcatccagaagccttcgtgtttttcgtggatcaagctcattatgaaaaaacgacctaacaccgcgaaggggctactgtttgtcttcttctctgccgaaggtcctcaagacgaagatatcgattgtaagcgatattggggtcttcttctccttcgaaggccctcgagacgaagacgttgtctgaaagcaacaacgtggaatgctaaagcta

SEQ ID NO: 34978 - DNA, 430 bp, Zea mays
  unsure (1)..(430): unsure at all n locations
gtttcttcatttttgaaccntacnggaacactaccccacttaaaagaatgagggtagatctcttgaatcttggggatttgaactccttaaagtacctcataacaagggtgttatggggccttcttctgctgttgctgcttgagcaggctgcggagaaatgactgacacanggttgattctgggacaaccttcttctcatcttctcttcgctatcttcttttctcttctcacttttcactgcctctntctttctctttgctcttcccactggaggattctatcaaagagtattaccatcatacactggaggaaaccaaagactatgaaccatgtgcaacagtcttcaacccaagaatcaccaagcatcgtgatcttatgggcgagggagtggaaaatggagttgcttgctatttggcanggnggtctatct

SEQ ID NO: 34979 - DNA, 436 bp, Zea mays
actaagcttgccttcgcttcagtctatcatccgcaatccaacggggtctgttgatctctctaatgggaaaatcttcacaactgtcaagaagatgctcctcgatgaaaaataggcagatggaccgaattgctaccggaggcagtctgggcgctaaacacaactgagtgcagggcgactgggttcactcctttccgccttctttacggatcggaggccatgaccccgcaagaaataaagcatgggtccccgcgtacagttccgtcagccgtccccgacgtggacgagccaacttcaaaagatctcattgacggagaccgggtcttcgccctacacgccctaaacaaataccaagcccagaccaaagcatggcgcgaccacgtagtcatcccgagggagttcagcgagggggacctcgtactcgttcgaacagctcgga

SEQ ID NO: 34980 - DNA, 406 bp, Zea mays
acggaactccattctacccctacgttctcttcatcgggggaagagtggaatcgtcccccatctccgacgatgagccaaccgtgcctggggaagaacctcctcagcgagaagctcgccgaccgaggaaccaacgccagaatgttcggcgacatcatgaagccggagaaggagacccgacatagcctgtatctcgagatgagatctcagaggtgggagaaactcctgatgaacgagccttcagggaaaggaggaattcccgccgacgtgatcgtcggcaggctcaagagcaagccgagtaggaggcgagacaacgccgagagaaccctctcttcggacgaaacctgaaccccgacttcgctcgagccatgaacacaccgagcgaggtcggtggagtggtggcttggat

SEQ ID NO: 34981 - DNA, 273 bp, Zea mays
atatttcgtatccggctagttatcctgaggataaaattaggagaattcatgcaaagaagactcattctacacaccatgctcttatctataagaaagaggcttctagctctaggcatcccacacatgtaaaaatgcctaaaaggaaaactcccattgcatcaaatgaacataacatctcaattaagactcttgatgcttcctatgtgctcactaacaaatcacgcagagtacgtgccaaatatgtggggggcaaacacaagggctccaagactt

SEQ ID NO: 34982 - DNA, 426 bp, Zea mays
  unsure (1)..(426): unsure at all n locations
agcttccacacgcttgcccctgggtcggctagcttgtctgaatagctctctgataagtcgctctagcgttnttgaggctgaacgtcatggaggtatagcagaaggctcccaacggcgtgatgaatgatgttttttcctcgtcttcttttgccaagctaatctgatgatacccagagtagcaatccaagaaagacaacacagaacatccggcggttgagtccaccacctggtctatcctatgaagtccgaagggatccttctgacagtgtttgttgagatccgtatagtcgacgcacatgcgccaatccactttattctttntgagtacaagaacagggttagctaaccactcaggatgtaacacctctctaatgaatccgaccgcgaccaagcgagccacctcagcacggatggcttctctcttgt

SEQ ID NO: 34983 - DNA, 474 bp, Zea mays
gaatacttaagcttgaagccatggtaagtagcataggctaataatattcgaattgacttttttttatctacgggtgcataggtttcaccgaaatccaaaccttcgacttgggagtatccttttgccacaagtcgagctttgttccttgtcaccacaccatgctcatcttgcttgttgcggaagacccatttggttcctacaacattttgattaggacgtggaactaaatgccatacctcattcctagtgaagttgttgagctcctcttgcattgccaccacccaatccgaatcttgtagtgcttcctctaccctgtgtggctcaatagaggaaacaaaagagtaatgttcacaaagagtatttgttttaccgaggttcggttctcgcaaacctactcctcgttgaggtggtcacaaagaccgggtctctttcaaccctttctctctctcaaacggaccctcggaccgagtgagc

SEQ ID NO: 34984 - DNA, 467 bp, Zea mays
  unsure (1)..(467): unsure at all n locations
acctgaggcatgcaagctttctctgaagctncgacacaacaaactgtatctgaatctgggccctcanagcccttcagggaagaaactttggaaaccgaagcgataaaaataccagaaccaattttaattgaagagactgacactgccatccccgaagcgcctgccagcatgtgtgattacattatacgacatgcttcggggaaaaagctatctcgacggagaaatcatgaagctaatcattatgcacaggagctaatatatccaaagggggcaataatattcaatgggacaaatgaagatgattttttatactgcctaccggataataacgaactatctgtctgtcgagaaatggccacgggcataagctttccgaagctcgaaagtggactaagcgccatgacgaaagaggatctcgcagacagccttgcgtacaacagcttgaaggaccggaattaaacgcttga

SEQ ID NO: 34985 - DNA, 362 bp, Zea mays
  unsure (1)..(362): unsure at all n locations
cactatcgaannactaagcttatgaagattcttcatnccaacatgtgctagtcggcgatgtcttattcttcccatgtgagacgtagcaattaagcaagcgtcgagtttagctcaatcgaaattcactcagtatagctgaccctctaacactcccttaaatgctatcgaatgctcaattcttctaaagacagtgacacctacatcagtgaatagacagttgttgcccatcttgcataattgagatacagaaagcaaattgtaatctaatgaatctacaagaaaaacattggaaatggaatggtcacgtgatatagcgattttacccaaccctttgaccaaaccttgattatcatccccgaatg

SEQ ID NO: 34986 - DNA, 453 bp, Zea mays
  unsure (1)..(453): unsure at all n locations
agcttaataagttccctgatgtcatgatnttctattcttagtgttcaagggaggatactgagaagcatgttgatgttgccattgtttttattggctcaaaggtatactcatctaatatttacttcttttaaagaatctgtttgtgcaaaaactgtttcaattaaggattaaaaaaaactgaagcaattcttatgcataaattcaaaattcaaaatcatattgagggcctgtttggtaatgctctggtttgtcaaaaaacagttgtagctctggcttttcctaaaaaacaacttttctggtagagctgaagtcatttcgcaaatcgtttggcagaaacggcttatcctatagccagagccattttcctatattaaaatgctagagccagagctaaagctggtgacactactatttgtggcttcttctgcgtagtacanaaatggctctggattt

SEQ ID NO: 34987 - DNA, 471 bp, Zea mays
ctaagcttctaagggagaacacatgataggtctaactaatgttactttctaaaaagatagaccttgtgcagcttgtcaagcagggaaacaggtgggaagctctcatcatgccaaaaatgtgatgacaacatcaagacccctggagttacttcatatggacctcttcggacccgtcgcctatctgagcataagaggaagtaagtatggtcttgttatagttgatgatttttcccgcttcacttgggtattctttttgtaggataaatctgaaacccaagggaccctcaagcgcttcctaaggagagctcaaaacgagtttgagctcaaggtgaagaagataaggagcgacaatgagtccgaattcaagaaccttcaagtggaggagtatcttgaggaggaaggaatcaagcacgagttctccgctccctacacaccacagcaaaatggtgtggtatagaggaagaacatgac

SEQ ID NO: 34988 - DNA, 437 bp, Zea mays
  unsure (1)..(437): unsure at all n locations
agcttntatgttgcaagtgcagttaccattcttgagacaatagaaacctcacctttgctgaagtattcataaggtacagatttggttcatatgacaaaatgagatgagcgggagaaaacagaatcatcagacatcaagcttacatagctaggattatagcagggaagcaataccaagcaaaacacaagcacaaaagagaagatacatttagaaacattattatttcacttagctgctcctagaacttgaggtcagatcagaatggcattaattaatagcacaaaatgcagtgtcaaaatacagaaatgaatgcattttaaacattgaaaacagcacagcagaagcagctaacatcacagtaaacaaatcaagtaataccagtaaaattggaatcgatcttgatgtgaagtcacctgatggaacccgcatccttaatg

SEQ ID NO: 34989 - DNA, 447 bp, Zea mays
  unsure (1)..(447): unsure at all n locations
ctggaggcgtcgatgggtgttctactcggtgtagattcgttctttttctcctccgncgccttgaatgcgaccagttgtgcttcgaacgtggagggatcatcaagctcattgatcttcttcgagccctcgatcatgcactcaaaacttacaaaattcccgattacttcctcgggggtcattagtgtatatctagggttgccacgaattaattggacttgagtagggttaagaaaaataagtgatcttaaaataaccttaaccatttcgtggtcatcccatttcttgctctcgaggttgcgcacttgattcaccaaggtcttgagccggttgtacatgttttgtggctcctcccctttgcgaagccggaagcgatcgagctccccctcgatcgtcgtccgcttggtgatctttgtgagctcatnctcctcgtgcgcggttttgagcaca

SEQ ID NO: 34990 - DNA, 478 bp, Zea mays
agctctgcaggagaaggagatgatatgaagctttggggtgcttgagaaagtcaattcaatttttattaactcaagctatcaatcttacaatgatctatatatccaagactggcccaaagttattttgaattattatatctgaaactcatatcatctcgggaaagatattgatgttgtaggaaataaagaaataccctgtgcgaaaaaacaaggcctacaacatggaggaaagccaaaggatggtaacatttatgcttttaagtgcaagtatcttaacttatcatttcttatgtgtcttgtgtagacacatagaaaaaggaagcacttcgattgttttagaattatgtcatcatcctttgaagaaattcctctcatatggtagaatgcatattcatcatttctatactatggcaatctacatgttttaaattatagtaagaaccttatggcatgatctacattaatcatccctttattg

SEQ ID NO: 34991 - DNA, 456 bp, Zea mays
  unsure (1)..(456): unsure at all n locations
cgatagtatgaaaaatatctttaacacaaacccttttaatatactcaaaacaccactgagcgatgggtcccacaatacataatgtctcgctattctagcgaagggaaggtgttttttctgaccttcggctaaaggcctttgttcatttcgcagtttgaatttgttacaaaggaacaaactaatactgcgagggactactgttggggccttcctcttccgaaggtgctcaaaaacacggctaaccatttgttcttagtattttattaagtactacaagagcttcgttaccagaaaaacttcgacataaatcaagtgatgtatgacgaagcaaatgaagcaagaagacgacaaaaggagaaggtattgttcaagttgttaagtacagatgacaatgttgtctctgtgacatttgtaaaccttgtatgtaattgtngagggcatgaatgtaataacatg

SEQ ID NO: 34992 - DNA, 414 bp, Zea mays
  unsure (1)..(414): unsure at all n locations
agctttaagctccttgacaataaaattacttcacccagtttaaacaaagatgtaagaatgaatgtttgagaagtttaaactaagtatgaagcacggttaatgcatgaacatcctttctcttccttttatacaagatatgccaggaatgtaggaagatttaagtacatgaataaacaagattgaatagntttacccttttgtacctttacatagtgatgctcttcttcattgtgctttggccttagtcttattgaattcgcctaagacttttactcaagacaatgtatgaaaatattttgcacaagagagagttctacaactagtgatccttctctaagtcattgttttagatatcaagtagatcacaaattgcataaatatatcatgaattcttcttttaacctaatggatatc

SEQ ID NO: 34993 - DNA, 365 bp, Zea mays
tctatcccattatcaagatgaatacaatcaatttctgacctcgcgcgagtgctagaaaatcactcgacttctaccgagatcctgattagcaagcagctactcgacctagcatactagtattcatctcaaaaaggaatcctaagttcatgcaactagagggttcaagcaactcctacacttaagtgcacattacagtcctacaagcattaagtgtagtaaagtagcatatattaacatggttatgcataaaaccggggcttgccttcaactgctggggctacgaggagaatcctcatagcagcctctgaagcctgctcctggtcctcctcttggacaggtccttgctcggggatgagcacgtactc

SEQ ID NO: 34994 - DNA, 457 bp, Zea mays
  unsure (1)..(457): unsure at all n locations
agcttattcaccacatgtgtgtaaatatcttgaggaagtcgagcatggtgtcttctcctcaattgactntgtttcttgttcccaagcaattttctttttgactctacaacttgtttctcaatcaaagattgacctttcttggggcagtggaggtcagcacatgataatactttaactaattgatcacttgtgcaagaatgatgttcacatgagtttaaactagtaattactacctcatgagcaatatcgagcatgatatggtcatcaactaatttactatgagaatacgacaacatatcatacttttcgcttagtgcaagcttttccaaattcatcatttctacttgattcctaagcatagaattctcagttttaagttgagcaacatcagataatacatcatgattatttctttgcttcactaaaatagattcataccgttggaccaaattattat

SEQ ID NO: 34995 - DNA, 458 bp, Zea mays
  unsure (1)..(458): unsure at all n locations
ctggttannaaagttggtgacatttgggattataaattattttctaaaattccagaagtatggattttggctattttaaatgtcccaaaattccctattggaactaaaaatcataaaattatttttattaaatactatagaaaattaggagcctagtaaaattgatctggtagttttagcatttttctacagttttctagaaattatttaaccctggtagaaaaataaaaggaaaaaacaatgaacagttctggaccggaactggcccaagtcggcccatctataggcggaagcgcgcgcgcccgctcccgtggtattgatcttgcgaataggccccccgacgttttgaataacttgaagcggggtcgcagtactattcctagagtcactgacactttacaaaaacatcccccaagttctatttcttcatagcccgaagtccacgacgatgaacagcg

SEQ ID NO: 34996 - DNA, 449 bp, Zea mays
  unsure (1)..(449): unsure at all n locations
ctaatacacctttataagcttatgaaccatcactccttctaaagacagatacatcaatatttgtgaacaaacaattgtagcccatatgacataattgacttacagaaagcaaactgttaccaagcgattctactaagaatacattagaaatcgaatgctcagtagtgatggcaattttacccaaacctttgaccttgctatggttcccatctccaaagataatcgtatcttgggaatccttgttcttgacataggagttgaacatcttcttctttgtaacgccctgaatttgagggttaaaattttctttctctaacactcaccaaattcaggcattgtctttcctttntctttntcttctcaaagttctagtgagagttaactcgatattgtgtataggtaaaccctaggagtaatccttttggttgtccatcatgccggatcatgca

SEQ ID NO: 34997 - DNA, 441 bp, Zea mays
  unsure (1)..(441): unsure at all n locations
ctaagtaatatttaaaagccttgggntaaagttggtatgatttggaccatgtttgatacttagaacccaaaaccctagcccctgccctatgaacttcactatggactccgaaaaccctaatttctcggagatccgtgaaggaaagttatattcaagacattagataataaaattttattatcttagcattttcatgagcattacatgagcattcatgattatatatggttatgtctagaaaacgaggaggaaatagaagttgaagaagcgaggacttcaccaccaccacctgaagaacctcaggcaggaaactgcttttactttgatatctgcggaacagagcccgattcacctatcatacaaggcaagccccggtgcatttgccacccccttgttatnttgaaatctttctcacttacttgatgcattaggttataggag

SEQ ID NO: 34998 - DNA, 270 bp, Zea mays
  unsure (1)..(270): unsure at all n locations
agcttcttcaccacgcgttcgtggatatcttgatgatgttgaccatgacattctctccttagntgtctcattttcttattttaagcaacttttcttttgatcctacaacttattgctcaatcaaagattgacatttctttgaatatcaggggttagcacatgacaatatattatatagatgcgcacatgagcaagaatgaggttcatatgaattcaaactatcaataacaacctcatgagccactacaggaaaacacttaattcctgtcg

SEQ ID NO: 34999 - DNA, 469 bp, Zea mays
tgtgttacaagaaggaaagtgggagcactggtcgattactgatcttgtatgtggatgacatattattgattgggaatgacattcctatgctggagtccgtcaaggcttcactgaaaaagagtttttctatgaaggacttatgggaagcagcatatattttgggcataaggatctatagagataggtcgaagaggcttataggattaagtcaagatacgtacattgacaaggttttgaaacggttcaacatggaacagtccaagaaagggttcatacctatgtcacatggtaaacaccttagccagatgcaatgtcctgcgatggctaatgagcgggagcgcatgagtaaggtaccatacgcctcagcaattggatcaatcatgtatgccatgataagtacacgcccagatgtttcatacgctataaatgctacgagtaggtaccaggctgatccaggtgaggatcactg

SEQ ID NO: 35000 - DNA, 452 bp, Zea mays
agcttctaaagggagaacacatttgatgactatcttatgttctatttgagaaagacagggtctgtagcgcatgccaagcaggaaaacaggttggtgcccatcatccacataagaacatcatgacgaccgacaggccgcttgagctactccacatggatctattcggcccgattgcttacataagcatcggcgggagtaagtactgtctagttattgtggatgattattctcgcttcacttgggtattctttttacaggaaaaatctcaaacccaagagaccttaaagggattcttgagacgggctcaaaatgagttcggcttaaggatcaagaaaataagaagcgacaacgggacggagttcaagaactctcaaatcgaaggttttcttgaggaagagggcatcaagcatgagttctcttctcctacacacctcaacaaatggtgtagtgga

SEQ ID NO: 35001 - DNA, 437 bp, Zea mays
  unsure (1)..(437): unsure at all n locations
tacagccatggtaagnagcatagccaagcaatatatgaattgactctatcctagctacgggcgcataggtttcaccgaaatccanaccttcgacttcagaatatcccttggccacaagtcgggctctgttccttgtcaccacaccatgctcatcttgcttgttgcggaacacccacttggttcctacaacattttggctaagacgtggaactaaatgccatacctcattcctcgtgaagttggtgagctcatcttgcattgccaacacccaatccgaatctcttagtgcatcctctaccctgtatggctcaatagaagaaacaaaagagtaatgttcacagaaatgagcgactcgagatcgagctgatacccccttatgaatatcgcctaggatggagatgacggagtgatctctttgaatcgcttgatggactctt

SEQ ID NO: 35002 - DNA, 467 bp, Zea mays
  unsure (1)..(467): unsure at all n locations
gcttatgcaaaccaagcaacaactgtgacttattctatatctgntacatatgcaccaatatccgagtttatgaaaccgttcagcactacattaggaaaacccgcaggcatcactacaacaagggactgaaccacaagaacacaacgatagctgaggatttctaacggtaaaacagaccggccaagtaggaaagacagatgctttatntacaccgcctggcgaagcggataaagttttagtcggctgtccagctctgctccacaacctcacgaactttgcggttgtactcacgcttgttctcgctgaacattctggctgcttcaaagttagcacgagaatttgggtttgggtcacacagcacggactgcaaaggaaagacaacaagaaaccatttgatacgttgagagtaccgatgggcccaaaaccacctcttggaactggtgtgaccaatacaacagcaacaacaa

SEQ ID NO: 35003 - DNA, 220 bp, Zea mays
acttcaccaccactatacggacgaacagggctgccttgttgttttcaaccctataacagttgccgacaacagagacaatgcagggaaggtgtagattaaacaaggagtacctttaattgaacttgttgtacgtgggctaagtatcccaaccctactgtgctataaattaacagccctgactgtatgctgatgagtgtctgctccacctaacaccgagata

SEQ ID NO: 35004 - DNA, 439 bp, Zea mays
  unsure (1)..(439): unsure at all n locations
agctcttacacgtatagtatagtgtgtttcatctttacaagatcctttcccttttccttttcacccctatcaccccaacccacctacgctacattacatttcctgctataccagtataccaccaatctgtatacaattgaaaaactacaggctactacaacccaatgctcctttcaggcacatatgtaacacatatataatcatctgaggtactctcttccgttccaaattataaaacgttttgggtatatctaaacacatatcttatatttagtatagcaaaggccatggatttagaaaagccaaaaaaaaaaacgtcttgcgatttggaacggagagtgagtataggcaaacgaacaatcacgccacanaatcatggagaaggggcgactgctcgaaccgttgccgctgatccatctggctcatggactcgtagtcc

SEQ ID NO: 35005 - DNA, 471 bp, Zea mays
  unsure (1)..(471): unsure at all n locations
ggtggacccgttgcctatcaactgaagttgccacccagcatgtcagctgttcatgatgtgttccatgtatctcagctgcggaaatgtgttcgtctacccactgaagtgctaccggaaccggacattgagatagaaccagacttgtcctaccaagagtaccccgtcaaggtattggatcaaaaggagagatcaactcgggcaagatcagtcagaatgtataaggttcagtggagtcaccattcagtagaagaagctacatgggagaccgaggattttctacgctctcgcttccccgactttctgcccaaaggagtcggtacgtaaccccaggaccccacccccacctgccctttgaatacaattatgagaaaaacctaggtaacaagggtagtctaagtggtggatntaacttaaaaagggcttccttctgaagttgcaaagagaatgacattcgaagagcagttaacaaga

SEQ ID NO: 35006 - DNA, 480 bp, Zea mays
  unsure (1)..(480): unsure at all n locations
cctgcggcatgcaagcttcgcacctctgaactaactcggctgtatcgttcttttgtatggacctgagttcgaatggaccctagcttggacagtacatcggctgctgtgttccgatctctttctacatgatgaaattccagacccttgaatttatcttccagctttcggacggcagcgcagtattatcccattgaatcgcttgaacaatcccactccttgtttatctggctgatgactaccagagagtctccgtataccatcaatctcttgacgcccaatgatacggcgatgttcaatccatggatcaaagcttcatatttggctgcattgttggaggccggaaatagcaattggagggcgtacttgaggtgttncgcctcaggtgtggagaagagaatacctgctcctgctcctgctccctggcagctcagcgagccgatcaaaatacattcgcatacttctacagactctgggttatct

SEQ ID NO: 35007 - DNA, 444 bp, Zea mays
tagcatatatgcacaactgttcattaatcaatacattgaattaggctgcactcagcccgtgttcttttgattcggaaggtcagaggtattatcaatcattgtccggcatccagacactacgtacgcacgagtaattggagatcctagattataataaaccacctagagagcttgatgctttctagagctgaactcatccaggttaaaagcaaagccaggacttctcggggctctatgtcagattgtcagtgttgcaccttgtactgatcgggagacagccaggccaagcaaagtagataaacaaaccatgtctacgattgaggcattgatggtaccgcgcacggtgcacatggttactttcaagctagctaatgcaaggcgctatgcactaatggtcccttccagagaatcatgtgccactgtaattggcttggctcaatgctc

SEQ ID NO: 35008 - DNA, 433 bp, Zea mays
  unsure (1)..(433): unsure at all n locations
agctnggccgaacctaggataaattcttgtnttgtgtgctctgttctgtattgtatcctgactctctgtcttactcgtctntatatctgcacttcaatacttatctgtggtataagctttatttgaagtgcaggacattttgagacaggatcttctattccgctgcaacctactcgaagagtcttctcactccactgcgtactaagtcttccagtagagtaagaatctaagtttctaaagtaantaagtttattcgcctattcaccccctctaggcgacatccagatcctgttcccgggtcaaagggaactttcagctgctggcgggtaatccgagcggacgcccgtgccccatttgctaggggtcggctagaggctcggaggcgcgctccaaaagtacctgcgggtgatctgccgaacccagtcctctttga

SEQ ID NO: 35009 - DNA, 358 bp, Zea mays
  unsure (1)..(358): unsure at all n locations
tgggaagctctcatcacaccaccaatgtgatgaccacatctagacctttggagatgcttcacatggacctcttctgaccagtcgcctatctaagtataggaggaaagtagtgtggtcttgttaatagtgatgacttttcccgcttcacttgggtattcttnttgcaggataaatctgaaacccaagggacccttaagcgctttctaaggagagctcaaaacgagtttgagctcaatgtgaaaaagataaggagcgacaatgggttctagttcaagaaccttcaagtggaggagtatcttgaggaggaagggatcaagcacgagttctccgctccctacacaccacatcaaaatggtgt

SEQ ID NO: 35010 - DNA, 431 bp, Zea mays
agcttctaaagggagaacacgtgatagggtcttatctaatgttcaattcgaaaaagatagaccttgtgcagcttgtcaagcagggaaacaggtgggaggctctcatcacaccaaaaatgtgatgacgacatcaagacccttggagatgctgcatatggacctttttggacccgtcgcctatctgagcataggaggaagtaagtatggtttagttattgttgatgacttttcccgcttcacttgggtgttctttttgcaggataagtctgaaacccaagggaccctcaagcgcttcctcaggagagctcaaaatgagtttgagctcaaggtgaagaagataaggagtgacaacgggtccgagttcaagaaccttcaagtggaagagtttcttgaggaggaagggatcaagcacgagttctccgctccctaca

SEQ ID NO: 35011 - DNA, 455 bp, Zea mays
tcaggacaagaagggacgcatgcatagattcacttgtggtatgtactgaatatgatcttagtcagttgattggggctgaatgcttcagctaacagcttattcgttgaatttcaggctctgaaagtttagatgagctgatatcttctgtaatccaaaggttaggcatggttgatgagaagaggatgattcaactgttggtaagcttgaataatttggcatcccattgtttccatcttgagaagtagggtaagaataagatgttctgtgtctgacttccaaatacaagatatcacgtttatgttcatcaatgttttcaagtcgaacgacttgttggtcgttttggctgaccgataagggcgattaatcacgattagtcggacttgggcaattaattgtgattggtccaaactaacttggacgattaatcagacaacttgaaaacattgatgttcatg

SEQ ID NO: 35012 - DNA, 438 bp, Zea mays
agcttaaagccatggtaagtagcatattctattaatatacaaatggactcaagcctagctacgggtgcatatgtttcaccgaaatccaaaccttcgacttgggagtattccttggccacatgtcgagctttgttccttgtcaccacaccatgctcatcctgtttgttgtggaagacccacttggttcctacaatattttgattaggacgtggaactaaatgccatacctcattcctcgtgaagttgttgagctcctcttgcatcgccaacacccaatctgaatctcttaatgcatcttccaccctctatggctcaataaaagacataaaagagtaatgttcacaaaaatgagcaacacgagatcgagtggttaccctcttatgaatatcgccgaggatggagttcacggggtgatctcgctgtattgcttggtggact

SEQ ID NO: 35013 - DNA, 466 bp, Zea mays
  unsure (1)..(466): unsure at all n locations
tgtggcgccctcnggcgtgttgtcgcagccgaagtatcatgtctcccacttggaagcctgcgggccgaacccttctggcgtggtagcgtcgcaaggactgctgataccgcgccgagtgtattaaagccacatcccgagcctcttccagctggtccagtgaatcttctcggttggtctggttgctatgatcatcgtaagcctttgtcctcggngaaccgtattctaagtccgtgggtaagatggcctcgaccccatagactagaaagaacggcgagaaacccgtggctcggctcggcgtcgtcctcagactccaaaccaccgagggtagttcctttatccaccgcttgccgaacttattgaggacgttgcagatcctcggctttagtccctgcaaaatcataccgttggcgcgctccacctgcccatttgtcattgtgtgagctacngcggcacagtccacatggat

SEQ ID NO: 35014 - DNA, 368 bp, Zea mays
taagctctcatctatcaagcctcatggaggcttggttttttttcctgaacctgccaggctctgaattgattgaatatctgcggacaacattattatcgaatttccttcattatgtagtccatttgctacccttctagtggttcctctactctctatgatgtcctaaagggtagagaccaaggtactatcactatgaagatattgaagattttgctgaagcttactggaggccatcaacacggcatatagtatcttctccaactctaagtactacctattggtggactccaaacttcggagaccaagtacaccggctcttgacccttcagctgtccggcctatattatttggaccaccgctgcgccgac

SEQ ID NO: 35015 - DNA, 473 bp, Zea mays
agcttattcccgcgttcttcattagttcatgttctgttagaaagagactaaatcattgtagtcaagattgaatagaaaagaatttaatatccctcaattcactcaaattcgtgtaaccgaacaacgtcttattgaagatgagattaactctagatatcttggtaaatacatacatcagatagaagttattcctgagaaaaaaagacgtcagcggtcctttttgtatgacctgagtggtagggaggagtccaggagagcacaactggaaatatctttgatttcttcatcaatagtttaacgtagcagtatcctcatggtcccacagcagcaaatatttcagctttatggttttctaatgctacataaaatcgagcaaactggatacaaggcatgcctaattcatcaatcatcattataactttcagcctcaactgttgctatatatatatatatatatatacctctcttagagg

SEQ ID NO: 35016 - DNA, 448 bp, Zea mays
tggtgacgttgtgcgtgtgacagtactttcaaaagtatggtcatcttcaaccattctcaccacattttcaccctatctggactttctactatatttcactatatcattccaaaagatacttcattacttccacattaaggacgtctccaacaacacaccttatctgggtccccatatatactatagttttagttatttagcattttttcatcagtttttaaagtgtaaaaaatcataaaatggttgtactatcatatcataatacacgttgttatcatattacattacttaaaaagagttaatatcccaaagaaattaattaattaaaatatgggaagagattagaggtccccatatatgagggaacaacctctctcccccaacatggggtaggctgtagaggcaattgttagaggggtttctcaccccaaatcacaccctatatgtg

SEQ ID NO: 35017 - DNA, 465 bp, Zea mays
  unsure (1)..(465): unsure at all n locations
agcttctgccaaacggggcccaccgatcagtgcttaatgaangcgcgcgcgccaagagtctgacgggaggggcccggatgtcggcgccggtctccaattgggccacacagtaacgctggatgtgggccgaaagcaaggttttggcccagatgcgggccaagttccctttcctttttttttaatcttattttctgttttcttttcttattttgaatctcaaattcaacttggtgacaaaatttgtattcagattaaatgtttcccctagaccataccaaagtatgaagcagtttgttgggtccatgcttcgtcgccgaaggtcttatagagagaagcgatcctcggatgaagctgtttgtgtaagatagccgaaggttccttttcgtaaagcttcggcattgcaaaccgacttaaagatagaatggacctttagtccataaatgtctaagtcaatgttgtaagttt

SEQ ID NO: 35018 - DNA, 450 bp, Zea mays
  unsure (1)..(450): unsure at all n locations
tgaccggnngatggcgcgttgtttccgtgtgctttctattacaattactgccaatccgttttcggtcacgtcaactgtcaagcctgtccccgcggatgactgacatgtggtctctgcacttgatggctttattgggccatgcgtggggtgcctcgacaccgctgcatttggtttttgaaaaatcaccttctctgtcttctgcggcggccccgaggaggcatggtactggcatgagcggcggttcggcttttctgcacccaggaaccgacgcccaaggaggatgactcgtgggcctgggccctcgcgtcagagactgggctgtttgtttctatggaggtgaaggggcgtactatcgcatgcggtgacacgcacctcatgtggcggttcgccttctccgcacacggaggtcgactcccgaagagtatgactcgtgggcccgggtccccgtgc

SEQ ID NO: 35019 - DNA, 451 bp, Zea mays
  unsure (1)..(451): unsure at all n locations
agcttcggcataacggcagaaaaggggaanctacttatagatgaaaagccaaattagacctcgaagaatcactatatagttattgttaagtgtaatgggtattaatgtaattntgcatgggctgcgacccgtgcctataaatatgtgaacagtattcccgtactgttcacgctgacttggcactttgcttttgcatcacacctgtattcacatcccttcaagccgaaggtatatntgtaatttaccattatttacatgagtaatataagtagaaaataaattaataataatgtttacagagattaagttatttcttatattctgtgtttaaatactctttatcttttgttatgtttatgaaggtttgtccttcatgaccttcgtccgaaatccattatatccaaagggaaataatgattcacaggacgaaggagtttgatatttaacatct

SEQ ID NO: 35020 - DNA, 445 bp, Zea mays
  unsure (1)..(445): unsure at all n locations
aatcaccaanaagggggagattgttttctctctcgtgagatttggtgtttggatgacaactcaattaaaggactaacaagtgtactaagtgttgaacaggtgcttaaggtaaagcctacagggttcaacacaagtgaacaagtgtgatggtccaaggactagatgatgatagataatgggcatcacaagtaagatggacattgcaaaagtgatactcgggtgcatagctcggagacaactgatcaagccaaggacggaggcaagaagagcttctaggtaccaagtgcacgggagaaggtcaaggaggttgaggaacccaaagccaagggtgaagaagaaggcttgcaaagtcaagggtgatcgagttgagaacagctacggcacatcaaggatcactacataaggacgtgacttacagccaatgaggtaacaactacagttatgt

SEQ ID NO: 35021 - DNA, 492 bp, Zea mays
  unsure (1)..(492): unsure at all n locations
tgatcttaagcgactgggctgcagcttcgcttgggtaaaaatttggcagcttaacagtgctatatcaatgaatgctggggtaacttcacacctaccagtctgtttatatagtgctacaggtaagaaggtgaatcgttaggatttttacaccaggtgaacagttgcttgcacccgctgcgcggtggaccgcagagaccaaatagtaactctgcagggtgggaccgctacgcgctcggaaactgaatcgtatctcgacaacgagctcagggaaggtgtttttcggaccttcggcttcctgaagcctaagagactttnttcacggatcaagctcgttacgaanaatgatctatcacctcgaaggggctactgttgggaccatgcttcgtcgccgaaggtcctgcaggaagaaacagcttcagctgaagctgtccgcatgtgatgaccgaaggttcctcttcatgaagcttcggaattacaaaccgacttanaagt

SEQ ID NO: 35022 - DNA, 476 bp, Zea mays
  unsure (1)..(476): unsure at all n locations
ctcagcttgttatgctcaaactcaggaaaattaagaaaaggaatatataatgattaccagagggcaacctgattttccctagcatgcctaagttatgtagttcacaagaaaaatccattgaaccatagtccagtgagagaaaattgtaatcacaattattcatgaaaaactaagaaaactttgaaaaatcataagaaaataatcctaaggagaaaatacccctaccttagggataactattcttgtgctaagaggaacctaggaaaaatacaagttctgttgtttgatatttttcaaataacaagttatttataagtgtctttttggcattaaactttagaaaatcataactaaataaccactaagtaaccctctgtgattntttggcacagaagcatgttattacttttagataccagcaaaaatgacccttaggacacaacccacctctagttaagagttgtagtgcaaagtga

SEQ ID NO: 35023 - DNA, 473 bp, Zea mays
  unsure (1)..(473): unsure at all n locations
agctgtctntggctcatcctctgtcttcatccatatttggtgatagcccgagtagcagtccaataagatcacaagttccgaagaagctgctgcatctacaagggagtctattcttggtaaagggaactcatcctttagacatgccttgttgagatctgtgaaatcaattctccatttcccattagccttcttcaccataatagtgttagctagccactctggatatgttacttctctgatgacactaacactgagaagtctctttacttcgttccgagcaccttcagatttatcctcagacattttctgaagtctttgctttcttggcctgaaagatggatccacgttgagtgaatgctcaatgacatctcagttaacaccacagagatcgttagctgtccaagcgaagacatctttgttgttgaacaaaaatcttatcaaggtcttttcttgttcaccagataactgagatc

SEQ ID NO: 35024 - DNA, 477 bp, Zea mays
actaagcttctaagggagaacacgtgataggtctaactaatgttactttctattaagatagaccttgtgcagcttgtcaagcaggtaaacaggtggggagctctcatcatgccaaaaatgtgatgacaacatcaagacccctggagttacttcatatggacctcttcggacccatcgcttatctaagcataggaggaagtaagtatggtcttgttatagttgatgatttttcccgcttcacttgggtattccttttgcaggataaatctgaaacccaagggaccctcaagcgcttcctaaggagagctcaaaacgagtttgagctcaaggtgaagaagataaggagcgacaatgggtccgaattcaagaaccttcaagtggaggagtatcttgaggaggaaggaatcaagcacgagttctctgccccctacacaccacagcaaaatggtgtggtagagaggaagaacatgatgctca

SEQ ID NO: 35025 - DNA, 440 bp, Zea mays
  unsure (1)..(440): unsure at all n locations
tgaagcaatctcgaacacgttntctgtatttccattggccgacacgatcatctncagctgggcctgtgccataaatgaagcaaggtgttagtgttactactattgcactatcttcttctttcttttctgaaaaaaaaaatgctcgatcaattggactctacaaagactgcagacgaacacgtcaccttatcaagagcttgtctggtcttgtcgtaccgcctccaccgagaaaatgctgaaaccatgcgggaggccacctgatttcacacccaggaacaaaccgcattagctaataatagtaattctcctaacacttgagcgtggcccagactacaggagaacaagttcttgacattaacctgagggtttatcttgtcaagctgcanaacgatctcacccaagaacangtacccagaaccatctttcgcgtggaagttcac

SEQ ID NO: 35026 - DNA, 392 bp, Zea mays
  unsure (1)..(392): unsure at all n locations
tttcngaaaacagggccttgcggcggaccgttcgcgatttctttttatcctcggacagaaccaatgcaaaatcacatgtctctactgcggaccgtccgatggaatagcaagcaccgttcgagaccacgcgcggaccgtccggccttaggtgcggaccgtctggttggtgaggaacctaaaaacccgaaggtgacgggttcggtaaaatgaattatagtgtcctcgcggaccgtccggagtgcacgatcggaccatccgtgaatgcctttatctgacatctgacgtcgcattaaatgcaatatatccgttgatatagccgttactgctgatcgttgcgttttcagccgttgatctgcaggggcggaccgtccggaccatgggcgcggaccgta

SEQ ID NO: 35027 - DNA, 427 bp, Zea mays
  unsure (1)..(427): unsure at all n locations
agcttgcatttcattgtgcttcaggaaagtatctttgcttgagtacttgattccgaanaagacatccttgcggcaccgattgcccatggctgatcaagggtttatcgagtttgttgcgtaccttctggaggtgaacccaaagaagcgcccaagcgcctcagaagcattgaaacatccatggctttcttttccttacgagccaatatcttcatgaggctaactgctattggatcctgtgtggctttagcatttgtctcaacacctaagcaccatgaaattttgatagatccagacggaagaatttctaccacgactgagccatggcatcagccgaaatcccaaacgcaaatgcagattcggttcgatcatgtcttggtgccacaatcagctggtcttaagcgccatgtaaaatcaatgcatgccatgt

SEQ ID NO: 35028 - DNA, 424 bp, Zea mays
  unsure (1)..(424): unsure at all n locations
actcagctaatgccctagaaatgctacttgttagggcaaagtctccatggttcatgataacgagggctatattttatatcatgctggttatcccgaacataagattaggagaattcattctaggaagtctcactctggctctcatcatgcttttatgtataagaatgaggcatctatttctaggcaatccactcatgttaaatcgcctaaaaagaaatctcctattgcatcaaatgaacccaatgtgtcttttaatacttttgatgcatcatatgntttaactaacaaatcaggcaaagtagttgccaaatatgttgggggcaaacacaatggctcaaagacttgtgtntgggtacccaaggtgcttgtttctaatgtganaggacccaagaaccgttgggtacctaagaacaaggcctaaact

SEQ ID NO: 35029 - DNA, 427 bp, Zea mays
tatacgcgacgcgaagagaagacgaacaagcacccacatacaaacatatacatatgcataggaacattacaccatacaaaggaaacataatcaaaacatgccatacgatatagagcgcgttactacagacacgcgaggaacaagacacgcgacggtcgatgctaccgtcgagaagttatcgcacttacgctaaaccaatattaaatatgacatttaagtccacattatcaactataaataatatatagcatctagtgtttttgattaacccgataccctagcaactatctggtaaaccagtatgttaattaaagcgagagatctaagtgaggcgaataatgacgcgcgcataacacgacagcgcgcatacgacgcgcggacacgtgcgacacagcacgctgatgacacacgagacaacacaacatgg

SEQ ID NO: 35030 - DNA, 467 bp, Zea mays
  unsure (1)..(467): unsure at all n locations
tatgaagggtcttcatcccaacatgtgctaaacttgtgattctatagccagcccatgttagtcttagcaagtaaacatgcatctagatcggcattctctttagtaaaatcaaccaagtaaagcttgtcgctagatacacctttaaatgctaatgaaccatcacttcttctaaagatagttacatcaatatttgtaaataaggaattataacccatacgacacacttggctgacagaaagaaaattataaccaagcgattttaccaaaaagacattagaaatagagtgctcgtagtaatcactattttacctatccccttgaccttgccttggttccatctccaaagatgatcatgtcatgagaatccttattcttaacgtagaaggtgaacatcttcttctcccccatcatgtggctgtgcatccgctatcaatgatccagatngagacccggatgcataaacctgc

SEQ ID NO: 35031 - DNA, 454 bp, Zea mays
  unsure (1)..(454): unsure at all n locations
agctntatcaaatggacgtgaagagtgcctttctcaatggaccaatcaaggaagaggtctatgttgagcaacctcccggctttgaagatagtgagtaccctaaccatgtttataaactctctaaggcgctttatgggctcaagcaagccccaagagcatggtatgaatgccttagagatttccttatcactaatggattcaaagtcggaaaggccgatcctacactcttcactaaaacacttgaaaatgatttgtttgtatgccaaatttatgttgatgatattatatttgggtctactaacgaatctacatgtgaagaatttagtaggatcatgacacaaaaattcgagatgtctatgatggnggagttgaagtatttcttaggatttcaagtgaagcaactccaagaaggcaccttcctaagccaacgaagtatactcaagatattctaagc

SEQ ID NO: 35032 - DNA, 462 bp, Zea mays
  unsure (1)..(462): unsure at all n locations
tatgaaattatctacaacttcttttaccaacccacagtttaattcttgtgataaaattgcctaactcttaagagaacagattctgcacagaattatgagactgaaaaactgctataatcaaactgtcataacattctgttcttatgtccgattgaggtgttcttcgcggccacggaaagatctacaaattatctacgactcatatatagactttttatttttttgaggccactaagaccacggaaaactgacatgaacagaaactgtcgaatctgccattctgcagaaattaaattcgagatcaaaacctaaccccacatctaatccaacctctaatccttcaatccacatgatccacaacctccaaaagcatataattatagggaggaacaaggatcctatccttacctagggtttccccaagaaaatctgcaagagatggnnggtagaacatctcttgat

SEQ ID NO: 35033 - DNA, 469 bp, Zea mays
agcttcaggtgtaggtggagacagttctttcttcttaattatttaaatgcacgataaggatttatcatttcaaatatttgaacaattaattcatacaatttgataagtaaagatttacaaagagggcaacattcgcgacggagaaaaaccacaacatcaccatttgccagcctatgttccatagaacagtcagccacagcacaacatagattactggctcttcaaccaagagtaaacaacacagcaagtataaaaaccaaagtgagaagcaacatagcacagtacagttaccaccatatcacaaccatttgattctacagctgctggaattgacaaacaaatgaagacaattgatgttcaacagagtgttccaaataattggaacatttgaatacagaatagactctggttctcagtttctaacatgctctaatgggttaaaaagaagttggtcataacccataaatat

SEQ ID NO: 35034 - DNA, 470 bp, Zea mays
  unsure (1)..(470): unsure at all n locations
cttgtttataagaaggatcgcaagtgttaatggtatcaatcatagattctaactntaccaagaaattctcacaaggatgagatcggcggcaggtaggaattcaatctgatgagtaacataaaccactgtttttgaagccaaatccgcaagcaagcattccttcaaaataataataataaagtcaaacataagcatacttggaataaatcaataaatcatgtactagtaccttgaaaatgtgggatcctgtatgcgcatcgactgcgctgaacggatcgtcgaacagatagacgtcggcgtcctgatacagagcgcgtgctatctggatcctctgcttctggcctccactgaggttgatgcctcgctcgccgatgactgtctggtcgccaaacggcaggttctccaagtctttcttgagcgcgcacgactcgagcaccctgtcgtacttgtctctgtccatctncataccg

SEQ ID NO: 35035 - DNA, 417 bp, Zea mays
  unsure (1)..(417): unsure at all n locations
agctngccgnctattacacccttaaaggctattgatttatcacttcttctaaagacagacacatctacatttgttaaaaggcaattatatcccatattgcatagttgactaacagatagcaaattgtaaccaagagactcaactaaaaacacattggagatagagtgctcattagaaattgcaattttacctaacccttttaccttgccttgattcccatcaccgaatataattgaatcttgggaatccttattcttgacgtaggaggtgaacatcttcttctccctgtcatatggtttgtgcatccgctgtcgataatccagcttgaacccccggatgcataaacctgcaaggcaaatatacgcttgggtcttatgtacccaacttatgttgggtcctacaaggatagtgcacata

SEQ ID NO: 35036 - DNA, 381 bp, Zea mays
  unsure (1)..(381): unsure at all n locations
tgtgaaggttcttcatccncacatgtgcgaagctgtgatgtcttttctgcccatgctaancttagcaattaagcatgcatctagaccggcctcctcttttgcaaaatcaactaaataaagtttgccgtctagtacacccttaaaagctagtgaaccatcacatcttctaaagacagacacatctacatttgtgaatagacaattatatcccatattacataattgactgacagatagtcaattatatccaagagacttcactaagaacacattatagatcgagtgctcatttgatattgcaattttgcctaaacctttcatcctgccttgggtacccatcaccgaaaatggtcgaatcttgggaattcttattcttgacgt

SEQ ID NO: 35037 - DNA, 373 bp, Zea mays
  unsure (1)..(373): unsure at all n locations
agcttagtgatacacatggtgattattgcatgtgctttgtgaagngcttacactagttaggctcctacttatgtgcttgttctaggtttagacctatagtttaatgagatttgcataccacttactatttggtgcttgcacgcaccattattatactcgaatgggcttgtagtcttgtaataccacaccaatcttgtttatggtgtgggcactacaacgtacatgtgggaatgaggcacacgacaattcgttcggaagatcaatcgagaagatgacatagagtggtccaacagaggtcagtttggagacctacttatgcatggaaaagaactatgagcatgtttgattcgcctttntctgatgagctagtcta

SEQ ID NO: 35038 - DNA, 438 bp, Zea mays
taaagccatggtgagtagcataggctaataatatgcgaattgactcaagcctagctacgggtgcataggtttaaccaaaatccaaaccttcgacttgagagtatcccttggccacaagtcgagctttgttccttgtcaccacaccatgctcgtcttgcttgttgcggaagacccactttgttcctacaacattttggttaggacgtggaactaaatgccatacctcattcctagtgaagttgttgagctcctcttgcattgccatcacccaatccgaatcttgaagtgcttcctctatcctgtgtggctcaatagaggaaacaaaagagtaatgctcacaaaaatgtgcaacacgagatcgagtggttacccccttatgaatgtcgccgaggatggtgtcgatggggtgatctccttggatcgcttggtggactcttg

SEQ ID NO: 35039 - DNA, 446 bp, Zea mays
agctgggccactggctagggaatgtctgcttccacgacgcggccaggccaacgtcgcacaggtggaggcggaggaggaagctctgctcttagcacacgcaagcatcgaactacctccagtggcaccgaccgcagcgacactccaccttgatgagtcgaaagcacgcgctttcctcggagacggctccagcaacgacatgattgaaggatggtgcctcgacaccggcgccgctcatgacatgaccgatggaagtgaaatgatgagtcaaaaccccccatgaaaatgataaagtgaagtaatgaatactgtgaaacttggatatttagagtgatttcatgtgtaactccgcaacaagtggaagtgaaatgaaagaaacgttgacatcttatgtaatttatgggccaaactatcttacgattatatatggatatatattgcgcttatat

SEQ ID NO: 35040 - DNA, 450 bp, Zea mays
  unsure (1)..(450): unsure at all n locations
ntaccaaatggacgtgaagagtgccttcctcaatggactcttcaaggaagaggtctatgttgagcaacctcccggctttgaagatagtgagtaccctaaccatgtgtataaactctctaaggcgctttatgggctcaagcaagccccaagagcatggtatgaatgccttagagattttcttatcactaatggcttcaaagtcggaaaggccgatcctacactctttaccaaaacacttgaaaatgacttgtttgtatgccaaatttatgttgatgatattatatttgggtctactaacgagtctacatgtgaagaatttagtaggatcatgacacaaaagttcgagatgtctatgatgggggagttgaaatatttcttaggatttcaagtaaagcaactccaagagggcacctttctaagccaaacgaagtatactcaagatattctaag

SEQ ID NO: 35041 - DNA, 459 bp, Zea mays
  unsure (1)..(459): unsure at all n locations
cttgtcgtggacaactaagattgtggttttctttctctatctcttagaagcttgcttgcttctttttgattcgattgctttcacctgtttgtcagcatttgttaagttctgctgcacacacgccagctttgtaggggtgtttctgttgtttaggattctgtaatttgcttcgccatgggggtctgccatgatatgcaacatccgcttgttagctagcttcctagctcagcattccccttagtcaaatctgtaacctgtagcatctacaagcgtgtggctttattgttgaaatcctgatgtttatcgttctctataaacacaaaactgaacaaataacctcgctgcaatgaataaactcacgtgttcagtgtgaatctgttggttgtgcccccatgctgcattgagttggacagtacangcatttcagacttgttgggaattaatatcatgtcgacactg

SEQ ID NO: 35042 - DNA, 434 bp, Zea mays
tctgcgcgtcgatccgtcctccgtccgagcatgcgctgttttcttccacgggatcatccctgggaagcgcgtccagcccctcgggcgactcgatctcccagtctgctttgggacaccctccaacttccgaagggagaccctgacgttcgaagtggtcgggttccgaggaacctaccacgccgtgttagggaggccatgctacgcgaagttcatggccgtccccaactacacctacctgaagctcaagatgccgggccccaacggggtcatcaccgtcggccccacgtacaaacacgcgttcgaatgcgacgtggagtgcgtggagtacgccgaggccctcgccgagtccgaggccctcatcgccgatctggagaacctctccaaggaggtcccagacgtgaagcgccatgccggcaacttcgagccagcggaga

SEQ ID NO: 35043 - DNA, 460 bp, Zea mays
  unsure (1)..(460): unsure at all n locations
cactcgttgtcccctgctctctgctgctgcttattctttccgctacccaaaacacccggttgtaggttacctttccggctttcccctttcggaattggcttggtttgcttcgccgcggcgtttcggattataaaatccatcggcgattgcttcgccactttgtacacgcgttttttacgccttggattgcgtcgtttccatggcactgctgtcttggatttcttggaatttccttacctttgtggccaaccggacataccagtgttgttgatgccggattggcacgtgccagcaagaggtagcataaccggatgttacaatcaacctaacaaacggctagcagatcagtaggttaaaattaacatgtcacacaaataaaactaatagttagcagttaaaattagccgagaggtttagaatgtaatggacccagctaatattagttatacttcanatagtc

SEQ ID NO: 35044 - DNA, 468 bp, Zea mays
  unsure (1)..(468): unsure at all n locations
tgctctgccgagtgtcaaccggntgacactctgcacaacattttctttgtcgagtgccaactttcgatgctcggcaaagttaacggcccgcagctatggacggctactgacagcccttttgccgagggccgtcctttgccgagtgtttggcactcggcaaagggcaaaaacttctttgccaagtgtatttttatgccgagagttctgctctcggtaaacgcgatcgttaccgagagcaagactttgccgagtgcggcacttgacaaagcgccggattccggtagtgagaccacatatgtgctattattagtcatttctatctttattttaccgagaattcacggnggtgagtacgcgtgaaatgcaaccaatgttttatatgaacagataaatatataaccagacacattgcgtatgcatgctgtgatattgatatacaatcatacggacaaacttcttgtaatcgtg

SEQ ID NO: 35045 - DNA, 458 bp, Zea mays
  unsure (1)..(458): unsure at all n locations
agctntatcanatggacgtgaagagtgcctttctctatggactaatcaaggaggaggtctatgttgagcaacctcccggctttgaagataatgagtaccctaatcatgtctataaactctctaaggcgctttatgggctcaagcaagccctaagagcatgatatgaatgtctaagagattttattatcactaatggcttcaaagtcggaaaagccgatcctactctctttactaaaacaattgcaaatgatttgtctgtatgccaattttatgttgatgatatcatattcgggtctactaacaaatctagttgtgaagagtttagtaggatcatgattcaaaaattcgagatgtctatgatgggagagttgaagtacttcttaggatttcaagtgaagcaactccaaaagggcacctttatcagcccaacgaagtacattcaagacatactcaccaag

SEQ ID NO: 35046 - DNA, 449 bp, Zea mays
  unsure (1)..(449): unsure at all n locations
acatgtgctagacggcgatgccacatttctcccatgctagtcttagcaattaagcatgcatctagaccggccttctcttttgcaaaagcaactaaataaagtttgccgtctagtacacccttaaaagctaacgaaccatcacttcttctaaagacagacacatctacatttgtgaataaacagttatatcccatattacaaagttgactcacagacaacaagttatatccaagcgactcaactaagaacactgtagaaatagagtgctcggatgaaatagcaatttttcctaaccctttcaccttgccttggttcccatcaccgaatatgatagaatcttggggatccttgttcttgatataggaagagaacatcctctnttcccccgtcatgtggtttgtgcatccgctgtcgataatccagcttgagcccccggatgcataaacatg

SEQ ID NO: 35047 - DNA, 479 bp, Zea mays
  unsure (1)..(479): unsure at all n locations
agcttcggtggcacatagtcaaatgatgggttgtcatcatttatcaaggggctgccatcctgagtactgaaattcatgcaatctgagaactcgccaaaatcgagcaaatcagatggcgatttgagttcattcagcaacacttgtgggttgtgtggatacagaggacacagctgcgcatgaggaagaaaacaattaaattggttagaaaaatattctgtgcttcaaatccatcagatacctctgggttgtgtgggcattcaaaaattgtgaatgccaccttattccaatattatttacccttggttctcatatgtgttcagtcaacattaccaaactgatccctactatgcacacaagtatttagacttctagggaagaaagctactagcaggtttttcatcaaatgtacttcgatatcaataaacatatgctaactntntgccaatgaataactggannaanattatgacaaaaaatgt

SEQ ID NO: 35048 - DNA, 467 bp, Zea mays
  unsure (1)..(467): unsure at all n locations
tctcattctcatctcttatcgncatggtgccatgctagattcgctcatcttagccctnttcattaagncgaccaatactaatagtattggttgtaagtcacgaatatagtacgcattggcaagtgtcagatgctccccattcttacactcatgaagaactaagccacgaccttcaatctttaccactgaagcatcaacaaatttgatggttctaaaagttccaccatcaatgctggagaatgcagcccgagatctcgtcatatgatatgaggccccagtatccaccacccatcgatatgagtcattctttttgccatccaaggccgcaaacaccctctcctctacaggatgcaccatgccatcaggtgatgtacgacctctntgggttcatctccaatntgtgcgaacataagcctgttcttcctcctgcgccaccattacatngtcatccctctttggttacttct

SEQ ID NO: 35049 - DNA, 419 bp, Zea mays
  unsure (1)..(419): unsure at all n locations
agctntaatcccgaaaatgtgtttgtggggtaccattcttgaaagttactcgggtttattgtcagccaccggggaattgaggctaatccggacaagattgaagctatcatgaagatggaagcacctcgatcacaaaagaaggttcaacgacttactggatgtatgacagctctgagcagatttatatccaggctgggggaaaaaggtttaccattttacaagctactcaagaaagtggataagtttcagtggactttagaggcacacgaagctctatatgcactgaagaaattcttgacaacaccaccagtgctgaagccaccatgacgagctacatcgactcaaccagctgaagatctgctactgtatatctctcgcacgactcacgtggtaagcaccgcgttggtagtcgagcgagt

SEQ ID NO: 35050 - DNA, 459 bp, Zea mays
  unsure (1)..(459): unsure at all n locations
taaagccatggtaagtagcataggcaagtaatatgcgaattgattcttgcctagctacgagtgcataggtttcaccgaaatccaaaccttcgacttgtgaatatcctttggccacaagtcgggctatgttccttgtcaccacaccatgctcatcttgcttgttgcggaagacccacttggttcctacaacatttagattaggacgtggaactaaatgccatacctcgttcctagtgaagttgttgagctcctcttgcatcgccactacccaatccgaatcttgaagtgcttcctctatcctgtgtggctcaatagaggaaacaaaatagtaatgttcacacaaatgagcaacacaagatcgagtagttacccccttttgaatatcgccgaggatggtgttcatggggtgatctcgttggattgcttggtggactcttgngtgtggcggtcttggagctt

SEQ ID NO: 35051 - DNA, 389 bp, Zea mays
  unsure (1)..(389): unsure at all n locations
tgcggcatgcaagcttctaagggagaacacattgtgggactatcttatgttctatttgagaaagacagggtttgtagtgcatgtcaagcangaaagcaagttggtacccaccatccacacaagaacgtaatgactacggacaggccactggaattactccacatggatctattcggcccgatagcttatataagcatcggcgggaataagtactatcttgtgattatggatgattattctcgcttcacttgggtgttgcttntgcaggagaaatcacaaacccaagagacctcaaaaggattcttaagatgggctcacaataagtttggattagcaatcacaaagataagaagcgacaatgggtcagagttcaagaactcactaatcga

SEQ ID NO: 35052 - DNA, 316 bp, Zea mays
atgcataccctcatctcaaagccaaagcctcttgaacagtctatgttacactaaaaaacatattaatcacgctttcaggaccttcggaagaggaaggcctccaacagaagcccctcgtagaaaaatatgcttctatattaacaaattcagactgcgacgggaacgaacgcctttagcgaaggtccaaaaaatatcttcccttcgctagaatatcgaaagactgacatatagggcccaccaagctatggtgcgctgggcatataaatagggactcacattgatagcgttcgatgtgtcatttcaactgctcgcgcta

SEQ ID NO: 35053 - DNA, 384 bp, Zea mays
gcatcagcatcacgctaataagccttcggctgtatgaaactcgaagtcgttctttacaatggcagctgattgctcctctatcttgttttctaagcttccaattataactttgtgccctaaatcctctaagtcctgctgcaattttaaagccttgctcaaaagcatactctatggacaaataaccttcggtagaaaatatctacgatattacaaatacgatgggctagacacaagatgtttaccttaaaatcggaatagaatcaactaccgaccatatgatgtcgtcggcagcggctgatatctgccacaagacttcggaaaccgatactctctgatagagtaccgataaccttcgcgccagcttgatctcgaatgcagcctaac

SEQ ID NO: 35054 - DNA, 458 bp, Zea mays
agcttgccaagccctcggacccgacctgacttcttctgatgcccgagatcgacctcaccggacttctgtcttccgccgccgcgcgtggaccgagctatccagtgagtctccgcccgattcctttcgctcatatcttctctggcatcccgtggacctccctgacctagttgattgaactatctcgccgtgaccaggccggtctcctcgccgccgacgagcatccccgcctgcgcgcgtggaccgaccgactccggccatctccgacggcgttccgcacaccgttgtgatccccgcgacctccccttcatcctcgaccacttcaccggaacagtctcgccgccggtaagcccctccgcccttttcttcgccgcggctactgtttaaggtagaagaacgaccttgggttagggtctgtataacccgacgggttttctgtaatgtcagcgactcatgtgaat

SEQ ID NO: 35055 - DNA, 463 bp, Zea mays
  unsure (1)..(463): unsure at all n locations
tagaagacgatccgaagctcaacagatggtgatgaagcttttatcctagctgngaaaaaattctaagaagactcttgtattaacctttataaagaatattgtaacttaagaatcagattctactctgtaaatttgtccataccttgtaatatatttttacctttccattgatgtatgaaatgctttgatgtggacgaaacttgtattttttgagccaaaggtgaaaaacaccttcccttcttttcgtacacaatgaagcatgaatctgcttttgaagctgtatacttagggccgaagcaactgtctgtatatgtatgatatgatgatgatgatcctatgtatgtctaaatgaatgtttatgaatgcaatgtatgatgtaaattatcgtgcaaatgaatgcccaaacatacacattcgaagctttatccacaaccttcattcccttaggaataattgaaatctt

SEQ ID NO: 35056 - DNA, 396 bp, Zea mays
  unsure (1)..(396): unsure at all n locations
gcttgccatacctgtcaagcaatattatatttcttcacaacagctacagactataccaagtacttggcctttcgcatgctggggactggatatgaatgggcctttcaagaaagctcaaggaggatatacccatgtattggtggcgatcgataaattcactaaatggatagagttccagcccattgcttctttaacctctgctaaagccgtagaattcatacaaagcataatattcagattcggataccaaacagtatcatcactgacttgggatccaacttcaccagttcagaattctntgacttctgcgagcaaaagagcattcagatcaaatacgcatctgtagcacattcaagagccaacgggcaggttgagcgagccaacggaatgatattg

SEQ ID NO: 35057 - DNA, 408 bp, Zea mays
tagaagtgtcaacagtcgtccaaggatacggggacgacatgctagacatccctgggcctgaaggtattgagacacttggataggctatcaagaatttcatactttggcctcgacgggatgttcaagtggttgagccaccaccatcattatctgatgccctctccctaactcaagagtcatcacatgcaaatactattgccaagaaattgtcctcacctcctcaatcttcacctactgccaagtcaattccttttcagctaccatcgccacctcctcatcttctttctaacccactgtctctgtctctagcatcgccattggaaagtgttatatatataattcagtcttggtggaaaaattaaataaagacggaaaacttccacggacccgctaattaaataaatcctc

SEQ ID NO: 35058 - DNA, 381 bp, Zea mays
tacagctacaccaatgcccctgctctcgtctagcccgcaccttcgctatttttgtcaccgcacccgtgacaccacgttgcctccgcccccacctacgagtcgttcctaacaccagaaatcttgcccgcgagatgctcctgtgtgagccgctcgagacaggtctgcgcccgccgccacctgtgggcctgcgttgtcccgcgcgatgcccaggctcgaaccgcgatccgcctcgcctgagatagtaatcgtcgttcatccccctccccacccgtatgagatagccgcttgcgttgatggaggtgtcgagcatgcactggtggagctagaggagggcgatgcataacgactaatcagaggcgagagatgccacacatagggccc

SEQ ID NO: 35059 - DNA, 439 bp, Zea mays
  unsure (1)..(439): unsure at all n locations
agcttagcatagctattaataatttggtcaaattntattagcaattactagatgtaagtacataccataccagaataataaaggaacaaaattaataataaatcccaatgcgatgccaatgacaaattgaatttaattccataaattcaccatgcgagagtcctgagctgctcatgaccgcgagcacggctagtataccagttttacactctgcagaggttgtaccctgtacccacaagtcaagttacccatctgccacagggttgcatgggccccatacacctctaccaaggaagcgaggcagggtaacactacgaggcctttacaaagttccactagcttcagaaaacccgctacagtttctatgaagagcaatataggaatcccccgtctgaccgccatcgcagcaaaatcaacctggggaacctcctacacgcct

SEQ ID NO: 35060 - DNA, 451 bp, Zea mays
  unsure (1)..(451): unsure at all n locations
tggacagngnnctgcgatggatcttggagtttctttgtcttatgagcagctgctatattagtagcaccttcgaaagtcagaacatgttatgcagccaagctacactttatttgtataaataatattgccgaatacgaagcactcctgttagagcttcggaatctaagggcaatgggaataagaagggctattctgaaaactgattctcaagtcatttttggccatgtagataaaagtatctaggcaagagatccgaaacttgaaaaatatctggatacagtccgaagggtggaggcctctttctaaggtttctctatcatgaacattccaagacgagaaaatgatcatgcagatctgttaaccgcatcagcggctcaggggctccctctaccttcggaagtattnttgaaacaataaaagcaccttcggttgaattatggaaagagaatgc

SEQ ID NO: 35061 - DNA, 469 bp, Zea mays
  unsure (1)..(469): unsure at all n locations
agctcgaagaaggagaaaccgcaacaagggtttaactccttgagaaagatgttcctaaagcaataagtgaagcaatcaacaagagacaagaaaaaggtaatgattcaattagtcatgttatttgcactaacaatctctctatgtcatccaaaagcaaagagagaagaggaaaaaggaggtgcttcaagtgcaagagattangtcacctcattgcttcttgtccatacaaagacaaggacgaagggataagaagatgttttggatgcaatgaaaaggatcacatgatcacttcatgtccgctcatgaagaatcaaagacgtgcaccctccaagatgaccctcactaagaaaaaaacaaacagcaagtgtcatgtctggttgagcaacgcttctgctacatgtgtggtgagcatggtcatctacctaaggtatgtaagaaaggtagggttctaagcaagtaaaattatctc

SEQ ID NO: 35062 - DNA, 464 bp, Zea mays
  unsure (1)..(464): unsure at all n locations
taaagaattgcgataacaaagaggaccttctaattatctattattctttgaagcaacaaaaagtcgttctaaggaacgcagagtaagtttgccgaagtcacaaaaagccgctccaaagggagcgcagtgtaagttttctgctccaaagtcgttccaaagggaatgcagagcttacagcgaaaagtcaacgctgataccgcctaagtaaaaggcgaagcgcgaaaagtcaacgcgaataccgctgaaagtaaaaggcgaagaagctcctaagggaggcttacaacgaanaataaacgctgattccgctgaagtaaaaggcaaagaagctcctaagggaggcttatagtaaaaagacaacgctaattcaaaaagattatgtgttttatcgcaggaatgtgtgtgtatcttcngaataaacaccatcttaaataacataacatcatcgcatcatttcgcatagcata

SEQ ID NO: 35063 - DNA, 477 bp, Zea mays
  unsure (1)..(477): unsure at all n locations
gcttgtgtngtaccagaattcagccgaggtgtttcttcgcataccactttttaggacaagcacttacaaagcagcgtaggaatgtttcgaggcactgattgactctttcagtttgaccatcggactgggggtgataagatgaacgcatgcgaagctcagcacctgctaacttgaatagggactgccaaaactggctagtaaaaactgggtcgcgatctgatataacagccataggaaacccatgaagacggtacacctgagacaggaataactgtgcgacagaagcagcggtgttgccaacccggacaaggcagaagtatgattagcactcaggaagcaatgagagctaccagagtctaataaaatgagcacatcaatgccttgaagttgaccgcgaagtcgaaatgatttagaggtagtcttggtagaagctgcttcagtggatagcaatatcatgaatngttcagcagaatctac

SEQ ID NO: 35064 - DNA, 407 bp, Zea mays
cactatcaagcatgctaccagcaaatttaaatttctcattttctagttcatgctccgtaattttagcatctcagttaactatatgatcattttggtgcttaatcatagtaaggtgatcatgaatagcatcaacattaatatctctacatctagtataaatagtgacatgatcaatagtaaatgtagagggtttgcaagcatttaattcaacaatcttagcatgtaaaatagcattctcatctctaagattggtaatagcatcattgcaaacatttaaatctttagccttagtaattaatctttcattttcaatcttaaggctagaaagagaggcattcaatttttcaatcttagcaatcaaactagcattatcatttctaagattagtaattgaatcatcacataca

SEQ ID NO: 35065 - DNA, 454 bp, Zea mays
  unsure (1)..(454): unsure at all n locations
agctctaagtaatatatagaagcgctgcgttttgtttggtatgattcggaccatgtntggtacttagaacccaaaaccctagcccccctgcactatgaacttcactatagactcaaaaaccctaatttctcggaaatccgtgaaggaaagttatattcaagacattagataataaacttttattatctttgcatcttcatgagcattacatgagcattgatgattatatatggctatatctagagaacgaggaggaaatagaagttgaagaagcgaggacttcaccaccaccacctgaagaacctcaggcaggaaactgcttttactttgatatttgtggagcagagcctgattcacctatcacacaaggaaagcccaggtgcatttgccacccccttgttattatgaaatctttctcacttacttgatgcatttggtgataggagttgtatgc

SEQ ID NO: 35066 - DNA, 405 bp, Zea mays
  unsure (1)..(405): unsure at all n locations
tggggcgttggataatcccctttatgtcttcccttttaaccagatcaattttgacataagatcattcctccatctgggccccgggccaccttttccgaaatattggaaccgggtagcttgcattagaatgagcaatgaatccataacaaccgaagttattatgatactgctctttgtcagtggcacttcgtctcgaacaacagttcgtgcatacttgcaaaacacttctcgctcggtatcaacccttggcttctcatagaccaaacaaacaaacccattctgattatagcttccggagtaagttgatgaagaaagaactgaaatatctntaacacttcaaccaaaaatctgcttaatgggaaccgaagacccaccttctaaaagcttctgtagacaacaacctca

SEQ ID NO: 35067 - DNA, 476 bp, Zea mays
  unsure (1)..(476): unsure at all n locations
actaagcttanacacttgttgccttggaacactatgaagcatcattatttctttatcatgacanctttagagctctcgccactatagaaccaanattaaccaaaataactctttactgtttcgattaaaggaaaagacaagtgaataaagaaagggtaacacttgaattttgagtatagagcacagaaaatattataccccaaaatttatggtgttacagacctatcctccttataataatctcgcccctgagattcaaggctggctaacaaagagttcatgatacttggctttcagatcatctacgcgttcccacgttgcttcttcttcagagcggtgaccccatctgactttgcacattctgatggtattcctttcagtgactttgtctgctgtctccataaactgcattggtttcttctcatacgtcacatcttctttgacttacagttcttccactcgcaactactacactg

SEQ ID NO: 35068 - DNA, 384 bp, Zea mays
cgttctcgccgagccaatcagcctacttcttctgctgacgggaaaaaacagaagaaaagacatcttcatcgagtgtctagtttggatcaagatgctggtccttccgttcctgctgctgaagaaatgcaagtgcctgcatttgctgagactgatcccaatgggtgtaacctgcctgctattaaccccaatgggtgtgacctggatgacgctgaccccaatgggtgtgagctggatgacgctgaccccaatgggtgtactgttcgcgttgttgatgaaggtgaggacgaggaggatgaaatctctcttactccgaagaacaaccccctctctatgctactgcgaaagagtggtgttcttttctatccctgtcgctcttgttggcta

SEQ ID NO: 35069 - DNA, 439 bp, Zea mays
  unsure (1)..(439): unsure at all n locations
gaacattgagcaanatctcatagacgcagccgatgtttattttgatatcacncngtactataaacgcaccgtgaagatagcataccatcatcagcatgggatcactaaatatatattctccaaagtgtagatgaccatgttacaaaccatgaacacaatgcagctctctctatgcaacttgtcactactatttccaccgttaatcatagtcaataatgatacaaccatagggctactgctgcaaaactgatccaaggattgtgtctcactacataacgctaaattttctgtagactttacacacaagtatcgaataatacggcaaccatgatgactgcgaaaatcatggatattaaggctgcgctaaagcggtaaggcgagcataaccacgtgaggcgtcctatcgccttgccgcgggagtaatgcgaagacataaggc

SEQ ID NO: 35070 - DNA, 376 bp, Zea mays
cacattttaggacttatttatgtttttttgagaaagacatgatatgtatcgcatgtcaagcacagttactctacatggatctattctactcgatcgcttacataataatttgctggagtaagtactgaaagggaaatgggcttaatcatcacctataatcaatattggtgggtgacgtccatcacaaaccacatggactaactagttttgtctattcatcatctatctcacgtgcataaagtcaaaacaaaccaataaagaagctaaagtggggaatcaacaaagtatggtgcaaagacatgaaatggtgttgcctgtggcgcaccggacagtgttcggtgccctatgccgagcacccagcaaactagtcacactc

SEQ ID NO: 35071 - DNA, 468 bp, Zea mays
  unsure (1)..(468): unsure at all n locations
gcttctaaagggagaacacgtgatttgtcttccaatgttcattncgaaaaagatagaccttgtgcagcttgtcaagcagggaaacaggtgggaggctctcatcacaccaaaaatgtgatgacaacatcaagacccctggagctgctacatatggacctcttcggacccgtcgcctatctgagcataggaggaagtaagtatggtctagttatcgttgatgactnttcccgcttcacttgggtgttctttttgcaggataagtctgaaacccaagggaccctcaagcgcttcctaaggagagctcaaaatgagtttgagctcaaggtgaagaagacgttccaacggccgcgatacgcaccatggcgattggagatgtacggcctcaagaacatttggagcaagatcaaccatcttcctcaactatggtgcatccnccaacccaaggtgacgaacangtacctcaagtgg

SEQ ID NO: 35072 - DNA, 463 bp, Zea mays
  unsure (1)..(463): unsure at all n locations
tgacattgatntcctgttggaagccaatgccattttttattctattgcgtctcccattataaagcatgctacgagcaaatttaaatatttcattgttctagttcatgctcggcaattttagcatctagtttagctatatgatcattttgttgtttaattatagcaatgtgatcatggatagcatcaacattaatatctctacatctcatgcaaatagaaacatgatcaacagtggatgtagagggtttgcaagattttaattcatctatcttacattttagcatggcattttcatctctaagacaggaaatagagacattgcaaatatttaaatccttagccttagaaattagtttatcattctcaatcttaaggctagaaattgattcattcaatntatcaattttagcaactaaactatcattctcatttttacgattggcaattgaatcatcacattcat

SEQ ID NO: 35073 - DNA, 453 bp, Zea mays
  unsure (1)..(453): unsure at all n locations
agctnggttaagataattggtaagtttattttggtgttctactgatttccctttaatgtcttagtgagagtttattaagatttctagctgaacttattggagtgagatttatttccctctcttcctttctaattcttttaggcttttaaggtgggcttgaactacaagacaactcaataaatttccaaaaattctgcaaacattacagtggcttctcactggtgtataattctctgtctcaaaatttggggtttaaaaagtgaatacttctctctgtataaaattatcaaatattagggcagagggagttttttgaactacaaccttctttttacaatgagttattctctaagacttatttttgttggcatttagatgctataacatgattttgtacaaattttttgccactaatactcattagttatcttattatgattntccacaagttct

SEQ ID NO: 35074 - DNA, 432 bp, Zea mays
ctgttccagtgcacccaggatcacgaagaataccttcatgcgtatgtccaaacgttcttacgactgagggcacaagcgccaacggagcccaatgaaattgttattgacgccatgattaaggggcttcggccatgacctacagcccaatacttcgccatgaaaccccctcagaccctgtagaaactgcttcagaagatggatgaatatatccgcgaagataatgactttctgctaagaagggaggaagcatacaagttctctgatatgaccaggggcttctgaggaagagttcaccctaggcacgtcatatcaatccactctactcagaatgatgacaggggaagtcagcaacaaacgccgcagtattcctcccacgcttcggggcatcaacagagctatgctcggtccccatctccaaggggcagaggcacc

SEQ ID NO: 35075 - DNA, 503 bp, Zea mays
  unsure (1)..(503): unsure at all n locations
tcgaccggatccttaagtcaccgcggctgcagcttaagattcagaggctggtatcttcttctatgttgatcaagacacttttatcgtaggttgtcttcaaagagcatataatgaagaaacttgcaatatgaaccaacacatgagaacccctcatagctattgttaacatatgagctccaggcacaaacatcccaaaatttgggaaaatgaatagtttgaatgtagaaaaacttcacaatctatcaatagcttatctggatttcatttttcactcaaaatttcaacaaaatgtttctggtctgtaataaactgcaaagaatcaacatattagttgttagaaaccaanaataaaagcaaattggacttagtattagttgtcgtacataataggcatcanagatcatagctagtntgtcacactctttggtgatacaaaganggcgtttaatgaaatcttttctcatggaaaaaatatgggtgtgagtagagaactaacatgagta

SEQ ID NO: 35076 - DNA, 459 bp, Zea mays
  unsure (1)..(459): unsure at all n locations
tttgaagaaaactccatatgaattgctcattggtagaaagccaaatatctcatatnttagagtattcggttgcaaatgttatattttaagaaagggacgtcggctttcaaaatttgagaagaaatgtgatgagggttttcttcttggatattcatcaaatagtaaagcttatagagtcttcaacaaaactcatggtattatcgaagaagcatatgatgttgaattcgatgaaacaaatgggtctcaagatgagagtgataatctcgatgatgttgggggaactcaattgataaatgcaataaaaacaatggccattggtgaaataaaaccaaaggaagatgatgatgaaaatagtgtggttgtcattccttcatcctcaactcaagatgaggaagatcaccaaagccaacaacatgatgaaactgtggatactcatgatcaaggtacttcaagacattc

SEQ ID NO: 35077 - DNA, 371 bp, Zea mays
  unsure (1)..(371): unsure at all n locations
agcttgagagctgagagtctcagtttggtctaagtttggtctcccagagcctgtgttgtaacgttgcatgcctccccttntatagctaaggggggcatgcagtggcggagcacccattatggcctactatggctagagtcatacctaaaaatcatgtttggtgtagtggtaagtgcatactacttgcaatcaataggttccaagtttgaatcctacatgttacatcaatttttttattttttatcctttttcagccatacctaattattattccgtcctccgccactggagccatgcacaagggtactgagccccgacatgtgggcccaggaacataacggatgtagtacttggagccactaatattcgtc

SEQ ID NO: 35078 - DNA, 385 bp, Zea mays
tcaagaacttcaagtgcaacttgaatattgtctgaacatcaatgcctcatctttagtatttgaatctaagtctagctcaaatgataattcttgcaaacattgtgccaaatatcatgcttcttgttgtctaactaaccatgcaaggaagaatagcccacaggtgtcggcgtttcgagacaggggggtccctaagccgacgagtgagtgtgctgcgtgccccaccccaaatgggtcgagcgcgttggcgagcgcgaaggggggagaggcgatgcggccggaacctatcgtgagagaggtggaagtcccgcggccttcgtgttcgtcccgcgcccaggtcatgtgcgcttgcagtatgggggttacaagcgtccacgctggtgaggga

SEQ ID NO: 35079 - DNA, 403 bp, Zea mays
agcttcaaatggtgacatcttcagactggtctgttaactattattatatgagaactcaacatatggtagaatcttgccccaactacctccatgctgaagggcacaagctctcaacgtatcctgaagtacttgattggtcctttcagtctggccatcagtttgcagatgataagccgaactgaagcttaactttgtattcatattctcatgaaagctttccaaaatatggaggtaaactgtgagccactatcagaaataatcttctttggtacaccgtgtaaacacacaatccgagccatgtataactccgccaactgtgcacctttataagtagtcttgaccggaataaagtgagccactttggtgagtctatccacaatcacccatatcgaatataaccctt

SEQ ID NO: 35080 - DNA, 90 bp, Zea mays
cttgattgtctctctgaatggattgctagctcttgtattttatgtggacgattgaagtgcttgggtgaagtgaatggaggtggttgtcct

SEQ ID NO: 35081 - DNA, 444 bp, Zea mays
  unsure (1)..(444): unsure at all n locations
agcttatccaaaaagtatagtgatntttggttttattaatcaacctctaaaattccaggagtataggttctggctattttaaatattccataattccttatttggactaaaaatcataaatctatttttattaaatactatagaaatttaggagtccaacaaagttggtctcacatttttagcctctttaaaaaaaattctatagattttcgaagtctggcaaaaaaggaaaaagaaaaagtatcaacagtactgggcttaattcaacccgatccagcccaatctcagcggaatgcgcccgcggtattgactttgcatagaagaccctgtctttntaaacaacccgtaaagagtccacaacactattgttttgtctcactgacatttgcatcaagggcccttcccttctattctttcataaagtcgggtccacgatgcggagcg

SEQ ID NO: 35082 - DNA, 384 bp, Zea mays
tgaagccatgggaagtagcataggctaattatatgcgaattgactcaagcctagctacgggtgcataggtttcaccgaaatccaaaccttcgacttgtgaataccacttggctatgagtcgagctttgttccttgtcaccacaccatgctcatcttgcttgttgcggaagacccatttggttcctacaacattttggttaagacgtggaactaaatgccagacctcattcctcgtgaaattgttgagctcctcttgcattgccaccacccaatccgaatcttggagagcttcctctaccctgtgtggctcaatagaggaaacaaaagagtaatgttcacaaaaatgagcaacccgagatcgagtagttacccccttatgaatgt

SEQ ID NO: 35083 - DNA, 397 bp, Zea mays
  unsure (1)..(397): unsure at all n locations
attgaagatctgcttgatcagatgagaggagctaaagtattctcaaagatagatctaagatcagactatcatcagttgaagattcggactgaagatatacctaaaacagccttcaccacaagatatggactatatgagtttttagtcatgtcttttggactgactaatgcaccggcttactttatgaacttaatgaacaaagtattcatggaatacctcggtcagtttgttgtggtattcatcgacaacatactggtatactcttagagtgaagaagcacatgaagatcatgtgagattagttctacagaaacttcgagacaattagttgtatgcaaaattttcaaagtgtgattnttggctgaagaaatgttntcctaggtcatattatcaccgat

SEQ ID NO: 35084 - DNA, 443 bp, Zea mays
  unsure (1)..(443): unsure at all n locations
tttcttcaattggggctacccctagcctaccacgtatatcactgctatgtagtttggactaaaacccttcttgtgtagccacaaatccaacatatgcatttcttgcacacttaactgccgaacattatatctttttgtaggccaatattctacaccatacaatataattgtacaatcgtcatcctataaaacttgccttttagcttctctggtaccatcttgttacatatagctgtnggcataataaaaaaactctgccgggagagaaagaccgccctcccggtgttatattaagaagagaccgaaacatggtctcggctgagaaaaccctcgaacccttccccctccatcactaacaggtcgatcaactgtccactctgcaacggcccggccggagggtggcgcacaggatatcaatcctctagagcgggtgaggcacagcg

SEQ ID NO: 35085 - DNA, 479 bp, Zea mays
agcttctacatttatattatgggaccttgattgtgtgtttaaccttcctagcttagttatatgctagtggatggtttcgatcctaggttgcatagctttttatgatagagatagcaacacttagtcaaaactatagttgtgcataagatagtttatttattgtatatgtttggacagaaggaaaacagaggccatataaagagagaaattagattgcctaatccacattcctcttagacatcaatgttcctttcaagggccatattgtctgtgagcttctatggtttgtcagaattttaacttaatgagggcttagaatggaaacctctagtttttgtactcgataaaaccttagttgatctaactaatttacactcaagtcatatattggtttccctaggtataattcactccaatcatagaagaatgtctgtcgtccaaggaattgatggattaaaaatggcacattaattatacct

SEQ ID NO: 35086 - DNA, 469 bp, Zea mays
  unsure (1)..(469): unsure at all n locations
aaatactaagcttacgggctactggcagagctagccgaagcactggcttgctcanattatggctggagggggctggccacggtggccgaagctctggcggcaatggcgggcggaattaagctcgccggagctaagggaaagtggctggccggtgagggtgagtgctgggccaantggggcgcgcctgggagggctttatangcactgcgcggtgcacgggcggtcgtggaccaacgagtgcgcgcgggcgtgcactgggaggcgcggtgcgcgaacgggcgtgaaccatgggtgtcagccgcggtcgaacacgtgttcccgttgcctctgcccctgttcaagcgccgattgggagcaaatcttctcgaatttgggcaagatcactgcaagggatttgttcaccagaccaagctttgtcttttgtgtatggacgaacgtgcggtttaggctannggacagggagtgtacc

SEQ ID NO: 35087 - DNA, 75 bp, Zea mays
aacaaaagcaaactagcttgccatcctagccaacaacgtgagccatgagggtgaatgctcgaaaaaaacggacac

SEQ ID NO: 35088 - DNA, 440 bp, Zea mays
ctaagcttgatagtccaaaatcaagaacttcaagtgcaacttgaaagtttctatatacttaatgcttcatctttattggttgaatctaaggctagctcctcaaatcataccatttgtaaacattgtgtaaaatatcatgctctttgttgcttgactaaccatgcaaggaaggaaagctcatatgttaaagtcaagacaatattgaagaattgctctatcaatgatgggttaaagaaagttgaacccaagttcaaaactttgaagcccaacaatgggagataggggcttgggtacaactcatacaagataaaccctagcatagagcataaggggtggaaatcccccaagttcatagagggaaccaccctatatgatgcctctgggaggattcactcctcaaatgacacgtcaactcaagtgaaggtaaacttgagtccaca

SEQ ID NO: 35089 - DNA, 426 bp, Zea mays
agcttctaaattgtgaaattatgagaacttttatttatctttcaaactatcggatcttaaattatgagaacttcaaataaaatttatgggttctaaaagattttaaacaaaaaaaagacatcaactaaaaaaatgttctttacaagtatcaaactttgatataatgcctatcttcattcagctttatttgaaaaaccataaattgtactttattgcaactatttttagaaatgactctaaatttaatcatctctacaaattatttttttaggcggatctagattaaagccattcctaaagatagatgcattcatagagacatctcagaaataccacccacctctaaagaataaaatttcagaggcagctaaactattcttaaagacgggtttagatacacgtatcttaagaagatgtaaactattt

SEQ ID NO: 35090 - DNA, 366 bp, Zea mays
  unsure (1)..(366): unsure at all n locations
acaccccagaacacttaagctntatactcggctgcattgntggaggccggacatagccactttatttttatntgaggcgctcgcctccaagtgcggcgatgagaatacctgctactgcttcctgcagcttcagtgagccgaaaaaatacatactccatacttatgcaggctctgggatatctggtacattgctgttcaccccactttaatacgaaatcaactattgcttgattttctatggctttgcgaggtcagaactccatatcatgagatcccagcttgccagcgcacttggctattcggccaatggtctccttgtaatgatgaatatcccctatagttaaaccactgactactatgactttg

SEQ ID NO: 35091 - DNA, 300 bp, Zea mays
  unsure (1)..(300): unsure at all n locations
agcgggcagaccccccagacagctagccataacagccacaaagacattccctgagaaacaacaaaaagctgccaccacacccctaaagctaagaccaccactctcaaaaacgaacatcatantgaaaaaacatcaacccaaagaaaactgctacaaaagaaatgcaccaaggaccagaaaaacacacaacgaagccggaggaggcattacccaccctgactacggacccactcaaagacggccggaacctggctgacaagaggaaacctccccacagggtacgaccgtgcaaaacagtgg

SEQ ID NO: 35092 - DNA, 465 bp, Zea mays
  unsure (1)..(465): unsure at all n locations
tgagaaacanatactggntgtggtatgcaaacttgtttattatttcctccaggnttcttcaattcgatgcaatatctacttgttcacctaccatatgaagctaaggtaggttgtcctgtccagtatagatggatgtatcacatcgaaaggacactaaagaagctacatgcaatggttggtaataagagacgagttgaacggtgcatcgctgaagatttcaaatacaaagagatagcatcattcatgggcctgtacnttgcagaggaacacaatgtcaacgctcctgcgttgcggtatcatgtcgacgagccctctatcagcgaccttgaaatctttcaatggaaggaaaaactataggacccagcacatcatactgtntcaccaatgacgaatggaagactgctttactctatatgtataacaacatggaagagatgaatcagtttctcctataagtgcaaactt

SEQ ID NO: 35093 - DNA, 383 bp, Zea mays
gcgatgccagacccaacccatgttagtgttaacaattaagccagtgtcgagttcagctctattaaaatcaactaagcatagctgaccctctaacactgccttaaaagctaccgaatcatcactacttgtaaagacagtaacacctatattcgtaaaaagacaactgacgccattttgcataaatgaaaactggaagcaagtgtaatctaacaatctacaagaaaccattggaaatgaatggtaggtgaataaaatttaccagtctttgacaaccttgattccaccccaatggatactcttgggatatgttttttatagaagaaacatcttctctcagcatgtggtggccccgtataatatctactgagcctcgtcataactac

SEQ ID NO: 35094 - DNA, 456 bp, Zea mays
tgactagctactggcggagctatccgaagcactggctgttcttatggtggctggatagggatggccacagtgaccgaagctctggcggcaatggcggacggaattaagctcgcctgatctaatgaaacgtggctggccggatacggtgggtgcggcgcaaagagacgtgcaccctgggaggctttataggcgcgggcgggcaccgccaaaggcgtgggcgcgcgtgggacttgaccggacgaccgggtgagcgcgctcaccggttgggcgagctctggcgtgccgaccagggtccaacacgtgtgcacgtgctgttctgcccaagttctggcgcgtgtggtcactcatccgagcctgctctgaccttaggcagtgcacaaaacctcttctcctccctacaagctaccattcttgtgtgggggtcataggattatgcctactggttgcagagatatg

SEQ ID NO: 35095 - DNA, 465 bp, Zea mays
  unsure (1)..(465): unsure at all n locations
agcttggacgggtttctgcgatggttctttttgataccttggngcangagcagctgcggtgttagtggcaccgtcaaaagttaaaacatgatatgcggtcaaattgaatttcatttgtacaaataatattgctgagtacgaagcacttttgttggggcttcggaaactaagggcaatgggaataagaagggctattctaaagaccgattctcaagttattgctggccacgtggacaaaagcagcaaggcatgagatccgaagcttgaaaaatatctggatgcagttcgaaggttggaagcctccttcgaaggtttttctgtcaagaatattccaagaggtgaaaatgagcatgcagatttgttagccaaatcagcgggccaggggctccctataccttcggaggtattcttcgaaacaataaggcaccttcngttgaacttatggaaagagctatacttaacaat

SEQ ID NO: 35096 - DNA, 317 bp, Zea mays
gccgaaatatacggagacatcatgaagccagagaacatgatctgacgcagcctgtgtcacgggatgaggtctcggaggtgggagaaactccggatgaatgagtcttcagggaaagaaggaattcccgacggcgcgatcgtcggcaagctcaagagcaagccgaacaggaagcgaaacaacgccgagagaaccctcttcttggccgaaacctgaaccctgacttcgcccgagctatgaacacaccgagcgaggtcggtggagtgttaactcggatagctgatggcctcctcccgactccagacgctgagggttatcga

SEQ ID NO: 35097 - DNA, 421 bp, Zea mays
  unsure (1)..(421): unsure at all n locations
tagtnttgaagcttcggctttgattatgttttttatcggctccgaagatgtctgaagataagaagactgttgctgagatgaagctgagccttgacgaagagaaaaacttggggtttcttatagcgatgtcaaagaccaatacagaaaaaattaccaaggagattctggaagggttgtcttgaaatactggtgacagtgacagctatgatgtggacagtggtggtgaagactccgaagatcgtccctggcgaccaagccattcagtttatgggtaatcaactatcaaagagaatcatcccgtcaacatgagaggaaggtattttcgggaattgtccattgtgagggccgacgaaggggaaaaaacttgcccacaccctgtagagaatgaagttcgagtgtacccaagctttttaaagctggc

SEQ ID NO: 35098 - DNA, 390 bp, Zea mays
ttcaagtcattcttcacataaaaccattctgtcatccagtcgtcgggccatctcttctcaaaggttggcacgggacaacttgacccacaccgtaaaacgaaattgtagcatccaaaattattgtgatactgttccttaccccaaagctttgtctcgtatgataattcgtgtatattgcagaaactttttacatcaggctccagaccttggcttctcacggtccacacgaagatattcaaccttatgattgcttctggggtaagttggtgaagatacacttcgaatattttcaacacctctacgacaaaattgctcaagggaaatctaagtccagctctcataaagcttcggtacactacgacttcattttcttcacggttctgacaagtc

SEQ ID NO: 35099 - DNA, 467 bp, Zea mays
  unsure (1)..(467): unsure at all n locations
agcttcatgcaactgctgccaaaaatgggatgtgaactgagtgcctctatctgatactatcttcttcagaatgccatgcaagcacacaatccgagacatgtatagttcgtccaacattgcactgttgtaggtcgtcttgactggtatgaaatgggtcacttttgtcaaaccgtccactactacccagatggagtcataacaagtacgagtgcgaggcaaaccgactatgaagtctgtgacaccccaggtgtcagtttcgtgttacgtcgggagatttatcctaatctcggacggtcagtgaaaatttctatttctcgctcgcatatgtctctgattatccagactattcgtacacatttgaccgaattcggagttattgagtctcacagaaggccanatttggagcctgttaaaacttttatttcttggcacgaatgcgaactcgctgatcaatcttgatttataaa

SEQ ID NO: 35100 - DNA, 383 bp, Zea mays
tctaaagggagaacacgtgataagtctaactaatgtttctttctaaaaagatagactctgtgcagcttgtccagcaggtaaacaagtgggaagctcttatcatgccaaaaatgtgatgaccgcatcaagacccctggagttacttcatatggacctcttcggacccgttgcctatctaagcataagaggaagtaagtatggtcttgttataaatgatgatttctcccgcttcactagggtattctttttgtaggataaatctgaaacccaagggaccctcaagcgctttctaaggagagcccaaaacgagtttgagctcaaagtgaagaagataaaaagcgacaatgggttcgagttcaagaacctttaagtggaggagtatc

SEQ ID NO: 35101 - DNA, 440 bp, Zea mays
ttaagtcacctgcggcatgcaagcttgagtgtggtatatctatgtataaaatggtgaaacctaacggggtcaattatgactcctaaaaactatctataaactaggccaccattaaatccctaaaacgaaacctatgcaaataatcaatctataatatgcaaactagggagcgactaaacgttgctatatctaccgcaaaatctaagtctcaatcctaaatattctaactagccagaggagattgaaacttaattacctaatatcaatgtgaaaggtaaaaagcaaggtagagatgcaaactttcgtggatgagatgcaaactcttgtggatgacgtcaatatatttatcaaggtatgcgaaaccacgcaagtgtccgagtaatcctcgttggcgcccctacacaaagggtagcccacatgagggccaagaacctcgatcg

SEQ ID NO: 35102 - DNA, 387 bp, Zea mays
cataccttaccatgttattacacacattatgctgggcgaagcgggacaaaccttcgcagcgaaatccttaccaacaacagaaccattgttctagacaacacatttactttactcaagaacaactttggatacaacgcgacatagcatagaagctctcatgagattcttcttgatatagggaacatgctgcgcactcgttaatggcaccgtcttgtccgaagggaacttcacaatgaccgtagcgccaccaagaacaagagcgcgctagcccattaccattaacacggtgtcagacctcccgacctagctggaagagaacatagaggcatcagcacacacatgaatatttgaccactgccattcaccacttcagtgaattacaactaa

SEQ ID NO: 35103 - DNA, 411 bp, Zea mays
agcttcaagcccttagattcagtgatggtattcttcttgccttgctctgtttagactctctatcttagctttcccttttgcctccctcagtctttctattcctctctttctggttgtttttttggtatagtttgagacctctttgcacaggcttctcttcttttatattaataaaattcttttacaatatatgtgtgtgggggtctcccctgctgtatctttcgctaaaaagagttgaaatatatgcacgggcattcaagacatactttatggataatttaatgaaactaatttgatgccgtatatatcggtttattttctgtgaacttggtcagagctagagaagttagacttatgataaagctaaagtgattgactccataacttgtatagaagagggagtaattacta

SEQ ID NO: 35104 - DNA, 416 bp, Zea mays
  unsure (1)..(416): unsure at all n locations
tttccttgtcgtcatccaccttgacatagaaccactcagatttccagcctgctgcccatntgcttcggtagctaattacaggaaactttgtagttttccgataggcgaagttatagcaaccaaaattgtcgtgcaatccatcctttctagccttcgtttgataatgcaactcgtgaacccggcaaaagctgtccgcaaatggttccactgcttggcttcggagtgcccagatataaacaataagcctaacgatagcgttaggggtcagctggtgaaaatagataccgaacctattcagtacctctgcaataatcccatgtagggggaaccttaatccagcctttagaaagcttttgaaaataacaatttcatccttctccggctgtggggtagtctcttctcccccgaagcgcaat

SEQ ID NO: 35105 - DNA, 78 bp, Zea mays
gcacccgactgtccggcgtgcacctgactgtcccgtgcgccatctaacagacgctgccaacaacggtcacttttggtg

SEQ ID NO: 35106 - DNA, 465 bp, Zea mays
  unsure (1)..(465): unsure at all n locations
tcgtgaaatattctccgaaactatagaaaagtttttggtgcctctctaatgaagatacacttcttctcgatttatcttgtgccttagcacgattttctcttttccaaaatattctccgaagatcaatactgtatccccttcttgttccacatgcaatatgatgtatgatgcttatgttatgcaaaatggtgtgatgatgttatgttatgcaaaatgatatttgtgccgcagatacatatccctgcaatagagcacacacactttntatatcagcgttgacttttcgctataagcctcccttaggagcttcttcgtcttttactttcagcggaatcagcgtttatttttcgttgtaagcctcccttangagcttcttcgccttttactttcagcggaatcagcatttatttttcgctgtaagcctcccttaggagcttcttcgccttttactttcggcggaatcag

SEQ ID NO: 35107 - DNA, 445 bp, Zea mays
  unsure (1)..(445): unsure at all n locations
gcttatgaagattcttcattccaacatgggctagtctgcggggccagagccaacccatgttagtcttagcaattaagcaagtgtcgagttcagctctatcaaaatctaccaagtatagctgaccctctaacactcccttaaatgctattgaatcatcacttcttctaaagacagtgacacctacatcagtgaatagacagttgtagcccaattgacataattgggatacggaaagcaaattgtagtctaaagaatctacgagaaaaacatttgaaatagtatggtcaggtgatatagcaattttacccaatcctttgaccaaaccttgatttccatccccgaatgtgatagctcgttggggatcttggttttctcatatgaggagaacatactttntctccctgtcatgtggtttgtgcacccgctgtcgagtattcaacttgag

SEQ ID NO: 35108 - DNA, 479 bp, Zea mays
  unsure (1)..(479): unsure at all n locations
ctaagcttctaaagggagaacacgtgatanggttgactaacgtgccattcttatattatagaccttgtgcagctggtcaagcaggtaaacaagtgggaggagcacatcacagcaagaatgtgatgaccacttcaagacctctggagctgctgcatatggacctcttcggaccctgcgcctatctgagcataggaggaagtaagtatggtctaattattgttgatgacttttcccgcttcacttgggtgttcttttttcaggataagtctgaaacccaagggaccctcaagcgcttcctaaggagagctcanaatgagtttgagctcaaggtgaagaagataaggagcgacaacgggtccgagttcaagaaccttcaagtggaggagttccttgatgaggaagggatcaagcacgagttctccgctccctacacaccacaacaaaatggtgtggtagagaggatgaacaggacgctcatt

SEQ ID NO: 35109 - DNA, 469 bp, Zea mays
  unsure (1)..(469): unsure at all n locations
gcagcttctaagggagaacacgtgataggtttgactaacgttcttttcgaaaaagatagaccttgtgcagcttgtcaagcacgtaaacaagtgggaggagcacatcacagctagaatgtgatgaccacttcaagaccgctggagctgctgcatatggacctcttcggacccgtcgcctatctgagcatatgaggaagtaagtatggtttaggtattgttgatgacttttcccgcttcacttgggtgttctttttgcaggataagtctgaaacccaagggaccctcaagcgctttctcaggagagctcaaaacgagtntgagctcaaagtgaagaagataaggagcgacaacgggtccgagttcaagaaccttcaagtagaggaattccttgaggangaagggatcaagcacgagttctccgctccctacacaccacagcaaaacggtgtggtagagaggaagaacatga

SEQ ID NO: 35110 - DNA, 403 bp, Zea mays
tgtagcactcgtagactcttagctcttcaagcatgggaatcatcactgttgcaccagcaggctctcctgcactgtcctgatctgtccatctctccaactcatgcaagtactgcaaccgcatcctcctcagcttcgggaaaatctgccgggacgcgctgcgttctgccgcctctgccacatcgacgttcgtgcacagtgttgtcaggccgatcatcccggataattccaagaccttcagagaaggtgacagccataccaccggcagatccttgcatctcgggcactcagtgacaacgagctctctaaggcactggaacatcctagaatctctcatccattttgacacagccaagccaccgtacccatgcagcttcagaaccttgagctcaccgtgagggacaag

SEQ ID NO: 35111 - DNA, 475 bp, Zea mays
  unsure (1)..(475): unsure at all n locations
agcttccagcccagccgtgctcggcttccctgtttcagttgatcctcccatggcgagctcgccggggatgccccttcccctgccggcgtttagcccaaaccggatctccctgcgcgcgctgctgcttctttactcggcgctctccgctcgaatttagcccagcagctccccgctcggttccgtttgccgcgccgtcgccttgctgcgcgcgccgtggtcttctttctccgcgcgccaggccgttccagagcttcctttgctccattccatggttgcgcgccgagcccctcgcgcagaccgcgagctctctgttcgccgcgcgctctagagttctccctgcacgcgctcagcttcaattctgttgctgcgcccactgcttattctccttgctcacccggcttgccgtggagctttcctgcgcgcgtgttccattngttctacacgtgctgccgcanagctctatgttcagttcgtc

SEQ ID NO: 35112 - DNA, 433 bp, Zea mays
  unsure (1)..(433): unsure at all n locations
taagagactnttttcacggatcaagctcgttacaaaaactatctatctccgcgaaggggctactattgggaccatgcttcgtcgccgaaggtcctgcaggaagaaacagcttcngctaaagctgcttatacatgatgaccgaagctaccactcatgaagcttcggtgttatagcatgcccgaagacgaaggatcgaaccgacttaaagatagaatgaccttttagcccataagggtctgagtcattgttgtaaacttttataggggcatgattgaattccttacggctggtgctggtctataatagtgaacaatattctttactgtcacgcattctgaattgcaacgcatgccggaattgtatctgtaagagaagataaatgactatatgtctgcattttatgtcattaaaaaatatggaatatgtactattt

SEQ ID NO: 35113 - DNA, 426 bp, Zea mays
  unsure (1)..(426): unsure at all n locations
atcctctgagtcacctgagcatcaagcttgccccggtacattgttttattttctatacttcaaagatatgggccagtggcgtatcgacttcagctccccgaagcattgtctgctgtacataatgtgttccatgtgtcacaattgaagaaatgtcttctggttcccaatcgaaccgttgaagtaacagatgttgtcctagaaccagatttaacatactcggaacatcctattctagttctggatcaaaaggacagggttacccggagaanaactctcaagttttataagatacagtggaaccaacattctgaagaagaggctacatgggaaactcaagactctttagataagaatttcccaggctttctagcctcatgtaatttgtaaagtatatttagtattgtaataaagaagtgaccccccaca

SEQ ID NO: 35114 - DNA, 423 bp, Zea mays
  unsure (1)..(423): unsure at all n locations
cctgagtcatgttaccggcggttatctatggcggcggcgatgggattcctcccnctatctttttctttggcggcgctgatgggtttgggtaactagtgtggcgcaattcaacggagaggagacaagggtagaccttggcggctagttttatcaccacccgggggtccgttgaggcccaactgaccaagtctgcggcgggatccgcggatgttagttacagtggagaaaatctacagtgatgcggctgccacgtggggtatgtgtgtctgtgagcccacgagtttgcgcacgacggggagaatggtccatgggtcccacgttgcggtgacctgccgtgcgcctgaccacacgggcccgcctgtctgcgccgataacgcgtggcggagtaacttggccgacgagtgatggccaaaaccgctggca

SEQ ID NO: 35115 - DNA, 399 bp, Zea mays
agcttctttcaaggatttgctggtttatatatttcagaggggaaaatgagcatgctgatctgctagccaagtcagcggcacaggggcttcctctacctttggaagtattttttgagacaataagagcaccttctgttaagagcagtgctcacaatatctcctgtccatagtgaagattggaggactgagattatatctttcctccagggtaactgtctcttggatgatgatgtttataacaaaacaatggaagtaagaacaagaccatatgtcataatagaaggggaattatataaacatggagtttgttccccacttctcaaatgcttatccagagccgaaggtatagaactgatgaaggagatacatgcaggattgtgtggatcccacattgtgtcc

SEQ ID NO: 35116 - DNA, 415 bp, Zea mays
accttaaaactcagctactaagcgcccccatggatgctcatcttcttttcagaccccactactcatatgaggtgactagacagttcatctgtcgaataatccaggcgaaatattttattcaatttgcatataatgaccggaatctccttctctaatttctccatcacatcttttttaattcctttactacaaagttgtctatagaagtatcttaactcagctaacgccgtccacacatcattattcacgtaacctcgaaacattacaggaagtatatctttccataataatgtgataatcatgactcttcaatccattcatttatcctggcctcaaattcacggaccatctgaatcccacagtatacccatctggaaattttaggttttcaaccacactttcaccttttctttgc

SEQ ID NO: 35117 - DNA, 463 bp, Zea mays
  unsure (1)..(463): unsure at all n locations
agcttcttcccgctacctagccacgcatctatatagaatttcttccctaattttatcgcctcagctaaagagactctgatattntcaatagagaatttaaattctggctagatagcaacatttacatgtttgcatgcagcattttcaagtattgaagtagcccctcgagcatcctacttgcgcaatagtcaccatgggtcgataggacttcgtcaaaagcttcaacttctccttcggcattgcagataacccgcactcaagcttcgatatcctatgtttctcatcataacccaacatacatcaagttccctattgtctggaaggaaatagagatagtcatcttcgatgtggccaccgtaaacaagtgagcctatgggtattttagatcttcacaanaagcttgcacttcggtaatttggtcgaacagtagctaccctccagaagcgtgccaaatgatatactc

SEQ ID NO: 35118 - DNA, 466 bp, Zea mays
  unsure (1)..(466): unsure at all n locations
tatgcctncctgngaagggccgntcgtcatcgccaagggttttatacccgggacgtacaagctggccaacagtcaaggcgaggtctacagcaacacttggaacatctgacagctacgtcgcttctacccttaagatgtttttcaagccgttcatataccttgtttacatatgaagtctaacatcaaggaagggtcagccttgcctcggcaaagcctgaccctccctcgggggctagaaggggggaaccccctccgcgtcaaaattttcctcagaaaaagcctttctgccagaatatctttcgtgcttttcgactacttcaatggtaggatcatgaaaacgacggagtacacgtaagcaggcaaggccgaccgagccgagggactcctacgcctccgggatacggatacctcactcatcaccttctgcgagaagtaactcgcgttcggatgagcgatcctgctgatc

SEQ ID NO: 35119 - DNA, 494 bp, Zea mays
  unsure (1)..(494): unsure at all n locations
ggatcttaagtcacctgcggcatgcaagctntaaaactaaacgctcagcaaatttttgtgcgcaagagctaaaaattgagtgagcgggagcagatggcaagagagcgtgccaaatgagtttgcggtatgactgtatttatacgcccagtgcgttgaaaattgaaagaccccacttgtcagagaatgttgctattctagcaaagggaaggtgttttttcggaccttcggcataaagccttcgtccatgtcgcaatctaaatttattattttaaacaaattaatattgcgaggggctactgtttggggccttcggcttacgaaggtcctcaaaaacaggatttgacagtatttctggagtataatgtgtgaacaggtatcttctgactcaagtcggcatcacagcagaccanaataatacgaaggttgatacagcgccgaatgtgtgagcanganagcttctgcgtgatagcaaaaaatgaaaccgacttaaagat

SEQ ID NO: 35120 - DNA, 463 bp, Zea mays
  unsure (1)..(463): unsure at all n locations
tcgttgcaatgtaaacaagtagaggtgtagtttaataattcttgatgcggccggcatgattggagttgaagaacacgtcggatgatcctacaagctagctgccgtcatccactgggatgttcggtcaactccgtgaagttgaatccaaattcggctgccgacctgccgtccaagcccaactgctctccatttgccctcgagcaatcaatgtatacacaagccatggtatcacgccgtatgagatgacaacgagttagtcatgcatcctccccgtccactccatctttgcttgctcacgagcaaggttttaaagtccgctagtcgactctagtcgcctaagcaccgataaggtgactaatcgcgattagtcatcgattagctcgattagtcgactccctagtcgtcctatagtncgccatctataacaggaccatatatatatatatatatatatataacagtc

SEQ ID NO: 35121 - DNA, 422 bp, Zea mays
cttacaaaaattggaagtcatctgaagaaaggtagtacaatagtgcatcattattgggcctactctctttggtttatatactagctcaatatcactgaatttactgtactacaggcgcttagtgagaagaacaaactaagttgtcaaatgaagaatacaacacattcatggggtacaaagagttttgcacgttggtccgaggacatggtgagtattttttattactaaataaaatcttctattaatctcttatcattatagtattagttttttctagagacaaggtgatcccataaaaaaacaaccacatagagcacaagtttacttagcaactcacaagagaagggtcaggaggcaaatcatcctgtggtatgctatttacacacgaagatgtatatatcatatatgaaaatatcaagaat

SEQ ID NO: 35122 - DNA, 456 bp, Zea mays
  unsure (1)..(456): unsure at all n locations
tcgactccatctatattatggagtgctttagaatctgttcattttccttcggcctttntggtagcttcctgacttccatgaatagcaataggccctagatccgaatgtatcttcatgcgaagatatgctggatgaagaattgcttcacaagcattgatggtcccacgaccaatgatagcattgtaagggtattccatgtcgacaatatcaaacacaacttgctcaatccttgtattgttgacaaatccaaaggtcactggcatcgtgatcttgccgagcgctacaatctgccttcctccgaagccacaaagagggtgcgtagcatcatgaatcttatcttctggctcttgcatctgtctaaaggccttggcaaatataatatctgctgcactgcctgtatcaaccagaacattgtggaccagaaatcctttgataacacaagaaataaccatagca

SEQ ID NO: 35123 - DNA, 324 bp, Zea mays
  unsure (1)..(324): unsure at all n locations
cttgaaggggactacgtctacttgaaggtttcaccaatgaagggagtatcgcgtttcgggataaaagggaagcttgcacccacgtacattggtccatttcctatacttgaaagatatgggccagtggcataccgactccaactacccgaaacattgtctgttgtgcantaatgtgtccacgtgtcacaattgaagaagtgtctttgggttcccgatcgaaccattgaagtaacagatgttgtccttgaaccggacttgacatactctgagcaccctattcgagtcttggatcaaaaggacagggttacccggagaaaaactctc

SEQ ID NO: 35124 - DNA, 401 bp, Zea mays
  unsure (1)..(401): unsure at all n locations
tgaagcctggnnagagcataggccaattatatacttattgtcttaagcctagctacgggtgcataggttttaccgaaatccaaaccttcgacttgggagtatcccttggccacaagtcgggctttgttccttgtcaccacaccatgctcgtcttgcttgttgcggaagacccacttggttcctacaacattttgattaggacgtggaaccaaatgccatacctcgttcctagtgaagttgttgagctcctcttgcatcgccaccacccaatctgaatcttgtagtgcttcctctaccctgtgtggctcaatagaggaaacaaaagagtaatgctcacaaaaatgtgcaacacgagatctagtggttacccccttatgaatgtcgccgacgatggtgtcgac

SEQ ID NO: 35125 - DNA, 349 bp, Zea mays
gcttcagccccatataccaggaagaatggtgtcttcccggcggcttggctgggcatggtctggttcccccataacacggatgggacctcactgacccaattcgcgccatgcttttttaagcagtcataggtgcgcatcttgagtcccctgaggatttctgcatttgccctcttcgcctgcccgttacttctggggtgggccacggatgccaagcacagctaggtaccgatgtcctcgcaatattcctaaaagatccgacttgtaaactgggtcccgttgtctgtaatgatatggcttgggaccctgaatctacagacgatcgacttgaggaaggcgacagcagcactct

SEQ ID NO: 35126 - DNA, 460 bp, Zea mays
tcaattccatctatattatggattgcttgtgagtctgtctcttttccttcggcccttctggcagcttcttgacttccatgaatagcaatgggcccttggtccgaaggtatcttcatgcaaagataagctggatgcagaattgcttcgaaggcattaagagtgccacgaccaatgattgcattgtaagggtactccatgtcaacaatatcaaacataacttgttcagtccttgtgttgttgatgaatccgaaggccactaacattgagattatgccgagtgctacaatctaccttcctccgaagccgcagaggggatgtgtggcatcaagaattttatcttcgggctcttgcatctgtctgaaggccttagcaaatatgatatcagctgcactgcctgtatcaaccataacattgtggaccaaaaatcctttgataacacaagagataaccatagcatcat

SEQ ID NO: 35127 - DNA, 462 bp, Zea mays
  unsure (1)..(462): unsure at all n locations
cgcaagcttgaaatgcaatacgctttaatcattatttacatctaaagntatatctcctaaaagattaaatgagaagtatcccgatatgattttggttattccttcataaaaacatataaaataagtattctctgaaaggatttttataaactatttcttaatgtacttttttttctgatcttgtatgcatgaaggcatatttaaaagactttgcgtaaataggataatagataaaataattaatcaaataatatttgcatttcatgctgccattttttttgaatgatgcatttgagtcaaagttgtaacctcattttaaattcgaattcaaaatttaaacatgaattaagtttagaatctgagaataagagaaaataagaaagaaaatgagaacagaattaaataaaaagaagacctctaccactattgggcccaaaatccctcgggccactcaaccatgct

SEQ ID NO: 35128 - DNA, 435 bp, Zea mays
  unsure (1)..(435): unsure at all n locations
ngaagccatggtaagtagcatatgctaataatatacgaattgactcaagcctagctacgggtgcataggtttcaccgaaatctaaaccttcgacttgggagtatcccttggccacaagtcgggctttgttccttgtcaccacaccatgctcgtcttgcttgttgcagaacacccatttggttcctacaacattttgattaggacgtggaaccaattgccatacttcgttcctagtgaagttgttgagctcctcttgcatcgccaccacccaatccgaatcttgtagtgcttcctctaccctgtgtggctcaatagaggaaacaaaagagtaatgctcacaaaaatgtgcaacacgagatctagtagttacccccttatgaatgtcaccgacgatagtgtcgacggggtgatctcgttggattgcttggtggactc

SEQ ID NO: 35129 - DNA, 280 bp, Zea mays
cacatcttggcaaggagtgggaattggattgctcctcgtccgagtccgacaatgaaggactcgccgccaccgccttcaacagtcatccctcttccccaacgagcgtcacacatgccttatggcaagggagaagaaggtatgtactctaaactctacttatgcttcttcaagtgaggacgaatctagtgatgaggatgaaatagattattcatgtttatttaagggcctagatagaaccaaggtagataaaattaatgaattgattgatgccttgaatgat

SEQ ID NO: 35130 - DNA, 160 bp, Zea mays
tgtgtattagcaacttgctttttatcttgacatgcactgcatggcttgtctttttcaaacaccacatcctttaatcctctaaccatatctttctttaataccttcttgagtgtgctcatcccaccatgtgcaaccctcttatgccaaacccttccaagtg

SEQ ID NO: 35131 - DNA, 423 bp, Zea mays
  unsure (1)..(423): unsure at all n locations
agcttangaacatggaaaccaaaagcttatagatattgtttaagctattgaagcattctgctacatgaagcaactaaatgatagccagataacttactggatgatggctgccatggactcataattattggggaaaatggaaagaaaggcaataatatccattaatcaaacttagaatgtcagtgcaagttaccatacacggattaaaacaagagcaaaatgatcttctggcaaacagtcatgtgaaacaatgaaaaatgtagtgagttcaatatatatttcgtttttgttctccaaaaaaaccatgctgagatagaaggattgtgccaactgcgacgtccgttgcgacgagcggttgggcaggcaattgctccggtcaccgtcttgcggcacgacgcgcgcgcaagacggcggctcgcacgt

SEQ ID NO: 35132 - DNA, 502 bp, Zea mays
  unsure (1)..(502): unsure at all n locations
tcagcttatactcggctgcattgntagaggccgggaacagcaactggatggtgtacttgatgtgttcgcctccaggtgcggtgaagagaatccctgctcctgctccctgcagcttcaacgagccatcaaaatacattcgccatacttctgcagtttctggattatctggtacttgctgttctgtccactctgatacgaaatcagccagtgcttgagttttgatggcagtgcgaggtcggaactcgatgtcgtgggatcccagctcgcaagcccacttggctattcggccaatggcttccttgttgtgaagaatgtcctctattggaaaaccagtgactactatgactntgtggtcgtcaaagtagtgacgcagcttgcgggcagttagaagtactgcatataatagcttctgaacctgaggatacnttttcttcgaggggcccagaacctcactgatgaagtaaacaggatgttgtactggataggcatgtccttcttctat

SEQ ID NO: 35133 - DNA, 265 bp, Zea mays
  unsure (1)..(265): unsure at all n locations
tgagaaaatggcgctcatcttcattatctttcgccaaatcctcaagcagaggaaggggaaagattacaagccccgttccaagaaggtttgctacaaatgtggtaagcccggtcattttattgctaaatgtcctttatctagtgatagtgacagggtgtgacgacctcgaatgggaaagagaagagaaaagatgaagttttaccangaagaaaggcggtgatgctcatgtttgccgggagtgggacttcaacgagagctccaccga

SEQ ID NO: 35134 - DNA, 386 bp, Zea mays
  unsure (1)..(386): unsure at all n locations
cttcctcaatggccctatcatagtagaggtctatgatgagcaacctnctggctgtgaagatagtgagtaccctatccatgtgtacaagctctcaaaggcgctttatgggctcaagtaagccccaagagcatgtgatgaatgcatgcgagattgttgaaaggaaaatagggttaaccattgcctataattaactttggtggttgagtcgtcaacacatactcatggactaactagtttgtctagaattcatgtattacatgtacataagggtcagcacaaaccaatgcaagagtcaatttacggacatcatttgcaactgagccaataacttgagtgtgctgaaagttggcgcaccgtactgtccggtgcaacaggttcgtacatgt

SEQ ID NO: 35135 - DNA, 431 bp, Zea mays
  unsure (1)..(431): unsure at all n locations
agctntagnggtaggccatctggattatcttctcaggtaatcttacagggggaacagagtttatgcagtcatataaagtatacggacaacctgtggctggtatgcagccatccattcccgattcgaactttattcatttctttcagcatccctctttatttcagtatactggtggaaatcaatacaatacaatgggtccaagatttactgttgtgaatccaactgaaagctntgatccacaaaagatgatacatcaagctgcatatccatctgatcagaggcttccacttccaagaactggctntcctaattctcctacatccagaagaggagggactgttccaaattatcaaggcatatcatcctatgttggagggccgatgacttatcctacaagtccatgtgttcacggacaaaccttgcctgnagta

SEQ ID NO: 35136 - DNA, 422 bp, Zea mays
  unsure (1)..(422): unsure at all n locations
tctgacttgtgggcctgccgaggtgtccggtgcacaccggtcttttcttgttgatgtccggagcaccggtatgggcagccctgacgtatgcgcgcgctgcgcgcgcatttaatgctgcgcagggagccgttggcgccgcagagagccgttgctccgctggcacaccggacagttcggtgcacaccggacagtccggtgaattatagcggagcggctgtcgtganaacccgaagatgacaagttccggaggccgcggttcgttggcgcaccggacatgtccggtgcacaccggacagtccagtgaattatagcgcgccggcctacgcgaatcccgagggcgaagggtgaagtcgaatcctctggcgaagggttaaaacgaagtctactggcgaccggacactgtcggtgacacggacagtccg

SEQ ID NO: 35137 - DNA, 272 bp, Zea mays
tgatatcaaggaggaattggagagcatgcaatcttttctacaaggagctgagagattcaaagatactgacaacaacactgccaactttatcaagaagattcgtggccttgctttcgacattgaagatgttatcgatgagtttatctacaagatggaggacaagcatggcagttttgctacaaagatgaatcgtcggattaatcgtatttggacatggcgacgtctcacgtccaaattgcaaaagatcaaactgaaactagagaatgttgata

SEQ ID NO: 35138 - DNA, 445 bp, Zea mays
  unsure (1)..(445): unsure at all n locations
tacccatgatgaggcatgtgaccagttaaagggtcctctattatatacctacatcgacacggtccttaatcgactcagacggagacactacaccgagactctctttatcgtgcaagtcacccgcccggactcagctctatcatttaaacccaaagnttggtacctatcagaggtacatatattacgatgttgaacccatcatggacatgatggatccaccattaagntttattctcgaaaacatcccacccactgtgaagcatcatctgttatgaaaacaaaaaaatttatttttctagagcaaagctaagcataagagaaaccttttgtaaacaaggatttaaggagaagtaatcaaatccaaggaaggatatgcatgaattggttagcacacaactcctatcacctaatgcatcaagcaagtgagaaagatttataaaggaac

SEQ ID NO: 35139 - DNA, 159 bp, Zea mays
gggtgcgagaggcgcacaccgcatggtgggcggagccgaactcaccaccgcagacgacggacccgagatgaaccccgactatgcgcgagccagcgaacggcgggcgtaacgcagaccgtaatcgtagcagggtgcagatacctcaaggacagcgtgaaa

SEQ ID NO: 35140 - DNA, 499 bp, Zea mays
  unsure (1)..(499): unsure at all n locations
tgatagtcaatgcacatcctcttcgtgccatccttcttctctatatatagcactggggctgcccaaggcgaggtactcggtctgatgtagcctttctctgacaactcatcaatctgcttcttgagttccaccaattctggtccggacacttgataggctctcttggaaataggggtggtgcctggtataagctctatggtgaattcaaccttccttttaggtggcatacctagcaactcctcgggaaacatatctgggaattctgatactacattcatagcctctgatggtttaatctcctcaatatgggaggtgacttggtgacaacttccttcccttggtctaggcaagaccaactctactaacactntntctcctgatagggacactaacttcaccattctcttgtcactgctaagactggctnggtacttggntagccaattcatccttangatgagatctataggtgtatccttgttacccataactattaaat

SEQ ID NO: 35141 - DNA, 466 bp, Zea mays
  unsure (1)..(466): unsure at all n locations
agcttgagcaaaatgaatagcttctgttgttaatgcagtaagcaagctntggctatggtcaaatttttggcagcaaaacagtgcaatagcaatgaatgatgtggtaacttcacacctgcccgtctgtttatatagtgccgcaggtgggaaggtaaatcatcaagtcttccacaccggacaaacagtcacccgcacccactgaacggtgggccacagagcccaagaaggtgaatcgccaggacgcgcgtaactgctgcatggcggggccaccttgcgcttggattattttaatcgtttctcagcaacgagctcagggaaggtgtttttcggatcttcggcatcccgaagcctaagagactntntcacggatcaagctcgttacgaanaacgatctagcaccgtgaagggggctactgttggggtatgcttcgtagccgaagatcctgaagaaagaaacaccttcatc

SEQ ID NO: 35142 - DNA, 465 bp, Zea mays
tcagctccatctatattgtggattgcttttgagtctgtccaatttccttcagcctttctggcagcttcctaacttccatgaatagcaataggcccttgatccgaaggtatcttcatacatagatatgctggatgaagaattgcttcgaatgcgttgagtgttccacgaccaatgattgcattgtaggggtattccatgtcaacaatatcaaacacaacatgtttagttcttgtattgtggacaaatccgaaggtcactggcattgtgaccttgccaagcgctacgatctgccttcctccgaaaccacaaagagggtgtgtagcatcatggatattatcctctggctcttgcatttgtctgaaggccttagcaaatatgatatccgttgcactgcctgtatcaacaagaacattatggactagaaatcccttgatgacacaagatatgaccatggcatcattgtga

SEQ ID NO: 35143 - DNA, 443 bp, Zea mays
  unsure (1)..(443): unsure at all n locations
agcttaataacaatttaggtcagttactttcttacaaataatgatcttagatcagatggttcactttcacttatccacttcaatctttntacacaaggactaatttttagacccgactagtaactaggtatgtgaatccaagtagatgtataggatggggaaaaaagactctatttggttctaataaattaggagggattaaaaggtaatctaataatgaagtgaaaacaacgatttcagttcagggatccaaacaagttgtaatacccaaattgtaaataatgagaatagaaatgacctcttatgtgttttgcctctatttgtggtaacatgggaacaaccatatttaaaatgggtaattgggctaataaccttaaataaactatgcatcatgtcagagtatctttgtgtgtgcatttggtaacaaataaaataatgttaat

SEQ ID NO: 35144 - DNA, 434 bp, Zea mays
  unsure (1)..(434): unsure at all n locations
tcagctccatctatgttatggatggctatngagtcagtccagtttccctctgcccttctggcagcttcctgacttccatgaatagcaatgggtccttgatccgaaggtatcttcatgcaaaggtaagcaggatgaagaattgcttcgaaagcattgagggtgccacgaccaataattgcattgtaagggtattccatgtcaacaatgtcaaacacaacttgctcggntctggtgttgttgatgaagccgaagatcactggcttagtgatcttgcccagtgctacaatctgtcttcctccgaagccacaaagagggtgtgtagcatcacgaatcttgtcttctggctcttgcatttgtctgaaggccttagcatatataatatcagctgcactacctgtatcaaccaaaacattgtggaccagaaattctttgat

SEQ ID NO: 35145 - DNA, 463 bp, Zea mays
  unsure (1)..(463): unsure at all n locations
agctntaccttgattctcaacaaactatcatatcctngagagttttnttagtcgggtaagtcttgctgagtaattgcatactcagtgttttattcccattgttgttgtaggagagactattaacatctttgagttttgctgaactcacactggaggtttttacttttatttatgtntattatgtgtgtattgggggaagatggcttcttcccaggtgttgtaataagttagcacatgaatctaccccaagcatgtaataataatacctactacttggtttgtataatttaaaagtctactgatatatattatcttattngtaaagtctccgctcaactcctgtatttaaagtttatgttcttgtcgggttattgtaatactcgcaactatggtgaatggtccttgggaataacgagttcatcacaactcggcatcccgagtaagttatctattcacttacata

SEQ ID NO: 35146 - DNA, 286 bp, Zea mays
  unsure (1)..(286): unsure at all n locations
ccttgtgtggagtgggagagggattgatctctntnggtgtgctttgcaatgaatgctagctcttgtatagtagttggaagctggaaaacttggatacaatgaatggtggggtggttggggtatttatagccctaaccaccaaacatgaccgttggtggaggctgtctgtcatatggtgcaccggacagtccggtgtaaaccggacatgttcggtgcgccagccacgtcaccaatgccagtgggaatcgaccgttggagttctgacttctgggcccgcctggatgtc

SEQ ID NO: 35147 - DNA, 381 bp, Zea mays
  unsure (1)..(381): unsure at all n locations
gcttggtcattntattgctaactgtccctacaatgatagngatcacgatcaagggaacaagagggagaaaaataagaactataagaaggcaaagggcgaggcacatcttggcaaggagtgggattcggattgctcctcgtccgactccgacaatgaaggactcgccgccaccgccttcaacaagtcatccctcttccccaacgagcgtcacacatgccttatggcaagggagaagaaggtatgtactcgaaactctacttatgcttcttcaagtgaggacgaatctagtgatgaggatgaaatagattattcatgtttatttaagggcctagatagaaccaaggtagataaaantaatgaattgattgatgccttgaatga

SEQ ID NO: 35148 - DNA, 353 bp, Zea mays
  unsure (1)..(353): unsure at all n locations
agctcactatgatatctaacgatatgcgcctgcgcttatgccaacggaccctccattggttggatcacgaaatcctctttcttcacaacagattcgcgatctttaatcttgaccatgtaacagacccgtgcgccatgctacagcagccttcaccaacagctcgtttggtggagccacttattcaggatcgaataccactagctcactcgatagtgaggcacagagaaatacaataaaacataataccacaaatgtaataagtataaccagngattacattatcggagtttcagaaataataaccataaattntaatgcagcggaaataactaacggagaataccgagtaacat

SEQ ID NO: 35149 - DNA, 469 bp, Zea mays
  unsure (1)..(469): unsure at all n locations
agcttgtcaagcatattttggtacccatcgcttgatgggtctgttaaggttagtaagcaaagatctacgaacccaaaagtcctttgtgttagcactaggtaaactcattacctttctagcacaagttgcaattttgggttgcctagttacatgaaaatttattgacaagctaggagtgaaattgttaccaatgggacaatccttgcattgatgtccctttcttcggcatgtgtagcataggcgtttttcaagttttgaagttttcttctttccttgcttgttgcctgctacatggttagtaaaaatnttcttttctaaccctatgctctcttgttttaaatggggacaagatctaagtaagtgttccttctcggagcatttaaaacaaagtctatcatcccttgtaataatcaagccattaatatagggacatgacctaatcaagtgccccactttanagcattcacta

SEQ ID NO: 35150 - DNA, 483 bp, Zea mays
  unsure (1)..(483): unsure at all n locations
ctcagcttgtcaagcatatttggtacccatctctngatgggtccatcattgttagtcaacanagatctaggaacccaaaagtcctttgtgttagcgcttggtaaactcattacctttctagcacaagttgcaattttgggtttcctagttacatgagaattaattgacaagctaggagtggggttgttaccaatgggacaatccttgcattgatgtccctttttccggcatatgtagcanagtcgatcctcaagtcttgaagacttcttctttccttgtttcttgcttgctacatggtcagttaatattttcttttctaaccctaangccttttgtttcaaatagggacaggaattgattaagtgtcccttctttgagcatttaanacanagtctatcatcccttgctaataatcaagccattttaatatatggacatgatctaatcaagtgccncttttcaaagcattcactacacttctta

SEQ ID NO: 35151 - DNA, 401 bp, Zea mays
  unsure (1)..(401): unsure at all n locations
agcttattctctctgcttagtaaaatgaatgatggccatggaatnggtcttaacccagggatattgcctctgtagcttcttagtttttgtgactgtgtgcgcccaatccaatcaggaagtttagtagcaagagcatataccttaagcaggtaacacacacaatgagcaccaacgctagaacacccaccaagcagagcatcaatcaatgaagaagggcaacaactctggcaccatgtatctggttgtcgttggatccatgttcgaaacccttgctgcatttcatcgaacaccacttgagcagcaattgaatctgatgtaggcttgcttgcaatagtcaccatggctaccgaattgngcttgacgagctntggaatgaggccagagagatagttggttctttc

SEQ ID NO: 35152 - DNA, 412 bp, Zea mays
  unsure (1)..(412): unsure at all n locations
tgatagtgaccctagggcatcgaattgatgagctccaccactggtgaagggggcangaggagaacaagaggatggtgaaggcgaggcccaagccaacaccgacaaggcagtcccagaagttgtggcggaaccgcccgaattattacgacttaagtgcctaagtcccgccttagaggctagaccacacttaaataggaataacccgtcagtccctcggatctagtccgataaagccacttatccaggatcgaataccactagctcactcgaaggtgggcacagagaaatacaataaaacataataccacaaatttaataagtataaccagtgattacattatcggagtttcagaaataataaccattaaatttaatgcagcggaaataactaacggagaanaccgagtaacat

SEQ ID NO: 35153 - DNA, 444 bp, Zea mays
  unsure (1)..(444): unsure at all n locations
agtcacaaaatgaccctattatataactngaatcacatttatacccctgggataccagaaaccctaattggaaccctggaaaaccctaaaaccaaatcctagggacttatgtgcaaaagtgatgaacctttggactaaagtgtaaaaactactatgtttaaacatataaagtcatttggttcacaaatatgtgaatttgcaagttaaaccctaagttntgggcttatttgcaaaaatcacctcttaagcactatagagcctaagtctgaaattcagtttagttggttcaactttggagccctgtatcttctgaaatatagggttcttgccctatgtcaccacaccaaatttgtaaagcaattataggagaagcaacttgtttaagggttcaagtcatgttcttgtgaaaaatctagagataatcatgctcaaaatctggctatt

SEQ ID NO: 35154 - DNA, 461 bp, Zea mays
  unsure (1)..(461): unsure at all n locations
ctcagcttgngtttaaatgattaagctgagaccgggctagtgacttgtactataagagagtctcggngtagtgtctccgtctgagtcgattaaggaccgtgtcgatgtaggcttgctgaccgaggaccctttaactggtcacatgcctcgtcatgtgtaagctctgcctcgggtagactaaggccagaataagataacatggaatgggcgtggagcggtggcgagagtancgtgtaccctccgtggcaagaggctggacggtggtgtatctgtgctctcggttggcgtgaacctgatctggtcttaagaaccctggtggcgggttgacatatgcaagggttaagtgctacatatgtcgtgtgattggagatccttagctgagtataatcgattcggatcaccgtaccttcgcggttatgaagacttggtactaacttacacgtagcatccactaaaatgat

SEQ ID NO: 35155 - DNA, 481 bp, Zea mays
agcttgtggcgccctcgggcgtcttgccgcattctaatcaccaagtctcctacttggaggtctcagggccgaacccctcgggcgtggtagcatcgcaaaggctgctgatatcgtgccgagtgtagcaaggccacgtcccgagcttcttccagctggtccagcgagtcttctcggctggtctggttgctttggtcgtcgtacgcccttatcctcggggaaccgtattctaagtttgtgggcaacatagcctcggccccatagactagaaagaacggtgagaaacccgtggcccgacttggcgtcatcctcagactccagaccaccgagggtagttccttcatccaccgcttgctgaacttgttgaggtcgttgtagatcctcggtttaaatccctgcagaatcatgccgttggcacgctccacctgcccatttgtcatggtgtgagccacggcagcccagtccacccggatgtggtggtcct

SEQ ID NO: 35156 - DNA, 427 bp, Zea mays
  unsure (1)..(427): unsure at all n locations
ntaggctactaaaacctctatagtgggtcattccgcacctgataagcatctccaagagcctgggaatcatccatggggaaaaagtcttagcttgtcagcacatcatacatctactccattgaatcaaattgctatctaacaagaatatggattgaatcaagctgcagtgaaaacctggaacttctcggctgcgcgtgggtcgttgggatgcttgtcagtatgcatgcacctgcctggtctaaaaaaacgaaagaataacccaaaaacggaagaataacccttaacaacagtacaacactcgaagatatacaatactcccccaaataagtaggaaccaaaaggtgacgtcgagcatgtcgtagtagtcctactccttctccatcatcgtcggtgtcgttccctaaccaagaacgcctaagcaagaagc

SEQ ID NO: 35157 - DNA, 375 bp, Zea mays
  unsure (1)..(375): unsure at all n locations
agcttgtccctgaacctcacctgaccttttaatcatatgantattggatttgttatgtgttctatttattntacctaattctttagtgaaaacatgtgtcatggagctttgttttaataggtgtactcaacttcaatggcaatgcttttaacgatggttttatctatatatcttttcagtgtgaaagctacaattcaggtgctatactatggctatattgttactcctgttccattgnggtggttgtagtttcttatttgtactcacatgctttaaccttttttttttgcagctcttcttgggcattatcatttgtataatttccctgcagatgtattttatgcctgtgcacatgcttattgagttgccacaaac

SEQ ID NO: 35158 - DNA, 501 bp, Zea mays
  unsure (1)..(501): unsure at all n locations
nnttgcgtcaggcttcagaccttggcttctcacggcccacacgaagatatttagccttataattgcctcgggggtaagttgatggagatagacttcgaatattttcagtacctccacaacgaagctgctcaagggaaatcgcagcccagccttcaaaaagcttcggtacactacgacttcattctcttcagggtgtgggcaagttttttccccttcgtcggccctcacaatggacaaatcccggaaataccttcctctcatgttgacaagatgattctctntaatagttgatttaccataaactgaatggcttggtcgccagggacgatcttcggagtcctcgccaccactgtccacatcatagctgtcactgtcaccagtatcttcggacaaaccttncagaatctctttggtaatttttctgtattggtctttgcatcgcataagaaaccccaagttttctcttcgtaaggctcagcttcatctagcaacagtcttcta

SEQ ID NO: 35159 - DNA, 428 bp, Zea mays
  unsure (1)..(428): unsure at all n locations
agcttagtcaatngaattgaagaactaattttataaaatttagaagttatggcgcctttaagaaggaaccaaacaaaaccaaaagatttagaaggtctaggtcatcaggagttggggctcattggggcttgtaatattataggttatatataattaatatatgatcgacaagatcatcgggtgttagggctaattggggcttgtaattttatgttatatatacattaatatatgatcgacaatggatatatagtattaagtgcatatatagtattacgcataatgctaagatctcatgactattgtagaaatactagcgcggggacctaacttntttgcaatttagcctattttatgntttattttcataaatatgttcttttncagtttattttaaaaaatagactcatagatcgacgccaacacta

SEQ ID NO: 35160 - DNA, 470 bp, Zea mays
  unsure (1)..(470): unsure at all n locations
tctaaagggtggaacacatttgngattaacaaatgttcattttgatataagatatgatntgtagcgcatgccaagccgggaagcaagttggcactcatcatccatacaagaacatcatgacgactgacaggccactggagctcctacacatggatttattcggcccgatcgcttacataagcatcggtgggagtaagtactgtctagttattgtggatgattattctcgcttcacttgggtattctttttgcaggaaaaatctcaaacccaagagaccttaaagggattcttgagacaggctcaaaatgagttcggcttaaggatcaagaaaattagaagcgacaacgggacggagttcaagaactctcaaattgaaggcttccttgaggagganggcatcaagcatgagttctcttctccctacacgccacaacaaaatggtgtagtggagaggaagaaatcgactcta

SEQ ID NO: 35161 - DNA, 431 bp, Zea mays
ctgacaggcgattcctcgaagcttatatttggatcgcaggctattcgcgacgggcaacgaatacaaacaggcacaagcaaacgtatacttacataagaacattacaccatacaagatgaaatattataaaagcgagcaatataaaatagtaagcgcttctacagctatgcaaggaaaataactgtgatagtcgaagctacggtcgaggggttagcgtgtttacactaaacaagtatgtaatataacatttacttcaacattatcaagaataaataatatctatcatttagctcgattaatcttctatactaaccaatgtcagttaaacaagtaatttaattaaaatgagagagtctaagcgaggcgaatatatgacgcgtgaaacagcacgacggtgtgtaaccgatacgcggacacgcgcgacaggcgtg

SEQ ID NO: 35162 - DNA, 501 bp, Zea mays
  unsure (1)..(501): unsure at all n locations
tcgggttctaaagctccagagcaagatactgaagccgtttctttccctcagagccctcaaaggcaaaaaccttggaaagtgaggctgaataaataacaaagccaacttttgctgaaggaactggtgtcgtacccccgaagcatccaaaattcgcgattatattnttcgtcatgcttcggggaaaaaattaacagagaaagaagaacaagaggcccaacactatgcccaacagttgaaatatccaaagggggcgttgatatttaatggcagtggagaagaagatatcttgtattgcctccccgacagcaaggaaatatctgtctgtcgggagatgagcagaagcttctgatttccaactttagaagacggactntcggtgctgtcaaagaacgatctggctgacagcctatcttacaacagtntataggtgcgacatatggaattcttatatntntgttgaattcacaaattttcgtttgttaaaactattgcacagacata

SEQ ID NO: 35163 - DNA, 468 bp, Zea mays
  unsure (1)..(468): unsure at all n locations
agcttatgaagattcttcatcccaacatggtctagtcggcggtgccagagccaacccatgttagtcttagcaattaagcatgtgtcgagttcagctctatcaaaatctactaagtatagctgaccctctaacacacccttaaatgctattgaataatcacttcttctaaagacagtgacacctacatcagtaaagagacagttgtagcccattttgcataattgagatacggaaagcaaattgtaatctaatgaatcaacaagaaaaacatttgaaatggaatggtcaggtgaaatagcaattttacccaaacctttgaccaaaccttgatttccatccccgaatgtgatcgctctntggggatnctggtttttctcatatgaggagaacatccttttctcccctgtcatatgggtngtgcacccactgtcgagtatccaacttgagcccccggatgcataaacctac

SEQ ID NO: 35164 - DNA, 482 bp, Zea mays
  unsure (1)..(482): unsure at all n locations
tactcagcttctccaacaatttcatgaattttggtgctcaactcttatttctaaaattccaatagtccttccaagagcacctttaattcacttaatattttataactgccttaaaatcctaaatctaactttaccagagagctcatgaatctagacatccaacaaaatttgtcttgctatttttggatttctctancaattttggcaccctttcaaagctctcagacaaataataaagggaaacgatntaagcctatgctgactccggcccacacgacccactaccaggccaaagtcggcctgcggccaggagcccgcgcgtccacacacccgactntgcacggaggcccttggcttattgagaactcaatcaagacccagggccactatttctctgtctctctgacaatacaccgagatccctgactntatcctccttcacatagtcacccnctcaaagggactncgatcgaacacctgtg

SEQ ID NO: 35165 - DNA, 444 bp, Zea mays
  unsure (1)..(444): unsure at all n locations
agcttgctgagatcgcaaacgtgcgaatcttggctaaaatccggcgcagacctcttcctggcacctatggctatctcttgtatgtgagttccaagggaagataagccctacgtcagaagatatgcggacgccaaatctggcttgtctccttgcccgctgcgcgacaaaagtgatgccaagacatgtcaaacgtcaagtgctcggtctccactttttccagggtgtgccttatgtggtatgccacatttttggtatagaactaaggtggttttggtgccatcttcaaggtgaacatggtggatctttagattaggtgtagattttgacttagagagaattagagagctctagctctttctctacttatagaaatggattggnngttcttaaggggtctntntgcaatggtttctttccatatntgttgattaatatgtcacttaa

SEQ ID NO: 35166 - DNA, 503 bp, Zea mays
  unsure (1)..(503): unsure at all n locations
tctaaagggagatcatgtgttaggactaaccgatgtctgttttgagaaagacagaccttatgcagcatgtcaggcagggaaacaggtgggaagcactcatcacaacaagaatgtgatgacaacatcaagacctctggagcttcttcacatggatctcttcagacccgttgcctacctcattatcggnggaagtaagtatggtcttgtaattgttgatgatttttcccgcttcacttgggtattctttttacaggataagtcagaaacccaagggactctaaagcgcttcttaaggagagctcanaatgaatttgagctaaaggtgaagaagataagaagcgacaatgggtccgagttcaaaaatcttcaagtcgaagagtttctcgaggaggaaggaatcaagcacgagttctccgctccctacacaccacagcaaaacggtgtggtagagaggaagaacagggacgctaatcgcatggcaagaatgatgctnggagaataca

SEQ ID NO: 35167 - DNA, 485 bp, Zea mays
  unsure (1)..(485): unsure at all n locations
agctngatgtttagaatgacatcagttctcttccaaatctttcatctcgaaattgctcgatagaagacttttaacttcctcaatcacattgagatttgatccaaagatcaagatgtcatcaacataaaggcacagcataacagactcacccccaccataccgatagtacacacacgtgtcagattcatttacagcaaaaccagcagctgtaagagtattatcaaacttttcatgccatttcttaggtgcttgttttaggccatacaatgattttatcaacctgcacaccttgttctcttgaccatccgcaatgaacccttctggcggatccatatagatctcgtcatccaactctccatttaggagagatgtcttaacatccatctgatgaatgataagaccataagaggctgccacgactattaatgtgcgaattgtagtcaatcgagccactggtgagtaggtatcanagaaatcttcaccct

SEQ ID NO: 35168 - DNA, 451 bp, Zea mays
  unsure (1)..(451): unsure at all n locations
tctggtggtggtggctctcgtcgtcaagcaggaggggagagtggatccggcggcggaggtgaatggcggtggagtaccactgctgctcggcggcctttttcgagcacatcgtcatcatcatcgtgctcgtgctcttcgcgggcctcatgtcgggcctcaccctgtgcctcatgtcccttagcctcgtcgatctcgaggtcctcgccaagtccggcaccgagcaggatcgcaagcacgcaggtaccctatcctaccgtcgccacccgtgtntctcgggggggggccgtgtcccttctctcgtctataggtcaataggtgcgatgtcatgttgcgccgggggcgtctgcggcgcctcgattggatgtacggttggtcagatatcgctgcgctggtacacgagttggcttgccattcctcgagcggctccaggggtgccggtcgatccatgaat

SEQ ID NO: 35169 - DNA, 468 bp, Zea mays
  unsure (1)..(468): unsure at all n locations
agcttgtgacgccggagccgtcgtttgttttacgccgacgatctcgtgcctgcgcccgaaaggatgagcgagcctatggtggttaatttgttgctttgctgcggccgtctgagtaaatccctgtcctcgcttgcaaaatggaatggcttgggtgttggtgaacatgtatagttacccgggaacgacggngtacttggcgttgccaaactcgttcttgatgacgtggaggtcagtgtggcaaagccctgataagagcaccttgatggtgacgtcgtcgtctctctgaaccctgaaatcgaaatcagccggcgcaaccattcagtccacgaagatgatgaactagtgcacaagttgtagactgcagcaatgaaagcaatacctncgtgagaagttgtaggggagaggtgccagagacattcctgcttgccacacgtcgcttctctgctccgcattaaaactcctgaatga

SEQ ID NO: 35170 - DNA, 337 bp, Zea mays
  unsure (1)..(337): unsure at all n locations
gtgacccacgttacaaaatgctagccaatgtcatgtagaatcttgattntctcaactcatgatcttgcagaaccaatcaaatagtacaaatttatctattccccagcttcgctagccattttgtcgagattgaaaatgctaaatagtaaatacaaagcaaggcatctgttttaagtgaaccgaagaggtcatgggtttacatcagaatgaccaaatattaatttgtgtcacatactcaattgtcagttgtggggcagggtggtggtcatggttttggggttatatgagagcgtagaaaaggtcactgtgctagtgctatatgccttattaggattta

SEQ ID NO: 35171 - DNA, 277 bp, Zea mays
tcattagatacttagcaagaatatcatcaacacctatggataacctccctaacgacctgtcaggcctccgatatacctataagaatctggctgcaactcttgatgccggtgcatcctctttaagctgtgccccagtaaagcctactcgtggctactgcccacactccttgaccagcctatattggtcatattcatctcccagttcttgcctcctaccgctatagtaccatcgcattcaacactactttcatatgcatgagccatgcacctttatgca

SEQ ID NO: 35172 - DNA, 469 bp, Zea mays
  unsure (1)..(469): unsure at all n locations
gctttggtgattagagagagtgatttgtcatgttcatttgagctcttgcgctngggtcgattctttctttcattctttcttgcgatcatctcaattgtaagaaaggcaagagacaccaattgtgtggtggtccttacgggaagtttggttcccaattgatttgagaagagaagctcactcggtccgagggaccgtttgagagagggaaagggttgaaagagacccggtctttgtgaccacctcaacggggagtaggtttgcaagaaccgaacctcggtaaaacaaatccgcgtgtcacactctntattcgcttgcgatntgttttgcaccctctctctcggactcgattatatntctaacgctaacccgacttgtagttgtgatttaagttgtaaatttcagattcgccctanttcaccccctctatgcaactntcagagaacatcttcttctccccctgtcatatggt

SEQ ID NO: 35173 - DNA, 380 bp, Zea mays
  unsure (1)..(380): unsure at all n locations
cagcttgtcaagcagggaaacaggtaggaggatctcatcacaccaaaaatgtgatgacaacatcaagacccctggagctgctacatatggacctcttcggacccgtcgcctatctgagcataggaggaagtaagtatgggttagttattggtgatgatttttcccgcttcacttgggtattctttttgcaggataagtctgaaacccaagggaccctcaagcgcttcctcaggagagctcaaaatgagtttgagctcaaggtgaagaagataangagcgacaacgggtccgagttcaagaaccttcaagtggaggagttccttgaggangaanggatcaagcacgagttctccgcttcctacacaccacagcaaaatggt

SEQ ID NO: 35174 - DNA, 473 bp, Zea mays
  unsure (1)..(473): unsure at all n locations
gcttgtgaagattcttcatcccaacatgggctagtcgacgatgctagagccaacccatattagtcttagcaattaagcaagtatcaagttcagctctattgaagtcaactaagtatagctgaccctcgagtactcccttaaatgctactgaatcatcacttattctaaagacagtaacacctacatccgtaaaagacaattgtagcccattttgcataattgataaactgaaagcaagttgtaatctaaagaatctacaagaaaaacattgaaaatagaatggtcaggtgatatagcaattttaccaagtcctttggccaaaccttgatttccatccccgaatgtgatagctctntggggatcatggttnttctcgtaggaagagaacatcattntctcccctgtcatgtggttngtgtacccgctatcaatgatccaacttgagcccncggatgcatataacctacaaacaa

SEQ ID NO: 35175 - DNA, 531 bp, Zea mays
  unsure (1)..(531): unsure at all n locations
accttgaaactcagcttggaggacgtctggaataatgctcgtggttcgagctatatctattatcggatntattctctactcctttaaagcacgagtttcgtgtgtcgtgcatcacacggatagattagatctggtttttcttcccgacgtctcgactaacaactagatcattacctcctagatgggtcatgagaaaacactcaaacctaacatgacacaaagccacacgcagagtatcgctcatgaatagtaccacatcgctagctgaatgaggacgagcgaccaagcgagctataaaaaggtgcatgtcttcttttcaactcgtgcctttcttgaccaaaggctaaaataaaatgaagtatccgtagtttagtatccggtatgtaggccacatattcactttaatttntaaatntaatttatggcgatggtccacttntaatttaaatntattnnttttgtggngaggattcatcacactgacttgcccataaatccttggatgtcttacaacggntaaactatatcatc

SEQ ID NO: 35176 - DNA, 459 bp, Zea mays
  unsure (1)..(459): unsure at all n locations
agcttaanactaagacttgtgcaagttgatccgagttaagctttttcactcgctntgttggcggttatctcaactaggttagacaagctgcaatacaataagtgtaaatatgcaaatgcaagcttgacaacaccatttgacatcttaaataaattttctgagatcaagtatatttaattcatttctcaacatgcaaaagcgagtcttatcaagtggcttagtaaagatatccgctaattgatcttctgacctcactccttctaaaatgatatctccttttgcaacatgatctctaaggaagtgatgacggatatcaatgtgcttggtgcaagagtgttgaatagggttattagcaattntaacagcactctcattgtcacacaacanaggtaccttntctagaactacgccatagtctagaagaagttgttcatatataanatntgtgtgcaacaagca

SEQ ID NO: 35177 - DNA, 517 bp, Zea mays
  unsure (1)..(517): unsure at all n locations
actaagcttcgagcgccaaggtctaaaaacaccttccctgagctcgttgtcgagaaacgattcaatttctcagcgtgtagcggccccacctttcagagttactgttcggtctctgcggtccaccacgcagcgagtgcgaacgggtgtccgcctggtgtaaaaatcctggcgcttcgccttcttacctgcagcactatataaacagacgagtaggtgtgaagttaccacagcattcattgctatttgcactgttntgctgccaaaatntttaaccgtcgccgaagcttgtctgtcggaatcgaacgaagctcctgtttgaaacctgcttcagaggaagaaagtattaaagttccacaagttcataattaaatggccagagtgcgctctaccgccaggggtgaacgtgagggggacgaaactgaagcttcggagactggtcccatttccgaagccatgcaacgatccgggctagtgacttcggaaaagatcctagtgaagatcagaacaagcatcgctg

SEQ ID NO: 35178 - DNA, 331 bp, Zea mays
  unsure (1)..(331): unsure at all n locations
agcttgagttntcgccaccggaacgatntctttgtttttcgcaacgaacatgcccaatccactactttatgtccaaaactcatgtntggggtggtttcgcgcaatttcgttgccgcacgtcacccattcaaaaaacgggtgtcggggtgatgcngacatcaacaccaacaccagcacatctacaccagcagcaccttttccagcccaggcgccaccccttccacctgtgccaatgactcgggcccgtgcaagagaattgaactacatcatgttgttaaacaaccaaggccccgattaatagacgaccatcccaattgctgtccataatgga

SEQ ID NO: 35179 - DNA, 503 bp, Zea mays
  unsure (1)..(503): unsure at all n locations
ctaagctaaggtaacacgtatggtccgtgtggaatatacaattggttcatactatgattatattgattgtgatgtggtacccatgcaagcttgctctatgttatttggtagaccatggcaatttgataaggacaccgtgcatcatggtaaaacaaatcaatactctttttatgcataatgagaagaagcttgttttgcaccctatgtcccccgatgctatcttgaaagatgaagttgctagagcatgcaaagagaanaacaaatctgttcataataaaaatctagatgttacaaaggaattggtacaacctaagagtgataattctaaatctgctcatgtaaggaaaaatgaaatacaactgaaaagtgcttgtttccttgcttccaaatctngattacttgaattaaatgatngtgatgcaatctgctatgtgtttatatgcaaggatgcttngttctcacttcacaacataccatctactntgccttctactatcactaat

SEQ ID NO: 35180 - DNA, 465 bp, Zea mays
  unsure (1)..(465): unsure at all n locations
agctggtgaaggttcttcattcccacatgtgctaatcggcgatgccacagccagcccatgctagtcttagctattaagcatgcatctagaccggcctcttcttttgcaaaatcaactaaataaagtttgccgtctaatacacccttaaaagctagtgaaccatcacttctcctaaagacagacacatctacattagtaaatagacagttatatcccatattgcacaattgactaaccgatagcaaattatatccaagagattctactaaaaacacattagatatagagtgctcgttagaaattgcaattttacctaacccttttaccttgccttgattcccatcaccgaatatgattgaatcttgggaatccttattcttgacgtaggagggtgaacatcttcttctccncgcatatggtttgtgcatncgcttgcgataatccagcttgaacccccggatgcat

SEQ ID NO: 35181 - DNA, 496 bp, Zea mays
  unsure (1)..(496): unsure at all n locations
tgccaataggacgcataattatacctttaatgtcttctcgtgctttcagatcattntttacataaaaccattctgtcatccagccgctgggccatcttttccgaanagttggcacggggcagcttgacccagaccgagaaacaaaattgtagcagccaaagttattgtgatactgttccttaccccaaggtattgtctcgtatgataattcgtgcatattgcagaaactttttgcatcaggcttcagaccttggcttcgcacggcccacacgaagatgttcagccttatgattgcctcgggggtaagttggtgaaggtagacttcgaaaatttttagcacctccacgacgaagctgctcaagggaaatcgcagcccagccttcnaaaagcttcggaacactacgacttcattctcttcagggtgtggacaagtcttctccccttcgtcggccctcacaacggacaaatctcngaaataccttcctcttcatgtaac

SEQ ID NO: 35182 - DNA, 424 bp, Zea mays
  unsure (1)..(424): unsure at all n locations
gcacctgggctgcagcttctcacgtgagtgggcctttttctgttgtcncaccttgatgaagaatttcgcttggtccgcacctcgattggttccacagcggcgtcaatttcactccctatggcgcagcgaaggtcattggccaaccacgcgccccaatttgcttcaccggtgaagaacgggtgcagcagcggccgcctccctacacggtccacagcgacgctccaacaggtgattcacggtgatggtggaacagggcaagggtgcacacgtggtcagggaagggaatgcgatgatttatcctcaggtagcgccatcgggtgcaacaacctccatttcccctgcccgcggtgaagtcgcgtacggttcacccaccatctgcgcgaagctcggacgagctgttgacgatgcccaaccctgacgcgtg

SEQ ID NO: 35183 - DNA, 468 bp, Zea mays
actcggccacatcggtcttcgtcgtctgtcaatagaatcctgacctgaaaaccttcccgactagtgttctggatgctacatgtattccacattgcccagcatggacctcctccagaagttgcttcccggtggacgggagaacgcacttcatgaggacgcccgatgcaccccttctgtataatgtctccccaatgagtgtatagtgagccgactgcctggcaatacgctctgccgagttcttgtcgtctggttcttattcattctttatatgcttaatgaccggccttctccagtcatcagagtctgactcgggttgatctatgatgttgcactcttctggttgatccattgagatactcggctgcagaattactgcacgaagacatcgggtgggacctgagttcgactggatccgagcttggacagtatatcagctgctgtgtccaatctcttccacatgatgaaatt

SEQ ID NO: 35184 - DNA, 472 bp, Zea mays
  unsure (1)..(472): unsure at all n locations
agcttgtgctgcatgctgcgataagttattcacttgcagattctgtcacgataaagttagtgaccatacaatggacaggtatcttcaccacaaccattcattttaccgtccacacctttcctgctgagggatgcttatgcacctgttgtgctattagaatttcaaggttttcattttcacatcgaaccaatatcaattaagcatgacattttatttggaaatagatgtttgtggttgtgccatggacctgtgcctcccttgtgaaatgaattgattttctgtcattgaattttctaactgaagcttttatttccagtgggatacttggctcttagtataccagctttgcataataaggacaaaagaacttgtatntgtatacttgaacgaacatttctgtcatatgacttgctgattgttgtaacctagaaatctgtatgaagaanaaaatgaatcaatngtactttcctta

SEQ ID NO: 35185 - DNA, 485 bp, Zea mays
  unsure (1)..(485): unsure at all n locations
actcagcttctaagggagaacacgtgataggtctaactaatgttactttctgaaaagatagaccttgtgcagcttatcaagcacggaaacaggtgggaagctctcatcatgccaaaaatgtgatgacaacatcaagacccctagagttacttcatatggacctcttcggacccgtcgcctatctaagcataggaggaagtaagtatggtcttgttatagttgatgattnttcccgcttcacttgggtattctttntacaggataaatctgaaacccaagggaccctcaagcgcttcctaaggagagctcanaacgagtttgagctcaaggtgaagaagataaggagcgacaatgggtccgagttcaagaaccttcaagtggaggagtatctngaggaggaaggaatcaagcacgagttctccgctccctacacaccacagcanaatggtgtggtagagaggaagaacatgacgcttatagacatg

SEQ ID NO: 35186 - DNA, 438 bp, Zea mays
agcttctaaagggagaacacgtgatatgttttactaacgttcaattcgaaaaggatagaccttgtgcagcttgtcaagcaggtaaacaggtgggaggagcgcatgacagcaagaatgtgatgaccacttcaagacccctggagctgctgcatatggatctcttcggacccgtcgcctatctgagcataggaggaagtaagtatggtctagttattgttgatgacttttcccgcttcacttgggtgttctttttgcaggataagtctgaaacccaagggaccctcaagcgcttcctcaggagagctcaaaatgagtttgagctcaaggtgaagaagataagaagcgacaacgggtccgagttcaagaaccttcaagtggaggagttccttgaagaggaagggatcaagcacgagttcttcgctctctacacaccacaac

SEQ ID NO: 35187 - DNA, 517 bp, Zea mays
  unsure (1)..(517): unsure at all n locations
ctcagcttaagctcttttacatagaatcacttcacccagtttatacttagatgcaagaatgaatgttngagaagttaaactaggtatgaagcagggttaatacatgagcatgctttctcttccttttatacaagatatgcaaggaatgtaggaagatttaggtacatgtatgaataagattgaatagttttacccttttgtacctttacatagagatgttctcttcattgtgctttgtccttagtcttattgaatttgccgaagacctatactcaagacaatatacaaaaatattttgcacaagagagagttctacaactagtgatctttttctaagtcattgtttttagatatcatgtagatcacaaattgcataaacatatcatgaattctccttttaacctagtgcatatcaagatagatgtcgatgganattaccaatngaaatcaaattgaaattgcatgaagcactaagaagcataagtgataattgaagttattcaatgatcatacaaca

SEQ ID NO: 35188 - DNA, 380 bp, Zea mays
  unsure (1)..(380): unsure at all n locations
agctnggaggcattgacaagcgtgtgatctatatgttcgagaaggaggctgctgaaatgaacaagcggtccttcaagtacgcgtgggtgctcgacaagctcaaggctgagcgtgagagaggtatcaccattgatatcgctctgtggaagtttgagaccaccaagtactactgcacggtcattgatgcccctggacaccgtgacttcatcaagaacatgatcactggtacctcccaggctgactgtgctgtccttatcattgactccaccactggtggttttgaggctggtatctccaaggatggccagacccgtgaacatgctctccttgcgttcacccttggagtgaagcagatgatttgctgctgcaacaaggtatgc

SEQ ID NO: 35189 - DNA, 505 bp, Zea mays
  unsure (1)..(505): unsure at all n locations
gcttctaagggagaacacatgttaggattaacaaatgttcattttgagaaagacaggatttgtagcgcatgccaagcagggaagcaagttggtgctcatcatccacaaaagaacatcatgacgaccgacagaccactagagctcctacacatggatctattcggcccgatcgcttacataagcatcggcgggagtaagtactgtctagttattgtggatgattattctcgcttcacttgggtattctttttacagganaaatctcatacccaagagacattaaagggattcttgagacgggctcaaaatgagttcggcttaaggatcaaaaagattagaagcgacaacgggacggagttcaagaactctcatatngaaggcttccttgaggaggagggtatcaagcatgagttctcttctccctacacgccacaacanaatggtgtagtggagaggaagaatagaactctattggacatggcangaaccatgctngatgagtaca

SEQ ID NO: 35190 - DNA, 481 bp, Zea mays
  unsure (1)..(481): unsure at all n locations
agcntttatcccaacttccaccatgcttaatatcacaagctcttaacatatattccaacacttgattagtcctctctgtctgcccatcagtctaaggatggtaggttgaactaaaattcaactttgtatccaagttctcatgcaacttcttccaaaaccgagaagtaaactgtgaacctcgatctgacacgatcttcttaggaactccatgcagacaaactatccgagtcatatacaattctgctagcttggctcccgtgtaattagtcctcaccggtatgaaatgagccacttttgtcaatctgtccacaatcacccaaatagagtcaatatcctttctggttgcgaggcaatccaataatgaagtccataccgatctcttcccacttccacttgggtatcttcagtgggtgcaatagtctagctggcctctggtgttcagccttaactctttgacacacatcgcacatagccacatgtg

SEQ ID NO: 35191 - DNA, 426 bp, Zea mays
  unsure (1)..(426): unsure at all n locations
tcgacatcttttgttgcttcttctccctgagnccctggcgtctaatcagcaatgaaatctgctaacgcctgagattgaattgaggatctgtgtacataatcaatggtaaattcattaagttctgcggcccattttccgatccttcttgtagcttctctgttcctcattatgtctttcaggggttgtgatgatggcactattatatgatatgcttgaaagtaatgtcgaagcttcctagaggccatcaatacagcatacaataccttctccaattctgtgtaatttttctttgataagctaagtactntagagacaaagtatatcagtgcttgtctttntacttggccatcttgcttttcctatacaagtgccgcactgaccgcagcatgggaagcagccacatacagaagtagcggagttcttgat

SEQ ID NO: 35192 - DNA, 456 bp, Zea mays
  unsure (1)..(456): unsure at all n locations
ccgacccggatctctaagtcacctgcggcatgcagcttatataaccttgattatttaccttgtatttctgcaacagaaaagctagtagaattgtggaatcagttcacactgcagaaatcgtaagccccattgtggacacttccacaagaatctaataatttgcaggtccaaattctaataaccattcaattcatgatgaggaaaacaggcagaggaaaacagacagagtacaagcctacaaaggaaatgaactttgcgtttcacctttacactatcaggtctcacgattcctctatcttgaatttgtttattttgaccactctaaagaacgaanaagttcgctctctctgctattatgtctttgagacatagaagcccaaaactacatcttggaacggcaatacagcactccattgacatgaattcagttaatataagacagaaccatattattta

SEQ ID NO: 35193 - DNA, 400 bp, Zea mays
  unsure (1)..(400): unsure at all n locations
taccgcatttgaagcatgagcgcttccccttcgtcttggtcttgcttggctggcccttgtgaccctttagcaccgtcttgaagcgcttaatgatgagggccatcttctcattatttagcccggctgcctcaacttgcgccaccttgcttggtagcgcttctttgctccttgttgccttgagagcaatgggttgaggctcatggatgggaccgttcaacgcgtcgtccacgtatcttgcctccttgatcatcattcgcccgcttacgaacttcccaagaatttcttcgggcgacatnttggtgtacctgggattctcacgaatattattcaccaaatgaggatcaagaacggtaaaggaccttatcattaggcggacgacgtcgtggtccgtccatcgcgt

SEQ ID NO: 35194 - DNA, 421 bp, Zea mays
  unsure (1)..(421): unsure at all n locations
agcttaatcttacacaaattgttccatacattccaactatcattacaataaaacctactcctctttaagacctttctctgcaacttcattcagtaatttgttaacaacttcgtcgacaatgaattcagccatgtttatgatattcaacgcctctttcattnttggatcagctaggggatcgtacggttcaggcggcggagataattcagctgaagtaggaaaaattaattactctgaagccacaaaaacaaatgtcgaagctaanaaccaaaaaaaatataatacctatacgtttttcacgctctgtagcttcttcagtatgtcttgcttctgttcgggcgtcatgggtgtctttttcacttttctttataaattcatgggccatttctcggccaccattcacccagacatcattgtaaaa

SEQ ID NO: 35195 - DNA, 454 bp, Zea mays
  unsure (1)..(454): unsure at all n locations
attttcactgatatctggaataatggtggccgagaaatggcccatgaaataatgaaaaagagcgaanaagatattcacgacgctcgagaagcagagaaaaaagctaaaaaaacccgcagaactcgagagacggataggtatcgcttaatggcttttagtttcgtcatttggtttcgtggcttcgaactaattgattttttctatcacagctgagctatctcatccaccagaaccgttcgacccactaaccgacccagaaacaaagaaagcaatagaaatcattaatatggtcgaagctatggtcgacgaagttgttaccaaactgcttaacgaagttacagaaaaagttctaaaggaagaatagcagttattgtataaacagctntagagtattaacgtaacattggttgaactaagtctgtaatatccgatgttataattctgaatgaacatg

SEQ ID NO: 35196 - DNA, 419 bp, Zea mays
tgcaagcttgatgatctggtcctccacaagcttgctacatgccttcttctttttctccatagcaggaaccttgctggaacactaccccacttaaaaagaatgagggtagaacttcttgaatcttggggatttgaactccttgaagtacctcataacaagggtgttacggggccttcttcttctgctgctgcttgtacaggctgcgaagagatgactgacactgggttgattctgggagaaccttcttcttatcttctcttcactatcttcttttctcttctcactgctcctttctttctctttgctcttcccactggaggattctatcaaagagtattaccatcatacagaggaggaaaccgaagactatgaaccatgtacaatagtcttcaacccaagaatcaccaagcattgtgatc

SEQ ID NO: 35197 - DNA, 494 bp, Zea mays
  unsure (1)..(494): unsure at all n locations
ctcctctgattactattaagttctgccttcatcatattcagcaagaatttaagcaggtgcatggttatagatcaagaaaatgaaagtgtgtaaactatgttgtgcagacgacataaatggatccagagctgccgcaggagctcgagcgcatgcatgcatagctgcaagaaatgttcttaagccttattaagaacatagttagttcacataagaactttcagttagtccccgtttttttttgtgggaaaattatagctaggcactcttttttcttgcatgcacacacttattagcttctaaaaaacccaatatatactactctttatcttcgtcgcagcaagaaatgttcatgttgntactgctaagtgctaagttatatgagtgtgcatagcctagctagctagataacacaccacaatataatgcacgaagggactaatactacacagcgccaaataaatggtttctgtgagtggcaaacaatcatgtgtact

SEQ ID NO: 35198 - DNA, 455 bp, Zea mays
  unsure (1)..(455): unsure at all n locations
gctngccgagatggttgtatgccattgccttcatatagtacgcctctgctgccatctcgtggtactgcatatgacacaggattcagtgtgtctgatgtcccaagccctttatgcaatcagcacagccgcacagtttctaagcaacatcttgtgaggcagacagggggagtaaagagcacaagctggattcatcagctcacctccaatgcttgcaggtcttcagtggcttggttcagaggatccaaaacagcttcaggatcttcgagaactgcaacagtaagacagtgaagtggggggaagtaacaaaagaaagaaccgtgtccattgtttcgacaagcgtaacaggtctagcttctagcgtctaggtggatgtgtcgagcagaccaatatgttgagaggttacagtcgatgcatcacacattaaaggatcagcatanggtttcacataatgaaca

SEQ ID NO: 35199 - DNA, 503 bp, Zea mays
  unsure (1)..(503): unsure at all n locations
tctaaaggggagaacacatttgggactaacaaatggttcatttgagaaagacaagatttgtagcgcatgtcaggcagggaagcaagttggtgttcatcatccacataagaacatcatgacgactgacaggccactcgagctcctacacatggacctatttggcccgatagcttacataagcatcggcgggagtaagtattgtatagttattgtggatgactattctcgcttcacttgggtggttcttttgcaggaaaaatctcatacccaagagaccttaaagggattcttgagacgggctcaaaacgaagttggcttgaagatcaagaaaataagaagcgacaacgggacggagttcaagaactctcaaatngaaggcttccttgaggagganggcatcaagcatgagttctcttctccctacacaccacaacanaatggtgtagtggagaggaagaatagaactctattggacatggcanggaccatgctngatgagtaca

SEQ ID NO: 35200 - DNA, 344 bp, Zea mays
ttgcatgatgtcatcaacattgtcaaaactataagaaattcagtaccaaatggccagagtgctttctactgctagagttacacacgacggacatgaggccaaagctgccgagactgccccatgaggcaatcgggactggttgtgatggatggtgcttttgacgaaggtgcacctgctgccgaagctgaacagactgatattgaacagggtgatgctggtgaagaagaaatatattataacaccattatgccatccaaacccatccacttggactatggaaagtcgactgtctcctaagctgatatgcccatgatgataaagctacgctacttcggggaagccaa

SEQ ID NO: 35201 - DNA, 347 bp, Zea mays
  unsure (1)..(347): unsure at all n locations
tcttagccttagcttccactgccaccaccttggccacctgctcatactcaaagtcagcagccagaagggcgccaacaccctcaacagcaatgtgacttcagggaagagttcgaagctcgtacagtcaacaacactgtaccagaatcaaagcacatttactgagagatatcctacctctgaagcattgttatcttttatgccatttttactttttgtataagaaataagtaatgaaaaactcagtttcaatttcttgtaataattttgcttacaccagaatgaaatatatctntttttggatttacaaagcttgaaagaagactcttaaaattcgaagttcanaagtc

SEQ ID NO: 35202 - DNA, 476 bp, Zea mays
  unsure (1)..(476): unsure at all n locations
agctnggtccaaggacagtggatggtgtctttcttggatatgcttcgngtagcatagcttatagatntttagtagttaaatctgaagttcctgatgtgtatgttgatactattatggaatcacgtgatgctactttctttgagcatatatttccaatgaaagacattcatagcaattctagatactcttctgagataattcctgaacataatacacctattgagagttttgaacagccacatgaaattgtcctagaggaggatgacaatgatgctcctaaaaggagcaagagacaaagggttgaaaaatcctttggtaatgatttcattgtgtaccttgtggacgatactcctactaccattgcagaagcattngcatctncagatgcagatgaatggaaagaagcagttcataatgagatggactctattctttcanatggtacgtgggaagtcactgatcgaccctatggatgc

SEQ ID NO: 35203 - DNA, 448 bp, Zea mays
  unsure (1)..(448): unsure at all n locations
agtttgagggccctatattgcataggaccagtgactctctatattatgactntgccacccagatatgtctaggtctactcttgtttggtggacctaggaatgtaaccttaacctttccatttgcaacctttcttagaacatagtgagcattgaaagcaaatggtcttgagtgcttangcaaggaagttggtggtttggctttgcagttgtgggcaaagtgaccttcatttccacactcaaagcatttgataggcttgtgagtctgcttaggcttgtattgagtggtagctntcttttgcacaaaagcattgtatccaataccactcttgttgtttttcataacagtgttcataagcagctcatnttggaggtatttgacccttgtgaactttngcacacttgtngcaagatgttcattntcactntttagtttcttgaacctcatttt

SEQ ID NO: 35204 - DNA, 424 bp, Zea mays
agctctagggatttctgtgaccaaattggtactaagatctcatttgcatcagttaggcacccggagtcaaatggactcgttgaaagagccaacggcattataatgacaggaataatgaagttaatcttcaatcaacccagaggaaaatggcccgatcagttaaccaaagtggtgtggagccacaacacgacaacatcgaggtctacaggcttcactccattcaagttgttattcggtgacgaagcaataactccagaggaagctaaaactggatcaataatgatagtagcctccgcacaatcacatcccaagctgttattcttaaaaaagatgcttaaagggataaactgcaccccggaaatataataaattaagcccaacagcaattgcggataaaagggtggtaaaaaattgtcccggcctt

SEQ ID NO: 35205 - DNA, 436 bp, Zea mays
  unsure (1)..(436): unsure at all n locations
gactctgctgtaaggtctgcggattcttcaatggtaggctgaagctggagagtgctcttatctctgacatgcacacagattgtgtgagggatgtcgcctgngcaccagctttgggattgtccaattcaaccattgacagtggttcacaacactgtaaggttgttatgtgtaccaatggaaaggatggatacaagtgggagggaatgctcatgcgtgacttctgttcccctgtctggagagtgtcgtggtccttgactggcaacatattatgcatagctgctggcgagaacaacataaccctctggaaggaagggtcaaatgggcagtgggaggaggcgatgaatggtgaaccatangatgaccggcaaggtttctgaatttcttgtagatccatgtttcgacaaggacaaagcttgctactggnnttactagtgtt

SEQ ID NO: 35206 - DNA, 472 bp, Zea mays
  unsure (1)..(472): unsure at all n locations
agcttagtggctttcactgtggcatgctcttctacaatgaatgaacggctaatgcgagtcacgacgatgcggtgaatgtgccaaggcacgtggcacaaggccgtgaagtggctgtctctggcgaactcatccgaatcagtcatggtctgctcgggtacggtggccggagtgtttccacggcatgatatttactgacccccggcgctatccaactgatctgtgcatgaatcacggtggcgatagcacgaatccgcgcgcggctcatcggcggcgaggggggctgaactgggattctatccggttactgtaccatcggattgttcttcagttagcctgacagaaccaagttggcatcngatttctcctgatnnttcatggcacacttgtggatcggccagtagcaaagttggtgtctaatgaatccagctacaccttgctatagcagccatagccaaactctcactagatcatg

SEQ ID NO: 35207 - DNA, 506 bp, Zea mays
  unsure (1)..(506): unsure at all n locations
gggacatattctgcgatggttcctgtggaaccttctgtgctttgtgcagctgccgtttaattgcaccttctaaagtcagaacatgctacgcagtgaaacttgattttagttgtacaaataatattgctgaatacgaagctttgctttggggtcttcggaagttgaaggcaatggggataagaagggcagttctcaaaactgattcccaagttatttctggccatgttgataaaagttgcaaagcaagagatccgaagcttgagaaatnattggatacagttcanagacttgaagcttccttcgaagggctttctgtcaagaatattccacgaggagaaaatgaacacgctgttctactagccaagtcagcggcacaagggctgccattaccttcggaagtattctttgaaacaataaaagcaccttctgttgaccttctcgaaagagcagtgctcaatatatctcctgtntatagcgaagattggagaactgagatcatgtctttt

SEQ ID NO: 35208 - DNA, 492 bp, Zea mays
  unsure (1)..(492): unsure at all n locations
agctnttccccggtgatcaactcctttttggtgtgttctcctgacatcacttcgagttgttagcctctaatgaagcaccaggctttgataccaattgaaagtcacctagaggggggtgaataagcgaaacttgtaaattataaactttgaacacgaacttcacccgaggttaggattagaaacaaattataatgaatgtggagtacaaaatagagttattcttgctatgagttgctcaatcaatgcggatgactntgggagctaactcaaaagattgtgagcaagagaacttagagagaggggaagggaagaatcaaattgaacagtgatgatcaacacaaataaacacaatgatttgtttcccaaggttnggttccaataaacctactccccgttgaggaggccatgganggccggtctttntcaaccctttccctctctcaatcaatcacttagactggttgagtgcttcttcttaatctcaaggatcac

SEQ ID NO: 35209 - DNA, 453 bp, Zea mays
  unsure (1)..(453): unsure at all n locations
agcttctcctggacaagtgctgcacttactactgagtgcgaagctgccacatataacaacagaggagtccctggtgttggtggagttagtgttgttaggtctatcaaatattgcttcagctcttcgaaggctctctgctggactggtccccattgaaaaacttcggctgacttcagcacttcgaanaatggtaaatttctctctgctgatctagatataaatctgttgagagatgacagtcttcctgtcaatctttgagcccccttctttgtacttggtggttccattcgaaggatagcttcgattttatttggattagcctcaatcccttttgttgaaaccaggcagccaagaaatttccctttcttcactccgaagaccacattttctggattcaactntaaaccggcctgtctaaaatagcgaaggctcttgagatcagcatgtgatatc

SEQ ID NO: 35210 - DNA, 516 bp, Zea mays
  unsure (1)..(516): unsure at all n locations
ntatcanatggacgtgaagagtgccttctgagagcacctatatgggggggtgaataggtgatcctgtgaaacttatacttatagccacaaaaacttgttaagtgttagcacaataatcgccaagtggctagagatgagtctcaacaaaacacaataccacaaaagatcaacacagagaagacacagtggtttatcccgtggttcggccaagtacaaaacttgcctactccacgttgtggcgtcccaacggacgagagttgcactcaactcctctcaagtgatccaatgatcaacttgaataccacagtgttatgcttttcctttcaatatcccgtttgcgaggaatctccacaacttggagtctctcgcccttacacttgagattcacaaagaaatacgtagtaagggagggaagcaacacacacaaatccacagcaaaatgcgcacacacacggccaagaatcgagctcanaagactatctcanagttctcactagaacggagctcgaatcactg

SEQ ID NO: 35211 - DNA, 429 bp, Zea mays
  unsure (1)..(429): unsure at all n locations
agcttatggtgttaggctgtctccagtctcttcctctaaatntcaccttttaaaggaatattctctgtactttacaacactctctaaatgattccgacctctatatcttttacatttccaacaatatcccctaaatttggtcctctatacctcatcctctctaatgtaccaatttaattaacataatttattgttttattaaattggaaccatcattttaggattaaaaacgacattagtgtttagaacgtctgcttgagcatttcatcgaaaagctgcatgagtcgtccgataggcacataggctccaacagttgtcccangtcgccgacggtgagctgagggctcgtggccaccatgcgacgccgacgttctctgccctatatgtggtgtcctcatgtcctgttccttctcgcgcgcgacgtgctgt

SEQ ID NO: 35212 - DNA, 501 bp, Zea mays
  unsure (1)..(501): unsure at all n locations
ngaaggacanattanaaagcaagccccaatatactntgtctctaaagttctaagtttgtcaaagaanaactatacagagttggagaaggtgttgtatgctgtgctaacggcctccaggaaactttggcactattttcaagcataccacataattgttccttcatcacagcctctgaaggatattatgaggaatagagaagctactagaaggattggaaagtgggctgcggagcttaatgaattcactattgactatgtccatagatcctcaattcagtcccaagcgttagcagacttcactgctgattggacactatgggctcangaagaagaagcaaataaaggtgccgaagcctggacagtattctgcgacggctcctgnggaaccttcggtgcaggtgcgactgctgtcttagttgcaccttccaaagtaagaacatngctatgcagcagggcttgattcagctgtacaaataatatngctgaacacgaagcattact

SEQ ID NO: 35213 - DNA, 478 bp, Zea mays
  unsure (1)..(478): unsure at all n locations
agcttttgccatatttttttctaaaccatttactgtgatctggagatgtttctcacgtgggattattagagaggagccagaagcccagaacagacagggtactgtaacaacaaaacagacactttctatatgttttcaagtcacctgtctactgtcatcataacaagacaggattgatgcccacttggctggctgctctgctctgcttgacagcacattttagtgcgtgttggtaactgcattggcaggcttttttctcgcatgacataacctgaagtcagaaccgactcaagtagtcactcaatttcctcatgcatgggcatggcattggcatcacatctcctcctcagttctcacaggcgaactcttangataggctntatctttgcattttgtttcgtgtggcagagtccattcttttgaggtagtagagcacctgaagtggccctgttactatgaacangctacaacatccctt

SEQ ID NO: 35214 - DNA, 485 bp, Zea mays
  unsure (1)..(485): unsure at all n locations
tgtagcatctnnttccttttctttntcttctggacttggagaatttcataacaaattgtagaanaatgataaaaataccagaccaattttgctaggcttctaatttcctatagtatttaataaaaatagtttcatgatttttagttccaataaggaattttgggatatttagaatagccaaaacccatacttctggaattntagagagtaaattatagtcccaaaattcaccaaactttntaatcaagctntaagtaatatttagaagccttgggtaaagtttgacatgatttggactattgttggtacttagaacccaaaaccctagtcccgtgccctatgaacttcactatagacaccagaaaccctagtttcccggagattcgtgaagaaaagttatattcaagacattagataataaaattttattatccttgcattntcatgagcattacatgagcattcatgaatatatnatggtatat

SEQ ID NO: 35215 - DNA, 354 bp, Zea mays
  unsure (1)..(354): unsure at all n locations
ggtgtctactctacttcttacccttccatangtgcataagtgcttcaccgtgaattctgatgcccccaaaataagtcctgggtgtgttcttatgtaaaatgggaaggtgatngcctatgcatcatagtagctgaggaaacatgagaaanattatcccatgcatgatctagagcttgctacaactgtctttgtataaagaaatggaagcattatctttatggtgagccttgtgatatttacatagatcatacaaatctaaagtacatcttcacctaaaaggccttaaatttaaggcagaggtgatggctcgaattgataaagaaatatgatcttactattcactatactactgac

SEQ ID NO: 35216 - DNA, 461 bp, Zea mays
  unsure (1)..(461): unsure at all n locations
tgccaagccctcggacccggccggatttcaccggatgcccgttatctacctcaccggacttcggtcttccgccgccgcgcgtggaccgagctatccagtaagtctccgcccaattcctttcgctcatatcttctctggcatcccgtggacctccctgacccatccaattgaactatctcgtcgtgaccaggccggtctcctcgccaccgacgagcatncccgcctgcgcgcgtggaccgaccgactccggccatctccgacggcgttccgcacaaccgtgtgatccccgagacctccccttcgtcctcgaccacttcaccggagcaatctcgccgccggtaagcccctccgcccttttctccgccgcggctactggttaaggtagaagaaagaacctcgggtacgattggtagaacccgaagggtntccgtaatgtcagtgactcatgtgattagtaacct

SEQ ID NO: 35217 - DNA, 306 bp, Zea mays
  unsure (1)..(306): unsure at all n locations
aattgagaaaacaaagcaaatggcacaagcagcgtaccaaatgtggttggtgcaagttcttatttatacgcttggcgcgccccgaaatggagggtcccgtctgtcattgactattgctattctagcaaagggaagggtgtttttcngaccttcngcttaaggccttcgtctatgtcgcagtctgaattcattaccttaaacaaaataatactgcgaggggctactgttgggggtcttcgtcctccgaaggtccttaaaaacataatttaacaatgtcttccaagcatggtttatagacaggtacct

SEQ ID NO: 35218 - DNA, 415 bp, Zea mays
  unsure (1)..(415): unsure at all n locations
tgtgaaggttcttcatccccacatgtgctaagcggcgatgccacagncagcccatgcaagtcttagccattaagcatgcatctagaccggcctcttcttttgcaaaatcaactaaataaagtttgccgtctaatacacccttaaaagctagtgaaccatcactccttctaaagacagacacatctacgtttgtaaatagacagttataccccatatgacataattgactaacagatagcaaattatatccaagactctctactaaaaatacattagagatagaatgctcattagaaatcgcaattttacctaacccttttaccttgccttgattcccatcaccgaatatgaatgaatcttgggaatccttattcttgacgtaggaggtgaacatcttcttcttccccgtcatatg

SEQ ID NO: 35219 - DNA, 468 bp, Zea mays
  unsure (1)..(468): unsure at all n locations
agctttccggctagctgtcaagcagcaacgttcagttcatgataggccaggccaggccatgcatgccagggaatctagctagctggggtacgtagtactctggattctcaagaccaaagccatgcacgtacagctaggctacatactactaccatgcatgggttgccttttcttgtgagaatcatcgatcataatatcatcattaacttagtgcacggccggtggtaccaccacactacgtacgtacgcacgcnncgcctttttctttatttctcccctgcctgaagcaacaaaaaattccattaatatatatgggctatttgtgtgcctttcttcccagctgattangaacgagcaatgaggatcgatgatgacgtgtgtgggctangctagctatctgactagcacctagcttgtggtgagtgatgcncatgcaggacactcacgaacgtactggcgttggttggg

SEQ ID NO: 35220 - DNA, 463 bp, Zea mays
  unsure (1)..(463): unsure at all n locations
taatgccggaattgctatcaaggaagctccctcactcttatcatcctcccattgtctcatggcaaagggagatgctaagggtaaaatcatcaccgatttaaatgatataaaagatgatgatgatatcgatgatgttgatgatgatggctattcatatgatgatcttgttagaatgttaggtgaggccgctgactacatgcacaaagaanaagaaaaatttaagaccttgaaggaattgtataaaaacctccaagtgtcttttgaggagctcaagacctctcacaatgacctcaaagaaaattgtgagaagcttgcggatgctcaaaaatcatctattgtgcatgaagttgaggtggtcactaaggatgttggagtcacttgtgacttacttgatagtcttacaagtgaaccactacctactaactctatttgtgataaatgcannaattctctcaatgataac

SEQ ID NO: 35221 - DNA, 402 bp, Zea mays
  unsure (1)..(402): unsure at all n locations
agcttgtgtcatcttaatctctgggccggttaactccatccccatattttttagtgcagcacatcaatggatgagtcatgtgtcccaactgtaacatgtcatttcaaaattgataatgagtccatcttgacagctaaagataagactaacaatagttgttgcatccaaggcttattgtattgcaagaacaattaaaataaaaaagcatccatcaatgagaatgagaccatgcaaggccggcgcgcatgaagtatgacaagtattcctataataatgaaaaaattngagaaaaggaaaagcacaggaaggaaagaaatgaattgtatgatctggtaattcagtgacatctggatatgctactcaactatatactctaagtcatgtcatcggtattcttttatc

SEQ ID NO: 35222 - DNA, 512 bp, Zea mays
  unsure (1)..(512): unsure at all n locations
cccccgcgagaccttctcccgtttctgtctaaccataatgtatgcgatatcgaatgtcatacttgatgcatattcactttctttgttcccttgtatgatgtactgtttgtttcccaatttgaatggatgaatgtatgtatgcttgcaatcgcatagagaacgatccggtcgaagagcccgaggagctcgcaagagaagcccctgagcagcagtcggttggtggaggcaagtgtcccttgacctatctatgtcctattcattatttaattcacctcccgctttacacatttatgcctaaggattgactagcttttgtgatccatgtccttgttcacctatttgggttggattattactgtttagctntatgctattgctcaactataatcaatgaacatgatgagattacctatgatacgctgttttcccctttcttatgatgatngtgtacttgtggccttaaggggggctcgagcggttctcgagtgcctctccgtannggacctgtctat

SEQ ID NO: 35223 - DNA, 486 bp, Zea mays
  unsure (1)..(486): unsure at all n locations
agcttatcgagcaatntgagagaaacatgatctatactcaatatgcagttgatttcgtttctgagtttcagttactgtgtggtgaccgtggttgttcatgtatctaaatgtctaatagccttaggagnnatatggngngnggaaacatactatggtatatagctacctgctcctaatantactncnntaatcacgccttgtggctgaatatttggactttgctttatttganttttggttgcagtattttttgttagctcatgcctcatggactaatattctctgcattcaatgtaggctntgaggacgctaacattccctttggtcctgtggaaggtactgngctcctacatgtgtaacaactacgacctgtttcttaatttaattcatantagttactatgcaaattgttgttgactatagcctttcatgattctagcaaatggtagaacgatactgagcattgatgatcgtttggaggatgac

SEQ ID NO: 35224 - DNA, 478 bp, Zea mays
  unsure (1)..(478): unsure at all n locations
tatgaagattcttatcccacatgggctagtcggcggtgcctgattcaacccatgttagtcttagcaattaagcatgtgtcgagttcagctctatcaaaatctaccaagtatagctgaccctccaacacacccttaaatgctattgaatcatcacttcttctaaagacagtgacacctacatcagtaaatagacagttgtagcccatttgacataactgggatacagaaagcaaattgtaatctaatgaatcaacaagaaaaacattggaaatagtatggtcaggtgatatagcaattttactcaatcctttgaccaaaccttgatttccatccccgaatgtgatagttcgttggggatcttggtttttctcatatgaggagaacatctttttctcccctgtcatgtggtttgtgcacccgctatcgagtatccaacttgagcccctggatgcataaacctacaaaacaanntttagtc

SEQ ID NO: 35225 - DNA, 476 bp, Zea mays
  unsure (1)..(476): unsure at all n locations
gcttctgccatgatgtgagtgtccctgtctctttataagagtaccatgtctgtgccacacttcggactgccatgattaaggacttcaccatgactgcagtattgcccccatacgangatnnnnnnncnnnnnnnnctcataatttattatctttttatcttatttctcttcttncntnnnnnncnnnnnnnnnnnnnnnnnnnngnggccnnggggnnccccgccgnnctgctgctngaggagaagcatcatcaaaaacaaagtttccatgatggaaatcgtcataccantcatcatcattgtaagaattgtattggccaagctctctttgtggaggtcttcggtcctggtcatcttgagtgagatgacgtatttctttggcagcttcatcgatcttcttctgtagttcagagagacgaatcatcttctctctcttcctttcaacttgctggtgaatagcttccagatcccttatc

SEQ ID NO: 35226 - DNA, 450 bp, Zea mays
  unsure (1)..(450): unsure at all n locations
cttctcgatttgcgtaactatgaaaccgctgaaattcttttgaaattctctgagtcttctgtcttgatcaccacgtcatccacatgcttgccctagtggtcggctaagcatgtctggatggctctctggtaagtcgctccagcgtttttgaggccgaacgacatggaggtatagcagaaagccccgaacggngtgatgaatgctgtcttttcctcgntcttctttgccaagttgatctgatgatacctggagtagcaatctaggaaggacaacacggaacacccgacggtcgagtctaccaactgatctattctaggaagtccaaagggatccttcggacaatgtttgttgagattcgtatagtcgatgcacatgcggcaatccactttattctttttgagtacaagaacaggatttgctaaccattctggatgtagtacttctctaatg

SEQ ID NO: 35227 - DNA, 477 bp, Zea mays
agcttcggctccatctatgttatggattgctttttattcagtccaattgccttcggcccttcttgcagcttcctgacttccatggatagcaatacgtccctgttccgaaggtatcttcatgcaaagataagcacgatgaaggattgcttcgaacgcattgagggtaccacgaccaatgattgcattgtaagggtattccatatcaacaatgtcaaacacaacttgctcagttctagtgttgttgatgaacccgaaggtcaccgacatggtgatcttgcaaaatgctacaatctgtcttcctacgaagccacagagaggatgtgtagcatcatgaatcttatcttctggctcttgcatttgtctgaaggccttagcaaatatgatgtcagctgcactgcctgtgtcaaccaagatatagtggaccagaaatccttttgatacacaagagataaccatggcatcattgtgtgggtaatc

SEQ ID NO: 35228 - DNA, 469 bp, Zea mays
  unsure (1)..(469): unsure at all n locations
ntgccacatagggcgcataattataccttggatatcttctcgtactgtcaggtcattcttcacataaaaccattctgtcatccagtcgccgggccatctcttccgaaaggttggcacgggacagcttgacccggaccgagaaacgaaactgtagcagccaaaattattatgatactgttccttaccccacggttttgtttcgtatgataattcgtgtatattgcagaagctttttgcatcaggcttcagaccttggcttctcacgggccacacgaagatattcagccttatgattgcctcgggggtaagttggtgaagatagacttcgaagattttcaacacctccacgacgaagctgctcaagggaaatcgcagcccagctttcataaagcttcggtacactacgacttcattctcttcacggtgtggacaagtcttctccccttcgtcggcccttacaatggacaaa

SEQ ID NO: 35229 - DNA, 481 bp, Zea mays
  unsure (1)..(481): unsure at all n locations
agctngcgtacgtcgattagctcctttgtttatcgngggagaatgccgcgggtaggcggtggcgtctgagaaagaggcggtggccggagcggagcaaggaggaggccatggcgacgaggctagggttctggccgtggggagggcgatgagtttggaagcttggatctggggttaggcccatgtagaaatttcggcccgataaccccctcagatgagatgggttcagtcaggttcggcaggactgagctagactaaggatgtttgaacgtaatagttagttagataaaagattgtcagtgtaattaactaatttactaaaagaaattgttggcgaaaagcgaagaaataggcttcgtcttccatcacaatatcatcaaatataagaataaaacgaatatcctgtttggtgtagtaaatggaaataccctatatgagtgtttacgtagaatactattntggctattttgacgatcacgataca

SEQ ID NO: 35230 - DNA, 475 bp, Zea mays
  unsure (1)..(475): unsure at all n locations
acacaagaaactcagcttcggaaccatctcttcacgagtaccgtacttttgttcatttcggnctcggaggcaacccaggctttcgtcgtcaataccgtcgaagagtagtgctcctggctgatacccgcaggagatggcgtagtctttcaattcttctttcttggcctctgttaatttttgaccaattaagctctgaaagttgaaactttctccttctgaagtatcttcgactatatccctctctttcccaggcactgtggccatggtttcttcggcggctgtggcagcctcttctgcggctatgtccagaagttntttatcaatatcagaaagtgtggtttctaatgttgcaccttcagcagctgcagcttcagtatgtgcagctaggtagctgcagcgctctcaacagctggtggtattgggccgaagctggtggtggtgttcttcaatggcctctgtcacataataattcttc

SEQ ID NO: 35231 - DNA, 480 bp, Zea mays
  unsure (1)..(480): unsure at all n locations
agctntaccctgtggactagactattagtttgttacggtaggtgtaccttatgcagttgaccatttccaacatttgcgtaatgaggactctagggagaagcctcgtagtgagaccctggacattcacctcggaagtgaatacggatctagctaacccgggctagaagggaatcgcgactcatgggtaaaagatgcgccacctctgcagagtgtaaaactgatatatcagccgtgctcacggttatgagcagcctggactcctcacatgataattgaacttgaagatggaaataaatcgagatccgatgatctgccaatnggtttgcttaagtggtttcacttaagtggttgtgatatactcttatacattngcttaatgggaatacttgggaatcacactttatatataagtcaggtggtnggttaataaatgttgacccaactaaaatgcttactgctcaacctcagcctcaccttgta

SEQ ID NO: 35232 - DNA, 513 bp, Zea mays
  unsure (1)..(513): unsure at all n locations
acaaaaactcagcttacagtatgccagcagcgatagtctctgatcgtgatcgtatattcaccatctcctnttggcaagaacttttcaaattatcaggcacgcaattgcgtatgaacacttcgtatcatcccaaacagatggccaaactgaaagggtcaaccaatgcctcgagacttctttgcgctgctttgttaactcttgtcctcacaagtggcatcattggctaccaatggcagaattctggtacaacacaacatttcattctgctctgggccgctccccattcgaggtgctgtatggtcgaccaccacgacactttggtattgcgcctgctgacactataactgatccagacctgtccacctggctgtccaacagagaagtgatgctccgagtggtcaaacagcacctgctgcgagcccaagttcgtatgaagcaacatgcatacaatggtatgagtgagaggcagtttgcttgtggagaccttgtgtacctatactgcaccatatattc

SEQ ID NO: 35233 - DNA, 462 bp, Zea mays
  unsure (1)..(462): unsure at all n locations
agcctttgatgacgagggccatcttctcattatcaagattggagggtcaatntgaagccccttgcttggagtantctcctcctcttccgtcgccttgaaggcaatggcttgtggctcnagcccggnggannnnctatggacaatagtatcatatacatgtttggantctnngnccnnnnnnnnnnnnctcccctcctttcccaacacctcctcgacgtcatcacctcgtatctaggattntcacgaagtaattgaacaagagtagcattaggaaatacgagttaccttancatgattntaacaacttcatggtcttctcatttggtgctcccaatgttntagacttggttcaccattggtttgagccggttgtacattnttgtggtccttctcctttattgagggcgaacccattgagctctccttcaatcacatccatcttagtgatcctgtcaccttcga

SEQ ID NO: 35234 - DNA, 479 bp, Zea mays
  unsure (1)..(479): unsure at all n locations
tatgtggacgatgtggtaatcaaaacgaaaaattggattatttattgaagattacagctggttntcaacagtctacggtgatatcgatggaagcttaatcctgaaaaatgtgtcttcggggtaccagcaggaaagttactcggatttattgtcagccaccgaggaattgaagctaatccagaaaagatcgaagctatcatgaggatggaggcactgcgatcacaaaagaaagttcatagacttaccggatgtatggcagccctgagcagattcatatccaggctgggagaaaaaggcttaccattttataagttactcaagaaggtggaaaagtttcagtggacttcagaagcacaggaagccctagacgcattgaaaaagttcttgacgacaccaccagtgctgaaaccgccacgacgggccacgtcgactcaaccggctgaagatctgctactatacatctcttgcacgactcacgt

SEQ ID NO: 35235 - DNA, 97 bp, Zea mays
  unsure (1)..(97): unsure at all n locations
actcaggaggccacacattttttcttatttcattcnncccgtcttctggacaagcatcctccctggatccaagtccatataccaacatatatcccat

SEQ ID NO: 35236 - DNA, 445 bp, Zea mays
  unsure (1)..(445): unsure at all n locations
tctaaagggagaacacgtgataggtttgactaacgttcaattctaataagatagaccttgtgcagcttgtcaagcaggtaaacaagtgggaggagcacatcacagcaagaatgtgatgaccacgtcaagacccctggagctgctgcatatggacctcttcggacccgtcgcctatctgagtataggaggaagtaagtatggtctagttattgttgatgacttttcccgcttcacttgggtgttctttttgcaggataagtctgaaacccaagggaccctcaagcgcttcctcaggagagctcanaatgagtttgagctcaaggtgaagaagataaggagcgacaacgggtccgagttcaagaaccttcaagtggaggagttccttgaagaggaagggatcaagcacgagttctccgctccctacacaccacagcanaatggtgtg

SEQ ID NO: 35237 - DNA, 485 bp, Zea mays
  unsure (1)..(485): unsure at all n locations
agcttcngctnttaaaacagttntttagtgtttccgaagatgtctgaagctgctaagaaggctgctgctgagatgaagctgagtcttgatgaagagaagaacttatggtttcttatagcaatgtcgaagaccaacacagaaaagatcaccagggaaattctggaagggctgtctgaagatactggtgacagtgaaagttatgatgtggacagtggtggcgaagactccgaagatcgcccctggcgaccaagccattcagtttatggtaaatcaactatcaaagagaatcatcttgttaatatgagaggaaggtatttccgggatctgtccattgtgagggcggacgaaggggaaaagacttgtccacaccctgaagaaaatgaagttgtggtgtaccgaagctttttgaaagccggattgcgatccccttgagcagcttcgtcgtggaggtgttgaanatcttcgaagtctatcttcatcaactt

SEQ ID NO: 35238 - DNA, 401 bp, Zea mays
  unsure (1)..(401): unsure at all n locations
cttaccgcattgaagcatgatcgctntcccttggtcttagccttgcttggctgtccctttcgaccttttagcgccgtcttgaatcttttaatgatgagggccatctcttcatcattaagaccggcagcctcaatttgtgccaccttgctgggtagcgcctccttgctccttgttgccttgagagcaatgggttgaggctcgttgatcggaccattcaaggcgtcgtcgacgtatcttgcctccttgatcatcatccgcccgcttacgaattttccgagtacctcctcgggcgtcatcttcgtgtacctgggattctcacgaatattgttcacgagatgaggatcaagaacgggtaatgaccttagcattatgcggacgacgtcgtgatccgtccatcgcgt

SEQ ID NO: 35239 - DNA, 362 bp, Zea mays
  unsure (1)..(362): unsure at all n locations
cgcggagcgtgccaatgggaaaatcttcacagctatcaaaaagatgctcctcgatgaaaaaaaatgcagatggaccgatttattgccggaggcagtctgggcgctaaacacaaccgagtgcagggcgaccgggttcactcctttccgccttctatacggatcggaggcaatgaccccgcaagaaataaagcatgggtcctcgcgtacagttccgtcagccgtccccgacgtggacgagccacctttaaaagacctcatttgacggagaccgggtcttcgccctacaggccctanacaaataccaagcccagaccaaagcatggcgcgaccacgcagtcatcccgagggagttcagcgagggg

SEQ ID NO: 35240 - DNA, 507 bp, Zea mays
  unsure (1)..(507): unsure at all n locations
gctggatacagctgacaatctcgtagcctctgaagtacttttctaaatgctcctcatgctcttgctcattttgggaatatataagaatgtcatcaatgaacactactacgaacttgtcgaggtagtccatgaacacactgttcatcaagtacatgaagtatgctggcgcattcgtcaaaccgaatgacatgaccgtgaactcatacagtccatacttggtgctgaatgttgtcttcggtatgtatgagggtcggattttgagttgatggtagcctgacctcagatctatctttgagaacacactggctcctctcaattgatcgaataaatcttcaattctgggtacgggtacttgttcttgatggtaacctcattcaaagctcgataatcgatgcacatccttttcgtgacatccttcttctncacaaataacactnggggtgcccaaaggaagtactcggtctgatgtagcctttctccgacacacatcaatctgcttcttgagtt

SEQ ID NO: 35241 - DNA, 204 bp, Zea mays
taaaaagaaaactcctactgcatcaaatgatcatgatatttcattcaaaacttttgatgcttcttatgtgctcactaacaaatcaggcaaaatagttgccaaatatgttgggggcaaacacaaggggtcaaagacttgtgtttgggtacccaaggtgcttgtttctaacgtgaaaggacccaagactgtttgggtacctaagaa

SEQ ID NO: 35242 - DNA, 460 bp, Zea mays
  unsure (1)..(460): unsure at all n locations
gtccggaatgaatcggcggtnattaccatccagtccaaagaaacttcggacttgatgtacagtggttgggggtttccactccaaaatatccttgactttgctgggatccaccgcaatccccttggcagataatacatgtcccagaaattgaatctcctccagccagaatgcacacttactgaacttagcatataattgatgttcccttaagcgtgttaatacgatccacaagtgctgagcatgctcctcttcattcttggagtatattaagatatcgtcaatgaataccaccacaaatttgtccaactcggacatgaataccgagttcatcagatatgtgaagtgggcaggagcatttgtcagtccanaagacataaccagatatccgaataatccataccgcgtggtgaatgcggtctttggtatatcttcgggtcggatacagatctgatgataaccc

SEQ ID NO: 35243 - DNA, 480 bp, Zea mays
  unsure (1)..(480): unsure at all n locations
agcttacataagatntgataaataagaattttaatcctatgatatagtttcctccccctaaatatgtgcatttcagaaaataccaattttgtactcaaatgccaaaagcacatatttgggtcaaagagtgaagacgacttatatcatactattcatagggtgctttgtgtcataaataaacatgatgctcatgacatattatgcactcatcaatttccttcatcttatgttttacttatgattcaacccccttttgtcaattatttctcccccttttcaaaagtattcttacacttagttacataagactaaaggtaaggtttaatgcacaatttctccccctttgtcataaatctccaaaaaaatataaagaatataaagggtagaaattatgattaatcaagaattgaacacactatcatgaaaagggtccttagatggcacanaggtaatggataagtggcataagtgatgtatctt

SEQ ID NO: 35244 - DNA, 496 bp, Zea mays
  unsure (1)..(496): unsure at all n locations
actcagcttatgcccgaaagattgtctaatttgtaagggcaaggctcccatggctcatgataacgagggttacattttatatcctgctggttatcttgagcataagattaggagaattcatgctaggaaatctcattctgtttctcaccatgctntattgtataagaatgaggcatctagctgtaggcaatcaacccatgttaaattgcctaaaaagaaaactcctgttgcatcaaatgatcatatcatttcatttaaaactattgatgcatcttatgttttaactaacaaatccggcaaaatagttgccaaatatgttgggggcaaacacaagggctccaagacttgtgtttgggtacccaaggtgcttgtttctaacatcaaaggacccaagaactattgggtacctaagaagaaggcctaaanactgtttacaggtttatgcatccngnggctcaagctggataatngatagtggatgcacanaccatatgac

SEQ ID NO: 35245 - DNA, 349 bp, Zea mays
aagggttataagcctatgttgtgtttcttcacgtagcgagagagataggtgccaatttgcagcagtcagcattgttgttcttgatcacttgcttgagcggttgtataggtcaccccttgttttgctgaatctgatgtcttgcaattgagcattgttagatccatacaaagataataataccgctataacaccacaggcttaatagattggtctatgtcagttacaataagacgatggaaaatatgttcaaacactaagagagctgggatccaaaggtaatagaagctacccactggtgcttgtagagttcatgtgggaaaatgaatggcgtgaaaataatgaagatgat

SEQ ID NO: 35246 - DNA, 519 bp, Zea mays
  unsure (1)..(519): unsure at all n locations
tgtgtggcgttcccttgaaattcgtacggttagtttaaactttgtcttgcgtttgccatggagggcaacctgagttcacctgagcgtgcatgcttccatgctntgtttttccgcttttgcgtggaagacttgctgaacatgaggaggtgtagctgggctcttttgtaagttgttactgctcgatgctgtaaacttgaggaggtgtatgtaacctgaccttgtccaacgttttcctgccacgatgaagtagctctgcttgtatgtcattacttctactttcccgttctttntttatttgtcgcggtttaatttaaaaatgaagataaatattcgagagcagagttattatgtacgtgtgtgtgcagtttgatccaccttcgtatatcctctcgttgaatagaaaacaaatttggtgccattcanaacagganaacacctagaataattacagttctgttcacgactctaattagcttgtcctaagttcatttataaaaaacagtcatgcgttttggatcg

SEQ ID NO: 35247 - DNA, 514 bp, Zea mays
  unsure (1)..(514): unsure at all n locations
atcctctgagtcgcctgcgggctgcaagcttgaganaatatntccgcctgccttctttgatgtcatggggcactngagtgtccatcttcccgatgaggcactgcttagaggacctgttcagtatggatggatgtacccaatagannggcnacnnngcccnnnnntctttttgtttagaacatggctatgccggcnggatcnnnngcngnngcnnnnnnggcnngngatcccttaacattntggtctaggtacatgaaggatgttgacactagatttaaccaggatgatgatagtggtacagagatgccattgcctaatgacatgtctgtttttaagcatggtgctactcttgttggaggtactaagactgagtacattgatgatgctaccatgaataagttagtttggtatgtgctacataatgctgatgaagtacaggaatatntgacgtaagttagttcgggatgtgctacatacattatggtatggttatctaatttgaaaatatgcctat

SEQ ID NO: 35248 - DNA, 394 bp, Zea mays
  unsure (1)..(394): unsure at all n locations
ntctcttatgacgaagctaaatcaagacgaaagcttgctcgataatgcgatgaanaagctntggctatggttaaatttttcagcagcacaacagtgcaatggcaatgaatgctgtggtaacttcacacctacccgtgtgtttatatagtactgcaggtgtgaaggtgaattgtcaagtcacccacacactctgaacagttacctgcacccactgaacggtggaccacccggcgcatgggaggtgaatcgccagatcgcgcatacctgccgcatggtggaccacctcgcgctcggaatattntaatcgtttctcggcaacgagctcaaggaaggtgttttttggaccttctgcattccgaagctttggagaaattttcacgggtcaagctcgtta

SEQ ID NO: 35249 - DNA, 482 bp, Zea mays
  unsure (1)..(482): unsure at all n locations
agcttgacattgcttccctgttggaagccaatgccatccttaatgccagggcgtctccctctatagagcatgcttctagcaaatttaaatttttcattttctatctcatgcttattaattttagcagtaagttgagctatgtgatcattttgttgtttaattaaagcaaggtgatcatggatagcatcaacatttacatctctacatttagtacaaatagagacatgaccaacagtaggtgtagagggtttgcaagcatttaattcatcaatcttagcatgtaaaatagcattctcatttctaagattggaaatagaaacattgcaaagattcaaatctttagccttataaattaacctacattctcagttttaaggctagaaattgattcattcaatttataaatcttagcanttaaactagtatttcttttctagactgacaatgaatcatacaaacattaacttttcaacctagtaata

SEQ ID NO: 35250 - DNA, 513 bp, Zea mays
  unsure (1)..(513): unsure at all n locations
tacggacctatgaaactcagcttattatatanaactctagagggagtttgattgttgcattcatgctattgcatagtgtgtttaaatgcaaaaatgattgaaacgtgttaacataatttgtagaagtctacggtaattttcacagtttatgagtaattgtctcatttttttgaaaaaacaaattttatgtatttatgacgcttaaaaagtagataagctccaaacactttatttgagtttattaagcttcaaaacatgactagaaatttccctagaattttttactctttaaaacaatttttatgcgttaaatatatatacggtatctattataattaattaattctcaaaataggtcgcttcgatttacacaattactatgcccactgtcatctcgtagggtacattgccctatgcgataaacccactataacctnctgccccgctccacccactcaccgaaccatggtttcctgatcgcttcgtatattctcgctaggtgtgccgtacaac

SEQ ID NO: 35251 - DNA, 436 bp, Zea mays
  unsure (1)..(436): unsure at all n locations
tcggccttcggaggccgaaagttgaaatgaacgaagcctttcttttagtgccaaagagccttcggcgttgtctgctcttttataggaacaagggacttattacaagagcatattgccttcagggtgtggccgcttgcggagaaatgggaaatgccacaagaaatcgttaaaaaggccgacgaaggtggactcgtcagatttaagtacactcttaaatctgaagataaatttattgagccagacgatgagtggttgaaaagcattgacaatttaagtgatgagctgcttgngacatactcgaaggccgaagatactgcaatgtcagcagccttcggaggccgaaaaaagaaaaggctgaatcgggtatttgatgccatcgggttcgtctaccctgactatagctaccccattcgaaggcagaagagantaaatacaa

SEQ ID NO: 35252 - DNA, 471 bp, Zea mays
  unsure (1)..(471): unsure at all n locations
agctntactttgaaataaatgtaagattatgttattcgcttccgcatttcttcatctccgatgttctgtaatgtctacaagatgggtgagacgttcctggtgaggtaaggaaagataccgaacttgtcaagtagttcaggggcacctacagggttgtctgatgtccgttggacaaggacaactgtaggtgggcctaattacttgggaggttccgtcacagctggtatcggagcgtagcccttcttggcagatattatgaagcatcttcaaaagggattttaagagtcttacctaaaaattcttttctcttcttacctaagtattctgaagaagtctatctcaaagaccagataggaagagtgcaacatatagaaggttgaatcgactaagggtgattctgtaattatacatgcatcatgctaagaatcttactaataacattttcccncttagaaaagaatgccgcacgta

SEQ ID NO: 35253 - DNA, 539 bp, Zea mays
  unsure (1)..(539): unsure at all n locations
gacacataaaactcagcttaataaacaatctggaccctctccatcacgctacagtcagtatagtcagagctcccatcaggcaccctccgttgcaagcaaccagccgccagcaaacgcctgttggcactgcggagaccccagtcacttcaagaacaactgccctcagttgaaggcacccggaccaacttactccaactcggtgaatggccccaagattccatcggcacctacctccaaggcactcccttcaaacagccagcagagcaggactcagtatcagggtagagcccgggtcaaccacgtcgacgctcaagaagctcagcaagccccgggagtagtgctcggtgagttccttgttgaatntaactcccgcttctgtgcttttgattcaggagcatcccattcttttatagccgctaagtntgtggaagagcatggcatccnctctacacccctagctatccctntggtcacccgaacccccggatcagaacctctatgcanactcanngtgctccaagtcagaaaatctttaagtg

SEQ ID NO: 35254 - DNA, 486 bp, Zea mays
  unsure (1)..(486): unsure at all n locations
agctntngaagaaatattaagtgatcgcggtgatgtctgcgcattttccggtgcgagaggaattttagccatcctggagaaggcgggttgcaatcatgtcaaaactttggcccagaccgaagctgccttctctgnggatgacacaagatccctcagctgaagcaagcttagnnngggggaaaatttacactgacatctaggcaaatggtggccgagaaatagctcacgaaattatgaagaagagcgagaaagacatcaatgaggcccgagtacaagctaagcaagctgaagaagttgcagagcgcgagaggcgcatangtattgtttcacggcatctagcttcggcatttgtttttgtgacttcgaactgattagatttttttcttctgcagtagaactatctcctccacaggaactgttcgaccccctggctgacccggaaacgaaggaagcaatagatatcattaatgtgaccgaatctattgt

SEQ ID NO: 35255 - DNA, 425 bp, Zea mays
agaacatgaagtcggccatctcaagacctataagcgcacggtgttaccctttcacgccgttcgtaacgacctcctgctggagatcaccctagacacctcgggacctggcttggtctccgctatgaatagcgctacttctggctctggtagctcgtagtaatgcccgaccacctccaactcttgccgccattcctgctggtgctagcgccaggcgcaacaaggtgcgcgacagaggctgcagaggcggcaacgacgcctacaaggcaacaacgacagctttggaggcaacatcagtggccacacctttggtgcccctgacaaggcacctgctccctcctggccctcctacaacctctggaacggtcacatcaccatgtggtctgccctgatgaatagtgggaggttcagcagcaacaacatcccca

SEQ ID NO: 35256 - DNA, 386 bp, Zea mays
  unsure (1)..(386): unsure at all n locations
agcttgaagccatggtaagtagcatatgcttattatatgcgaattgactcaagcctagctacgggtgcataggtttcaccgaaatccataccttcgacttgtgaataccctctggctacgagtcgagctttgttccttgtcaccacaccatgctcatcttgcttgttgcggaagacccatttggttcctacaacantttggttaggacgtggaactaaatgccagacctcattcctcgtgaaattgttgagctcctcttgcatcgccaccacccaatccgaatcttggagagctttctctaccctgtgtggctcaatagaggaaacaaaagagtaatgttcacaaaaatgagcaacccgagatcgagtagttaccctcttatgaat

SEQ ID NO: 35257 - DNA, 490 bp, Zea mays
  unsure (1)..(490): unsure at all n locations
tgtctcangagggttngactctgttgttaaggtctggggattcaacaatggtagttggaagctggagagtgctcttatctctgacatgcacacagattgtgtgagggatgtcgcctgngcaccagttttgggattgtccaagtcgaccattgccagtggttcacaagacgggaaggttgtcatctggaccaagggaaaggatggagacaagtgggagggaaagctcatgcgtgacttcggttcccctgtctggagagtgtcgtggtccttgactggcaacatattatgcatagctgctggcgagaacaacataaccctctggaaggaagggtcaaatgggcagtgggaggaggcgatgaacgttgaaccatatgatgaccggcaggtttctgaantcttgtagatcatgtttcacaaggacaagcttgctactgttactagtgttcgacaagttaagttgccatgtgttactagtgttctgcgatcatgt

SEQ ID NO: 35258 - DNA, 68 bp, Zea mays
atctatatacttattaggcggacaacaagcgtctaagcacattaactgctataaatatactcccgcct

SEQ ID NO: 35259 - DNA, 96 bp, Zea mays
gaacttccaatgatgtaacggcaccagtttctgtcttaataatatgacccatccgcacagcgattattacagttctgtcgttactcatttagcatt

SEQ ID NO: 35260 - DNA, 416 bp, Zea mays
  unsure (1)..(416): unsure at all n locations
gacctatanaaactcagcttcgcctcgcccgaccccagggctcggactctatctttgncctgattgcgggctccgcctcgcccgaccccaaggctctgtctcaatatcagcctctgaaggtgggttcctcctctcccgacctcatggctcggcctcaaccttggactcaggagaagtcccctactcgcccgaccttgggctcggaccgaccgcgccacaggtgatacatcattatcctacccctagctagctcaagctatgggaatacaagaccggcgtcccatctggctcgccccgatgaaattaatgatggctcctcgcgtgcgcccatgacgatggtggttctcagcccactacggaagcaaggatacgtcagcatgatcccagtattgccgaccgttgtgcttctacagggc

SEQ ID NO: 35261 - DNA, 357 bp, Zea mays
  unsure (1)..(357): unsure at all n locations
agcttttgtgacatatgtataataaccttatttacaaactgcttgatgaacattgttcattttgatgattagataaatattgtttttcagtatacctgtactcattctattgtaaacaattcattctaggtatgtaacaaaatggcatgtttatatctttgattcatgatgcatttctttcatacaccatgctgtaagagtagaattgatgattctttcatcgcattcaataatctcacaagattgtcttccattttcatagttggtaccagcagtgactgagctcattgntgcccagttgatgtaccttgaatggatgaacagtaaagaacatgnttatatatacatcaactcaac

SEQ ID NO: 35262 - DNA, 461 bp, Zea mays
  unsure (1)..(461): unsure at all n locations
tcagctccatctatgttatggattggctttgagtcattccaattgccttcagcccttctggcagcttcctgacttccatgaatagcgatgggtccttgatccgaaggtatcttcatgcaaagataagcaggatgaagaattgcttcgaaagcattgagggtgccacgaccaataatcgcattgtaagggtattccatgtcaacaatgtcaaacacaacttgttcagttctagtattgttgatgaacccgaaggtcactgacatggtgatcttacccagtgctacaatctgccttcctccgaagccacagagaggatgtgtagcatcatgaatcttatcttctggctcttgcatttgtctgaaggccttagcanatatgatatcagctgcactacctgtgtcaaccaagacattgtggaccagaaatcctttgataacacaagagaataaccatggcatcgt

SEQ ID NO: 35263 - DNA, 409 bp, Zea mays
  unsure (1)..(409): unsure at all n locations
gagattaaaagctctcttgtgggttttggtggtttggatgacaacccaattaaaggactaacaagtgtgctaagtgttgaacaggtgcttaatgcaaagctaacagggttcaacacaagtgaacaagtgtgatggtccaaagactagattatctatagataatggacatcacaagtaagatggacattgcttaagtgagactcgatgtgtgtaactcagagacaaccgatcaagccaaggatggaggcaagaagagcttcgatgtactgagtgcatgggagaaggtcaaggagactaggaactcaaagccaggggtgaagaagaagacttgcanagtcaaggttgatcgagttaagaagaagtatggtgcatcaaggatcactacataatgacatgacttacaactaat

SEQ ID NO: 35264 - DNA, 413 bp, Zea mays
tagactagaggccctttcgcagcaatgaaacactatgaataaacaagatccaaataattccaagtagagtactaaccgataatatttttagaaaaatattcggtgatagtttctgatttaagataaattagctatgatttctatgattttcataaaacagataaccacctttgaaacaagctatgtaccaaatttcaacaattggagggcatacctggtttataattcaaggttgaaaataggactgtcatgtaagatgaaggttaaaagcggactttaaccaaaaataaatcacgattttttatgaaaagaaatcgttagttaagtagaagatgcctctcctatcgcattaattgcattaacatgaaaacttaaagtaactttatcaagagtaagcgagcatacctagaaat

SEQ ID NO: 35265 - DNA, 448 bp, Zea mays
agcttgacatgaggagatggcgctcgtcatcattatcttccgccaaatcctcaaacaaaggagggggaaagactacaagtcccgctccaagaaggtttgctacaagtgtggtaagcccggtcactttatagctaaatgtccattatcaagtgacagtgacaggggtgatgacaagaagggaagaagaaaggagaagaaaagatactataagaagaagggcggcgatgcccatgtttgtcgggagtgggactccgacgaaagctcaagcgactcctccgacgacgaggacgccgccaacatcgccgtcaccaaagggcttctcttccccaacgtcggccacaagtgcctcatggcaaggacggcaaaagaagaggtaaatctaactctcactaatataaactttagtgatgatatgctaggagagggatattactaccttttgcaccta

SEQ ID NO: 35266 - DNA, 508 bp, Zea mays
  unsure (1)..(508): unsure at all n locations
tcccatgtnggatcaaagagtgaatagtgttgcttgaccagtgatgttaaaacggctntcgtctcactgactttcgatctagatctgaccaccttgctcttgctccaatctgcgggcagaaaaaggaggtagacaaattagaagagaaatcacaaagaagcatagatcgagaagctgagatcctggtcactccctaaagaatacggtgatctgttcctgctctgcatgccttcgggcaccatcaccaccagcccgaatgggccgacgccgcacgagtccgacaaggaggtgtccttctccacgcacgtgtgcagcttgtgaggatcatgcagctactcggggtccagctcctcaacgtcctctaggctcttcagcacctcgaacacaacctccatgtccgtatgcatggcatcgactatattngcaaaagataggagtaatatgatgcaatgaatcactaanataaattntatagaggctagatcatggtctacagtaatatataaac

SEQ ID NO: 35267 - DNA, 473 bp, Zea mays
  unsure (1)..(473): unsure at all n locations
agcctgngtaactcactgaanatgcagcatatttccatganattcgaggtaagttgtcactaccagcagcatcctcagtgactgaacttccaaggacaatgtcatctgttctttctttctcgacatccaagttatgaacttcagcttgcaatgctgccctcaattcccctctagtgcgttcattccatatcaaatctgctctgttgtgatctatactgaatgccctccaaaatccataccaattgcacaggagcctgccagatcccacaggagtgttttccaccacaacctgtgcagggactgaaaaatctgaatgcaatgagctcacaagaatgccattggcattggagtccactgaataaacatgtgaatccagctgtggtgcctcgatntcgtgaattatttcagaaagggcctcatgtacagaaccatgtggaactgacacagtgtgagaatgatcaatgtttatacct

SEQ ID NO: 35268 - DNA, 495 bp, Zea mays
  unsure (1)..(495): unsure at all n locations
ntatangatggacgtgaagagtgccttcctcaacggaccaatcaatgaataggtctatgttgagcaacctcccggctttgaagacagtgagtatcctaatcatgtctataagctctctaaggcgctttatgggctcaagcaagccccaagagcatggtatgaatgccttagagatttccttattgcaaatggcttcgaagtcggcaaggtcgatcctactttattcactaaaactcttgacagtgatttgtttgtatgccaaatttatgttgatgatattatatttgggtctactaacgaatctacatgtaaagaatttagtaggatcatgacacanaaattcgagatgtctatgatggtggagttgaagtatttcttatgatatcaagtcaagcaactccaagagggcaccttcattagccaaacgaagtacactcaagacattctaaccaaagtttgaatgaaggatgccaagcccatcaagacacccatggg

SEQ ID NO: 35269 - DNA, 483 bp, Zea mays
  unsure (1)..(483): unsure at all n locations
agcttgagcacattagcctccacactactgtatcttccaaatatgcttacaatgatgattggttgtcttggtattcagaatgatatccataaaggatatgatgaatctgtgatagattcgaaaatttcagatcattaatgaccatcagtaatgaattgttatttccaactggttatggttggagtcaggaattttgcacgctcctgacttgtgattaactgcatgtactgcatgtacaagttcccctatggtttttagtacgtgggaatccataaaagatttcccatgcgtacattgggtatgttcccaatctcaccaccgcagcgtacatatatgggcacacagaanactggggatctatgtgagaattcattctccgtcgattattaagaattagaatctcttcatgagaatctatctatgggccgtacgcttgcttgaatcatgagccttttcaggcattagggggagatttcgagtacc

SEQ ID NO: 35270 - DNA, 519 bp, Zea mays
  unsure (1)..(519): unsure at all n locations
ggggatatcaaccaaatctgatgctgacaagctagaagttggcctattctcaatctttccgtgcgtacagccagccttcagaatagcggtagctgtgcctcgagaagctaccagggcgcagaagtcggcatgcccaccaataacttcgttaagagcatcaacctcgccttcaatatgttccaaggtgctgggcaggttttcggctgaaggtgaaaatttttcagaactggctccgatagaatgaaatacgtccttcagccgctgcacgcatgggttgccgaaatttaggcatttctcttggagatccttcaatgatttctgcanatttgaatttttctcgacctgagtcttgagacttgcttcaagcttctccttttcttgctcatattnttctaactttntgagtaattcattctttaaactgtcattttcggctcggacctcagccaaggagccttccatagactgaataacaaagtctttcttttctacggcaccttcgtgtctttagctatgatt

SEQ ID NO: 35271 - DNA, 343 bp, Zea mays
agctggcttctttgacgagggcgcaagcctcatttttcgtcaaaaaagctataccggtgccctggtgtggatacttagtcgagtgttatggcactgacactacgaacagcacatctatgccgagtgttacagtgggcctagtgaccagagctacctcttattaattgggttgtcattctagcccgacatacatacggaagaccatatacgctcatgcatataactgtatcgtgacatatgtcacactcgcggtcgatcgggccggttctcacagcttatccaagatgtttagacacagacttaaggacttcccactcatgaacataagtcttaagtgtctcac

SEQ ID NO: 35272 - DNA, 482 bp, Zea mays
  unsure (1)..(482): unsure at all n locations
agctnttatgctattcttatcananaaatttatgcgaggtgtgccactcttattatggngggcagcggctgtatgcaggtgatccaagtaatacaactacataaaaaggaattacaatgttcaatagcaatgtaagtagacataaccaacatcgtaaaacatgttacataactaccaaaagttagcaaccaaaaattaaataaatgtgcatacggaaaaacactatacttacaaggacaacaatggagcatccatatatagtcgtggagacatttgtggtgatccggttgtgccacttcttggcagcttcacatagatcattaaaaatcaactggcaccagtcgatctcatggaaacggtgcatttcttctgtgagaagcacctcatgatatgtgatgccccagctagcagttggaaacagcanatggtngaatagaatgaagaagaaacatctgattgaaaggtcatcatcctcgcctttc

SEQ ID NO: 35273 - DNA, 456 bp, Zea mays
  unsure (1)..(456): unsure at all n locations
tcagataacgaagccttcgcgttccanaacttagttggtgattatctaacanaagctgaaatagaagagcttaaagagtacgcccaatcctgtggatacaaacctgnggcactcctcttcggaggcgttgatgacgagaaattagagtgtattcgggaccaaacaggggccaaagttatcagtactctgtccaagagtattggattcccgaagctagaaacagacatcagccgctaccgacgacaacatgtcgttggtagtttattttactccaacttcaaggtgaatgaattgtcccttaacctttattgcttctaataaaaacatgtctgacgaaggttgtgtttgtgtagagtatgttattgagcaaagccttgcaaatgcaacaagatcttgaagataanaagcatganattataatcgganatttggaaacanaataaggagcaatcagat

SEQ ID NO: 35274 - DNA, 409 bp, Zea mays
  unsure (1)..(409): unsure at all n locations
agctngcaccctgatacattggtccatttctgattcttgaacaatgtgggccagtggcataccgactccaactaccagaaacattgtctgctttgcacaatgtgttccatgtataccaattgaagaagtgtctttgggttccaaattgaaccattgatatagtggatgttgccttggaatcagacctaacatattcagaacatcctattcgagtcctggatcaaaaggataggatcactcgaagaagaactcttagattctacaagatacaatggaactaacatactgaagatgaagctacatgggaaacccaagacttcttagaaaagaatttccctgactntttagcttcatgtaatttgtgagatatgtacaattggtttgtaaaatggaataaacccctaccacc

SEQ ID NO: 35275 - DNA, 488 bp, Zea mays
  unsure (1)..(488): unsure at all n locations
ngcaagaaacattctaagactcctagactccgcctcgatgcattngatcgattatgttagggatttgagctccgtttgagttgcgtactccctgtgctgtgttttgagctcaaatcttggcttgtgtgcgtgtgtgtgctgcggatttgagtcttgcgtgtgttgctctccctctcttactactgtgaatctcttgtgacaaaattgtaagggcacgagactcgaatctatggagattcctcgcaaacgggagagaggctatcaggaacaaagccatggtattcaagatgatcattggatcgcttgacaagtgttgagtgcaaccctcgtccatcgtgacgccacaatgtgaaagtatgcaatgtgtacttgtccgaaccacgggataaaaatctccgtgtctcttgtcgagaatattctgagattgttgtgatcacaagatctcacttttaagctacttatgtacgctactctttaatatcaatttt

SEQ ID NO: 35276 - DNA, 455 bp, Zea mays
  unsure (1)..(455): unsure at all n locations
agcttcttctggagaagagaaatcttttgatcttangcatctgggtggtattgatcttagtgttgaagagttatccgaacttatagagnttgctaggccacagacctggttccattntgtttagtggtgtagatgaagaggtactgggatttcttcctgaccaagccgaagctagaatggttaacactgtgacgaagtctatcggcttcctgaagctagagaatgagttgtgcaactacagaaaacaacataatattggtagcttagtctactcaaattttaaggtataaagtcacttatgcaatatatctttattataaatgattagattaaaatttatttattctttgactttgctgcagaagtttttgatgagaaatctttgaggctttagcatgaactggaagatcngtaaaaagagttcattatttctaaactagacgaaaaagttgaaa

SEQ ID NO: 35277 - DNA, 469 bp, Zea mays
  unsure (1)..(469): unsure at all n locations
ggtgaagattcttcatcccaacatgggctagtcggcgatgctttagccaacccatattagtcttagcaattaaacaagtgttgagttcagctatgttttcattaaaatcaactaaatatatctaatcctataacactcccttaaatgctattgaatcatcacttcttctaaagacagtaacacctaaatccgtaaaaagacagttgtagcccattttacataattgagaaactgaaagcaagttataatctaaagaatctacaagaaaaacattggaaatggaatggtcaggtgaatatagcaatttaccaagtcccttgaccaaaccttgatttccatccccgaatgtgatagctctntgnggaatcttcgttttctcgtaggaggagaacatccttttctcccctgtcagatggtttgtacatccgctgtctgttatccaacttgagcccccggatcataaacctgc

SEQ ID NO: 35278 - DNA, 391 bp, Zea mays
agcttagcatctatactgaaggtggtgaattactcaagaaacaaaacgaattcctttgaatgtatggtgaatatagtcaaattagcaacaaaaaactttatgcacgcattgttattgcaccagggtaataatatgaatcgacactgtggttaaatgctgaaccaaataatcactactacagttgcaaaattcgacacttggcaccaacgaccaggcaaataaagttgagagaaacagcccttaaacaaaaggcagaacccacagttgccagcgtactacgaccagcgccagctgcaatgctaacatatactccctccgttttttttacttgacgttttttagttcaaaaatgcactatcaggtatcaaatatataagattggaggtagtag

SEQ ID NO: 35279 - DNA, 505 bp, Zea mays
  unsure (1)..(505): unsure at all n locations
tctanaagagagncggaaggagtgaggattgttgattgagacttttaaacgagagaaacagggagaaagatgagaactagcgttcttgttctgtattgataaaatggtaattgatgtccctattagtccatacaattgtccttttatagatgtagaaatccacttgccccctgacaatagccccacatgtcagccactcctaacaccaactaacaggagtggatgatgctgatataaatgaacttggagggtggcagtacaccattgagctagaggaaggagaggagatcgttggctgccacgactgcctggcgctcgccgcgatcctttggctctatgccgtctgacatgcttggtacaacaggttngccacttatntgctctcactgtgatttggtgaaggtatagtangcgcctctatattcatctattgtcatcatagtgactctgtgtacctnctctagtgtgttgatgacattatgctcattggctctcctttgagtct

SEQ ID NO: 35280 - DNA, 482 bp, Zea mays
  unsure (1)..(482): unsure at all n locations
agcttctaaagggagagcacattntatgattaacaaatgttcattntgagaaagacaggatttgtagcgcatgccaagcaggaaagcaagttggaacccatcatccacacaagaacatcatgacgaccgacaggccactggaactcctacacatggatctatttggcccgatagcttacataagcatcggcgggagtaagtactgtctagttattgtggatgattattctcgcttcacttgggtattctttttgcaggaaaaatctcatacccaagagacattaaagggattcttgagacgggctcaaaacgagttcggcttaaggatcaagaaaattagaagcaacaacgggacggagttcaagaactcacaaatcgaaggcttccttgaggaggagggcatcaagcatgagttctcttctccctacacaccacaacanaatggtgtagtggagagaaagaatagaactctattggacatg

SEQ ID NO: 35281 - DNA, 471 bp, Zea mays
  unsure (1)..(471): unsure at all n locations
tagaaaagtctggtataaatctgtgataatatccaaccagtccaatgaaacttcggacctaatgaacagtggtcgggggtttccactccaaaatgtccttgactttgccggggtctaccgcaatccctctggcagatagaacatgtcccagaaattgaatttcctccagccaaaacgcgcacttgctgaacttggcatacaactgatgttctctcaggcgcgttaatacgatccgtanatgttgggcgtgctcctcttcattcttggagtatatcaaaatgtcgtcaatgaagaccaccacaaacttgtctagctcgggcatgaacaccgagttcatcaaatatgtgaagtgggctggagcatttgttaacccanaagacattaccagatattcatacaacccatatcgcgtagtgaacgcggtctttggtatatcttcnggccgaataccgatctggtgatagcccttat

SEQ ID NO: 35282 - DNA, 454 bp, Zea mays
agctggatgtttagaacgacatcagcttcttccaaatctttcatttcaaaattgctcgatagaagacttttaactttctcaatcacattgagatttgatccaaagatcaagatgtcatcaacataaagacacaacataatagactcacccccaccataccgataatacacacaagtgtcagattcatttacagcaaaaccagcagctgtaagagtattatcaaacttttcatgccattgcttaggtgcttgttttaggccatacaatgattttatcaacctgcacaccttgttctcttgactatccgcaataaacccttctggctgatccatatagatctcctcatccaactcgccattaaggaaagctgtcttaacatccatctgatgaatgataagaccataagaggcttgcacggctattaatgtgcgaatcgtagtcaatcgagccactg

SEQ ID NO: 35283 - DNA, 476 bp, Zea mays
  unsure (1)..(476): unsure at all n locations
tgtccatttganaacttattttggcaacgatattatactatgtggcgcgttaccgacaacaattacacaacaacaaaacaatcaatgtaattattattgatatttcgaatttattgctttcaaaattaataaatacaattctttcggatcatttatatagtgtcaaatgagaagaaaacaaagaaaaatgaaaaagaaatggaaaatgtgaatctgttaacactgtagctntatgggatgaaatttagaggacgctgctggagacggagaatatatagaggacagaatcttttagagtgttctgtaaaggacagagaatattcctttatgggacgaaatttatgggacgctgctggagacagtcttagccccttcctcattgattcaccttcatgtacatctagtgtagcactgctagagttagagttnggatcataggggcatcaattcgctgttctcccgcttagcaccgacac

SEQ ID NO: 35284 - DNA, 375 bp, Zea mays
  unsure (1)..(375): unsure at all n locations
agcttatngaactcctgtagaaggtcctagaggatataactcagtcaacatcaacgatagtggaggcgacaaccactctgcaacatatttgtatagccatgttgctaactgtaaatgcaacttgttagatcgtgtctagcagttcacccatatgatgttagataaaactgcttgagatagccttagcaatagaaagtattaaatggtcgaaatgctaattgttctaaaattaaacttttattaatctatttttttgttgttgagcggtatagttagtaaagtactcttgccacttcatgttgtacccgtttcgcgcccttagtgtcttctacagattatcgatgtaaatatcttgctcccagggccgctcctgac

SEQ ID NO: 35285 - DNA, 107 bp, Zea mays
  unsure (1)..(107): unsure at all n locations
actcctattatcgggcctagcaggaagaccgctttttacatntagtcctttttggtttcacaaatacgtctttttagtttcatttcaaagaatagaccctcagctcg

SEQ ID NO: 35286 - DNA, 487 bp, Zea mays
  unsure (1)..(487): unsure at all n locations
agcttctcctgtacaagcgccacacttaccgcagagtgcgaagctgccacatacaataacagaggagcccctagcgtgggtggagttagcgttgttagatctatcaagtattgcttcagctcttcaaaggctttctgctgagctgatccccattgaaagactttggctgattttagcacttcgaagaatggtaaatttctctctgctgatctagatatgaatcgattcaaagatgccaatcttcctgtcagccgttgagcccccttctttgtgcttggtggctccatccgaagaatagcctcgattttgttctgattagcttcgatccccttcgttggaactaaacaaccaaggaattntcctttctttacttcgaagacacattnttctggatttaatttaaggtcagcttgcctaanattagcaaatgtttcatgtagatcagcaatgtgattntcctacttcgtgctctttattatgatatcat

SEQ ID NO: 35287 - DNA, 434 bp, Zea mays
  unsure (1)..(434): unsure at all n locations
tctaaagggagaacacgtgataggtttaactaatgtgcaattcgaattagatagaccttgtgcagcttgtcaagcaggtaaacaagtgggaggagcacatcacaccaaaaatgtgatgaccacatcaagacctttggagatgcttcacatggaccttttcggacccgtcgcctatctaagtataggaggaagtaagtatggtcttgttatagttgatgacttttcccgcttcacttgggtattctttntgcaggataaatctgaaacccaagggaccctcaagcgcttcctaaggagagctcanaacgagtttgagctcaaggtgaaaaagataaggagcgacaatgggtctgagttcaagaaccttcaagtggaggagtaccttgaggaggaagggatcaagcacgagttcttcgcttcctacacaccacaac

SEQ ID NO: 35288 - DNA, 481 bp, Zea mays
  unsure (1)..(481): unsure at all n locations
agcttgtgaagattcttcatcccaacatgtgctantctgtgatgccagagccagcccatgttagtcttagcaattaagcaggtgtcgagttcagctctatcaaaatctaccaagtatagctgaccctctaacactcccttaaatgctattgaatcatcacttcttctanagacagtgacacctatatcagtgaaaagacagttgtagcccattttgcataattgagatacagaaagcaaattgtaatccaatgaatctacaagaaaaacatcggaaatagaatggtcaggagatatagctattttgccaagacctttgaccaaaccttgatttccatccccgaatgtgatagctcgttggggatcttggtttntctcgtaagaagagaacatcttcttctcccctgtcatatggatggtgcacccgctgtcgagtatcctacttgagcccccggatgcataacctacaaacaatttagttc

SEQ ID NO: 35289 - DNA, 447 bp, Zea mays
ggaaccgagggcccgcgtcaccggagaagccaaatcgcgctcaccgtagttcaagaactcgccggcgcacgtggaccgggtaaaccccttcaccatttcccgattcgttgcgcgcatggcctctgtgtcatcccgtgaagctcctcgtgcccattaattaaactctcccgccgtggtttggccggagcatgcgccgccgtcgatccccgccgcctgtgttcgtggccaggggagccccgaccacctctgacgccgacccgcacatcgacgtgaccgtcgcgacctcctgaacatcaccgaccacctcgccggacctccctcgccgccggtaagccgcgccacccttttctttcccgcggctactgtttcagttaaaggaaggactgcgggtgagagggagagaaatccagggggttaagtgaaaagtcagcgactcaagtgaatagt

SEQ ID NO: 35290 - DNA, 490 bp, Zea mays
  unsure (1)..(490): unsure at all n locations
agctngaagatgatctttgagtagccagaatcagtcgttgcaatcggcaaccagatgctcctcaaggccagattttgttgaagctctatctcctcgaagagtctgcaaagtgaagatatgtagctgaagtaaagctatacccataacccttctaagctgaatctcgaggatgaggttccttttaagtggggtagatttgtagcatcccaaaaattcaaatcttgaatttttctcanactcgctctaaattcaaaatgaatttcaaatttcatttcaaaatgtttgtttgcaagttgatatcagcaaataaaatatagtggtctatattctctccaaaatcctcctcaaatatcctacaaatatntccctagtgatccccctcanattctttccagaaatactgcccanatattccaccgatatatctncaagtattttcttcctaagaaataccttcagaatcatttntcaagtccctacaaatattttc

SEQ ID NO: 35291 - DNA, 465 bp, Zea mays
  unsure (1)..(465): unsure at all n locations
tatgaagattcttcatcccaacatgggctagtcgacggtgccatatctatcccatgttagtcttagcaatcaagcatgtgtcgagctcagctctatcaaaatctactaagtatagctgaccctctaacacacctttaaatgctattgaatcatcacttcttctaaagacagtgacaccaatatcagtaaaaagacagttgtagcccatttgacataattgagaaacagaaagcaagttgtaatctaaagaatcaacaaaaaaaaacattggaaatagtatggtcaggtgatatagcaattntacccaaacctttgaccaaaccttgatttccatccccgaatgtgatagctcgttgggaatcttggtttttctcatatgaggagaacatccttctctccccggtcatgtggtttgtgcacccgctgtcgagtatccaacttgagcccccggatgcataaacctac

SEQ ID NO: 35292 - DNA, 432 bp, Zea mays
  unsure (1)..(432): unsure at all n locations
agcttcaggaatcaggacatgaattggaatgaaaaagaaatgattagttcaaactttaagagagatggagggctcccaatcggtttaaccaagagctttaaagttgagaaagtttacctttacctccgatatttacttgaaggcacatataggataaggcgataagctttagatttttagcattttttgaggctgtgatccacaaataaaattgtattgtctatatattggaggatggataaagccccatcaactagacatgggattacaccctcgacttgaccttccncttttgcatatccccattctagaactctgcaaccattttgtcatattttctttgaatcttccctctcctactcaaatgaattacaacaagttcgtttgagtcacattcttaattgtgacacattattcanataatatgcattt

SEQ ID NO: 35293 - DNA, 501 bp, Zea mays
  unsure (1)..(501): unsure at all n locations
gagcgtcggcgcgctagctgaaaatgataccgacttatatatgaaaaggctattcacacctcagtggattactatataattattacccaatgtagagggcgtgaatgtaattttgtatgggctgtgtcccgtgtctataaataggtgaacagtacccccgtactgttcacgctgatttggcatttgcttttgcgtcacacctgtactttcatctccttccaagctgaaggtacatttgtaattcgatgttatttctgtttcttcacaataataataaggtgataataatatataattgtttatgttatccttcatattccttatgattcattcttcgtcattgtatgctgtgtttatgaaggtacgtncttcataaccttcgtccgaaaatcattatatcctaacggaaataatgcttcgaaggacgaaggactttatagaataacattntctgtgtngccttgtcttaactcatagcattngagaacaagtctccacatt

SEQ ID NO: 35294 - DNA, 444 bp, Zea mays
  unsure (1)..(444): unsure at all n locations
agcttgtggactntggcananaaatataatttaaataactcataagatcagacatgcctaatttatatgggcactgtaacaatgttaagtaccttttcaaacgagagggtgattggaaactataatgttgctcctgctgagtatgttcaggtatgacaatgccaaccatctttgccatagaaaatagagttgtgagagttttctttctcgaagtgccaataacccacccccacatagagaaacttccactactccaaaatagatcagtaaagacagttcaataaataggtcatcanaataactttacaatgcactaaacaaatagagatatattcagaaacaacagcttcatgtacctctcatgtaaggccgaatatttaagttgccaggttcatgtggatttaaaggtgcacatactctccagtatttttaggtggatgaaca

SEQ ID NO: 35295 - DNA, 469 bp, Zea mays
  unsure (1)..(469): unsure at all n locations
taccattataatggtagcgttgggggtcttgggcatcaacatttctttgccgaccggtcctgttatctggacgttatcacctggctgcagatcacctgcattatgatatgagcacgcacaggggaacaagctagatcagatattcgggtgccaatcaagtcagatcaggatttgtagaagaagattgtgtgctgacctaccgcggcggccgcattcccgcccttatcctcctatctgatggcacgcggctcccgcctctcctccgaccctcctccgcctccgcatcatcgtccgagccacaccgcctggtgtcctcggtggagcagaacagcgcctttcgcgccccgtccctgccgccaaagcgcagccacgatggggactgcgagcccaggcggagcgctggggaaccaccaagccgaagcgcanagggcatggcagcgacggcgtcagtgacggtgagtgagagcct

SEQ ID NO: 35296 - DNA, 481 bp, Zea mays
  unsure (1)..(481): unsure at all n locations
agcttaaacaagtttaaatctctaagattctccttttatttattntattaaataaataaaacatacatctacattagttcatattcaatcctaaaacttagagtgtgcagacagtaagtgaacctattttatttaaacagataataattctatgaacattttgcaatttgaatcactaaatttggagttcatatgcaaaagttatgaaataaacaattttgggaattcaaaatatgaaattagggcaaattctgtgaatatttaattgtccagggctaaatctgcaacacaacagccacgcaaaggggtatcgggtgaatctaaccgtcagatctaaaaccaacggctgagattagatctgcggtcgagggcgcgcgcgcgagcgggcgagcgctgacaggcgggccaaggagtgtcagcgacagtgggggagagcgcgctgaccgagcgggcccagcaccagaggggttgggcgctgaca

SEQ ID NO: 35297 - DNA, 478 bp, Zea mays
  unsure (1)..(478): unsure at all n locations
acacaaaatctcagcttggtagtaaccggcttcatctganaccttggaaactggtgttctgcatgtccttcagcttctgccatgatgtgattgttcctggccgaagagagcagtaccaggtttgcgcaacattcttaactgccatgacgaaggatttcaccatgattgcggtattgcccccatacgaagatatggttgcttcgtagctcatcagaaactgcttcggatctgagtgcccatcatacatggggagttggggtggcttgtatgatgggggccatggngtagcctgcaattctgctaacagaggagaagcatcatcaaaagcaaaatttccatgatggaagtcatcataccactcatcatcatcataggaattgtcttgacaaagctctctgcgttgaggtcatcagtcctggtcatcttgagtgagatgacgcatttcctcagcagcttcgtcgatcttcttctgtagatc

SEQ ID NO: 35298 - DNA, 444 bp, Zea mays
agcttctaaagggagagcacattctatgactaaccaatgttcatgttgagaaagacatggtttgtagcgcatgcgaagcacgacagcaagttggcgctcatcatccacacaagaacatgatgacgactgacaggccacttgagctactccatatggatctattcggcccgatcgcttacataagcatcggcgggagtaagtactgtctagttatagtggatgattattctcgcttcacttgggtattctttatgtaggaaaaatcacaaacccaagaaaccttaaaagtattcttaagatggactcaaaacaagttcagattaacgataaaaaggataagaagcgataatgggacggagttcaagaattcacaaatcgaaggatttcttaaagaagagggcatcaaacatgaagtctcttcaccctacacacctctacaaaatg

SEQ ID NO: 35299 - DNA, 333 bp, Zea mays
tggccatcgctgtctcaagaccatacacgcgtcgcggatactctgtttccatccccaccacttgggcacttgcactcggaagaaacaaaaagggaggcgcttccgagaaaacgctagggggacgcacccatgtagtgcaggactctgacccagtcactcaaagcatcgagggcctctgcgctgtctctccgagctcgcgcgcgtgcgcgcaattcatccgagccttggccttatcatgctggatcgacacagtactagtaatgccttgtgattctactttactcgctcagaaatgtatgacttctgcgagcctagaagcatgctgatcatatg

SEQ ID NO: 35300 - DNA, 471 bp, Zea mays
  unsure (1)..(471): unsure at all n locations
agcttagcaagtgtgagttctggatcagtgaagttctgttcttaggtcacattataaaccgagagggattggctgtatatccgaataacgtaacaactatcttgggttggaaagcaccaaaagatgtcagtgaaatcatagagtttcattggaatgaccgattattatcgacgtttcattgaaggtttctccaagattgccaggctaatgacagccttgttggcaaagaaggttgagttcaagtggaccccagcatgccagaagtcctttgagacaatgaaagagaagttgacaacggcaccaatactgattctgcgaaatgttcacaagtcattctcagtgtattgcgatgcttcgttcaccggactgggatgtgtgttgatgcatgaaaggagagtactggcatactcgtcccgacagttcgngaattatgagaagaactattctactcatgatctggagttagcaacc

SEQ ID NO: 35301 - DNA, 443 bp, Zea mays
  unsure (1)..(443): unsure at all n locations
ttacggacctatgaatactaagcttanaaggctctgtcaggcgtctgaactgaacttcgccatggtacagtaactcaattggggatcagatcgccgcgaccaanaaaaatctcaccgccgacgaccaccgggcgcgggttcgcgtattgggtcaccgtgattcgtgcggaccgtgtggataacgccgcagggaaatggatcattgccgccggtgagctgggtaccacctcggccagccgtggtactcctctccttgttcaccgatcgtgcggatgaggtctcaccgctgttgagtcatccctgccgtccgccgcgtgtccaaacaccttaccacgtcgcagctaaccatcctatacctggccggtgatcgccggaggagctgccaccgtgaaagccatatcttccacgcgccagtactattgttctctccgaccgccagcaca

SEQ ID NO: 35302 - DNA, 337 bp, Zea mays
  unsure (1)..(337): unsure at all n locations
tgctcatcatccacacaagaacatcatgacgactgacaggccacttgagctacttcacatggacctattctgcctgatagcttacataaacatcggcgggagtaagtactgtctaggtattgtggatgattattcttgatcacttgggtgttcttgttgcaggataaatctcacacccaagagaccttaaagggattcttgagacgggctcaaaatgagttcggcttaacgataaaaaagattataagcgacaacgggacggagttcaagaactcacaaatagatngtcccttgaggatgaaggatcaagcatgattctcttctcctacacccacac

SEQ ID NO: 35303 - DNA, 391 bp, Zea mays
agcttgtgaaggttcttcatccccacatgtgctaagcggcgatgccacagccagcccatgctagtcttagcaattaagcatgcatctagaccagcctcctcttttgcaaaatcaactaaataaagtttgtcgtctagtacacccttaaaagctaatgaaccatcacttcttctaaagacagacacatctacatttgtgaataaacaattatatcccatattgcataattgactaacggataacaaattatatccaagcgactcaactaagaacacattataaatagagtgctcggatgaaatagcaatttttcctaaccctatcaccttgccttggttcccatcaccgaatattatagaatcttagggatcccttgtcttgacgtatgaag

SEQ ID NO: 35304 - DNA, 398 bp, Zea mays
  unsure (1)..(398): unsure at all n locations
ntatcaaatggacgtgaagagtgccttcctctatgtgccaatttaggaagaggtctatgttgagcaacctcccggctttgaagacagtgagtaccctaaccatgtctataagctctctaaggcgctttatgggctcaagcaagccccaagagcatggtatgaatgccttatagatttccttattgcaaatggcttcaaagtcggcaaggccgatcctactctatttactaaaactcttgacaatgatttgttcgtatgccaaatatatgttgatgatatcatatatgggtctactaacgaatctacatgtgaagaatttattaggatcatgacacagacaattgagatgtctatgatgcgggagttgaagtattgtctatgattccaagtcaaacaac

SEQ ID NO: 35305 - DNA, 443 bp, Zea mays
  unsure (1)..(443): unsure at all n locations
atcttaagcgactgggctgcactggnatttatgctactgccctttattatagtgatcaggatcaagggaacgggagggagaagaataagaactataacaaggcaaagggcgaggcacatcttggcaaggagtgggatttggattgctcctcgtccgagtccgacaatgaaggactcgccgccaccgccttcaacagtcatccctcttccccaacgagcgtcacacatgccttatggcaagggagaagaaggtatgtactcgaaactctacttatgcttcttcaagtgaggacgaatctagtgatgaagatgaaatagattattcatgtctatttaagggcctagatagaaccaaggtagataaaattaatgaattgattgatgccttgaatgataagaatangcttttaaaaaacaagaggactngttgtatgaagaacatga

SEQ ID NO: 35306 - DNA, 439 bp, Zea mays
  unsure (1)..(439): unsure at all n locations
gatgctaacgacctgcagtattcttgaaagcttantaactgaatattcctacagttaatctgtacgtcagccactcaaagcacacttaccgntagcgatcccattgaagagcagatacccagatatatcaggatgttagtctgaccgtatcgaggttcaaagaagagtactagcgctcccacaagtaacaatgctgtcaccacatatgctagaaaccctgccaatgatcgacaccccaggatggagagattctgtgagaactgcagctccagcgaactgtcatgcgcaagactgggttgcaatgactcacctggttgagtagctaggttccagatttccttgacagagttaggcatatgctcttcaggagcatgcatgacaacaacaactgaacctactatgcacgacacacagccaaggaccccgagcttctcaagcc

SEQ ID NO: 35307 - DNA, 363 bp, Zea mays
  unsure (1)..(363): unsure at all n locations
catgcactgcatggctggactttttcaaacaccacatgctttaatactctaaccatatctttctttaataccttcttgagtgtgctcataccaacatgtgcaagcctcctatgccttaaccatactatcgaagctttggttaacaggcaaattcttaagtctgcatcttctgaaatgaaatccactaagtagaagttgttgtacctaatacctttgaacaccattgattcatcatccatctttgatacaataaccgttgttggagtgaataagcattgaatgtcaagatcacagagttgacccactgataataaatcgaagctcanaggtgcaactaacagaacatttgatatcgatccatca

SEQ ID NO: 35308 - DNA, 237 bp, Zea mays
  unsure (1)..(237): unsure at all n locations
acaccccaaactaagctttgtcgattggaaagattcatcactcgcgccgcttgtaataatgcctcctctcgaagnggctcgaaggttgaaaacttggatgacttccatgtcgggtggccgtaccncacctaccctcacctcccccacacttacccattcacctcttccctctatctcaccacacttacatctccttcatctcctacatctcaactctcccatacattcacctccctt

SEQ ID NO: 35309 - DNA, 345 bp, Zea mays
  unsure (1)..(345): unsure at all n locations
acactcaagctccatactcngctgcattgttagaggccgggaacagcaactgtatggtgtactttaggagctcgcctccaggtgcggtgaagagaattcctgctcctgcttcctgcatcttcaacgagccctcaaaatacattcgccgtacttctgcagcttctggattatctggtacttgctgttctgtccactctgatacgaaatcatccactgcctagagttttgatggcaacgccaagtccgaactctatgttgtgggatcccatctcgcaagcccacttggctatacagccaacggcttccttgttgtgaagaaagttccctattggaaaaccaatgact

SEQ ID NO: 35310 - DNA, 447 bp, Zea mays
  unsure (1)..(447): unsure at all n locations
gcttgacaatgagaaaatggcgctcatcattaatagctttcgccaaatcctcaagcagaggaaggggaaagattacaagccccgttccaagaaggtttgctacaaatgtggtaagcccggtcattttattgctaaatgtcctttatctagtgatagtgacaggggtgaccaccagaagggaaagagaagagaaaagaagaagtattacaagaagaagggcggtgatgcgcatgtttgccgggagtgggacttcgacgagagctccaccgactcctcctccgactaagatgctgcaaacatcgtcgtcaccaaagggcttctcttccccaacgtcggccacaagtgcctaatggcaaaggactaccagaagacagtcaaatctacatcctccactaagtatgcaacttgtagngatgaggataattctagtgatcaccaagataactt

SEQ ID NO: 35311 - DNA, 403 bp, Zea mays
tcctcaatggccctatcatagaacaggtctatgatgagcaacctcatgtctttgaagagagagagtaccctatccatgtgtacaagctctcaaaggcgctccatgggctcaagtaagctccaagagcatggtatgaatgcatgcgagattgttgaaaggaaaatagggttaaccatgtcctataattaacttcggtggttgagcagtaccacaaactcatggactaactagttatgtgtagaattcatgtattacaggtacataaggttcagcacaaaccaatacaagagtcaatttacggacataatatgaaacagagcaaataactcgagagtgctgaaaggtggcgcaccgtactgtccggtgaacaagttcatcatgtgcaaccaacactcttggaaaa

SEQ ID NO: 35312 - DNA, 285 bp, Zea mays
  unsure (1)..(285): unsure at all n locations
cacaccttacttgttctgttttatgaccggagccccggtatgggcagccctgacgtctgcacgcgctgcccncccatttaatgctgcgcagggagccgtaggcgccgcacagagccgatgctccgctggcacaccggacagagctgagcacaccggacagtacggggaataataacggagcggctgtcgtgaataccctaagatgacgagatccggacgccgtgggtcgtgggcgcaccagacatgtccggtgcacaccggacagtccattgatacataacgcgc

SEQ ID NO: 35313 - DNA, 470 bp, Zea mays
  unsure (1)..(470): unsure at all n locations
agcttcagncccttggcagggctctnntggtgtttatctcttgatatcaagggagggaattggaggaggcatgctatatcttttctacagaggagcttganngagattcaaagatacctggacaacaaccactgcctaactttatcaagaaagattcgtggcgcttgctttcgacattgaagatgttatcgatgagtttatctacaagatggaggacaagcatggcagttttgctacaaagatgaatcgtcggattaatcgtatttggacatggcgacgtctcacgtccaaattgcaaaagatcaaactgaaactagagaatgttgataagagaaatgttcgatatgacatgagaggaattgctagagaagatggaagcagtgatgctcatcatagatctaccgaccagatttcttacttccccaaagaggaaaatcttgtgggcatngatgaaaacaaggagttattga

SEQ ID NO: 35314 - DNA, 449 bp, Zea mays
tacccatgaagaggcatgtgaccaggtaaagggttctctttcatcaagcctacatcgacacgggccttaatcgactcagacggagacactacaccgagactctctttatcgtgcaagtcacccgcccggtctcagctttatcatttcaaacccaaagtttggtacctagcagaggtacatattttccgatgttgaacccatcatggccatgatggatccaccatcaagttttattttcgaaaacatcccacccactttgaagcatcatcttttatgaaaacaaaaaaatttatttttctagagcaaagctaagcataagaaaaaccttttgtaaaacaaggatttaaggagaagtaatcaaatccaaggaaggaaatgcatgaattggtttagcacacaacttctatcacctaatgcatcaagcaagtgagaaagatctaaaaaggaac

SEQ ID NO: 35315 - DNA, 420 bp, Zea mays
ccggatccttaagtcacctgcggcatgcaagcttgacccgtggacccgcgtcaccggatatttttcaatcgtgctcaccggagttcaagaacccgccggcgcacgtggaccgggtaagcccctgcaccgttttccaattcgttgcgcgcatggcctctacatcaccccgtgaagctcctcgtgcaccttaattgaactataccgccgtggtttggccggagcaggagccgccgacgacccccgccacctgtgctcgtggccagggtagccccgacgacctccgacgccgacccgcacaccgacgtgaccgtcgcgacctcccggatgtcactgaccaccccgccggagctctactgccgccggtaagccccaccgccgtaatctgtgccgcgggtactgtttaagtcagtcagggagcac

SEQ ID NO: 35316 - DNA, 412 bp, Zea mays
  unsure (1)..(412): unsure at all n locations
tgatagtcaatgcacatcctcttcgtgccatccttcttctttattatatcactggggctgcccaaggcgaggtactcggtctgatgtagcctttctctgacaactcatcaatctgcttcttgagttccaccaattctggtccggacacttgataggctctcttggaaataggggtggtgcctggtataagctctatggtgaattcaaccttccttttaggtggcatacctagcaactcctcgggaaacatatctgggaattctgatactacattcatagcctctgatggtttaatctcctcaatatgggaggtgactnggtgacaacttccttcccttggtctatgcaagaccaactctactaacactttttctcctgatagggacactaacttcaccattctcttgtcact

SEQ ID NO: 35317 - DNA, 440 bp, Zea mays
  unsure (1)..(440): unsure at all n locations
cacctgaggcatgcaagcttgagcaaaatgaatagctgccgntgtttattactaagcaagctttggctatgggcaaatttttggcaacaaaacagtgcaatagcaatgaatgatgtggtaacttcacacctgcccgtctgtttatatagtgccgcacgtgggaaggtaaatcatcaagtcttccacaccggacaaacagtcacccgcacccactgaacggtgggccacagagcccaagaaggtgaatcgccaggacgcgcgtaactgctgcatggcggggccaccttgcgcttggattattataatctgttctcagcaaccagctcagggaaggtgtttttcggatcttcggcatcccgaagcctaagagactntttcacggatcaagctcgttacgaaaaaccatctancatcgtgaacgggctactgctgggggtatg

SEQ ID NO: 35318 - DNA, 436 bp, Zea mays
tcagctccatctatattgtggatagctgttgagtctgttcaatttccttcagcctttctggcagcttcctaacttccatgaatagcaataggcccttgatccgaaggtatcttcatacatagatatgctggatgaagaattgcttcgaatgcgttgagtgttccacgaccaatgattgcattgtaggggtattccatgtcaacaatatcaaacacaacatgtttagttcttgtattgtggacaaatccgaaggtcactggcattgtgaccttgccaagcgctacgatctgccttcctccgaaaccacaaagagggtgtgtagcatcatggatattatcctctggctcttgcatttgtctgaaggccttagcaaatatgatatcctgtgcactgcctgtatcaacagacattatggactgaaatcccttgtgacaca

SEQ ID NO: 35319 - DNA, 419 bp, Zea mays
agcttaataacaatataggtcagttacttttctacttataatgatcttagatcagatggtgcactttcacttatccacttcaatctttttacacaaggactaatttttagacccgactagtaactacgtatgtgaatccaagtagatgtatacgatggggaaaaaagactctatttggttctaataaattaggagggattaaaaggtaatctaataatgaagcgaaaacaacgatttcagctcagggatccaaacaagttgtaatacccaaattgtaaataatgagaatagaaatgacctcttatgtgttttgcctctatttgtggtaacatgggaacaaccatatttaaaatggttaattggctaataacccttaaataaactatgcatcatgtcagagtatctttgtgtgtgcattt

SEQ ID NO: 35320 - DNA, 453 bp, Zea mays
  unsure (1)..(453): unsure at all n locations
tcagctccatctatgttatggattgcttctgagttatttttgtttttctctgcccttctggcagcttcctgacttccatgaatagcaatgggtccttgatccgaaggtatcttcatgcaaaggtaagcaggatgaagaattgcttcgaaagcattgagggtgccacgaccaataattgcattgtaagggtattccatgtcaacaatgtcaaacacaacttgctcggttctggtgttgttgatgaagccgaagatcactggcttagtgatcttgcccagtgctacaatctgtcttcctccgaagccacaaagagggtgtgtagcatcacgaatcttgtcttctggctcttgcgattgtctgaacgccttancaaatataatatcagctgcactacctgtatcaaccaaaacattgtggaccagaaatcctttgattacgcacgaaataaccata

SEQ ID NO: 35321 - DNA, 315 bp, Zea mays
  unsure (1)..(315): unsure at all n locations
agctntaccttgattctaacagaccagctttctcttgagagtttttntaggcgggtaagtcttgctgagtaattgcatactcactgttttattcccattgttgttgtaggagagactattaacatctttgagttttgctgaactcacactggaggtttttacttttatttatgtttattatgtgtgtattgggggaagatggcttcttcccaggtgttgtaataagttagcacatgaatctaccccaagcatgtaataataatacctactacttggtttgtataatttaaaagtctactgatatatattatctta

SEQ ID NO: 35322 - DNA, 305 bp, Zea mays
cggacactataaaactcaacttgtgtggagtgggagagattgatctctttggtgtttctgcaatgaatgctagctcttgtatagtagttggaagctggaaaacttggatacaatgaatggtggggtggttggggtatttatagccctaaccaccaaacatgaccgttggtggaggctgtctgtcatatggtgcaccggacagtccggtgtaaaccggacatgtccggtgcgccagccacgtcaccaatgccgttgggattcgaccgttggagttctgacttctgggcccgcctggatgtccggtg

SEQ ID NO: 35323 - DNA, 427 bp, Zea mays
  unsure (1)..(427): unsure at all n locations
cttatactctgtgcttagtaaagcgaatttttgctattgaattgggcttaacccaagggtatcgcctctgtaactacttagatcttgtgactgggtgcgcccaatgcaattctgaagatgagtggcaagagcatataccttaagcaggttacacacacaatggacaccaacgctagaacacccaccaagcagagcatttatcaatgaagaatggcaacaactctggcgccatgtatatggttgtctgtggatccatgttcaaaacccttgctgcatttgatgaaacaccacttgagcagcaatagaatctgatgtatgcttgcttgcaagagtcacacatggctaccgaatagggcttgacgagcttcggaatgaggctcgagagatagatggntctttcttcagatgacgatgatctgtgatgcct

SEQ ID NO: 35324 - DNA, 272 bp, Zea mays
  unsure (1)..(272): unsure at all n locations
tagaaaactaagctttgcatcgaaanccttcttctctagatctaagnttaangatttcgtggagagctcactattgaagctagcaatctcggcctgggcttctgccaacgaaccctccattgtttggatcacgaaatccttcttctccagagcagcttcgtgatctttaatcttgccctctaaacagtccggtgcgccatgcgacagcagcctccaccaacggctcgtttggtggtggcaatattcctttctggcaacacttatttcaattc

SEQ ID NO: 35325 - DNA, 397 bp, Zea mays
  unsure (1)..(397): unsure at all n locations
agcttgtcaagcatatgttggtactcatcgtttgtatgggctgctaagggtagtaagcaaagatctatgaacccaanagtnccttgtgttagcactaggtaaactcattacctttctagcacaagttgcaatcttgggttgcctagctacatgaaaatatattcacaagctaggagtgaaattgttaccaatgggacaatccttgcattgatgtccctttcttcggcatgtgtagcataggcgtttttcaagttttgaaagtttcttctttccttgcttgtcgcctgctacatggttagtaaaaatattcttttctaaccctatgcctctntgttttaaatggggacaagatctaagtaagtgtcccttcttggagcatataaaacaaagtctatca

SEQ ID NO: 35326 - DNA, 308 bp, Zea mays
cggcgacaaagatctatggacccaaaagtcctttgggttagcgcttgggcaactcattacctttctaacacaagttgcaattttgggtttcctagttacatgaaaattaattgaccagcttagattgggggtggtaccaatgggacaatccttgcattgatgtccctttttccggcctatgtaacaaagtcgatcctcaaatcttgaagacttcttctttccttgtttcttgcttgctacatggacagttaatattttcttttctaaccctaagcctttttgtgtcacatagggacaggatttgatta

SEQ ID NO: 35327 - DNA, 377 bp, Zea mays
  unsure (1)..(377): unsure at all n locations
agcttattctctctgcttagtaaaatgaattttggntatggaatcgggcttaacccacggatattgcctctgtagctatttagatctagtgactgggtgcgcgcaatccaatcatgaagtttagtagcatgagcatataccttaagcaggttacacacacaatgagcaccaacgctagaacacccaccaagcatagcatctatcaatgaagaatggcaacaactctggcaccatgtatctggttgtctgtggatccatgttcaaaacccttgctgcatttaatgcaacaccacttgagcagcaattgaatctgatgtatgcttgcttgcaatactcaccatggctaccgaattgggcttgacgagctttggaatgag

SEQ ID NO: 35328 - DNA, 453 bp, Zea mays
cactcaagccttgatagtgaccctaggcatcgaatatgatgagctccaccactggtgaagggtgcaggaggagaacaagaggatggtgaaggcgaggcccaagccaacaccgacaaggcagtcccagaagttgtggcggaaccgcccgaattattacgacttaagtgcctaagtcccgccttagaggctagaccacacttaaataggaataacccgtcagtccctcggatctagtccgataaagccacttatccaggatcgaataccactagctcactcgaaggtgaggcacagagaaatacaataaaacataataccacaaatttaataagtataaccagtgattacattatcggagtttcagaaataataaccataaattttaatgcagcggaaataactaacggagaaaaccgagtaacatggcgaagcctggccacgctactcctcctg

SEQ ID NO: 35329 - DNA, 446 bp, Zea mays
agctttagggtaaaagtcacaaaatgacctttttttaaacttgaatcacatttatacccctgggataccagaaaccctaattggaaccctggaaaaccctaaaaccaaatcctagggacttatgtgcaaaagtgatgaacctttggactaaagtgtaaaaactactatgtttaaacatataaagtcatttggttcacaaatatgtgaatttgcaagttaaaccctaagttttgggcttatttgcaaaaatcacctcttaagcactatagagcctaagtctgaaattcagtttagttggttcaactttggagccctgtatcttctgaaatatagggtttttgccctaggtcaccacaccaaatttgtaaagcaattataggagagcaactttgtttaagggttcaagtcatgttcttgtgaaaaatctagagataatcatgctcaaa

SEQ ID NO: 35330 - DNA, 448 bp, Zea mays
atgattaagctgagaccgggctagtgacttgctctataagagagtctcggtgtagtgtctccgtctgagtcgattaaggaccgtgtcgatgtaggcttgctgaccgaggaccctttaactggtcacatgcctcgtcatgtgtaagctttgcctcgggtagactaaggccagaataagataacatggaatgggcgtggagcggtggcgagagtagcgtgtaccctccgtggcaagaggctggacggtggtgtatctgtgctctcggttggcgtgaacctgatctggtcttaagaaccctggtggcgggttgacatatgcaagggttaagtgctacatatgtcgtgtgattggagatccttagctgagtataatcgattcggatcaccgtaccttcgcgggtatgaagacttggtcactaacttacacgtagcaatccactaaagatgat

SEQ ID NO: 35331 - DNA, 441 bp, Zea mays
agcttgtggcgccctcgggcgtcttgccgctttctaagcaccaagtctcctacttggaggtctcagggccgaacccctcgggcgtggtagcatcgcagaggctgctgatatcgtgccgagtgtagcaaggccacgtcccgagcttcttccagctggtccagcgagtcttctcggctggtctggttgctttggtcgtcgtacgcccttatcctcggggaaccgtattctaagtttgtgggcaacatagcctcggccccatagactagaaagaacggtgagaaacccgtggcccgacttggcgtcatcctcagactccagaccaccgagggtagttccttcatccaccgcttgctgaacttgttgaggtcgttgtagatcctcggtttaaatccctgcagaatcattgccgtggcacgctccacctgcccatttgtcatgggg

SEQ ID NO: 35332 - DNA, 386 bp, Zea mays
  unsure (1)..(386): unsure at all n locations
ntaggctactaaaacctctatagtgggtcattccgcacctgataagcatcttcaagagcctgngaatcatccatggggaaaaagtcttagcttgtcagcacatcatacatctactccattgaatcaaattgctatctaacaagaatatggattgaatcaagctgcagtgaaaacctggaacttctcggctgcgcgtgggtcgttgggatgcttgtcagtatgcatgcacctgcctggtctaaaaaaacgaaagaataacccanaaacggaagaataacccttaacaacagtacaacactcgaagatatacaatactcccccaaataagtaggaaccaaaaggtgacgtcgagcatgtcgtagtagtcctactccttctccatcatc

SEQ ID NO: 35333 - DNA, 437 bp, Zea mays
  unsure (1)..(437): unsure at all n locations
agcttgtccctgaactcacctgaccttttttatatatgatattggattntgttatgtgttctatttattttacctaattctttagtgaaaacatgtgtcatggagctttgttttaataggtgtactcaacttcaatggcaatgcttttaacgatggttttatctatatatcttttcagtgtgaaagctacaattcaggtgctatactatggctatattgttactcctgttccattggggtggttgtagtttcttatttgtactcacatgctttaaccttttttttttgcagctcttcttgggcattatcatttgtataatttccctgcagatgtattttatgcctgtgcacatgcttattgagttgccacaaactttgcctgtaacatcaaagtaggttcatggcattgttagctaacccattgatcagctgagggt

SEQ ID NO: 35334 - DNA, 461 bp, Zea mays
  unsure (1)..(461): unsure at all n locations
ntntgcgtcaggcttcagaccttggcttctcacggcccacacgaagatatttagccttataattgcctcgggggtaagttgatggagatagacttcgaatattttcagtacctccacaacgaagctgctcaagggaaatcgcagcccagccttcaaaaagcttcggtacactacgacttcattctcttcagggtgtgggcaagttttttccccttcgtcggccctcacaatggacaaatcccggaaataccttcctctcatgttgacaagatgattctctttaatagttgatttaccataaactgaatggcttggtcgccagggacgatcttcggagtcctcgccaccactgtccacatcatagctgtcactgtcaccagtatcttctgacaaaccttgcagaatctctttggtagatttttctgtattggtctttgacatcgctatgagaaaccccaagt

SEQ ID NO: 35335 - DNA, 450 bp, Zea mays
  unsure (1)..(450): unsure at all n locations
agcttagtcaattgaatagaagaactaattttataaaagttagaagttatggcgcctttaagaaggaaccaaacaaaaccaaaagatttagaaggtctaggtcatcaggagttggggctcattggggcttgtaatattataggttatatataattaatatatgatcgacaagatcatcgggtgttagggctaattggggcttgtaattttatgttatatatacattaatatatgatcgacaatggatatatagtattaagtgcatatatagtattacgcataatgctaagatctcatgactattgtagaaatactagcgcggngacctaactttttgcaatttagcctatnttatgttttattttcataaatatgttcttttcagttntattttanaaaatagactcatagatcgacgccaacactattggcgcctagcatccacgggtc

SEQ ID NO: 35336 - DNA, 459 bp, Zea mays
  unsure (1)..(459): unsure at all n locations
cactcaagcttcaaagggtgaacacattntgngattaacaaatgttcattttgagaaagatttgatttgtagcgcatgccaagccgggaagcaagttggcactcatcatccatacaagaacatcatgacgactgacaggccactggagctcctacacatggatttattcggcccgatcgcttacataagcatcggtgggagtaagtactgtctagttattgtggatgattattctcgcttcacttgggtattctttttgcaggataaatctcaaacccaagagaccttaaagggattcttgagacaggctcaaaatgagttcggcttaaggatcaagaaaattagaagcgacaacgggacggagttcaagaactctcaaattgaaggcttccttgatgaggagggcatcaagcatgagttctcttctccctacacgccacanacaaatggtgtagtgga

SEQ ID NO: 35337 - DNA, 444 bp, Zea mays
  unsure (1)..(444): unsure at all n locations
agcttgacagtcgattgctcgaagctcagttatggatcgcagtctattcgcgacgtgcgaggaatacaaacaggcacaagcaaacgtatacttacataagaacattacaccatacaagataaaatattataaaagcgagcaatataaaatagtaagcgcttctacagttatgcaaggaaaataactgtgatagtcgaagctacggtcgaggggtgagcgtgtttacactaaacaagtattaattataacatttacttcaacattatcaaatataaataatatctatcatttagctcgattaatcttctatactaaccaatgtcagttaaacaagtaatttaattaaaatgagagagtctaagcgaggcgaatntatgacgcgtgaaacagcacgacggtgtgtaaccgatacgcggacacgcgcgacaggcgtgagaactaaat

SEQ ID NO: 35338 - DNA, 375 bp, Zea mays
gccctcaaagccctcaaaggcaaaaaccttggaaagtgaggcacataaaataacaaagccaactctcgctgaaggaactggagttgttacccccgaagcatccaaaattcacgaatatatttttcgacaagcctcggggaaaaaattaacagaaaaagaagaacaagacgcccaacactatgcccaaaagttgaaatatccaaagggggcgccgatatttaatggcagcggaaaacaagataactcgtattgcctccccgacagcaaggaaatttctgtctgtctggagatgagcacaacgctcagaattccaaccttagaagacggactttccgtgctgtcaagaacgatctggctgacaggctatcctacaac

SEQ ID NO: 35339 - DNA, 448 bp, Zea mays
agcttatgaagattcttcatcccaacatgttctattctgcggtgccagagccaacccatgttagtcttagcaattaagcatgtgtcgagttcagctctatcaaaatctactaagtatagctgaccctctaacacacccttaaatgctattgaataatcacttcttctaaagacagtgacacctacatcagtaaagagacagttgtagcccattttgcataattgagatacggaaagcaaattgtaatctaatgaatcaacaagaaaaacatttgaaatggaatggtcaggtgaaatagcaattttacccaaacctttgaccaaaccttgatttccatccccgaatgtgatcgctctttggggatcttggtttttctcatatgaggagaacatccttttctcccctgtcatatggtttgtgcacccactgtcgagtatccaacttgagc

SEQ ID NO: 35340 - DNA, 448 bp, Zea mays
  unsure (1)..(448): unsure at all n locations
caatttcatgattgttggtgctcaactcttatctctaaaattccaatagtccttccaagagcacctttaattcacttaatattttataactgccttaaaatcctaaatctaactttaccagagagctcatgaatctagacatccaacaaaatttgtcttgctatttttggatttctctacaatttttggcaccctttcaaagctctcagacaaataataaagggaaacgatttaagcctatgctgactccggcccacacgacccactaccaggccaaagtctgcctgcggccaggagcccgcgcgttcacacacccgactttgcacggaggcccttggcttattgagaactcaatcaagacccacggccactatttctctgtctctctgacaatacaccgagatccctgactntatcctncttcacatagtcaccccctcaaagggac

SEQ ID NO: 35341 - DNA, 442 bp, Zea mays
agcttgctgagatcgcaaacgtgcgaatcttgtctaatatccggcgcagacctcttcctggcacctatggctatctcttgtatgtgagttccaagggaagataagccctacgtcaaaagatatgcggacgccaaatctggcttgtctccttgcccgctgcgcgacaaaagtgatgccaagacatgtcaaacgtcaagtgctcggtctccactttttccagggtgtgccttacgtggtatgccacatttttggtataaaactaacgtggttctggtgccatcttcaaggtgaacatggtggatctttagattatgtgtagattttgacttacagagaattagagagctctagctctttctctacttaaagaatggatttggggtttcttaacgggtctttttgcaatgtttcctttccatatcttgtgatcaatatgtcactt

SEQ ID NO: 35342 - DNA, 438 bp, Zea mays
  unsure (1)..(438): unsure at all n locations
tctanagggagatcatgtgttaggactaaccgatgtctgtttttagaaagacagaccctatgcagcatgtcatgcaggggaacacgtgggaagcactcatcacaacacgaatgtgatgacaacatcgagacctctggagcttcttcacatggatctcttcagacccgttgcctaccttattatcgggggaagtaagtatggtcttgtaattgttgatgatttttcccgcttcacttgggtattctttntacaggataagtcagaaacccaagggactctaaagcgcttcttaatgagagctcaaaatgaatttgagctaaaggtgaagaagataagaagcgacaatgggtccgagtcaaaaatcttcacgttaagagnttctcgaggaggaaggaatcaagcacgagttctccgctccctacacaccacagcaaaacg

SEQ ID NO: 35343 - DNA, 453 bp, Zea mays
  unsure (1)..(453): unsure at all n locations
agcttgatgtttagaatgacatcagcctcttcatatctttcatctcgaaattgctcgatagaagacttttaacttcctcaatcacattgagatttgatccaaagatcaagatgtcatcaacataaaggcacagcataacagactcacccccaccataccgatagtacacacacgtgtcagattcatttacagcaaaaccagcagctgtaagagtattatcaaacttttcatgccatttcttaggtgcttgttttaggccatacaatgattntatcaacctgcacaccttgttctcttgaccatccgcaatgaacccttctggcggatccatatagatctcgtcatccaactctccatttaggaaagatgtcttaacatccatctgatgaatgataagaccataagaggctgccacgactattaatgtgcgaatggtagtcaatcgagccactg

SEQ ID NO: 35344 - DNA, 455 bp, Zea mays
tctggtggtggtggctctcgtcgtcaagcaggatgggagttatgagccggcggcggaggtgaatggcggtggagtaccactgctgctcggcggcctttatcgagcacatcgtcatcatcatcgtgctcgtgctcttcgcgggcctcatgtcgggcctcaccctgtgcctcatgtcccttagcctcgtcgatctcgaggtcctcgccaagtccggcaccgagcaggatcgcaagcacgcaggtaccctatcctaccgtcgccacccgtgtttctcgggggggggccgtgtcccttctctcgtctataggtcaataggtgcgatgtcatgttgcgccgggggcgtctgcggcgcctgatttggatgtactgttggtcagatttcactgcgctggtacacgagttggcttgccattccctctagcgggtccagggtgccgggtcgatccatgaataat

SEQ ID NO: 35345 - DNA, 422 bp, Zea mays
  unsure (1)..(422): unsure at all n locations
agcttgtgacaccggagccgacttttttgactacaccgacnatctcgtgcctgcgcccgaaaggatgagcgagcctagggtggttaatatgttgctttgctgcggccgcctgagtaaatccctgtcctctcttgcaaaatggaatggcttgtgtgttggtgaacatatatagctaccccggaacgaccgggtacttggcgttgccaaactcgttctagatgacctggaggtcaatgtggcaaagcccgcagaagagcaccttgatggtgacgtcgtcgtctctctgaaccctgaaattgaaatcagccggcgcagcatttcagtccacgaagatgatgaactagtgcacaagttgtatactgcagcatggaaagcaataccttcgtgagaagtggtatgggagaggtgaccagagacatccc

SEQ ID NO: 35346 - DNA, 368 bp, Zea mays
gttacaaaaggcgagcaaatgtcatgtagaatcttgattttctcaactcatgatcttgcagaaccaatcaaatcgtacaaatttatctattccccagctttgctagccattttgtcgagattgaaaacgctcaatagtaaatacaaagcaaggcatctgttttaagtgaaccgaagaggtcatgggtttacatcggaatgaccaaatattaatttgtgtcacatactcaattgtccattgtggggcaaggtggtggtcatgttcttggggttatatgagagcgtacaaaagggtactgtgctggcgctatatgccttataacgatatattacgagtaccaccgtgtgagacctctggcagatgttgca

SEQ ID NO: 35347 - DNA, 243 bp, Zea mays
ttagaaacctttggacctacgtatgtaggtactcctcgaggccctgcctgcactggaaaagggcgagagcagtcattgactgcgactagaagcccattatgccggtgaccatcgtattcttcatctcctgacacgatgagaatgcctctggcttgtaagacgaattttatggtagacccacactcatgactgccatgatgaaatatatatccatgacaacactgggtgccacatcaaatgata

SEQ ID NO: 35348 - DNA, 443 bp, Zea mays
  unsure (1)..(443): unsure at all n locations
gcttggtgattagagagagtgatttgttatgttcatttgagctcttgcgctngggtcgattctttctttcattctttcttgcgatcatctcaattgtaagaaaggcaagagacaccaattgtgtggtggtccttacgggaagtttggttcccaattgatttgagaagagaagctcactcggtccgagggaccgtttgagagagggaaagggttgaaagagacccggtctttgtgaccacctcaacggggagtaggtttgcaagaaccgaacctcggtaaaacaaatccgcgtgtcacactctttattcgcttgcgatttgttttgcaccctctctctcggactcgattatatntctaacgctaacccgacttgtagttgtgattaagtttgtaaatttcagattcgccctattcacccccctctaggcaactttcagagaaca

SEQ ID NO: 35349 - DNA, 454 bp, Zea mays
  unsure (1)..(454): unsure at all n locations
actaagcttctaagggagaacacgtgataggtctaaccaatgttcatttctaaaaagatagaccttgtgcagcttgtcaagcagggaaacaggtaggaggatctcatcacaccaaaaatgtgatgacaacatcaagacccctggagctgctacatatggacctcttcggacccgtcgcctatctgagcataggaggaagtaagtatggtttagttattgttgatgatttttcccgcttcacttgggtattctttttgcaggataagtctgaaacccaagggaccctcaagcgcttcctcaggagagctcaaaatgagtttgagctcaaggtgaagaagataaggagcgacaacgggtccgagttcaagaaccttcaagtggaggagttccttgaggaggaanggatcaagcacgagttctccgctccctacacaccacancaaaatggtgtggt

SEQ ID NO: 35350 - DNA, 441 bp, Zea mays
  unsure (1)..(441): unsure at all n locations
agcttgtgaagattcttgatgccaacatggttcttnttacgatgctagagccaacccatattagtcttagcaattaagcaagtatcaagttcagctctattgaagtcaactaagtatagctgaccctcgagtactcccttaaatgctactgaatcatcacttattctaaagacagtaacacctacatccgtaaaagacaattgtagcccattttgcataattgataaactgaaagcaagttgtaatctaaagaatctacaagaaaaacattgaaaatagaatggtcaggtgatatagcaattttaccaagtcctttggccaaaccttgatttccatccccgaatgtgatagctctttggggatcactggttttctcgtaggaggagaacatcattctctcctctgtcatgtggtttgtgtacccgctatcaatgatccaac

SEQ ID NO: 35351 - DNA, 473 bp, Zea mays
  unsure (1)..(473): unsure at all n locations
actcagcttgtgggacgtctggataatgctcgtggttcgagctatatctattatcggatttattctctactcctttaaagcacgagtttcgtgtgtcgtgcatcacacggatagattagatctgttttttcttcccgacgtctcgactaacaactagatcattacctcctagatgggtcatgagaaaacactcaaacctaacatgacacaaagccacacgcagagtatcgctcatgaatagtaccacatcgctagctgaatgaggacgagcgaccaagcgagctataaaaaggtgcatgtcttcttttcaactcgtgcctttcttgaccaaaggctaaaataaaatgaagtatccgtagtttagtatccggtatgtaggccacatattcactttaantttaaatntaattntatggggatgggccactcttaatttaaatttatttttttgtggggaggattcatcacactgg

SEQ ID NO: 35352 - DNA, 446 bp, Zea mays
  unsure (1)..(446): unsure at all n locations
agcttaaaactaagacttgtcaagtttgattttagttaagctttttcactcgctttggtggcggttatctcaactaggttagacaagctgcaatacaataagtgtaaatatgcaaatgcaagcttgacaacaccatttgacatcttaaataaattttctgagatcaagtatatttaattcatttctcaacatgcaaaagcgagtcttatcaagtggcttagtaaagatatccgctaattgatcttctgacctcactccttctaaaatgatatctccttttgcaacatgatctctaaggaagtgatgacggatatcaatgtgcttggtgcaagagtgttgaatagggttattagcaattttaacagcactctcattgtcacacaacaaaggtaccttntctagaactacgccatagtctagaagagtttgtttcatatataaaattt

SEQ ID NO: 35353 - DNA, 381 bp, Zea mays
tcggagcgccgaaggtctaataaacaccttccctgagctcgttgtctataaactattcaatttctcagcgtgtagcggccccacctttcagagttactgttcggtctctgcggtccaccacgcagcgagtgcgaacgggtgtccgcctggtgtaaaaatcctggcgcttcgccttcttacctgcagcactatataaacagacgagtaggtgtgaagttaccacagcattcattgctatttgcactgttttgctgccaaaatttttaaccgtcgccgaagcttgtctgtcggaatcgaacgaagctcctgtttgaaacctgcttcagaggaagaaagtattaaagttccacaagttcataattaaatggccagagtgcgctc

SEQ ID NO: 35354 - DNA, 447 bp, Zea mays
  unsure (1)..(447): unsure at all n locations
agcttgagtnttcgccaccggaacgatttctttgtttttcgcaacgaacatgcccaatccactactttatgtccaaaactcatgtttggggtggtttcgcgcaatttcgttgccgcacgtcacccattcataaaacgggtgtcggggtgatgcggacatcaacaccaacacgagcacatctactccatcagcacctttttcagcccaggcgccaccccttccacctgggccaaagactcgggcccgtgcaagaaaattgaactacatcatgttgttaaagaactaaggcccggaagaatagacgaccaccccaattgccgcccataatggacgacctatggttggccgcccctaggggctgctccctctctctatttattcaggagctgctcctcctttatgttccgagtcttgttttaccttagccttacctactcttgacacgcc

SEQ ID NO: 35355 - DNA, 461 bp, Zea mays
  unsure (1)..(461): unsure at all n locations
taaggtaacacgtatggtccgtgtggaatttacaattggttcataccatgattatattgattgtgatgtggtacccatgcaagcttgctctatgttatttggtagaccatggcaatttgataaggacaccgtgcatcatggtaaaacaaatcaatactctttttatgcataatgagaagaagcttgttttgcaccctatgtcccccgatgctatcttgaaagatgaagttgctagagcatgcaaagagaaaaacaaatctgttcataataaaaatctagatgttacaaaggaattggtacaacctaagagtgataattctaaatctgctcatgtaaggaaaaatgaaatacaactgaaaagtgcttgtttccttgcttccaaatctgatttacttgaattaaatgatgttgatgcaatctgctatgtgnttatatgcaaggatgctntgttctcacttcac

SEQ ID NO: 35356 - DNA, 460 bp, Zea mays
  unsure (1)..(460): unsure at all n locations
accttaagcactgagctgcagctgtgaagttcttattccacatgttcaatcggcgatgccacagccagcccatgctagtcttagctattaagcatgcatctagaccggcctcttcttttgcaaaatcaactaaataaagtttgccgtctaatacacccttaaaagctagtgaaccatcacttctcctaaagacagacacatctacattagtaaatagacagttatatcccatattgcacaattgactaaccgatagcaaattatatccaagagattctactaaaaacacattagatatagagtgctcgttagaaattgcaattntacctaacccttttaccttgccttgattcccatcaccgaatatgattgaatcttgggaatccttattcttgacgtaggaggtgaacatcttcttctcccncgtcatatggtttgtgcatccgctgtcgataatcca

SEQ ID NO: 35357 - DNA, 427 bp, Zea mays
  unsure (1)..(427): unsure at all n locations
acgcataattatacctttaatgtcttctcgtgctttcagatcattntttacataaaaccattctgtcatccagccgctgggccatcttttccgaaaagttggcacggggcagcttgacccagaccgagaaacaaaattgtagcagccaaagttattgtgatactgttccttaccccaaggtattgtctcgtatgataattcgtgcatattgcagaaactttttgcatcaggcttcagaccttggcttcgcacggcccacacgaagatgttcagccttatgattgcctcgggggtaagttggtgaaggtagacttctaaaatttttagcacctccacgacgaagctgctcaagggaaatcgcagcccagccttcataaagcttctgaacactacgacttcattctcttcagggtgtggacaagtcttt

SEQ ID NO: 35358 - DNA, 278 bp, Zea mays
cacctgacaagaatggcgttgttccgcacctcgattggttccacagcggcgtctattaaactccctagggcgcaacgaatgtcattggccaaccacgcaccccaatttgctttaccggtgaaaaacagatgcaacagcggccgcctgcctacacggtacacagaaacgctccaacaagagattcacggggatggtggaacatggcaagggtgcacacctggacacggaagggaatgcgactattatcctcatgtagctccattgggtgtaacaacctt

SEQ ID NO: 35359 - DNA, 423 bp, Zea mays
  unsure (1)..(423): unsure at all n locations
agcttgtgctgcatgctgcgataagttattttcttgcagattctgtcacgataaagttagtgaccatacaatggacaggtatcttcaccacaaccattcattntaccgtccacacctttcctgctgagggatgcttatgcacctgttgtgctattaaaatttcaaggttttcattttcacatcgaaccaatatcaattaagcatgacattttatttggaaatagatgtttgtggttgtgccatggacctgtgcctcccttgtgaaatgaattgattttctgtcattgaattttctaactgaagcttttatttccagtgggatacttggctcttagtataccagctttgcataataaggacaaaagaactcgtatntgtatacttgaacgacattttctgtcatatgacttgctgattgttgta

SEQ ID NO: 35360 - DNA, 444 bp, Zea mays
tctaagggagaacacgtgataggtctaactaatgtttctttctaaaaagatagaccttgtgcagcttatcaagcacggaaacaggtgggaagctctcatcatgccaaaaatgtgatgacaacatcaagacccctagagttacttcatatggacctcttcggacccgtcgcctatctaagcataggaggaagtaagtatggtcttgttatagttgatgatatttcccgcttcacttgggtattctttttacaggataaatctgaaacccaagggaccctcaagcgcttcctaaggagagctcaaaacgagtttgagctcaaggtgaagaagataaggagcgacaatgggtccgagttcaagaaccttcaagtggaggagtatcttgaggaggaaggaatcaagcacgagttctccgctccctacacaccacaacaaaatggtgtg

SEQ ID NO: 35361 - DNA, 444 bp, Zea mays
  unsure (1)..(444): unsure at all n locations
agcttntaaagggagaacacgtgataggtttgatcttcgttcaattcgaaaaggatagaccttgttcagcttgtcaagcaggtaaacaggtgggaggagcgcatgacagcaagaatgtgatgaccacttcaagacccctggagctgctgcatatggatctcttcagacccgtcgcctatctgagcatatgaggaagtaagtatggtctacttattgttgatgacttttcccgcttcacttgggtgttctttttgcaggataagtctgatacccaagggaccctcaagcgctttctcaggagagctcaaaatgagtttgagctcaacgtgaagaagataagaagcgacaacgggtccgagttcaagaaccttctagtggaggagttccttgaataggaagggatctagcacgaagtctccgctccctacacaccacaacaaaatg

SEQ ID NO: 35362 - DNA, 370 bp, Zea mays
gaatgaatgtttgagaagttcaactaggtatgaagcagggttaatacatgagcatgctttctcttccttttatacaagatatgcaaggaatgtaggaagatatatgtacatgtatgaataagattgaatagttttacccttttgtacctttacatagaaatgttctcttcattgcgctttgtccttagtcttattgaagttgccgaagaccttatctcaagacaatttactaaaatattgtgcacaagaaagagttctacaactagcgatcgtgttcttaatcattgcttttagatatcatgtagatcacagaatggatgaacatatcatgaattcctcttttacctagggcatatcaagatagatgtct

SEQ ID NO: 35363 - DNA, 347 bp, Zea mays
  unsure (1)..(347): unsure at all n locations
agctnggaggcatcgacaagcgtgtgatctttatgttctagacagaggctgctgaaatgaacaagcggtccttcaagtacgcgtgggtgctcgacaagctcaaggctgagcgtgagagaggtatcaccattgatatcgctctgtggaagtttgagaccaccaattactactgcacggtcattgatgcccctggacaccgcgacttcatcaataacatgatcactggtacctcccaggctgactgtgctgtccttatcattgactccaccactggtggttttgaggctggtatctccaaggatggccagacccgtgaacatgctctccttgcgttcacccttggagtg

SEQ ID NO: 35364 - DNA, 462 bp, Zea mays
  unsure (1)..(462): unsure at all n locations
actcagcttctaagggagaacacattntaggattaacaaatgttcattttgagaaagacaggatttgtagcgcatgccaagcatggaagcaagttggtgctcatcatccacaaaagaacatcatgacgaccgacagaccactagagctcctacacatggatctattctgcccgatcgcttacataagcatcggcgggagtaagtactgtctagttattgtggatgattattctcgcttcacttgggtattctttttacaggaaaaatctcatacccaagagacattaaagggattcttgagacgggctcaaaatgagatcggcttaaggatcaaaaagattataagcgacaacgggacggagttcaagaactctcaaattgaaggcttccttgaggaggagggtatcaagcatgagttctcttctccctacacgccacaacataatggtgtagtggagagga

SEQ ID NO: 35365 - DNA, 441 bp, Zea mays
agcttttatcccaacttacaccatgcttattagtatatgctcttaacatatattccaacacttgattagtcctctctgtctgcccatcagactaaggatggtaggttgaactaaaattcaactttgtatccaagttctcatgcaacttcttccaaaaccgagaagtaaactgtgaacctcgatctgacacgatcttcttaggaactccatgcagacaaactatccgagtcatatacaattctgctagcttggctcccgtgtaattagtcctcaccggtatgaaatgagccacttttgtcaatctgtccacaatcacccaaatagagtcaatatgctttctggttgcgaggcaatccaataatgaagtccataccgatctcttcccacttgcacttgtgtatcttcagcgggtgcaatagtcttactggcctctggtgttca

SEQ ID NO: 35366 - DNA, 475 bp, Zea mays
acacatagaatactcagcttcacatcttttgttgcttcttctccctgagcctcttgtctttcaatcagcaatgaaatctgctaacgcctgagattgaattgaggatctgtgtacataatcaatggtaaattcattaagttctgcggcccattttccgatccttcttgtagcttctctgttcctcattatgtctttcaggggttgtgatgatggcactattatatgatatgcttgaaagtaatgtcgaagcttcctagaggccatcaatacagcatacaataccttctccaattctgtgtaatatttctttgataagctaagtactttagagacaaagtatatcagtgcttgtctttttacttggccatcttgcttttcctatacaagtgccgcactgaccgcagcatgggaagcagccacatacagaagtagcggagttcttgatgaaagtggagttagagttgtcaaatctatc

SEQ ID NO: 35367 - DNA, 423 bp, Zea mays
  unsure (1)..(423): unsure at all n locations
agcttcatataaaccttgaattatttgactttgtattnctgcaacagaaaagctagtagaattgcggaatcagttcacactgcaaaaatcgtaagccccattgtggacacttccacatgaatctaataatttgcaggtccaaattctaataaccattcaattcatgatgaggaaaacaggcagaggaaaacagacagagtacaagcctacaaaggaaatgaactttgcgtttcacctttacactatcaggtctcaggattcctctatcttgaatttgtttatttngaccactctaaagaacgaaaaagttcgatctctctgctattatgtctttgagacatagaagcccaaaactacatcttggaagggcaatacagcactccattgacatgaattcagttaatataagacagaaccatatta

SEQ ID NO: 35368 - DNA, 424 bp, Zea mays
accgcattagaagcatgagcgctctctcttcatcttggtctagctaggctgacacctgagaccctttagcaccgtcttgaaacgcttaaagatgagggccaatctcttattatttaacccggctgccccaacttgcgccaccttgcttggtaacgcatcattgctccttgatgccttgatagcaatgagttgaggcttatggatgggaccgtataacgctttctccacgtattttgacttcttgatcatcattcgtacgcttacgaacttaccaagaattatcttcggcgacattatggcgtactgggaattcacgaaaattattaccaaagaggacaagacggtcaggacctacatatgcggacacagtgggacgtacattcatgattcgaactcctatattgtgaaacggactgaccggtga

SEQ ID NO: 35369 - DNA, 438 bp, Zea mays
agcttaatcttacacaaattggttttacattctaactatcattacaataaaacctactcctctttaagacctttctctgcaacttcattcagtaatttgttaacaacttcgtcgacaatgaattcagccatgtttatgatattcaacgcctctttcatttttggatcagctaggggatcgtacggttcaggcggcggagataattcagctgaagtaggaaaaattaattactctgaagccacaaaaacaaatgtcgaagctaaaaaccaaaaaaaatataatacctatacgtttttcacgctctgtagcttcttcagtatgtcttgcttctggtcgggcgtcatgggtgtctttttcacttttctttatagattcatgggccatttctcggccaccattcacccagacatcattgtaaaaatttctccgccatcaacg

SEQ ID NO: 35370 - DNA, 430 bp, Zea mays
  unsure (1)..(430): unsure at all n locations
tcactgatatctggaagaatggtggccgagaaatggcccatgaaataatgaaaaagagcgaaaaagatattcacgacgctcgagaagcagagaaaaaagctaaaaaaacccgcagaactcgagagacggataggtatcgcttaatggcttttagtttcgtcatttgttttcgtggcttcgaactaattgatnttttctatcacagctgagctatctcatccaccagaaccgttcgacccactaaccgacccagaaacaaagaaagcaatagaaatcattaatatggtcgaagctattgtcgacgaagttgttaccaaactgcttaacgaagttacagaataagttctaaaggaagaatagcagttattggtaaaacacgtttagagtattaacgtaacatttgttgaactaagtctgtaatatccgatgt

SEQ ID NO: 35371 - DNA, 445 bp, Zea mays
agctttgatgatctggtcctccacaagcttgttacatgccttcttctttttctccatagcaggaaccttgctggaacactaccccacttaaaaagaatgagggtagaacttcttgaatcttggggatttgaactccttgaagtacctcataacaagggtgttacggggccttcttcttctgctgctgcttgtacaggctgcgaagagatgactgacactgggttgattctgggagaaccttcttcttatcttctcttcactatcttcttttctcttctcactgctcctttctttctctttgctcttcccactggaggattctatcaaagagtattaccatcatacagaggaggaaaccgaagactatgaaccatgtacaatagtcttcaacccaagaatcaccaagcattgtgatcttacgcgcatgggagtggaaaatggagtt

SEQ ID NO: 35372 - DNA, 475 bp, Zea mays
  unsure (1)..(475): unsure at all n locations
actaagcttacacatggtggtgctcctctgattactattaagttctgtctaacaacaaattcagcaagaatttaagcaggtgcatggttatagatcaagaaaatgaaagtgtgtaaactatgttgtgcagacgacataaatggatccagagctgccgcaggagctcgagcgcatgcatgcatagctgcaagaaatgttcttaagccttattaagaacatagttagttcacataagaactttcagttagtccccgtttttttttgtgggaaaattatagctaggcactcttttttcttgcatgcacacacttattagcttctaaaaaacccaatatatactactctttatcttcgtcgcagcaagaaatgttcatgttgttactgctaagtgctaagntatatgagtgtgcatagcctagctagctagataacacaccacaatataatgcacgccaggacttaatactacacagcg

SEQ ID NO: 35373 - DNA, 422 bp, Zea mays
  unsure (1)..(422): unsure at all n locations
agctngccgagatggttgtatgccattgccttcatatagtacgcctctgctgccatctcgtggtactgcatatgacacaggattcagtgtgtctgatgtcccaagccctttatgcaatcagcacagccgcacagtttctaagcaacatcttgtgaggcagacagggggagtaaagagcacaagctggattcatcagctcacctccaatgcttgcaggtcttcagtggcttggttcagaggatccaaaacagcttcaggatcttcgagaactgcaacagtaagacagtgaagtggggggaagtaacaaaagaaagaaccgtgtccattgtttcgacaagcgtaacaggtctagcttctagcgtctaggtggatgtgtcgagcagaccaatatgttgagaggtttacagtcgatgcatcacaca

SEQ ID NO: 35374 - DNA, 450 bp, Zea mays
  unsure (1)..(450): unsure at all n locations
tctaaagggagaacacattttgngactaacaaatgttcattttgagaaagacaagatttgtagcgcatgtcaggcagggaagcaagttggtgttcatcatccacataagaacatcatgacgactgacaggccactcgagctcctacacatggacctatttggcccgatagcttacataagcatcggcgggagtaagtattgtatagttattgtggatgactattctcgcttcacttgggtgttctttttgcaggaaaaatctcatacccaagagaccttaaagggattcttgagacgggctcaaaacgagtttggcttgaagatcaagaaaataagaagcgacaacgggacggagttcaagaactctcaaattgaaggcttccttgaggaggagggcatcaagcatgagttctcttctccctacacaccacaacaaaatggtgtaatgga

SEQ ID NO: 35375 - DNA, 413 bp, Zea mays
agcttattcatcgtattctcagttagagcatcgtcttggtttagcttcgtcataagaaggagcttcggcaagattgcataaagtcaacaacattgtcaaaactataagaaattcagtaccaaatggccagagtgctttcaactgctagagttacacacgacggagaggaggccaaagctgccgagactgccccatgaggcaatcgggactggttgtgatggagggtgcttttgacgaatgtgcacctgctgccgaagctgaacagactgatattgaagagggtgatgctggtgaagaagaaatagattataacaccattatgccatccaaacccagccacttggactttggaaagtcgactgtctccgaagctgatatgcccatgatgataaagctaggctacttcggggaag

SEQ ID NO: 35376 - DNA, 409 bp, Zea mays
tcttagccttagcttccactgccaccaccttggccacctgttttatctaaagtcagcagccagaagggcgccaacaccctcaacagcaatgtgacttcagggaagagttcgaagctcgtacagtcatacaacactgtaccagaatcaaagcacatttactgagagatatcctacctctgaagcattgttatcttttatgccatttttactttttgtataagaaataagtaatgaaaaactcagtttcaatttcttgtaataattttgcttacaccacaatgaaatatatcttttcttggatttacaaagcttgagagaagactcttaaaattcaagttcataagtcgttccttagggaatgatagccataattgatcaactacaaaagtctttctaaagaatgcagtgt

SEQ ID NO: 35377 - DNA, 430 bp, Zea mays
  unsure (1)..(430): unsure at all n locations
gacagtggattgagtctttcttggatatgcttcgcgtagcatagctgatagatttttagtagttaaatctgaagttcctgatgngtatgttgatactattatggaatcacgtgatgctactttctttgagcatatatttccaatgaaagacattcatagcaattctagatactcttctgagataattcctgaacataatacacctattgagagttttgaacagccacatgaaattgtcctagaggaggatgacaatgatgctcctaaaaggagcaagagacaaagggttgaaaaatcctttggtaatgatttcattgggtaccttgtggacgatactcctactaccattgcagaagcatttgcatctncagatgcagatgattggaaagaagcagttcataatgagatggactctattcttcaaatggta

SEQ ID NO: 35378 - DNA, 447 bp, Zea mays
  unsure (1)..(447): unsure at all n locations
ngagttttgagggccctatattgcataggaccagtgactctctcaattaatgactntgccacccagatttgtctaggtctactcttgtttggtggacctaggaatgtaaccttaacctttccatttgcaacctttcttagaacatagtgagcattgaaagcaaatggtcttgagtgcttaggcaaggaagttggtggtttggctttgcagttgtgggcaaagtgaccttcatttccacactcaaagcatttgataggcttgtgagtctgcttaagcttgtattgagtggtagctttcttttgcacaaaagcattgtatccaataccactcttgttgtntttcataacagtgttcataaacagctcattttggaggtattgaccctcgttgaacttatgcacacttgttgcaagatgttcattttcactttttagtttcttgacctca

SEQ ID NO: 35379 - DNA, 402 bp, Zea mays
gatttctgtgaccaaattggttcgaatattcattttgcatcagttacgcacccggagtcaaatggactcgttgaaagagccaacggcattattatgacaggaataatgaagttaatcttcaatcaacccagaggaaaatggccagatcagttaaccaaagtggtgtggagccacaacacgacaacatgaaggtctacaggcttcactccattcaagttgttattcggtgacgaagcaataactccagaggaagctaaaactggatcaataaggatagtagcttcggcagaatcagattccgaagctgcttattctatagaataagatgctttataagggatcagactgcaagccgtggagaatatcacataatatcaagccgaaacagtcaaatggcgggat

SEQ ID NO: 35380 - DNA, 463 bp, Zea mays
  unsure (1)..(463): unsure at all n locations
tgtctcaggagggtttgactctgttgttaaggtctggtgattcaacaatggtagttggaagctggagagtgctcttatctctgacatgcacacagattgtgtgagggatgtcgcctgcgcaccatttttgggattgtccaagtcgaccattgccagtggttcacaagacgggaaggttgtcatctggaccaagggaaaggatggagacaagtgggagggaaagctcatgcgtgacttcggttcccctgtctggagagtgtctgggtccttgactggcaacatattatgcatagctgctggcgagaacaacataaccctctggaatgaagggtcanatgggcactgggaggaggcgatgaatgttgaaccatatgatgaccggcacgggttctgaatttcttgtagatccatgtttcgacaaggacaaagcttgctactgttttactagtgtttctacaaagtt

SEQ ID NO: 35381 - DNA, 438 bp, Zea mays
  unsure (1)..(438): unsure at all n locations
accttaatggctttcactgtgagcagctctctctctatgaatgaacggctaatgcgagtcacgacgatgctgtgaatgtgcccccgcacgtggcacaaggccgtgaagtggctgtctctggcgaactcatccgaatcaatcatggtctgctcgggtacggtggccggagtgtttccactgcatgatatttactgacccccggagctatccaactgatctgtgcatgaatcacggnggcgatagcacgaatccgcgcgcggctcatcggcggcgagggggctgaacttgggattctatccggttactgtaccatcggattgttcttcagttatcctgacagaccaagtgtggcatccattttctcctgatttttcatggcaacttgtggatcggccaatatcaaagttgttgtctaatgatcccgctacaaccttgcta

SEQ ID NO: 35382 - DNA, 312 bp, Zea mays
aacatgctacgcagcgaaacatgacctagttgacaaaaaatatcgctgaatacgaaacttcgctttgggggcatcgcaagaagaaagcacaggagataagaagggcaaatctcaaaacagattcccaagctatctctggccatgttgatgaaagtcgcgaagcaagagatccgaagctcgagaaatatctggatacagctcaaagacctgaaccttcctacgaagggctttctgacaagaatataccacgacgagaaaatgaacaccctgcactactagccaagtcagtggcacaagggctgcacatacctc

SEQ ID NO: 35383 - DNA, 439 bp, Zea mays
agcttttccgcggggagcaactccttgttttgtgttctcctgacatcacttcgagttggtagcctctaatgaagcaccacgctttgataccaattgaaagtcacctagaggggggtgaataggcgaaacttgtaaattataaactttgaacacgaacttcacccgaggttatgattagaaacaaattataatgaatgtggagtacaaaatagagttattcttgctatgagttgctcaatcaatgcggatgactttgggagctaactcaaaagattgtgagcaagagaacttatagagaggggaagggaagaatcaaattgaacagtgatgatcaacacaaataaacacaatgatttgtttcccaaggtttggttccaataaacctactccccgttgaggaggccatggaggccgggtctttttcaaccctttccctctc

SEQ ID NO: 35384 - DNA, 424 bp, Zea mays
  unsure (1)..(424): unsure at all n locations
ggacctaagcaccgcggctgcactttccgacagtgctgactatctattatgcgaagctgccacatataacagcagaggagtccctggtgttggtggagttagcgttgttacgtctatcaaatattgcttcagctcttccaaggctctctgctggactggtccccattgaaaaacttctgctgacttcagcacttctaaaaatgcgaaatttctctctgctgatctacatataaatctgttgagagatgacagtctctctgtcaatctttgagcccccttctttgtacttggtggttccattcgaacgatagctncgattttatttggattagcctcaatcccttntgttgaaaccagtcagccaagaaatttccctctcttcactccgaagacacatttttctggattcaactnctaaccggcc

SEQ ID NO: 35385 - DNA, 396 bp, Zea mays
  unsure (1)..(396): unsure at all n locations
atcaaatggacgtgaagagtgccttctgagtgctcctttatgtgggggngaataggtgatcctgcgatacttatactcatagccacaaatacttgttaagtgttagcacaataatttcctagtggcttgagatgagtcttaacaaaacacaataccgctaaagatcaactcagagaatacacagtggtgtatcccgtggttctgccaagtactaaacttgcctactccacgttgtggcgtccctacggacgagagttgcactctactcctctcaagggatccaatgatcaacttgaataccacagtgttatgctcttcctatctatatcccgtttgcgaggaatctacacaacttggagtctctcgcccttacacttgagaatcacatagaaatac

SEQ ID NO: 35386 - DNA, 428 bp, Zea mays
  unsure (1)..(428): unsure at all n locations
agcttatggtgttaggctgtctccagcatctttctctaaatttcaccttataaaggaatattctctgtactttacaacactctctaaatgattccgacctctatatcttttacatttccaacaatatcccctaaatatggtcctctatacctcatcctctctaatgtaccaatttaattaacataatttattgttttattaaattggaaccatcattttaggattaaaaacgacattagtgtttacaacgtctgcttgagcatttcatcgaaaagctgcatgagtcgtccgataagcacataggctccaacagttgtcccaggtcgccgacggtgagctgagggctcgtggccaccatgcgacgccgacgttctctgccctatatgtggtgtcctcatgtnctgttcctcctcgcgcgcgacgtgctg

SEQ ID NO: 35387 - DNA, 427 bp, Zea mays
  unsure (1)..(427): unsure at all n locations
ngaaggacanattaaaaagcaagccccaatatactttgtcttcaaagtnctaagcctgtcaaagaaaaactatacagagttggagaaggtgttgtatgctgtgctaacggcctccaggaaactttggcactattttcaagcataccacataattgttccttcatcacagcctctgaaggatattatgaggaatagataagctactataaggattggaaagtgggctgcggagcttaatgaattcactattgactatgtccatagatcctcaattcagacccaagcgttagcagacttcactgctgattggacactatgggctcacgaagaagaagcgaataaaggtgcctaagcctgtacagtattctgcgacggctcctgtggaaccttctgtgcatgtgcgactgctgtcttattgcaccttcca

SEQ ID NO: 35388 - DNA, 451 bp, Zea mays
  unsure (1)..(451): unsure at all n locations
agcnntttgccattttttttctaaaccatctacggtgatctgtagatgtttctcacgtgggattattagagaggagcaagaagccaagaacagacagggtactgtaacaacaaaacagacactttctatatgttttcaagtcacctgtctactgtcatcataacaggacaggattgatgcccacttggctggctgctctgctctgcttgacagcacattttagtgcgtgttggtaactgcattggcaggcttttttctcgcatgacataacctgaagtcagaaccgactcaagtagtcactcaatttcctcatgcatgggcatggcattggcatcacatctcctcctcagttctcacaggcgaactcttaggataggctntatctttgcatttgtttcgttgtggcagagtccattcttttgaggtagtagagcacctgaagtggtccctg

SEQ ID NO: 35389 - DNA, 460 bp, Zea mays
  unsure (1)..(460): unsure at all n locations
ctgtagcatctttncctttntctttatcttctggacttggagaatttcaaaacaaattgtagaaaaatgataaaaataccagaccaattttgctaggcttctaatttcctatagtatttaataaaaatagtttcatgatttttagttccaataaggaattttgggatatttagaatagccaaaacccatacttctggaattttagagagtaaattatagtcccaaaattcaccaaactttttaatcaagctttaagtaatatttagaagccttgggtaaagnttgacatgatatggactatgtttggtacttagaacccanaaccctagtcccgtgccctatgaacttcactatagacaccaaaaaccctagtttcccggagattcgtgaagaaaagttatattcaagacattagataataaaattttattatccctgcattttcatgagcattacatga

SEQ ID NO: 35390 - DNA, 436 bp, Zea mays
  unsure (1)..(436): unsure at all n locations
agcttacccacaagaatgtgaagttttaattgatgaatgtgtgtgagtgaagctttcaaatgttgaaggagagattggtgtctactctacttcttacccttccataggtgcataagtgcttcaccgtgaattctgatgcccccaaagtaggtcctgggtgtgttcttatgtaaaatgggaaggtgattgcctatgcatcatagtagctgaggaaacatgagaaaaattatcccatgcatgatctagagcttgctacaactgtctttgtattaaagaaatggaagcattatctttatggtgagccttgtgatatttacatagatcatacaaatctaaagtacatcttcacctaacaggccttaaatntaaggcagaggtgatggcttgaattgataaagaattatgatcttactattcactatactactgacaaagc

SEQ ID NO: 35391 - DNA, 385 bp, Zea mays
gacactatgaatactaagcttgccagccctcggacccggccggatattactggatgtcctatatcaacctcaccggacttcggtcatacgtcgccgcgcgtggaccgagctattcaataagtttccgcccaaattctttcggtcatatcttttctggcattccgtggacctcccttgaccattcaaatgaactatcttgtatggaacaagacgggtttctctccacccacaaacatattcccctgtgcgcgtggagcgaccgactactggcattttctacgggggttcgcacatcgttgtgaatccccagacctcccctttgtcctcgaacaatttatctgagcaaaatctccgccgcgtagagcctccttccttttttcgccgc

SEQ ID NO: 35392 - DNA, 151 bp, Zea mays
agcgttttttatttttatctataaaattgagaaaacaaagcagatggctcacgcagcgtaccaaatgtggttggagcaagttcttatttatacgcttggcgcgcccccaattggaggggtccgcctgccattgactattgctattcttgcc

SEQ ID NO: 35393 - DNA, 443 bp, Zea mays
tgtgaaggttcttcatacccacatgtgctaagctgcgatgtcacagccagcccatgcaagtcttagccattaagcatgcatctagaccggcctcttcttttgcaaaatcaactaaataaagtttgccgtctaatacacccttaaaagctagtgaaccatcactccttctaaagacagacacatctacgtttgtaaatagacagttataccccatatgacataattgactaacagatagcaaattatatccaagactctctactaaaaatacattagagatagaatgctcattagaaatcgcaattttacctaacccttttaccttgccttgattcccatcaccgaatatgattgaatcttgggaatccttattcttgacgtaggaggtgaacatcttcttattcccgtcatatgggttgtgcatccgctatcaataattcagc

SEQ ID NO: 35394 - DNA, 442 bp, Zea mays
  unsure (1)..(442): unsure at all n locations
agctntccggctagctgtcaagcagcaacgttcttttcatgataggccangccaggccatgcatgccagggaatctagctagctggggtacgtagtactctggattctcaagaccaaagccatgcacgtacagctaggctacatactactaccatgcatgggttgccttttcttgtgagaatcatcgatcataatatcatcattaacttagtgcacggccggtggtaccaccacactacgtacgtacgcacgcccgccttttttctttatttctcccctgcctgaagcaacaaaaaattccattaatatatatgggctatttgtgtgtcctttcttgtccagctgaattaggaacgaagcaatgatggatcggatgatgtacgtgtggtgggcttaagctagctaatctgagctagcagcctaagcttgtgggtgcagtgca

SEQ ID NO: 35395 - DNA, 463 bp, Zea mays
taatgccggaattgctatcaaggaagctccctcactcttatcattctcccattgtctcatggcaaagggagatgctaaggtaaaaatcatcaccgatttaaatgatataaaagatgatgatgatatcgatgatgttgatgatgatggctattcatatgatgatcttgttagaatgttaggtgaggccgctgactacatgcacaaagaaaaagaaaaatttaagaccttgaaggaattgtataaaaacctccaagtgtcttttgaggagctcaagacctctcacaatgacctcaaagaaaattgtgagaagcttgcggatgctcaaaaatcatctattgtgcatgaagttgaggtggtcactaaagatgttggagtcacttgtgacttacttgatagtcttacaagtgaaccactacctactaactctatttgtgataaatgcagcaattctctcaatgataac

SEQ ID NO: 35396 - DNA, 445 bp, Zea mays
  unsure (1)..(445): unsure at all n locations
gcttgtgtcatcttaatctctgggccggttatctctatccccatattntttagtgcagcacatcaatggatgagtcatgtgtcccaactgtaacatgtcatttcaaaattgataatgagtccatcttgacagcaaaagataggactaacaatagttgttgcatccaaggcttattgtattgcaagaacaattaaaataaaaaagcatccatcaatgagaatgagaccatgcaaggccggcgcgcatgaagtatgacaagtattcctataaaattgaaaaaatttgagaaaaggaaaagcacaggaaggaaagaaatgaattgtatgatctggtaattcagtgacatctggatatgctactcaactatattttctaagtcatgtcatcggtattcttttatcttaagcaaaatttanggaaaaggcagaattaaaacctgcaactg

SEQ ID NO: 35397 - DNA, 464 bp, Zea mays
  unsure (1)..(464): unsure at all n locations
actaagctctaaccccccgcgagaccttctnccgtttctttctaacctttatgtttcgatatcgaatgtcatacttgatgcatattcactttctttgttcccttgtatgatgtactgtttgtttcccaatttgaatggatgaatgtatgtatgcttgcaatcgcatagagaacgatccggtcgaagagcccgaagagctcgcaagagaagcccctgagcaccaatcggttgggggagggcaatgttccttgacctatctatgggcctaatcatatttaatatcacttcccgcttacacatttattgcttaaggattgactactctttgtgatccatgttcttgttcacctatttggggtggaatattactggttagctttatgctattgctcaactataatcaatgaacatgatgagattacctatgatacgctgttttcccctttcttatgatgatgttgtac

SEQ ID NO: 35398 - DNA, 457 bp, Zea mays
  unsure (1)..(457): unsure at all n locations
tatgaagattcttcatcccaacatgggctagtcggcggtgtcagatccaacccatgttagtcttagcaattaagcatgtgtcgagttcagctctatcaaaatctaccaagtatagctgaccctccaacacacccttaaatgctattgaatcatcacttcttctaaagacagtgacacctacatcagtaaatagacagttgtagcccatttgacataactgggatacagaaagcaaattgtaatctaatgaatcaacaagaaaaacattggaaatagtatggtcaggtgatatagcaattttactcaatcctttgaccaaaccttgatttccatccccgaatgtgatagttcgttggggatcttggttnttctcatatgaggagaacatctttttctcccctgtcatgtggtttgtgcacccgctatcgagtatccaacttgagcccctggatgcata

SEQ ID NO: 35399 - DNA, 241 bp, Zea mays
gcgcgcaccgcgaggagccgcttaaaatccagcgccaacgcacgctataagctcacgacgaacgccaacagaaagggttgactcacaacattcggcgagccccacagggacgagggctgagaggggcctggggaccgcactgcgaagaaaccacaaacagcccgaggaaacgcaaccacaacagaaatgatgcaactcctggagctcgcctggctctgagaagagatcttgagtcacactc

SEQ ID NO: 35400 - DNA, 438 bp, Zea mays
aactcaactccatcgatattgtcgtaaacatagaagaccagctgtatttcttttgaaattcctcgagtcatccgcactgagcaccacgtcatccacatgcttgccctaatggtcggctaaacatgtctggatggctctctaggtagtcactccagcgtatttgacgccgaacgacatggaggtatagcaaatagccccgaacggggtgatgaatgctgcctttacctccgcttctcttgccaaattgatctgatgatacctggagtagcaatctatgaaggacaacactgaacacccgacggtcgagtctaccaactgatccattctatgaagtccacagggatccttccgacaacgtttgtcgagatacagatcgtcgatgcacatgccgcattccacatgattgcttttgagtacaagaacaggatatgctaacca

SEQ ID NO: 35401 - DNA, 454 bp, Zea mays
  unsure (1)..(454): unsure at all n locations
agcttcggctccatctatgttatggatngcttttgtattcagtccaattgccttcggcccttcttgcagcttcctgacttccatggatagcaataggtccctgttccgaaggtatcttcatgcaaagataagcaggatgaaggattgcttccaacgcattgagggtaccacgaccaatgattgcattgtaagggtattccatatcaacaatgtcaaacacaacttgctcagttctagtgttgttgatgaacccgaatgtcaccgacatggtgatcttgcaaaatgctacaatctgtcttcctccgaagccacagagaggatgtgtagcatcatgaatcttatcttctggctcttgcatttgtctgaaggccttagcaaatatgatgtcagctgcactgcctgtgtcaaccaagatattgtggaccatatatcctttgataacacaagagataac

SEQ ID NO: 35402 - DNA, 427 bp, Zea mays
  unsure (1)..(427): unsure at all n locations
ctcaagctntgcacacatgggcgcataattataccgaagagatcaattctactttcatgtcanncatcacataaaaccattctgtcatccagtcgccgggccatctctcctcaaaggtgggcacgggacagcttgacccagaccgagaaacgaaactgtagcagccaaaaatattatgatactgttccttaccccagagatctgtgtgctatgataattcgtgtatattgcagaagctgtttgcataggcttcagacctaggcttttcacggtccacacgaagatattcagccttatgattgcgctccgggttagtcggtgaagatagacttctaagattttctacacctccactacgaagctgtttaatggaatcacagccatcttttaaatgctcagtcactcgatttcatttttcaggtgtggc

SEQ ID NO: 35403 - DNA, 437 bp, Zea mays
  unsure (1)..(437): unsure at all n locations
agctngcgtacgtcgattagctcctcggctgtatctgggagaatgccgcgggtacgcggcggcgtcggagaaagaggcggtggccggagcggagcaaggaggaggccatggcgacgaggctagggttctggccgtggggagggcgatgagtttggaagcttggatctggggttaggcccatgtagaaatttcggcccgataaccccctcagatgagatgggttcagtcacgttcggcaggactgagctagactaacgatgtttgaacgtaatacttagttagataaaaaattgtcagtgtaattaactaatttactaaaagatttgttggcgaaaaagcgaagaaataggctcgtcgttccatcacaatatcatcacaaataagaaaaaaacgaatatcctgtntgggtagttaaatggaaataccctttatgagtg

SEQ ID NO: 35404 - DNA, 433 bp, Zea mays
  unsure (1)..(433): unsure at all n locations
acacaagacactcagcttcggaagccaactcttcacgagtccgttttctttgtttcgancggctcggagcaacccaggctttcgtcgcaataccgtcgaagagtaatgctcctggctgatacccgcaggagatggcgtagtctttcaattcttctttcttggcctttgttaatttttgaccaattaagctttgaaagttgaaactttctccttctgaagaatcttcgactatttccctctctttcccaggcactgtggccatggtttcttctgcggctgtggcagcctcttctgcggctatgtccagaagttttttatcaatatcataaagtgtggtttctaagtttgcaccttcagcagttgcagcttcagtacgtgcagcttggtatctgcagcgctctcaacaactggtgtgtttggcgccgcaactggt

SEQ ID NO: 35405 - DNA, 442 bp, Zea mays
  unsure (1)..(442): unsure at all n locations
agctntaccctgtggactagactataagttgtttactgtatgtgtaccttatgcagttgaccatttccaacatttgcgtaatgaggactctagggagaagcctcgtagtgagaccctggacattcacctcggaagtgaatacggatctagctaacccgggctagaagggaatcgcgactcatgggtaaagatgcgccacctctgcagagtgtaaaactgatatatcagccgtgctcacggttatgagcagcctggactcctcacatgataattgaacttgaagatggaaataaatcgagatccgatgatctgccaatggttttgcttaagtggtttcacttaagtgttgttgatatactcttatacatntgcttaatgggaatacttgggattcacacttattattaagtcaggtgttgttaataaaatgttgaccaactaa

SEQ ID NO: 35406 - DNA, 305 bp, Zea mays
ccagctccttctggcaagaaactttcaaattatcatgcacgcaattgcgtatgaacacttcgtatcatcccaaacagatggccaaactgaaagggtcaaccaatgccttaagacttctttgcgctgctttgttaactcttgtcctcacaagcggcatcattggctaccaatggcagaattctggtacaacacaacatatcattctgctctgggccgctccccattcgaggtgctgtatggtcgaccaccacgacactattgtattgcgccggctgacactataactgattcaaacctgtccacct

SEQ ID NO: 35407 - DNA, 445 bp, Zea mays
  unsure (1)..(445): unsure at all n locations
agcttttgatgacgagggccatcttctcattatctagattggagggtcaatttgaagccccttgcttggagtagtctcctcctcttccgtcgccttgaaggcaatggcttgtggctcgagcgtggaggaattgctatgggcaatgtcctccacatgtttggagtctttgaccataagttcaaagctcacatactttccaaacacctcctcgacgtcatcacctcgtatctaggattttcacgaagtaattgaacaagagtagcattaggaaatacgagttaccttagcatgattttaacaacttcatggtcttctcatttggtgctcccaatgttntagacttggttcaccattgttttgagccggttgtacattnttgtggtccttctcctttattgagggcgaaccatgtgagctctccttcaatcacatccatcttagtgat

SEQ ID NO: 35408 - DNA, 406 bp, Zea mays
  unsure (1)..(406): unsure at all n locations
tatgtggacgatgtggtaatctaaacgaanaatttgttttatttcattgaagatttacagctggttatcaacagtctacggtgatatcgatggaagcttaatcctgaaaaatgtgtcttcggggtaccagcaggaaagttactcggatttattgtcagccaccgaggaattgaagctaatccagaaaagatcgaagctatcatgaggatggaggcactgcgatcacaaaagaaagttcatagacttaccggatgtatggcagccctgagcagattcatatccaggctgggagaaaaaggcttaccattttataagttactcaagaaggtggaaaagtttcagtggacttcagaagcacaagaagccctatacgcatgaaaaagttcttgacacaccaccagtgctg

SEQ ID NO: 35409 - DNA, 436 bp, Zea mays
  unsure (1)..(436): unsure at all n locations
agcttgactcaggtatccacacattaatccttattttattnttcccgtcttctggacaaggcatcctccctggatccaagtccatagaccaacatatatcccattatcaagatgaatacaatcaattcctgacctcgcgcgagtgctagaaaaatcactcgacttctaccgagatcctgattagcaagcagctactcgacctagcatactagtattcatctcaacaaggaatcctaagttcatgcaactagaggtttcaagcaactcctacacttaagtgcacattacagtcctacaagcattaagtgtagtaaagtagcatatattaacatggttatgcataaaaccggggcttgccttcaattgctggggctgcggggagatcctcaatagcagcctctgaagcctgctcctggtccttctcttggacaggtcc

SEQ ID NO: 35410 - DNA, 459 bp, Zea mays
tctcagcttctaagggagaacacgtgataggtgtgactaactttcatttctataaagatagaccttgtgcagctggtcaagcaggtaaacaagtgggaggagcacatcacagcaagaatgtgatgaccacgtcaagacccctggagctgctgcatatggacctcttcggacccgtcgcctatctgagtataggaggaagtaagtatggtctagttattgttgatgacttttcccgcttcacttgggtgttctttttgcaggataagtctgaaacccaagggaccctcaagcgcttcctcaggagagctcaaaatgagtttgagctcaaggtgaagaagataaggagcgacaacgggtccgagttcaagaaccttcaagtggaggagttccttgaagaggaagggatcaagcacgagttctccgcttcctacacaccacaagcataatggtgtggtagag

SEQ ID NO: 35411 - DNA, 341 bp, Zea mays
ttagcacctgggctgcagcttcgctttaaacagtttttagtgttttcttatatgtctgaagctgctaagaaggctgctgctgagatgaagctgagtcttgatgaagagaagaacttagggtttcttatagccatgtcgaagacccacacacaaaagatcaccacggaaattctggaagggctgtctgaagatactggtgacagtgaaagttatgatgtggacagtggtggcgaagactcctaagatcgcccctggcgaccaagccattcagtttatgggtaatcaactatcaaagagaatcatcttgttaatatgagaggaaggtattcctggatctgtcc

SEQ ID NO: 35412 - DNA, 399 bp, Zea mays
atgatcgctttccctcggtcttatccttgcttggctgtccctctcgaccttttagcgccgtctgaatcttatatgatgagggccatctcttcatcattaagaccggcagcctctatttgtgccaccttgctgggtagcgcctccttgctccttgttgccttgagagcaatgggttgaggctcgttgatcggaccattcaatgcgtcggcgacgtatcttgcctccttgatcatcatccgcccgcttacgaatttttcgagtacctcctcgggcgtcatcttcgtgtacctgtgattctcacgaatattgttcacgagatgaggatcaagaacggtatatgaccttatcattaggccgacgacgtcgtgatccgtccatcgcgtgcttccgtagctccta

SEQ ID NO: 35413 - DNA, 435 bp, Zea mays
aacttgccttcgatacagtcaatttatcttgttctacggggtcttggagcgtgccaatggcataatcttcacagctatctaaaagatgctcactcatgaaaaaaaaggccgatggaccgatttattgccggaggcagtctggtctctatacacagccgagtgcaaggcgaccgggttcactcctttacgccttctatacggatcggaggcaatgaccccacaagaaatatagcatgggtccccgcgtacagattcgtcagccgtccccgacgtggacgagcctactttaaaagacctcattgacggagaccgggtttttgccctacatgccctaaacaaatactaagcccagaccaaagtatggcgcgaccacgcagtcatcccgagggagatcaacgagggggacctcgtactcgaacaaacagctcggacgga

SEQ ID NO: 35414 - DNA, 430 bp, Zea mays
cggatacatctgacagtctcgtaatctttgtatttctttcttctaatgctcctcatgctcttgcgtcattagggaatatataacaatgtcatcaatgaacactactacgaacttgtcgaggctgtccatgaacacactgttcatcaagtacatgaagtacgctggcgcattcgtcaaaccgaatgacatgaccgcgaactcatacaattcatacttggtgcagaatgatgtcttcggtatgtatgagggtctgactttgagttgatgggatcctgacttcatatctatctttgagaacacactggctcctttcgaacgatcgaataaaatttcaattctgggtacgggtacctgtccttgatgggaacctcttacaaagcttcgatattaatgcacatcctttatgtgacattcttcttctaatcaaata

SEQ ID NO: 35415 - DNA, 359 bp, Zea mays
agcttaatgcccctaaaagattatctaattttgttaagggcaaggcactcatggttcacgataatgagggttatattttatatcctgctaattatcctgagcacaaaattaggagaattcatgctaggaaacctcatactatttcacatcatgcttttatgtataggaatgaggtttctagctctaggcaatcaactcatgttaaattgcctaaaaagaaaactcctactgcatcaaatgatcatgatatttcattcaaaacttttgatgcttcttatgtgctcactaacaaatcaggcaaaatagttgccaaatatgttgggggcaaacacaaggggtcaaagacttgtgtttgggta

SEQ ID NO: 35416 - DNA, 408 bp, Zea mays
ctggtaaagtccggaatgaatcggccgttattaccagcctgtccaaggaaacttcggacttgatgtacagtggctgggggtttccactccaaaatatccttgactttgctgggatccaccgcaatacccttggcagataatacatgtgccagaaaatgaatctcctccagccagaatgcacacttactgaacttagcatataatagatgttcccttaagcgtgtgaatacaatccacaagtgctgagcatgctcctcttcattcttggagtatattaagatatcgtcaatgaataccaccacaaatttgtccaactcggacatgaataccgagttcatcatatatgtgaagcgggcaagagcatttgtcagtccaaaagacataaccagatctccaatatatccatac

SEQ ID NO: 35417 - DNA, 445 bp, Zea mays
  unsure (1)..(445): unsure at all n locations
agcttacataagattgataaataagaatttgaatcctatgatatagtttcctccccctaaatatgtgcatttcagaaaataccaattttgtactcaaatgccaaaagcacatatttgggtcaaagagtgaagacgacttatatcatactattcatagggtgctttgtgtcataaataaacatgatgctcatgacatattatgcactcatcaatttccttcatcttatgttttacttatgattcaacccccttttgtcaattatttctcccccttttcaaaagtattcttacacttagttacataagactaaaggtaaggtttaatgcacaatttctccccctttgtcataaatctccaaaaaaatataaagaatataaagggtagaaattatgattaatcaagatttgaacacactatcatgaanagggtccttagatggcacaa

SEQ ID NO: 35418 - DNA, 440 bp, Zea mays
  unsure (1)..(440): unsure at all n locations
taatgctccgaaagattgtctaattntgtaaagggcaaggctcccatggctcangataacgagggttacattttatatcctgctggttatcttgagcataagattatgagaattcatgctaggaaatctcattctgtttctcaccatgcttatttgtataagaatgaggcatctagctgtaggcaatcaacccatgttaaattgcctaaaaagaaaactcctgttgcatcaaatgatcatatcatttcatttaaaactattgatgcatcttatgttttaactaacaaatccggcaaaatagttgccaaatatgttgggggcaaacacaagggctccaagacttgtgtttgggtacccaaggtgcttgtttctaacatcanaggacccaagactatttgggtacctaagaagaaaggcctaaactgttttacaggtttatg

SEQ ID NO: 35419 - DNA, 354 bp, Zea mays
gcctatgttttctttttcacgccgcgagagaaatcggtcagatctgcaacattaagtattggtagacttgttcacttgttagagtggttgtataggtcacccctttttttgctgaatctgacgtctcgcaattgtgcgtttttagatccatacaaaaaagagaaaccgacttgaacaccagacgcttaagtaattggtctatttcacctacaatacgatgatggaaaataggtttcaaacactaatagagctgggatcctatggttagagaaacatcccactggtgcttgagaagaatatgtgggatcatgaactggaaattaagatgacatgatggtgacacaacatatggca

SEQ ID NO: 35420 - DNA, 411 bp, Zea mays
taaacttttacttgcgtttgccatggagggcaacctgagttcacctgagcgtgcatgcttccatgctttgtctttccgcttttgcgtggaagacttgctgaacatgaagaggggtagctgggctcttttgtaagttgttactgctcgatgctgtaaacttgaggaggtgtatgtaacctgaccttgtccaacgttttcctgccacgatgaagtagctctgcttgtatgtcattacttttactttcccgttctttttttatttgtcgcggtttaatttaaaaatgaagataaatattcgagagcagagttattatgtacgtgtgtgtgcaagttgatccaccttcgtatatccttcgtttgaatagaaaacacaattggtgccattcaatacaggaaaacacctacaataat

SEQ ID NO: 35421 - DNA, 430 bp, Zea mays
  unsure (1)..(430): unsure at all n locations
agctngagaaaatatttccacctgccttctttgatgtcatggtgcacttgagtgtccatcttcccgatgaggcaatgcttaaaggacctgttcagtatggatggatgtacccaatagaaaggcgactaggcactttgaaaaattttgtaaggaacagggctaggccggaaggatcaattgctgaggcatatatggcaagtgataccttaacattttgttctaggtacatgaaggatgttgacactagatttaaccaggatgatgatagtggtacagagatgccattgcctaatgacatgtctgtttttaagcatggtgctactcttgttggaggtactaagactgagtacattgatgatgctaccatgaataagttagtttggtatgtgctacataatgctgatgaagtacaggacatatcgacgtaagt

SEQ ID NO: 35422 - DNA, 370 bp, Zea mays
aaacctagctttcttgacaaccaaacagaacaagcatgtctaaattctataaaaacatggcttgggaaatatttatctacaccacagagcaatggccaagaatgctgcgggaaccttacacctacccgcgtggttatataatactcgcagcgtgaaggtgaaatgtcaatttccccacacactctgaacagatacctgccctcactgaacagtggaccaccccgcgcctgggaggtgaaatgccacataccccatacctgccgcatggtggaccacctctcgcttcgaatattttaatcgtctctctgcgacgagctcaacgaaggagtttttggacctctggcattccgaagctttggagaatatttca

SEQ ID NO: 35423 - DNA, 437 bp, Zea mays
  unsure (1)..(437): unsure at all n locations
agcttgacattgcttccctgatggaagccaatgccatccttaatgccagggcgtctccctctatagagcatgcttctagcaaatttaaatttttcattttctatctcatgcttattaattttagcagtaagttgagctatgtgatcattttgttgtttaattaaagcaaggtgatcatggatagcatcaacatttacatctctacatttagtacaaatagagacatgaccaacagtaggtgtagagggtttgcaagcatttaattcatcaatcttagcatgtaaaatagcattctcatttctaagattggaaatagaaacattgcaaagattcaaatctttagccttataaattaacctacattctcagttntaaggctagaaatngattcattcaatntataaatcttagcaattaaactagtattttcttttcta

SEQ ID NO: 35424 - DNA, 460 bp, Zea mays
  unsure (1)..(460): unsure at all n locations
tattaatataaaactctagagggagtttgattgttgcattcatgctattgcatagngtgtttaaatgcaaaaatgattgaaacgtgttaacataatttgtagaagtctacggtaattttcacagtttatgagtaattgtctcatttttttgaaaaaacaaattttatgtatttatgacgcttaaaaagtagataagctccaaacactttatttgagtttattaagcttcaaaacatgactagaaatttccctagaattttttactctttaaaacaatttttatgcgttaaatatatatacggtatctattataattaattaattctcaaaataggtcgcttcgatttacacaattactatgcccactgtcatctcgtagggtacattgccctaggcgataaacccactataacctcctgccccgctccacccactcaccgaaccatggtttcctgatcgc

SEQ ID NO: 35425 - DNA, 441 bp, Zea mays
  unsure (1)..(441): unsure at all n locations
agctntatcaaatggacgtgaagagtgccttcctcaatggaccgatcaaggaggaggtctatgttgagcaacctcccgactctgaagatagtgagtaccctaaccatgtctataggctctctaaggcactttatgggctcaagcaagccccaagagcatggtatgaatgccttaaagattttcttattgcaaatggcttcaaagtcggcaaggccgatcctactttattcactaaaactcttgacaatgatttgtttgtatgccaaatttatgttgatgatatcatatttgggtctactaacgaatctacatgtgaagaatttagtacgatcatgacaaagaaattcgagatgtcgatgatgggggagttgaagtattttctaggattccaagttaagcaactccaagagggcaccttcattagccaaacaaagtacactc

SEQ ID NO: 35426 - DNA, 458 bp, Zea mays
tcggccttctgaggccgaaggttgaaatgaactattccgtctaagagtgccaaagagccttcggcgttgtctgctcttttataggaacaagggacttagtacaagagcatattgccttcagggtgtggccgcttgcggagaaatgggaaatgccacaagaaatcgttaaaaaggccgacgaaggtggactcgtcagatttaagtacacttttaaatttgaagataaatttattgagccagacgatgagtggttgaaaagcattgacaatttaagtgatgagctgcttgggacatactcgaaggccgaagatactgcaatgtcagcagccttcggaggccgaaaaaagaaaaggctgaatcgggtatttgatgccatcgggttcgtctaccctgactattgctaccccattcgaaggcagaagagaaaaaatacaacctctgcataagaagatactata

SEQ ID NO: 35427 - DNA, 442 bp, Zea mays
  unsure (1)..(442): unsure at all n locations
agcttactnttgaaataaatgtaagattatgttattcgcttccgcatttcttcatctccgatgttctgtaatgtctacaagatgggtgagacgttcctggtgaggtaaggaaagataccgaacttgtcaagtagttcaggggcacctacagggttgtctgatgtccgttggacaaggacaactgtaggtgggcctaattacttgggaggttccgtcacagctggtatcggagcgtagcccttcttggcagatattatgaagcatcttcaaaaggatttttaagagtcttacctaaaaattcttttctcttcttacctaagtattctgaagaagtctatctcaaagaccagataggaagagtgcaacatatagaaggttgaatcgactaaggttgattctgtaattatacatgcatcatgctaagaatcttactaataacatt

SEQ ID NO: 35428 - DNA, 474 bp, Zea mays
  unsure (1)..(474): unsure at all n locations
ctataaaactaagcttaataaacaatctggaccctctccatcacgctattgtcagcagagtcagagctcccatcaggcaccctccgttgcaagcaaccagccgccagcaaacgcctgttggcactgcggagaccccagtcacttcaagaacaactgccctcagttgaaggcacccggaccaacttactccaactcggtgaatggccccaagattccatcggcacctacctccaaggcactcccttcaaacagccagcagagcaggactcagtatcagggtagagcccgggtcaaccacgtcgacgctcaagaagctcagcaagccccgggagtagtgctcggtgagttccttgttgaatttactcccgcttctgtngcttttgattcaggagcatcccattcttttatagccgctaagtntgtggaagagcatggcatccnctctacacccctagctattcccttggtcacccg

SEQ ID NO: 35429 - DNA, 427 bp, Zea mays
  unsure (1)..(427): unsure at all n locations
agctntgaagaaatgtaagtgatcgcgttgatgtctgcgcattttccggtgcgagaggaattttagccatcctggagaaagcgggttgcaatcatgtcaaaactttggcccagaccgaagctgccttctctgtggatgacacaagatccctcagctgaagcaagcttagtgggtggaaaattttacactgacatctaggcaaatggtggccgagaaatagctcacgaaattatgaagaagagcgagaaagacatcaatgaggcccgagtacaagctaagcaagctgaagaagttgcatagcgcgagaggcgcataggtattgtttcacggcatctaacttcggcatttgtttttgtgacttcgaactgattaattatttttcttctgcagtagaactatctcctccacaggaactgttctaccccct

SEQ ID NO: 35430 - DNA, 402 bp, Zea mays
agaacatgaattaggccatctcaagaccttcaaccgcacttttgttcccttacacgccgttcgtaacgacctcctgctggagatcaccctagacacctctggacctggcttggcctccgctatgaatagcgctactactggctctggtagctcgtattaatgaccgaccacctccaactcttgccggcattcctgctggtgctagcgccaggcgcaacaaggggcgctacagatgctgcagaggcggtaacgacgcctacaaggcaacaacgacagctttggaggcaacatcagtggccacacctttggtgcccctgacaaggcacctgctccctcctggccctcctacaacctatggaactgacacatcaccatgtggtctgtcctgatgaatagtgggag

SEQ ID NO: 35431 - DNA, 330 bp, Zea mays
  unsure (1)..(330): unsure at all n locations
agcttgaagccatggtaagtagcataggcttattatatgctaattgactcaagcctagctactggtgcataggtttcaccgaaatccaaaccttctacttgtgagtaccctttggctacgagtcgagctttgttccttgtcaccacaccatgctcatcttgcttgttgcggaagacccatttggttcctacaacattttggttaggacgtggaactaaatgccagacctcattcctcgtgaaattggtgagctcctcttgcatcgccaccacccaatccgaatcttggagagcttcctctaccctgtgtggctcanaaaatgaaacaaaa

SEQ ID NO: 35432 - DNA, 425 bp, Zea mays
  unsure (1)..(425): unsure at all n locations
tattacgtgacactatnaaactcagcttgtctaggagggttgactctgtcttaaggtctgcggtattaactttggtagttggaagctggagagtgctcttatctctgacatgcacacagattgtgtgagggatgtcgcctgtgcaccagttttgggattgtccaagtcgaccattgccagtggttcacaagacgggaaggttgtcatctggaccaatggaaaggatggagacaagtgggagggaaagctcatgcgtgacttcggttcccctgtctggagagtgtcgtggtccttgactggcaacatattatgcatagctgctggcgagaacaacataaccctctggaatgaatggtcatatgggcactgtgaggaggcgattaatgttgaaccatatgatgaccggcaatgtttctgaatttctt

SEQ ID NO: 35433 - DNA, 59 bp, Zea mays
  unsure (1)..(59): unsure at all n locations
accttaagnacctgggctgcaactgagattctatagtgtaccacatattttttttattt

SEQ ID NO: 35434 - DNA, 69 bp, Zea mays
  unsure (1)..(69): unsure at all n locations
ancctgggagcgcaatgagggatctaccttcttattaaggctctgcactcagtgatcgctgtcaagaca

SEQ ID NO: 35435 - DNA, 85 bp, Zea mays
tagctcactcccacccaagccggtttttttctttttgaacgtgtctcgctccctcattaatgatcagctcatataacctccgaag

SEQ ID NO: 35436 - DNA, 435 bp, Zea mays
  unsure (1)..(435): unsure at all n locations
agctnnttgtgacatatgtagaataaccttatttacaaactgcttgatgaacattgttcattttgatgattagataaattttgtttttcagtatacctgtactcattctattgtaaacaattcattctaggtatgtaacaaaatggcatgtttatatctttgattcatgatgcatttctttcatacaccatgctgtaagagtagaattgatgattctttcatcgcattcaataatctcacaagattgtcttccattttcatagttggtaccagcagtgactgagctcattgttgcccagttgatgtaccttgaatggatgaacagtaaagaacatgtttatatatacatcaactcaactggaacggctcgcgatgatggtgaaccggtaagcaagattattcaatnggngacttcagtcaggtatttctagtatt

SEQ ID NO: 35437 - DNA, 446 bp, Zea mays
tcagctccatctatgttatggattgcgtttgagtcagtccaattgccttcagcccttctggcagcttcctgacttccatgaatagcgatgggtccttgatccgaaggtatcttcatgcaaagataagcaggatgaagaattgcttctaaagcattgagggtgccacgaccaataatcgcattgtaagggtattccatgtcaacaatgtcaaacacaacttgttcagttctagtattgttgatgaacccgaaggtcactgacatggtgatcttacccagtgctacaatctgccttcctccgaagccacagagaggatgtgtagcatcatgaatcttatcttctggctcttgcatttgtctgaaggccttagcaaatatgatatcagctgcactacctgtgtcaaccaagacattgtggaccagaaatcctttgataacacaagagat

SEQ ID NO: 35438 - DNA, 431 bp, Zea mays
tgtattgccatcaatcaccaattatggggagattaaaagctctcttgtgggttttggtggtttggatgacaacccaattaaaggactaacaagtgtgctaagtgttgaacaggtgcttaatgcaaagctaacagggttcaacacaagtgaacaagtgtgatggtccaaagactagattatctatagataatggacatcacaagtaagatggacattgcttaagtgagactcgatgtgtgtaactcagagacaaccgatcaagccaaggatggaggcaagaagagcttcgatgtactgagtgcatgggagaaggtcaaggagactaggaactcaaagccaggggtgaagaagaagacttgcaaagtcaaggttgatcgagttaagaagagttatggtgcatcaaggatcactacataatgacatgacttaca

SEQ ID NO: 35439 - DNA, 462 bp, Zea mays
tataaccactagactagaggccctttcgcagcaatgaaacactatgaataaacaagatccaaataattccaagtagagtactaaccgataatatttttagaaaaatattcggtgatagtttctgatttaagataaattagctatgatttctatgattttcataaaacagataaccacctttgaaacaagctaggtaccaaatttcaacaattggagggcatacctggtttataattcaaggttgaaaataggactgtcatgtaagatgaaggttaaaagcggactttaaccaaaaataaatcacgattttttatgaaaagaaatcgttagttaagtagaagatgcctctcctatcgcattaattgcattaacatgaaaacttaaagtaactttatcaagagtaagcgagcatacctagaaataggaccagaccattttggaacttctgcttgaaacttagta

SEQ ID NO: 35440 - DNA, 426 bp, Zea mays
  unsure (1)..(426): unsure at all n locations
agcttgacaatgaagagatggcgctcgttattttatgcttncgcccaatcctcaaacaaaggagggggaaagactacaagtcccgctccaagaaggtttgctacaagtgtggtaagcccggtcactttatagctaaatgtccattatcaagtgacagtgacaggggtgatgaccagaagggaagaagaaaggagaagaaaagatactataagaagaagggcggcgatgcccatgtttgtcgggagtgggactccgactaaagctcaagcgactcctccgacgacgaagacgccgccaacatcgccgtcaccaaagggcttctcttccccaacgtcggccacaagtgcctcatggcaaaggacgggcaaaagaagaaggttaatctaactccttcactaaatatgaaacttctattgatgataatgc

SEQ ID NO: 35441 - DNA, 464 bp, Zea mays
  unsure (1)..(464): unsure at all n locations
tcccatgttggatcaaagagtgaatagtgttgcttgaccagtgatgtaaaaacggctttcgtctcactgactttcgatctagatctgaccaccttgctcttgctccaatctgcgggcagaaaaaggaggtagacaaattagaagagaaatcacaaagaagcatagatcgagaagctgagatcctggtcactccctaaagaatacggtgatctgttcctgctctgcatgccttcgggcaccatcaccaccagcccgaatgggccgacgccgcacgagtccgacaaggaggtgtccttctccacgcacgtgtgcagcttgtgaggatcatgcagctactcggggtccagctcctcaacgtcctctaggctcttcagcacctcgaacacaacctccatgtccgtatgcatggcatcgactatattgcanaaagatanggagtatatgatgcaatgaatcactaaaat

SEQ ID NO: 35442 - DNA, 306 bp, Zea mays
atgggctcaagcaagccccaagagcatggtctgaatgccttatagatttccttattgcaaatggcttcaaagtcggcaaggtcgatcctactttattcactaaaactcttgacagtgatttgtttgaatgccaaatttatgttgatgatattatatttgggtctactaacgaatctacatgtcaagaatttagtatgatcatgacacaaaacatcgagacgtctatgatgggggagttgaagtatttcttaagatttcaagtcaagcaactcctagacggcaccttctttatcctaacgaagtcac

SEQ ID NO: 35443 - DNA, 425 bp, Zea mays
tgcaagcttgagcacattagcctccacactactgtttctaccaaatatgcttacaatgatgattgtttgtcttggtattcagaatgatatccataaaggatatgatgaatctgtgatagattccaaaatttcagatcattaatgaccatcagtaatgaattgttatttccaactggttatggttggagtcaggaattttgcacgctcctgacttgtgattaactgcatgtactgcatgtacaagttcccctatggtttttagtacgtgggaatccataaaagatttcccatgcgtacattgggtatgttcccaatctcaccaccgcagcgtacatatatgggcacacagaaaactggtgatctatgtgagaattcattctccgtccatattaagaattagaatctcttcatgagaatctatttat

SEQ ID NO: 35444 - DNA, 444 bp, Zea mays
  unsure (1)..(444): unsure at all n locations
ggggatatcaaccaaatctgatgctgacaagctgaagtatggcctattcgcaatctntccgtgcgtacagccagccttcagaaaagcggtagctgtgcctcgagaagctaccagggcgcagaagtcggcatgcccaccaataacttcgttaagagcatcaacctcgccttcaatatgttccaaggtgctgggcaggttttcggctgaaggtgaaaatttttcagaactggctccgatagaatgaaatacgtccttcagccgctgcacgcatgggttgccgaaatataggcatttctcttggagatccttcaatgatttttgcaaatttgaatttttctcgacctgagtctagagacttgcttcaagcttctccttttcttgctcatatttttctaactttatgagtaaattcatctttaaactgtcatattcggcttggacctc

SEQ ID NO: 35445 - DNA, 343 bp, Zea mays
gctactttgtcgagcgctatggccctgacactcggcgcagcacatctatgccgagtgttacgctgggcctaatgaccagtctacaccttattaatatggttgtgctactatccaaccaaccataaggatagccagttacgtcacatgaataacatattcatcacatatgtaaccaacgccgtcgatcaaacaagttctcactgcacttgcaacatgttctaacacaaacttaattatccaacactcaacaacataagtcttaagtgtcttacagagccttagcaacagctaagaacataacgctcaaaaaagataatacctcatctaggcggttgctggacta

SEQ ID NO: 35446 - DNA, 440 bp, Zea mays
  unsure (1)..(440): unsure at all n locations
agctnttatgctattcttatcaaaaaaatttatgcgaggtgtgccactcttattatggggggcagcggctgtatgcaagtgatccaagtaatacaactacataaaaaggaattacaatgttcaatagcaatgtaagtagacataaccaacatcgtaaaacatgttacataactaccaaaagttagcaaccaaaaattaaataaatgtgcatacggaaaaacactatacttacaaggacaacaatggagcatccatatatagtcgtggagacatttgtggtgatccggttgtgccacttcttggcagcttcacatagatcattaaaaatcaactggcaccagtcgatctcatggaaacggtgcatttcttctgtgagaagcacctcatgatatgtgatgccccagctagcagttggaaacagcaaatggttgaatagaatg

SEQ ID NO: 35447 - DNA, 454 bp, Zea mays
  unsure (1)..(454): unsure at all n locations
tcagaaaacgaagccttcgcgttccagaacttattttgttaacatctaacaaaagctgaaatagaagagcttaaagagtacgcccaatcctgtggatacaaacctgnggcactcctcttcggaggcgttgatgacgagaaattagagtgtattctggaccaaacaggggccaaagttatcagtactctgtccaagagtattggattcccgaagctagaaacagacatcagccgctaccgacgacaacatgtcgttggtagtttattttactccaacttcaaggtgaatgaattgtcccttaacctttattgcttctaataaaaacatgtctgacgaaggttgtgtttgtgtagagtatgttattgagcanagccttgcaaatgcaacaagatcttgaagataaaaagcatgatattataatccggaaatttggataacacaataaaggagctat

SEQ ID NO: 35448 - DNA, 426 bp, Zea mays
  unsure (1)..(426): unsure at all n locations
agcttgaccctgaacatgggtgcattttttattcttgaacaangagggccagaggcataccgactccaactaccagaaacattgtctgctttgcacaatgtgttccatgtataccaattgaagaagtgtctttgggttccaaattgaaccatcgatatagtggatgttgccttggaatcagacctaacatattcagaacatcctattcgagtcctgtatcaaaaggataggatcactcgaataagaactcttagaatttacaagatacaatggaactaacatactgaagatgaagctacatgggaaacccaagacttcttagaaaagaatttgcctgactgtttaacttcatgtgatttgtgagatatgtacaattgtttgtaaaaatggaataaaccctaccaccctctccttgtatgaaaacaa

SEQ ID NO: 35449 - DNA, 113 bp, Zea mays
  unsure (1)..(113): unsure at all n locations
ttgcagaaacattctaagactcctagactccgtctcgattcattngatcgactatgttagagatttgagctccgtttgagttgcgtactccctgtgctgtgttttgagctcaa

SEQ ID NO: 35450 - DNA, 306 bp, Zea mays
  unsure (1)..(306): unsure at all n locations
agcttcttctggagaagagaaagcgactttcttatgcaccngggnggnattgatcttagggttgaagagttatccgaacttatagagtatgctaggccacagacctggttccattttgtttaacggcgtagatgaagaggcactgggattccttcctgaccaaccccaagctagaattgttaacactgtgacgaagtctatcggcttcctgaagctagagaatgagttgtgcaccacacaacaccacatacattgggagcccaacttactctaattttacagggtaaagcaccgatgcaatacatc

SEQ ID NO: 35451 - DNA, 333 bp, Zea mays
aagatcttcatcccacatgggctagtttgtgattccatagccaacccataatagtcttagcaggtaaacaagtgttgagttcacctatgtcttctttaatatcaactaagatatcaaatgctataacactcccttaaacgctatagaatcatcacttcttcctaagacaggaacacctacattctgtaaaagacagatgtagcccattttacataattgagaaactgaaagcaaggtataatctagagaatctacaagaaaaacattggaaatggaagggtcaggtgatatagctattttaccaagtcctttggacaaaccgtgagtttcatc

SEQ ID NO: 35452 - DNA, 438 bp, Zea mays
agcttatcatctaaactgaaggtggtgaactactcaagaaacaaaacgaattcctttgaatgtatggtgaatatagtcaaattaccaacaaaaaactttatgcacgccttggtattgcaccaagggtataatatgaatccacactgtgggtaaatgctgaaccaaataatcactactacaggtgcaaaaatcgacacttggcgccaacgaccaagcaaataaagttgagagaaacagcccttatacaaaaggcggaacccacagttgccagcgtactataaccaacgccagctgcaatgctaacatatactccctccgttgtttttacttgacgttttttatttcaaaaatgcactatcaggtatcaaatatataagattggaggtagtagttgccattaccgctactactctaaccacagaaatccctctttgatca

SEQ ID NO: 35453 - DNA, 448 bp, Zea mays
tctataaaagagcgggaaggagtgaggattgaataatgttactttgaaacgagagaaacagggagaaagatgagaactagcgtttttgttctgtattgataaaatggtaattgatgtccctattagtccatacaattgtccttttatagatgtagaaatccacttgccccctgacaatagccccacatgtcagccactcctaacaccaactaacaggagtggatgatgctgatataaatgaacttggagggtggcagtacaccattgagctagaggaaggagaggagatcgttggctgccacgactgcctggcgctcgccgcgatcctttggctctatgccgtctgacatgcttggtacaacaggtttgccacttatttgctctcactgtgatttggtgaggttaagttaggcgcctctatattcatctattgtcatcatagtgactc

SEQ ID NO: 35454 - DNA, 435 bp, Zea mays
agcttctaaagggagagcacattttatgattaacaaatgttcattctgagaaagacaggatttgtagcgcatgccaagcaggaaagcaagttggaacccatcatccacacaagaacatcatgacgaccgacaggccactggaactcctacacatggatctatttggcccgatagcttacataagcatcggcgggagtaagtactgtctagttattgtggatgattattctcgcttcacttgggtattctttttgcaggaaaaatctcatacccaagagacattaaagggattcttgagacgggctcaaaacgagttcggcttaaggatcaagaaaattagaagcaacaacgggacggagttcaagaactcacaaatcgaaggcttccttgaggaggagggcatcaagcatgagttctcttcttcctacacaccac

SEQ ID NO: 35455 - DNA, 448 bp, Zea mays
  unsure (1)..(448): unsure at all n locations
tagaanagtctggcataaatctgtgattatattctaccattccaaggaaacttcggacctaatgaacagtggtcggtggtttccactccaaaatgtccttgactttgccggggtctaccgcaatccctctggcagatagaacatgtcccagaaattgaatttcctccagccaaaacgcgcacttgctgaacttggcatacaactgatgttctctcaggcgcgttaatacgatccgtaaatgttgggcgtgctcctcttcattcttggagtatatcaaaatgtcgtcaatgaagaccaccacaaacttgtctagctcgggcatgaacaccgagtncatcaaatatgtgaagtgggctggagcatctgtttacccaaaagacattaccagatattcaacaacctatatcgcgtagtgaacgcggtctttggtatatcttctggccgaata

SEQ ID NO: 35456 - DNA, 448 bp, Zea mays
agcttgatgtttagaacgacatcatcttctcccaaatctttcatttcaaaattgctcgatagaagacttttaactttctcaatcacattgagatttgatccaaagatcaagatgtcatcaacataaagacacaacataatagactcacccccaccataccgataatacacacaagtgtcagattcatttacagcaaaaccagcagctgtaagagtattatcaaacttttcatgccattgcttaggtgcttgttttaggccatacaatgattttatcaacctgcacaccttgttctcttgactatccgcaataaacccttctggctgatccatatagatctcctcatccaactcgccattaaggaaagctgtcttaacatccatctgatgaatgataagaccataagaggctgccacggctattaatgtgcgaatcgtagtcaatcgag

SEQ ID NO: 35457 - DNA, 451 bp, Zea mays
  unsure (1)..(451): unsure at all n locations
tgtccatttgaaaacttaatttggcaacgatattatactatgtggcgcgttaccgacaacaattacacaacaacaaaacaatcaatgtaattattattgatatttcgaatttattgctttcaaaattaataaatacaattntttcggatcatttatatagtgtcaaatgagaagaaaacaaagaataatgaaaaagaaatggaaaatgtgaatctgttaacactgtagctttaggggatgaaatttataggacgctgctggagacggagaatatatagaggacagaatcttttatagtgttctgtaaaggacagagaatattcctttatgggacgaaatttatgggacgctgctggagacagacttagccccttcctcattgattcaccttcatgtacatctagtgtagcactgctagagttagagtntggatcatatgggcatcaattcc

SEQ ID NO: 35458 - DNA, 444 bp, Zea mays
agcttattgaactcctgtagaaggtcctatatgatataactcagtcaacatcaacgatagtggaggcgacgaccactctgcaacatatttgtatagccatgttgctaactgtaaatgcaacttgttagatcgtgtctagcagttcacccatatgatgttagataaaactgcttgagatagccttagcaatagaaagtattaaatggtcgaaatgctaattgttctaaaattaaacttttattaatctatttttttgttgctgagcggtatagttagtaaagtactcttgccacttcatgttgtacccgtttcgcgcccttagtgtcttctacacgattatcgatgtaaatatcttgctcccagggccgctcctgactttatgggggcctatggcgatatccaatatggacgccccatccaccatgtatatacactatatataca

SEQ ID NO: 35459 - DNA, 299 bp, Zea mays
  unsure (1)..(299): unsure at all n locations
tgcttgcaaaanagaantttcaccaaagatactccatattatcatggcctagcaaggaagaccgtcttttttacattttagtccttttttggtttcacaaatacgtcttttttagtttcatttcaaaaaatagaccctcagctnggtgttgttttttttgtctctctctaaacaattgttggcgcgagtactttaagcttttcttcacaaaggtacgtaccttggatttcctttttattaatttaggcgttcttttatcttctcgggctcgacaatgtacatgccctttatatcttcct

SEQ ID NO: 35460 - DNA, 392 bp, Zea mays
agcttctcctgtacaagcgccacacttacctttattgcgaagctgccacatacaataacagaggagcccctagcgtgggtggagttagcgttgttagatctatcaagtattgcttcagctcttcaaaggctttctgctgagctgatccccattgaaagactttggctgattttagcacttcgaagaatggtaaatttctctctgctgatctagatatgaatcgattcaaagatgccaatcttcctgtcagccgttgagcccccttctttgtgcttggtggctccatccgaagaatagcctccattttgttctgattagcttcgatcccctttcgtggaactaaacaaccaaggaattttcctttctttacttctaagacacatttttctgga

SEQ ID NO: 35461 - DNA, 434 bp, Zea mays
tctaaagggagaacacgtgataggtttaactaatgtgcaattctattaatatagaccttgtgcagcttgtcaagcaggtaaacaagtgggaggagcacatcacaccaaaaatgtgatgaccacatcaagacctttggagatgcttcacatggaccttttcggacccgtcgcctatctaagtataggaggaagtaagtatggtcttgttatagttgatgacttttcccgcttcacttgggtattctttttgcaggataaatctgaaacccaagggaccctcaagcgcttcctaatgagagctcaaaacgagtttgagctcaaggtgaaaaagataaggagcgacaatgggtctgagttcaagaaccttcaagtggaggagtaccttgaggaggaagggatcaagcacgagttcttcgctccctacacaccacaac

SEQ ID NO: 35462 - DNA, 452 bp, Zea mays
gcttgtgaagattcttcatgccaacatgttctattcggcgatgccagagccagcccatgttagtcttagcaattaagcaggtgtcgagttcagctctatcaaaatctaccaagtatagctgaccctctaacactcccttaaatgctattgaatcatcacttcttctaaagacagtgacacctatatcagtgaaaagacagttgtagcccattttgcataattgagatacagaaagcaaattgtaatccaatgaatctacaagaaaaacattggaaatagaatggtcaggagatatagctattttgccaagacctttgaccaaaccttgatttccatccccgaatgtgatagctcgttggggatcttggttcttctcgtacgaggagaacatcttcttctcccctgtcatatggtttgtgcacccgctgtcgagtatccaacttgagcacccc

SEQ ID NO: 35463 - DNA, 425 bp, Zea mays
gaaccgagggcccgcgtcaccggagaagccaaatcgcgctcatcgtagttcaagaactcgccggcgcacgtggaccgggtaaaccccttcaccatttcccgattcgttgcgcgcatggcctctgtgtcatcccgtgaagctcctcgtgcccattaattaaactctcccgccgtggtttggccggagcaggcgccgccgtcgatccccgccgcctgtgttcgtggccaggggagccccgaccacctctgacgccgacccgcacatcgacgtgaccgtcgcgacctcctgaacatcaccgaccacctcgccggacctccctcgccgccggtaagccggtacccttttttttccgcgctactgttcagttaaggaggactggggtgaagggaagaatccaggggtaaggaaaagcacgactcagtgat

SEQ ID NO: 35464 - DNA, 414 bp, Zea mays
agcttgaagatgatctatgagtagccagaatatctgtttgcatcggaaccatagctcctgaggccagatcttgttgaagctctatctcctcgaagagtctgcaaagagaagatatgtagctgaagtaaagctatacccataacccttctaagctgaatctcgaggatgaggcttcttttaagtgggggagatttgtagcatcccaaaaattcaaatcttgaatttttctgaaactcgctctgaattcaaaatgaatttcaaatttcatttcaaaatgtttgtttgcatgtgatatcaccaataaaatatagggtctatattctctccaaaacctcctcaatatcctacaatatttcgtagcgacccctcagatcttccagaatactggcaaaattcaccgattatctccagatt

SEQ ID NO: 35465 - DNA, 465 bp, Zea mays
  unsure (1)..(465): unsure at all n locations
tatgaagattcttcatcccaacatgggctagtcgacggtgccagatccaacccatgttagtcttagcaatcaagcatgtgtcgagctcagctctatcaaaatctactaagtatagctgaccctctaacacacctttaaatgctattgaatcatcacttcttctaaagacagtgacaccaatatcagtaaaaagacagttgtagcccatttgacataattgagaaacagaaagcaagttgtaatctaaagaatcaacaaaaaaaaacattggaaatagtatggtcaggtgatatagcaattntacccaaacctttgaccaaaccttgatttccatccccgaatgtgatagctcgttgggaatcttggtttttctcatatgaggagaacatccttttctccccggtcatgtggtttgtgcacccgctgtcgagtatccaacttgagccctcggatgcataaacctac

SEQ ID NO: 35466 - DNA, 442 bp, Zea mays
agcttaggaatcaggacatgaatttgaatgtattaatacatgattagttcaaacttccagagagatggagggctcccaatcggtttaaccaacagctttaaagttgagaaagtttacctttacctccgatatttacttgaaggcgcatatatgataaggcgataagctttagatttttagcattttttgaggctgtgatccacaaataaaattgtattgtctatatattggaggatggataaagccccatcaactagacatgggattacaccctcgacttgaccttccccttttgcatatccccattctagaactctgcaaccatattgtcatattatctttgaatcttccctctcctactcagatgaattacaacaagatcgctcgagtcacattcttaattgtgacacattattcaaataatatgcatttcaagataaga

SEQ ID NO: 35467 - DNA, 413 bp, Zea mays
tcggcgtgctagctgaaaatgataccgacttatagatgaaaaggctattcagacctcggtggattactatagaattattaccaaatgtagagggcatgaatgtaattttgtatgggctgtgtcccgtgtctataaataggtgaacagtacccccgtactgttcacgctgatttggcatttgcttttgcgtcacacctgtactttcatctccttccaagctgaaggtacatttgtaattcgatgttatttctgtttcttcacaataataataaggtgataataatatataattgtttatgttatccttcatattccttatgattcattcttcgtcattgtatgctgtgtttatgaaggtacgtccttcataaccttcgtccgaaaatcattatatcctaacggaaataatgctt

SEQ ID NO: 35468 - DNA, 438 bp, Zea mays
  unsure (1)..(438): unsure at all n locations
agctngtgcgacttggcaaaaaaatagatatttttaactcacaagatcagacatgcctaatgtatatgggcactgtaacaatgttaactaccttttcaaacgagagggtgattggaaactatcatgttgctcctgctgagtatgttcacgtatgacaatgccaaccatctttgccatataaaatagagttgtgagagttttctttctcgaagtgccaataacccacccccacatagagaaacttccactactccaaaatagatcagtaaagacagttcaataaatatgtcatcaaaataactttacaaggcactaaacaaaaagagatatatccagaaacaacagcttcatgtacctctcatgtaaggccgaatatttaagttgtcacgttcatgtggatntaaaggtgcacatactctccaatatttttaggtggat

SEQ ID NO: 35469 - DNA, 453 bp, Zea mays
taccattataatggtagcgttggggtctttgggcatcaacttttctttgccgaccggtcctgttatctggacgttatcacctggctgcagatcacctgcattatgatatgagcacgcacaggggaacaagctagatcagatattcgggtgccaatcaagtcagatcaggatttgtagaagaagattgtgtgctgacctaccgcggcggccgcattcccgcccttatcctcctatctgatggcacgcggctcccgcctctcctccgaccctcctccgcctccgcatcatcgtccgagccacaccgcctggtgtcctcggtggagcagaacagcgcctttcgcgccccgtccctgccgccaaagcgcagccacgatggggactgcgagcccaggcggagcgctggggaaccaccaagccgaagcgcatagggcatggcagcgactgcgtcagtga

SEQ ID NO: 35470 - DNA, 441 bp, Zea mays
  unsure (1)..(441): unsure at all n locations
agcttaaacaagtntaaatctctaagaatcttcttttatttatcttattaaataaataaagcatacatctacattagtgcatattcaatcctaaaacttatagtgtgcagacagtaagtgaacctatggtatttaaacagataataattctatgaacattttgcaatttgaatcactaaatgtggagttcatatgcaaaagttatgaaataaacaattatgggaattcaaaatatgaaattagggcaaattctgtgaatatttaattgtccagggctaaatctgcaacacaacagccacgcaaaggggtatcgggtgaatctaaccgtcagatctaaaaccaacggctgagattagatctgcggtcgagggcgcgcgcgcgagcgggcgagcgctgacatgcgggccaaggagtgtcagcgacagtgagggagagcgcgct

SEQ ID NO: 35471 - DNA, 357 bp, Zea mays
tgatgtgattgttcctggccgaagagagcactaccaggtttgcgcaacattcttaactgccatgacgaaggatttcaccatgattgcggtattgcccccataccaagatatggttgcttcgtagctcatcaaaaactgcttcggatctgagtgcccatcatacatggggagttggggtggcttgtatgatgggggccatggggtagcctgcaattctgctaacagaggagaagcatcatcaaaagcataatttccatgatggaagtcatcataccactcatcatcatcatatgaattgtcttgacaaagctctctgcgttgaggtcatcaatcctggtcatcttgagtgagatgacg

SEQ ID NO: 35472 - DNA, 447 bp, Zea mays
agcttagcaagtgtgagtgttggatcagtttatttctgtcttaggtcacattataaaccgagagggattggctgtatatcccaacaacgtaacaactatcttgggttggaaagcaccaaaagatgtcagtgaaatcaagagtttcattggaatgaccgattattatcgacgtttcattgaaggtttctccaagattgccaggctaatgacagccttgttggcaaagaaggttgagttcaagtggaccccagcatgccataagtcctttgagacaatgaaagagaagttgacaacggcaccaatactgattctgcgaaatgttcacaagtcattctcagtgtattgcgatgcttcgttcaccggactgggatgtgtgttgatgcatgaatggagagtactggcatactcgtcccgacagttgaagattcatgagaagaactatcctac

SEQ ID NO: 35473 - DNA, 448 bp, Zea mays
tcacaaggctctgtccaggcgtctgtactagaacttcgtccatggtactagttacatcaattggcggaacagatctcacgcgaccaatatataatatacacggcgaccaccatcgggcgcaggttcacgtattgtgtcaccgcgattcgagcggaccgtgtggattacgccacacggaaatggatcattgtcgtcggcgagctgggtaccacctccgacacgcgtggtacttcttaacttgttcaccaatcgagctgatgaggactcaccgctgatgagaatttcctggcgtccgccgcgtgtcacatcaccttactcacctgcatgtatccattctgtaccatgcccgtgatcgtcggagatctgcaccgtgaatccatatcttcacgcgcccgactattgattttccgaacgccctcatctggtaaattggcgcatcgtcgttaag

SEQ ID NO: 35474 - DNA, 444 bp, Zea mays
  unsure (1)..(444): unsure at all n locations
agcttggtgacgatggagaagctttttctctataatcctggctgtcaaattggttgtcattatcgactatgagcttggacgggactcccaatcggcaaacaatgttttgtcagaagaacttctgggcggtcttcaacgttattatggatactgcccttgcctcgatccacttggtaaaatactcgacagcgactaaggtgaacttgaggtttccttgggccgagggtagcggcccgacaatatccaccccccatcgttgaagtggccatgtgtgggcaatcaactntgtgtattgcgaagggttgcttgaacggtgagagaacttctggcaggcttcgcacgaccgcgtgactcgattcacggcgcagaatatagcgggccagtataatccttgacggatcaccttggcagcgaggcccctangcccccgaatgagagccacaa

SEQ ID NO: 35475 - DNA, 402 bp, Zea mays
  unsure (1)..(402): unsure at all n locations
agagcacactttgggacttaccaatgtttattntgagaaagacaaggaatgtatcgcatgttacgcaaggaaacaatatggtgctcattatccacactagaacattatgacgactgacatgcctctttatctactccacatggacctattctgcctgatagcttacataagcaatggcgggagtaatgtactgcctagttattggggatgattatttctgatcacttggctgtgtctttttgtcggagtaaatactataatctacgaaaccttaaagggatttttgtacgggctcaaatgattctgcttatgaaaacaaataaaacgacactggatgagtctaaaactacaatagaagctcttgagataaggcataacctaatctttttctaccccaacaaa

SEQ ID NO: 35476 - DNA, 440 bp, Zea mays
agcttgtgaaagatcttcatcaccacatgttcttatcagcgatgccacagccagcccatgctagtgttagcaattaagcatgcatctagaccagcctcctcttttgcaaaatcaactaaataaagtttgtcgtctagtacacccttaaaagctaatgaaccatcacttcttctaaagacagacacatctacatttgtgaataaacaattatatcccatattgcataattgactaacggataacaaattatatccaagcgactcaactaacaacacattataaatagagtgctcggatgaaatagcaatttttcctaaccctttcaccttgccttggatcccatcaccgaatattattgaatcttggggatccttgttcttgacgtatgaagagaacatcctcttttctcccgtcatgtggtttgtgcatccgctgtctat

SEQ ID NO: 35477 - DNA, 393 bp, Zea mays
  unsure (1)..(393): unsure at all n locations
ttatcaaatggacgtgaagagtgcctttctcaatggaccaatctaggaagaggtctatgttgagcaacctcccggctttgaagacagcgagtaccctaaccatgtctataggctctctaaggcgctttatgggctcaagcaagccccaagagcatggtatgaatgccttatagatttccttattgcaaatggcttcaaagtccgcgaagccgatcctactttatttactaaaactcttgacaatgatttgtttgtatgccaaatatatgttgatgatatcatatttgggtctactaacgaatctacatgtgaagaatttagtaggatcatgacacacaaatttgagatgtctatgatgggggagtcgaaagattttctatgattncaagttca

SEQ ID NO: 35478 - DNA, 329 bp, Zea mays
aactttcccaactagagttctggacgcatcatgtactccgcattgtccggcatggatctcctctaacagatgctttccaatagccgaatgaatgcatttcatgaggactcttgtcacacctcttatatacagtgtgtcccctatgaaggtgtagtggcttgattgtcttgcgatgcgttcagctgccgccttgtcatctaattcctcttcattttttatgtacccgatgataggctctctccagacattagggtccaactctgattggcttaaggtgttgcactcttccgcatgatctaagataatacctcggcatgatacttcttgga

SEQ ID NO: 35479 - DNA, 494 bp, Zea mays
  unsure (1)..(494): unsure at all n locations
tactcaagcttagcaagagacaccaagtgtgtggtggtccttgcacggtcttagtgacccttgtgattaagggaaggctcactcggtctaagtgaccatttgagagagagggaaagggttgaaatagacctggtctttgtgacctcctcaacgaggactaggttatttggaaccaaacctcggtaaaacaaatcaccgtatctactcgctttgattctcgcttgatttgtttgccctcttacctctctctaacgtatccttgctagtattaatttgagtttgctcccatacgtcatccacatcctttgagcaactcttagcaagagaaacattctttcggacttgaatttaattctaacgctaaccccggtcctagtgtgtgtttaaagtttataaatttcaggtttctcctattcacccncctctatgcgactttcaattggtataagagccagtgcttcattaagagtctaaccaactctaagcgatgtctg

SEQ ID NO: 35480 - DNA, 406 bp, Zea mays
  unsure (1)..(406): unsure at all n locations
gctttaccctgtagtctggactataagttggttacggtatgtgtaccttatgcagttgaccatttgcagcatttgcgtaaagaggactctagggagaagcctcgtagtaagaccctagccattcacctcggaagtgaatacgggtctagctaacctgggctagaagggaatcgcgactcatcggtaaagatgtgccacctctgcagagtgtaaaactgatatatcagccgtgctcacggttatgagcagcctggactcctcacatgataattgaacttgaagatggaaataaatcgaaatccgatgatctgccaatggtttgcttaagtggtttcacttaagtgttttttatatactcttgtaactntgtttaggacttgttcggttgtaccacaatccatatgga

SEQ ID NO: 35481 - DNA, 445 bp, Zea mays
  unsure (1)..(445): unsure at all n locations
tctgaaattcagatattctgtgtaacagagtcagctttgagtgtgaatgtaaccatgatctagtgatcaaatgagcttagtcactatagtcgatttgtagctggtatgttgcactacaactttgatgtagagactcgaggatgttgccatagaaatttgggaagaaaactgtcctagaacttggctgtcatgtgcactgaatgggctatcccatggtacagtgcctgaaccggatcagatcgccagcgcagggaatcttcaccgccgacgacccttccgccgtgattcgtgtcgccggcgtcaagattcacgctcggagtaagtcgataacgtcgcggtgtcaaaatatcctcgccgtccgtgagctggacgccattgcggctcatcgncgtgcctaccccttgctgactgaacccgtggataaagtctcacccgccgtaccatc

SEQ ID NO: 35482 - DNA, 444 bp, Zea mays
  unsure (1)..(444): unsure at all n locations
ctgcagcttcggtctttgcttatagctcttgttacatgactaaaataacttgagaatcagtttaagaatggcccttctgattcccattgcctttaacttctgaagacccaagagcagagctttgtactcagcaatattatttgtgcagctgaaattgagtcttgccgcataacaggttttaactttagaaggtgaaaccaacacagcagctgctcctgcttcgaaggttccccaagacccatcgcaaaacactgtccatgtttcggcatctttattcgtttcttcctcctgagcccctggcgtccagtcagcaatgaagtctgccaacgcttgagactgaatcgaagatctatgaacataatcaatacanaattcattgagctcttgcagccattgtacaatccttccagtagcttctcgatttctcataatatccttcaacgg

SEQ ID NO: 35483 - DNA, 443 bp, Zea mays
  unsure (1)..(443): unsure at all n locations
tggcgtacaactgacaatctcgtagcctctgcagtacttttctcaagtgctcttcatgctcttgctcattctaggaatatacaaggatatcatcaatgaacaccactacaaacttgtcgaggtagtccatgaacacactgctcatcaagtacatgaaataagctggtgcatttgtcaaaccgaatgacatgactgtgaactcatataacccatacttggtgataaaggttgtcttcggtatatccgaaggtcagattatgagctgatggtaacctgacctcagatctatctttgaggacacatcgactcctctcaactaatcgaataagtcttcaattctgggcacgggtacttattcttgatagtgacttcattcaaggatctgtagtcaatgcacatnctttttgttccatccttcttcttcacaaatagcactanggatg

SEQ ID NO: 35484 - DNA, 391 bp, Zea mays
  unsure (1)..(391): unsure at all n locations
atggacgtgaaaagtgccttcctcaatggaccaatcaaggaagaagtctatgttgagcaacctcccggctttgaagacagtgagtatcctaaccatgtctataagctctctaaggcgctntatgggctcaagcaagccccaagagcatggtatgaatgccttagagattttcttattgcaaatggattcaaagtcggaaaggccgatcctacactctttaccaaaactcttgaaaatgacttgtttgtatgccaaatttatgttgatgatattatatttgggtctactaacgagtctacatgtgaagagtttagtaggattatgacacaaaaattcgagatgtctatgatgggggagttgaagtattttctaggatttcaagtgaaacaac

SEQ ID NO: 35485 - DNA, 348 bp, Zea mays
gaaaatctggtatgaatcggcggttatatccagccagtccaaggaaacttcggacctgatgaacggcggtcgggggtttccactccaaaatgtccttgattttgctgggatctaccgcaatccccctggcagatagtacatgtcccagaaattgaatttcctccagccaaaacgcgcatttgctgaacttggcatataactgatgttctctcaagcgcgttaacacgatccgtaagtgttgtgcatgctcctcttcattcttggaatatatcaaaatatcgtctatgaagaccaccacaaacttgtccaactcatgcatgaataccgagttcatcaaatacgtgaagt

SEQ ID NO: 35486 - DNA, 373 bp, Zea mays
  unsure (1)..(373): unsure at all n locations
accagtattgattatgccagatctacggaagggatttgacatttattgtgatgcatgtggccaaggactgggatgtgtgctcatgcaagaaggacatgtgatcgcctatgcgtctcgtcagttgtggaaacatgaattgaactaccccactcatgacttatagctggcagcagttgtgcatgcacttaagatttggagacactatattatgggaactaagtgccaagtgtacacggatcataagtgtcggcgtttcgagaccaggggtccctaagccgacgagtgaatgtcgtcgcgtgccccaacccaaatgggtcgacgcggggccgagcgcgaangggggaagtgaggcggccggagacaggcgtgagag

SEQ ID NO: 35487 - DNA, 446 bp, Zea mays
tcgcacctctaaactaactcggctgcatcactcttcgcttgtggccaatagaatcctgacataaagaccttcccgactagtgtcctggacactgcatgtatcccacattgcccagcatggacctcctccagaagtcgcttcccagtagatgagagaatgcacttcatgaggacgcctgatgcaccccttctatacaatgtctccccaatgtgtgtgtagtgagccgactgtctggcaatacgctcggctgaatttttgtcatctggttcctcttcattctttatatacctgatgattagccttctcgagtcatcagagtctgactcgggttgatttatagtattacactcctctgcttgatccattgagatgctcggctgcagtatttcttgtacaaagactccaggtgggaccttgagttgactggatcctaacttgacagtaca

SEQ ID NO: 35488 - DNA, 374 bp, Zea mays
  unsure (1)..(374): unsure at all n locations
agcttactntagaatgcgcctatataaattcttgcatggattggcncttcatttttaacattntggaccacgcttgcaccatatgttttgtttttgcaaattcttttgtaaatccttttcaaagtccttttgcaaatagtcaaaggtaaatgaataagatttcgaanagcattttcaagatttgaaattctccccctgtttcaaatgcttntcctttgacttaaacaaaactccccctaaatgaaatcctcctcttagtgttcaagagggttttgagaatatcaatttgaaatacgactttctcccccttntgaacacaatagggtactaatttgaaatttccaataccaatttgaaatttccaattgaaaaca

SEQ ID NO: 35489 - DNA, 377 bp, Zea mays
tcatcatcaaccttaacatataaccattccgttttccaccctgctgcccatttgcttcggtagctgatcacaggacactctgtagtttttcgataagcaaaattatagcaaccaaagttgtcatgtaatccatcctttctagcctttgtctgatagtgcagttcatgaactccgcaaaagctgtccgcaaacggttccaccgcctggcttctgagtgcccaaatataaacactaagcctaacgatagcgttaggggttagctggtgaaaataaattccaaaattattcaatatctctgcaataatcccatgaagggggaatctcaacccagcctttaagaagcttttaaaaataacaatttcatctttctccggctt

SEQ ID NO: 35490 - DNA, 407 bp, Zea mays
agcttggacggttcgcgatgataacgggcttatgagcctacacatacatacaaccggctcaagacccttatcaacaaaataaggagctactggagcacgcgatggacggaccacaacgtcgtccgcctaatgctaaggtcatttaccgttcttgatcctcatttggtgaacaatatacgtgaaaatcccaggtacaccaagatgtcgcccgaagaagttcttgggaagttcgtaagcgggcgaatgatgattaaggaggcaagatacgtggacgacgcgttgaacggtcctagtcatgagcctcaacccattgctctcaaggcaacaaggagcaaggatgcgctaccaagcaaagtggcgcaagttgaggcggccgggctcaatgatgaggagatggccctcatcat

SEQ ID NO: 35491 - DNA, 358 bp, Zea mays
  unsure (1)..(358): unsure at all n locations
actcagcttatgaccctaaagagtggctaatttgttagggccaatctcccatggttcaagataatgagggctatatttatatcctgctgattatccttagcacaaaattaggagaattcatgctatgaaatctcattctgtttctcaccatgcttttatgtataagaatgagacttctagctctatgcaatcaatccatgttaaattgcctaaaaggaaaactcctactgcatcaaatgaacataatatttcattcaagactttagatgcttcttatgtgcttactaacaaatcaggcaaagtagtggccaaatatgttgggggcaaacacaanggctccaagacttgtgtttgggta

SEQ ID NO: 35492 - DNA, 333 bp, Zea mays
agcttatctatgcaatacttgttgcgtccatgaagatgcgccactattttcaggcacacagagatgtggtggtgacctactttccgttaaaggccattctccacaactctaacaccacgggcaacatcgccaagtgggctgcggagcttgccgagttccaactggacttccagcttcgcgacgctatcaagagctaggtcctagccgacttcatcgtggagtggaccccatcttctagcgctcctaggggtttggatcctgatttggaccccacacctgcggagcctatggttctggtcttcatcgagccccactggaccctattcttctatg

SEQ ID NO: 35493 - DNA, 376 bp, Zea mays
gtgggcacgcatctgaatttagagccgcttatcagccttttacagatggccagaccgagaggaccaggcacactcttgaagatatgctgagagcctgtgcgatgcaagatcagtccggatgggacaagcgattgccttatgcacaggttttctataacaacagctaccacgcctgcttgaagatgtcaccatttcaggcgctttatggaacgagttgccgaactccgttgcaatgggatcagcctggagaaaagcaagtgtttgggccagacattttgcttgaagctgaagagaacatcaagatcgttccagagaatctgaagatatcgcaatcgaggcagcgacactatgctgacaccataagaagagagctgag

SEQ ID NO: 35494 - DNA, 302 bp, Zea mays
tcacaatacacatcaaaacctttatgaataataagcctaattaacactggtgatgtggttagcccttcccttaatttctctaaacatttctgacatgctttattccacttaaactctttatctttcttcaacaacgaagtaaggggtttcactattttggagaaaccttccataaatcttctgtagtattctgcttatccaagaaaactcctgatcttggacacatctgtgggttgttttcaatttaatatttcacttaatttactggagtctacgctaattcctccattggtggtaatatg

SEQ ID NO: 35495 - DNA, 397 bp, Zea mays
  unsure (1)..(397): unsure at all n locations
tgataaaaacacatgtggatatatagtatgactagcatgatatacctacgacgtgaagccttatgatgatagaagggtagctaggtggctaagtgattaagccctacacgccacttaaaaggatgggagttcttccccattccctttacattaatgtaaggtcgtttatgacgagcatgcatgcattcttaattaagtaaatggataattgagtaaagaactaaaaacaaaatgatgaccaactaagtatcctaataccgttttttatagttggagagaagctgagttttattttgcttgttctttntataattctttttcttttacttacgcttaaccgtacacagatgacttcccacggatcctcagacgacgggaatgcactgtcccacactga

SEQ ID NO: 35496 - DNA, 361 bp, Zea mays
  unsure (1)..(361): unsure at all n locations
ttttgcaaatttgaatttttatccatctcagttttaaggcttgcttcaaggtgtttcttttcttgctcaaatttttctgattgtttcagcaattcattctttaagttgtcgttctctgcttggacttcagccaaggagccttctatagactggataacaaagtctttcttttctaatgcaccttcatgctctntaaccatgatttcaaggtcttggatggtgaaatccttctttttcagatcagcttcgtaattttcaactttttcagccaaatcttggatgatggctttgttcttctcgtcttcgagatcttgttgtatttttagaaccttacttaacaatatgctctgtcaaacaatct

SEQ ID NO: 35497 - DNA, 366 bp, Zea mays
  unsure (1)..(366): unsure at all n locations
tctaaagggggaacacattttatgactaacaaatgttcattttgagaaagataagatttgtagagcatgtcaggcacggaagcaagttggtgttcatcattcacacaagaacatcatgacgactgacaggccactcgagctcctacacatggacctattcggcccgatagcttacataagcatcggcgagagtaagtactgtcgagttattgtggatgattattctcgcttcacttgggtgtcctttttgcaggaaaaatctcacacccaagagaccttaaagggattcttgagacgggctcaaaacgagttcggcttaagaatcaagaanattagaagcgacaacgggacggagttcaagaactc

SEQ ID NO: 35498 - DNA, 477 bp, Zea mays
  unsure (1)..(477): unsure at all n locations
tctaaagggagaacacattttaggattaacaaatgttcattttgagaaagacaggattngtagtgcatgccaagaagggaagcaagttggcactcatcatccgcataagaacataatgacgaccgacaggccactggagctcctacacatggatctattcggcccgatcgcttacataagcatcggcgggagtaagtactgtctagttattgtggatgattattctcgcttcacttgggtattctttttacaggaaaaatctcaaacccaagagaccttaaagggattcttgagacgggctcaaaatgagtttggcttaaggatcaagaaaataagaagcgacaacggaacggagtttaagaactctcaaatcgaaggcttccttgaggaggagggcatcaagcatgagttttcttctccctacacgcctcaacaaaatggtgtagtggagaggaagaatagaactctattggacat

SEQ ID NO: 35499 - DNA, 473 bp, Zea mays
  unsure (1)..(473): unsure at all n locations
gcttgcacttacgaccaaaccgcacacagtttcatatnatattcaattggtcaacaanagaggtaaggtctaggtaaccaagctggtacgaatgaatcttgctgttggttcatatcgtgatgatgtcgactgtgatgtcgcgcctatggatgcttgtaatattctgctagggacaccatggcaagtggattcagattgtatgcatcatggnagatcaaatcaatatgccctcatatgccattgataacaaaattatantgcttcccatgtccactgatgctattgtgcgtgatgatgttgctatagctaccttagctaaaactgagaacaacaagaatatttatgttgttggtaataacacagatgggataaaattgaaaggacattgcttgtttgcacacaaactgatgtntaatgaatatttgccttcactactggtgcctacgcctatgtatgcaacgatgctttgattt

SEQ ID NO: 35500 - DNA, 381 bp, Zea mays
  unsure (1)..(381): unsure at all n locations
actaagctggagtttttgccacctgaaccatatcgtgggacttcgctttttacatgcccaatccactancttagggccaagactcatgtttggggtggtttcgcgcaatatcgttgcctcacctcacccattcagaaaactggtgtcggggtgcatacaagcactagtttttttgcaccggaaccatttcttcgtttttcgcaacgaacatgcccaatccactactctacgttcaaaactcatgttnggggtgtgtttgcgcaatttctttgtcgcacgtcacccattccgaaaacgggtgtctgggtgcatacaaagcatgagttttcgccaccggaaccatttattcttttatctcaacgaacatgcccaatccactac

SEQ ID NO: 35501 - DNA, 395 bp, Zea mays
  unsure (1)..(395): unsure at all n locations
gcttgtggagtgttagccatcggccaatcatgatctgctgaactattgntcaagtcaaacatgcagtggctggagccaacatgaaatgttacactttttccaaatcagagatggaaattgatgccacatcgtatcgcaataccatatacgtcgttaggtaaaactcgacaaataggctaacttatgtaaatgacaagataatgataaatggcatgccttcaattatcaatacaaatgtaacagaacaactatgggacaagagctatgaggtcgaggtattacaagtctttcagtgggagatcctgcaaaacgttaagggtcccagacagttgattatcttgcatgtgcctatcatagaagaggtggaaaagaaggaaataagtctgggaaaacaa

SEQ ID NO: 35502 - DNA, 474 bp, Zea mays
  unsure (1)..(474): unsure at all n locations
tatacatactcagcttcacatccagccgatgggaagcagtggcaagatttcaatgacaaccactgagactttgccgatgaaccaagaaatgttaggttcgcactgagtactgatggaatgaacccatttgctgagaggagcagcaagcatagcacatggccggtgatcctcaccatatacaaccttcctccatggttgatgcagaaacggaagtacattttgctaaccatccttatttctggacctacacaacctggagttgacatggatgtatttttggagcccttaatggaggatatgaaaatattgtgggaaacgggtgttcaaatgttggatgagtatcgtaaaggttcattcacgctgagagcaattctttntgttacgatcaacgattaccctgctctcttcacattatcatggccagttaagggaaaggttggttgcacagtatgcattgatggaactgcttacgta

SEQ ID NO: 35503 - DNA, 328 bp, Zea mays
ctctataatactcaagcgtctaaagggagaacacgtgataggtctaactaacgtacatttcgataaagatagaccttgtgcagcttgtcaggcatgtaaacaggtgggaggagcgcatcacagcaagaatatgatgaccacatcaagacccctggagctgctacacatggacctcttcggacccgtcgcctatttaagcataggaggaagtaagtatggtctagttattgttgatgacttttcccgcttcacttgggtgttctttttgcaggataagtctgagacccaaaggaccctcaagcgctttctcatgagagctcataatgag

SEQ ID NO: 35504 - DNA, 454 bp, Zea mays
gcttctaaaggagaacatgtgataggtctatctattgttctattcgaaaaagatagaccttgtgcaacttgtcaagcatggaaacaggtgggaggctctcatcacaccaaaaatgtgatgacgacatcaagacccttggagatgctgcatatggacctcttcggacccgtcgcctatctgagcatatgtggaagtaagtatggtttagttattgttgatgactattcccgcttcacttgggtggtctttttgcaggaaaagtctgagacccaagggaccctcaaacgcttcctcaagagagctcataatgagtttgagctcaaagtaaagaagataaggagcgacaacggatccgagttcaagaaccttcaagtggaagagttccttgaagaggaacggatcaagcacgagttctccgctccctacacaccacaagcaaaatggtgtggtagag

SEQ ID NO: 35505 - DNA, 448 bp, Zea mays
  unsure (1)..(448): unsure at all n locations
tcggctatggttaaatanttggcagcaaaacagtgcaatatcaatgaatgttgtaataacttcacacctacccgtctgtttatatagtgctgcaagtaagaaggtgaatcatcaagttttttacaccggacaaacagtcgctcgcacccactgaacggtgggccgcaaaaaccgagaaagtgaacctacatggtgggaccgctccgcgctcggaaagtgtatcgtttcccggcaacgagctcgaggaaggtgtttttcggaccttcggcttctcgaagcctaagagacatttttcacggatcaagctcgttacgaaaaacgatctagcaccgcgaaggggctactgttgggaccatgcttcgtcgccgaaggtcctgcaagaagaaatagcttcngcanaagctgcttatacgtgatgccgaagctaccactcatgaagcttcgatgc

SEQ ID NO: 35506 - DNA, 444 bp, Zea mays
  unsure (1)..(444): unsure at all n locations
acaacgaggatattgctcttatcattaagagcttttgntaaatcctcaaacaaaggaaggggaaggactacaagcctcgttccaagagggtgtgctaccggtgtggtaactccggtcattttatcactaaatgtccatattctagtaatagtgacagggacgaagacaagaaggggaagaagatagagaagaagaagtattacaagaagaagggtggcgatgcgcacatggtgcgggaatgggactccgatgagagctccaccgactcctcctccgacaaggacgctgccaacatcgccatcaacaaaggcctcctcttcctcaatgtccgccacaagtgtctcatggcaaaggacngcaaaaagaagaaggtacattctaaagataccctcanatatactacatccgatgatgatggtagctctagtgataatgaagatgatt

SEQ ID NO: 35507 - DNA, 418 bp, Zea mays
  unsure (1)..(418): unsure at all n locations
tcaatggggagcctacttgatgtagactcttctttcttctcctccgtcgccttgaatgcgacaggttgcacctcangtgtggaggtgccgcattgctccaagttgatgatttgtttggagcccgtgatcatcaattcaaagctcacaaactttcctattacttcctcgggagacattagcttgtatctatgatcaccacatattatttgaacttgagtaggattgcgaaatacgagtgatataagaataaccttgaccgtttcatggtcatcccattttgtgctcccgaggttgcgcacttggttcaccaaggtcttgagccggttgtacatagcttgtggctcctcttctttggtgaggacgaatcgaccgagctccccctcgatcgtcnntccgttggggatcttggtcacctcat

SEQ ID NO: 35508 - DNA, 377 bp, Zea mays
  unsure (1)..(377): unsure at all n locations
agtagtgcacccatatgacccatttactggtatctgtcatcctttgattcacgcaacaggacctgcaggacttatgccaagaagccaatccatgtgtccgggtcccctgngttacagttccgaaaactagggcacccgtcgcagagtggtggagcatgtangcttatggtacgaaaccaggctaagcggctacacaactccggaccaccccaggggacgtgtgtccgttttctagaactgccccccaggctatcggacccccttatcgagggatcccanactgctcgcctggctactcaattcggatgcccatatactcagcagggtgggaactgtatgggtggttcagataaaanatgatgttcgtaagttgaagc

SEQ ID NO: 35509 - DNA, 387 bp, Zea mays
  unsure (1)..(387): unsure at all n locations
tgcacagttcagtgctaagctagctccactgcctataataatccccatggggcttcaagacaaagcccatgcatctgaaacttacaattgagctgtctcatctccacagctctcgctgatatagcatatactatcccctcatagaaagcttcaggcacagcaactcagatcctaagtaaatcattttggcaagcagcttcattaagctttccacacatcaaatatgaggatcagcaaaagtgccccagatctcttgaagaacgcggtgacgtccgttaagagcaagactgttgctctaagaacaaagctcatcattctggcctctatgcgccngaggttagcgatggtcggtgcgatatctcgccagatccatgaacttgtcgcgtc

SEQ ID NO: 35510 - DNA, 248 bp, Zea mays
  unsure (1)..(248): unsure at all n locations
tatgtaattattatgcactaacatttgatcaaataatttgttaatttgtttaccgncgcaacgcacggacactcacctagttataacaagaagacaacattgggagtggcaaaaatccaattatctcttgtccgcccggcctcttccgtctcggagcgagaaatcagcggcatcgccgcgcgcatccgaagcgcacacgacaatgcatggcggatccaacggcatcgtctatggtggcctcaagtacc

SEQ ID NO: 35511 - DNA, 323 bp, Zea mays
ggcttactcacaatttctcttcagactcatatttctcccgcgtggatggagggttagttactaagtacctcgaggactctttaacaaaaagacctatgctgaaagggtattggtccttcttgaccgcccaatcaaaaaccaatgctccaaattatatcctgcctcgaaatcaactggtatgctaccaaaaccgatggatccacagtctacggctataacttaatggaacactatctatggaacacgatctaatttcatctgcatgataccgatccgacgacacatatccaattgcccaacaacgatacactttaactaatctg

SEQ ID NO: 35512 - DNA, 423 bp, Zea mays
  unsure (1)..(423): unsure at all n locations
agcttatctgccatagctgctgccgttctcttggactcatcacccactgcactgactgtagggggaagtgacactgcanggttcagtggttgtgaatggggaggtgtcgatcttactcccgaaccgtgcatcatagctgctgtttgatctggtggagtaatcatgagcggactataagtagattgtgtatcgttcgtgacaagaacacgacccagttgttgtctaagttgaatggcatgttcagcctctgctcgagcgacctgctttgataattaaatcagagattagcatgactacagttgcataaaacatactgatataaaaaatagtgatatatctaccaatattaaagaaagtaactgtgactctgtgagctcatatataatttcagcaaggacaggggcataaacatgctggctccat

SEQ ID NO: 35513 - DNA, 256 bp, Zea mays
ctgatacaactttggctaaaatgctataatgttgcgcttcacgatataaattatggctcggaactggagtacctcggctgtattattgagttggaactccggcgggaggtgcaatttttgtgcagctgttattttgaagctctccgtggttctcatgcatgcgaccccacatagtgtcacgccctgtactacatcattggggacatacctgaggtcgtcaaaatcggaaatgactgcatacaagtattaatgcctt

SEQ ID NO: 35514 - DNA, 444 bp, Zea mays
  unsure (1)..(444): unsure at all n locations
tgacaatgcttgaacaatattatattttaggcgattatggaaaatagtgtcttggaatactacctcatggacgagaactggatcaaagaaaataactcgtgaggcgatttcagcttttgttgtgtcacccaacggtgctcttcttgcaatgtgagattggaaagatccacttgttttttatagtcatctttctaaaatgttgccattcatgatatttctttggagaatgcatacataccttgttggttgtagtgtatcaccagttttttagcatcaccagtttagaatgttccttttccctacgtgcgcgtgggtacacgtacaccatggagggattaaaacatgtgcgtgcataggggggcaaggttgtattcaactcanagtcagtgtatgccattaacatcaaaagcgacctttttggagtactactcgttttcttcgtgt

SEQ ID NO: 35515 - DNA, 416 bp, Zea mays
  unsure (1)..(416): unsure at all n locations
ctatcaactcagctgtaaattcttcattcacatgggctagtcgcggtgccagagccaacccatgttagtcttagcaattaagcaggtgtcgagttcatctctattgaaatcaactaagtatagctgaccctctaacactcccttaaatgctactgaatcatcacttcttctaaagacaataacacctatatccgtaaaaagacaattgtagcccattttgcataattgagaaactgaaagcaagttataatctaaggaatctacaagaaaaacactagaaatagaatggtcaggtgatatagcaattttaccaagtcctttgaccaaaccttgatttccatccncgaatgtgatagctcttttgggatcatnggttttctcataggaggagaaacatcctttctccccagtcatat

SEQ ID NO: 35516 - DNA, 429 bp, Zea mays
agcttgtcaacaatataaacacaaaagagatttgctgcttctgcagatcagccgaagcctatgctcttatgtgaagatatagtagatcaacgggtattgctggggtctcagctatctgatgagcaggaaaaaactctgataaggtttttgttcaacaacaaagatgtcttcgcttggatagccaatgatctttgtggtgtcaacagagatttcatcgagcattcacttaatgtggatccatctttcaggccaaggaagcaaagactttggaagatgtctgatgataaagctgaaggtgctcggaatgaagtaaaaagacttctcagtgctggtgttatcagagaagtaacatatccagaatggttagccaacactgttatggtgaagaaaggctaatggcaatggagaatgtgtattgatttcacagat

SEQ ID NO: 35517 - DNA, 422 bp, Zea mays
ttgccgagttcctcctagtgcactcggcaaaggaactaacaaatgggctgctagtgatccctttgtcgagtgctagtccggcgagcacttgacaaagagtgagcctttgccgagtgccacctaatacgctcggcaaaggaactgacaaaggagccacacgaatcttctttgtcgagtgttagtacagtaaacactcggcaaagagtgagcctttgccaagtgtcactgtggtactcggcatagtctgtgtcgccgtcacctggcaccgtgacgacgtcttttctttgccgagtaccgattggcactcagcaaagtctttgtcgagtgtccgacaaaaagtactcggcaaagaagtcgttgtcgatgtacgattcaccgagacttctttgccgagtgtcacactcggcaaagccttcgtcgag

SEQ ID NO: 35518 - DNA, 390 bp, Zea mays
agcttgaaccgaagacccgcgtcaccggaatagatcaatcgtgctcgccggagttcaaaaacccgccggcgcacgtggaccgggtaagcctctgcaccattttccaattcgtcgcgcgcatggcctctacatcaccccgtggagctcctcgtgcaccttaattgaactataccgccgtggtttggccggaacaggagccgtcgacgacccccgccgcctgtgctcgtggccagggtagctccgaccacctctgacgccgtcccgcacaccgacgtgaccgtcgtgacctcccggacgtcactgaccaccccgccggagctctactgccgccggtaagcctcgccgctgtaatctatgccgcgggtactgtttaagtcagtcagggagcgc

SEQ ID NO: 35519 - DNA, 426 bp, Zea mays
  unsure (1)..(426): unsure at all n locations
cttcaacactcttttttggaattgtgcttgaagacttaattgtctccaagacgtctagtacatttaccattcttttcctttntggggtcactgctggccccttttgattttttgctgtttcaatatttactgcaggactcaaaacttctaatgttttttccttaatcggctttttcgcttcttccattttttctgtggatggtgcttcggccatctctgcagtttctggcagcaaggctggctgttcaacttcggtggccgaagaagcttctccggtgaactcaggcaccgaagctggttcaatatagcgtggccggtgtgtgaggacttttatcctctntctctttgattctggctcgctaggagcagttgcagcttcctcttctgcagaagttgtgttctttcttttctgccctcgagtgggat

SEQ ID NO: 35520 - DNA, 144 bp, Zea mays
ggccggaccaagcacgcgcagactaaattattttggcacttaacacgtggcaaccgtcccgcgaacggagaaaaaaggccagagagcccctccgggggacccatcttgccactaaccggaaaagcctggctggaaccaggcaaa

SEQ ID NO: 35521 - DNA, 421 bp, Zea mays
  unsure (1)..(421): unsure at all n locations
tatctcanaagtgtggtgaatnttgggattattaatcatctctctaaaatccagaaatatggctctgggctattttaaatgtcccacaattccctattggaaataaaaaccatgaatccatccttattaaatactataggaaattagaagcctagcaaaactggtccgatatttctagcatttttctataattttctaggaactcccttagtccagaacacacagaaaaaggaaaagatgctacacgattgggctcatatcagcccgcgagggcccaacatagacagaattcacccacgcgcacgctcgtgcggtcagttttgcgcatggaaccctggcggtttgaatattttatgaagaaccttcctaccatcctctgcccactgacatttgagaaacaccctcgcgcttcttcttttca

SEQ ID NO: 35522 - DNA, 433 bp, Zea mays
  unsure (1)..(433): unsure at all n locations
ttgatttacacacatctagagtccacaatacttatttcaattgtgtctacattatcttttaaaattaaactatctaaaattctaaaggtcacaagatctaaacctgtgtggtttaacttctttgcctaaaatattcaatacaagattaccaaacattgataaaaaaaagataatcatgtatatattcataaatgagttgatagtgcgatacagatgtgtaatgtgttgtgtatgctgaagattagtggtaaacatgttaagacacacatctctacaaatctggtattacacgaggcggacaacttacactcttctgttaatcagcttacaaagatgagcaataccgccgatcactatctctataaatagccattangggagatgatttggtagagacggcagcctacctctattaataanaattggtcgtctc

SEQ ID NO: 35523 - DNA, 186 bp, Zea mays
ctagacccttattaacaaaataacgagctactggagcacgctatggacggaccacaacctcttccgcctaatgctaaagtcatttaccgttcttgatcctcatttggtgaacaatatacgtgaaaattccagcacaccaagatatcgcccgaagaattcttgggaagttcctaaccggccaatgat

SEQ ID NO: 35524 - DNA, 378 bp, Zea mays
taatgaccctaaaagaatgtctaattttgttaatggcattgctcccatggttcaagataatgagggctatatttatatcctgctaattatccttagcacaaaattaggagaattcatgctaggaaatctcattctgtttctcaccatgcttttatgtataagaatgagacttctagctctaggcaatcaatccatgttaaattgcctaaaaggaaaactcctactgcatcaaatgaacataatatttcattcaagacttttgatgcttcttatgtgcttactaacaaatcaggcaaagtagttgccaaatatgttgggggcaaacacaagggctccaagacttgtgtttgggtacccaaggtgctttgttctaacgtg

SEQ ID NO: 35525 - DNA, 376 bp, Zea mays
  unsure (1)..(376): unsure at all n locations
tcccattgctccctacgtccnctcaacatcatatcattgctccacagatacgtggggtgagcactctttggccccgaggaggccgaaaaaggatgaccagccatatgagccaccagggcaggcattaatgccccatataacccaagccctggacaagaaggaaacataatacccaaatgcccacaccattgatggaccagaggaccggtggactactatcagctgtcattgacatagtaagggaagagatagctgggcgttctaagataagctcgcagttagtatgacccctaggggaagtcttatccctagggaacaagaatacccaaattntntaaaaaaattggtgactatggcaaaagcacgcatgagcaca

SEQ ID NO: 35526 - DNA, 352 bp, Zea mays
  unsure (1)..(352): unsure at all n locations
tcaacatcggcactcgctgtttccaccgccccgtcctacatgtcgcctgccattccacctnctcctccaacaatgggggcagtggcaagggcaaagggcgcggtggcagcatggacggtggtactcggcgcaaccaacagcacggtggcggtcggcgcaaccagcaacanggtggcggtcgccaaccaccccacccaactggtccttggttttgctacaacccctggactggtccatggccttctcagcagcaacagtgggcgcctactctgcctcctccacagtaggcccacaccgcctttgcgccaccgcagttctatgccgcaggtgctccttcaggcggctggaatat

SEQ ID NO: 35527 - DNA, 354 bp, Zea mays
  unsure (1)..(354): unsure at all n locations
gtcctacaaggttagtcacaacagactttggaacccagatgcaagttttgtctctcttgcacttaagtcccaaacttctaacaactactttatcatttngcatataagaacaaatgaagcatcacatgtttgataaagcatagttggttcaattgatgccttcctgggcgcatgagaagcaacatgatggtgcctaggtctattcccaccatgatcatatgaagaactagatgcaaacatggcatgagaattaaatgcagcatcatgataggtaggtaaggaagcatgggtataacaactatcatgatgagcaacactataaacattcttgacatgagcatagagataagcatg

SEQ ID NO: 35528 - DNA, 478 bp, Zea mays
agcttgtcatgcatattttggtccccatatcttgatgggtccgtcaaggttagtcaataaagatctaggaacctagatgtcctttgtgctagcacttggtaaactcattacctttctagcacaagttgcaattttggattgcctagttacatatgaattaattgacaagttgggggtgggatagttaccaataggacaatccttacattggtgtcctttctttcagcatatgtagcaaaggtgatcttcatgtcttgaagatttcttctttccttgtttcttgcttgctacatggttagtaaatattttcttttctaaaactatgccttttgttttacatggggacatgacttaactaaatgtcccttcttatagcatctaaaacaatgtttatcatccttcttaataatcaagcaattctctttaatatagggacatgacctaatcaagtgcccattttcaaagcattcactacact

SEQ ID NO: 35529 - DNA, 452 bp, Zea mays
  unsure (1)..(452): unsure at all n locations
catgggctagtcggcggtgccagagccaacccatgttagtcttagcaattaagcatgtgtcgagttcagctctatcaaaatctactaagtatagctgaccctctaacacacccttaaatgctattgaatcatcacttcttctaaagacagtaacacctacatcagtaaagagacagttgtagcccattttgcataattgagatacagaaagcaaattgtgatctaaagaatctacaagataaacattggaaatggaatggtcaggggaatatagcaatttacccaatcctttgaccaaaccttgatttccatccccgaatgtaatagctcgttggggatcttggttcttctcataggaggagaacatcttcttctctcctgtcatgtgggttgtgcacccgctgttataatccaacttgagcncncggatgataaacctacaaacaagttag

SEQ ID NO: 35530 - DNA, 460 bp, Zea mays
  unsure (1)..(460): unsure at all n locations
agcttgtgaagattcttcatcccaacatgggctagtcggcggtgccagagccaacccatgttagtcttagcaattaagcaagtgtcgagttcagctctatcaaaatctaccaagtatagctgaccctctaacactcccttaaatgctattgaatcatcacttcttctaaagacagtgacacctatatcagtaaaaagacagttgtagcccatttgacataattgagatacagaaagcaagttgtaatctaatgaatcaacaagaaaaacattggaaatggaatggtcaggggatatagctattttacccaaacctttgaccaaaccttgatttccatccccgaatgtgatagctctttggggatcctgngttttctcataggaggagaacatcttcnttctccctgtcatgtgggttgtgcacccgctgtcgataatccaacttgagcccncggatgcat

SEQ ID NO: 35531 - DNA, 467 bp, Zea mays
gctttggggtgcttgagcgagataattcaattcttatttactcaagctatcagtcttataatattttatctccctaagattaacccaaagttattttgaattattatatctaaaactcatatcatctcgagcaagatattgatgttgtagggaataaaggattatcctgtgtggagaatcaaagcctacaatatggaggaaaggcaaaggatggtaacacttatgtctttaagtgcaagtatcttcaattatcatttctcttgtgtcttgtgtagtcacatagaaaaaggaagtacttaagaaattttgttaaattataacaccattatttggagaaagtttttctcatatgggagattgcatatttatcgtttctatattatggcaatctacatactttaaatagttataagtacctcatgggtggtttcacattaattattctatttttgcaatggtctagacat

SEQ ID NO: 35532 - DNA, 466 bp, Zea mays
  unsure (1)..(466): unsure at all n locations
tgagtggggggctccaaattggaagggaaacgctggctgtctaatagaaagggaagtcactggcgcgagctaccgtggcggtcactgaggcaatgcttcaagcgacggacaggcttcctatgccggttcactgtgacatggtaaagcttcgaggcacgtggcattctagtggcaggcggcaaactttggcgaggtcaccaggaccggccgcagggcaagtgggtacggggctacctcatgatctcatccacggtgaagatcttttcactgtcgatcataatccgcacaccagagagcacgaatcatggcggccggcacgaatccaggcacggaggtcaccagcggcgaggtgcattgcatccctgatattntcagacactgtaccatcaggatcttcttaagagcgcctgacagagcaaaatgaaaggctttttctctaattttatgtgacactcgctaatcatct

SEQ ID NO: 35533 - DNA, 416 bp, Zea mays
  unsure (1)..(416): unsure at all n locations
gctgtgaaggttcttcatccccacatgtgccaaacggtgatgccacagccagcccatgctagtcttagcgattaagcatgcatctagatcggcctcctcttttgcaaaatcaactaaataaagtttgtcgtctagtacacccttaaaagctaatgaaccgtcacttcttctaaagacagacacatctacatttgtgaataaacagttatatcccatattacacagttgactcacagacaacaagttatatccaagcgactcaactaagaacacattcgaaatagagtgctcggatgaaatagcaattttcctaaccctttcaccttgccttggttcccatcaccgaatatgattgaatcttggggatccttgttcttgacgtaggaagagaacatnctcttttcccccgtcattgt

SEQ ID NO: 35534 - DNA, 320 bp, Zea mays
  unsure (1)..(320): unsure at all n locations
ataaaatctaccaagtatagcgtaccctctaacactcccttaaatggtactgaatcatcactttttctaaagacagaaacacctacattcgttaaaagacagttgtacccattttgcataattgtgaacggaaagagattgtatctaaagaatctccagaaaacattggaataaatggctggagatatacatntacccatcctttgacaaccttgatttcatcccaatgtgatagtcgtggggacatgtttttctattgagagacatcttctctccctgtaatggttgtcacccctattatatcacttgaccccgagcta

SEQ ID NO: 35535 - DNA, 399 bp, Zea mays
ttcttatcaaatcagcagcatttaccatcacagcaactgcagaccatacccgtaacatggccatttgtgtgctggggactggacatgattggacccttcaagagagctgagggaggatacactcacgtgctggttgccattgacaaattcactaaatggatagagtacaaacccattgcttctctggtttcagctaaggcagtggaattcatacaagatataatattcacgtttggaataccgaatagcattataactgacttgggatccaatttcactagctctgaattctttgacttctgcgaacaaagaagcatccagatcagatatgcgtcagtagcacacccaagagccaacggtcaggtagaaagggctaatggaatgatattggaagcactc

SEQ ID NO: 35536 - DNA, 371 bp, Zea mays
  unsure (1)..(371): unsure at all n locations
aagaatcttcattccaacatggtctattcggcgatgccagagcgaacccatattagtcttagcaattaagcaattatcgagttctgatctattgaaatcaactaagtatagctgagcctctaacactcccttaaatgctactgaatcatcacttcttttaaagacagtaacacctacatcagtaaatagacagttgtagcccatattgcataattaaaaaactgaaagcaaattgtaatctaaagaatctacaagaaaaacattggaaatagaatggtcaggtgatatagcaattntaccaagtcctttgaccaaaccttgatttccatccccgaatgtgatagctctttgtggagtcattgttttctcat

SEQ ID NO: 35537 - DNA, 438 bp, Zea mays
  unsure (1)..(438): unsure at all n locations
tcttgaagaaaagactactggattcatcgagtcaattgcttagaccaatacagaaaagattacaaaagaaattctagaaggcttatctgaagataccgatgacagtgatagttatgatgcggaaagcggtggcgaagactccgaagatcgaccctggcgaccaagtcacgtagtcttcgggaaatcgactatcagatagagtcatcttgataacatgagaggaaggtattttcgagacatatctactgtgagggctgacaacggagacaggactgttcccgttcctgaagagaatgaagtcgtaatctaccgaagcttcttcaaggctgggcttcggttccccttanagcagattgtggttgaagttctaaagatatatgagaatttccttcaccagaattacccccgaagcaattattcagaatggggatcttcgtc

SEQ ID NO: 35538 - DNA, 454 bp, Zea mays
  unsure (1)..(454): unsure at all n locations
agctntaaatgaagatgaataagaaccaccttaagagaagaatattctgaagaagagaaaagtatcatctccgaagcgaanagtatctgacgaagaagagactcctgcatcacactctgccactgacgtggaagagattttgaaggtaatgactgaatccctgcctgtgaagctaagtccattagggcctcaactgacaaagttttttcagaaggaaaaggagcccgaaaaaacgaagaanacaactaanacaaagagacaaagaatcatcgcagtgaccgaagtcattgacaagacaccaccgagagcttcagctcggaagacaccagcggctgaggaaatatcaaatgttgaagtcgcaccttcggaaatcgcggctaccgaagctacctcagccgaagatttgaacttgganaccacaatcgaacatatcgancaaatactgctagacatg

SEQ ID NO: 35539 - DNA, 349 bp, Zea mays
agtatcatacgcttataatatgcgaattgactcaagcctagctacgggtgcataagtttcaccgaaatccaaaccttcgacttgggagtatccttgggccacaagtccagctttgttccttgtcaccacaccatgctcgtcttgcttgttgcggaagacccatttggttcctacaacattttggttaggacgtggaactaaatgccatacctcgcttcttgtgaaattgttgagctcctcttgcatcgccaccacccaatccgaatcttgaagtgctttctctaccctgtgtggctcaatggaggagacaaaagaataatgttcacaaacatgagcaacaccagatcta

SEQ ID NO: 35540 - DNA, 381 bp, Zea mays
gagcgtgccttcgtcttagtataccacccactatccaacggagttgtggaacgcgcaaatggcaaaattatcacaactgtcaagaagatgctcctcgacgataaaaagggcaagtgggccgatttattacctgaagcggtctgggcattaaacacgactgagtgcacggcgactgggttcacccctttccgccttctatatggatcggaggccatgaccccgcaagatataaaacatgggtccccacggacagtcccgtcagctgtccccgacgtggacgagcccacttcgaaggacctcatcgacgaagaccgcgtcttcgccctacaggctctaaacaaataccaagcctatacaaaagcatggcgcgaccacacagtc

SEQ ID NO: 35541 - DNA, 460 bp, Zea mays
  unsure (1)..(460): unsure at all n locations
agctgaaatcaagcaaacatgcactatcttatgatacatcaacactatacacatatcaattagctcaacacaacatcaaatcaatcaacaaatcaccaacataacaaagaacacatgtatgcgcctcatgctaatacgactatacaccatgaaacctgagagatggctccaatagcaagcaagatgataaacaatcagcacatatgacaagtaaaatacccaaataagaggtgacacacaaatttacatggggaactccttgcggagaaaaaacacaccggcggtggcgagcaagaactatactatgaagatgaaaaatacaagaggtagaagccaagaggtgtgaggaggtttcgaattcccaattcactctcttatgtttgtggatntggtgcctttcaatctcccctctcttctctaaccctagatctattnnttttttntacaaatgaagccactc

SEQ ID NO: 35542 - DNA, 428 bp, Zea mays
  unsure (1)..(428): unsure at all n locations
agattagagaacatctagtatgtactcttaaggactaaaggttttatctaagactaacatgacaaacgaaatagtacactaagatcaagnnnttggttgcatgcgaanncaaatgttgagccaaaaagtacactgcagtagtgagaaacaaatcagcacatgcaagattggtatcctagttagcatcaattgctcaaagcaataaaattaataaaatcattgatgtgtcaatgaaactggtaattgatgacaataaaaataacaaaattacagggtctattatcgtcatgaagaataaactntgtactgttccaagctacaaagattntgatcttttatggacaaaattatttgtaagcaactacatgtctatctcacgtggaggcttggcctgtatagaaaaagtatagctttcgacattgatgttc

SEQ ID NO: 35543 - DNA, 436 bp, Zea mays
  unsure (1)..(436): unsure at all n locations
gagaaaaaagaagaatctacttcaaccgatatgcccttaggcacggccatacataacatagaaatcacacgtggaaggggtgggcaattagctagagcagcaggtgctgtagcgaaactgattgcaaaagagggtaaattggccactttaagattaccatctggggaggtccgtttggtatcccaaaactgcttagcaacagtcggacaagtgggtaatgttggggtgaaccaaaaaagtttgggtagagccggatctaagtgttggctaggtaaacgccccgtagtaagaggggtagttatgaaccctgtggaccacccccatggnggtggtgaagggaaagcccccattggtagaaaaaaacccacaaccccttgtggttatcctgcgcttggaagaagaactatgaaaaggaanaaatatagtgatagtttta

SEQ ID NO: 35544 - DNA, 454 bp, Zea mays
  unsure (1)..(454): unsure at all n locations
gcttactcctccctgggaagggccgntcatcatctccaattattttgaagcccagaacatacaagctggccaacgatcaaggcgaggtctacgacaacgcttggaacatccgacagctacgtcgcttttacccttaagatgttttcaagtcgttcatatgccttgttttctttacatacacaaataaagtctaaccgtcaaggaagggtcagccttgcctcggcaaaacccgaccctccctcgggggctagaaggggggaaccccctctgcgtcaaaatgttccttggaaaaagtctttctgccagaacgtctttcgcgcttttcgactacttcgatagcggggtcctgaaaacaacggagtacacgtaagcggcaaggccgaccgagccgagggactcctacgcctnctggatacggatacctcactcatcaccttccgcgataagtaactcg

SEQ ID NO: 35545 - DNA, 424 bp, Zea mays
tcggagactgttcccatctccgaagccatgcaacgatccgggttggtgacttcggaaaagatccctaatgatgatgcagaacaagcagaacaagcaatcgctgaagcagaagaagaagatattgaggaaactgatcccgaagatgattatcgcattgccatgccaagcaagcccagccacttggacttcgggaaatctactgtttcgaaggctgatctctccaagatggtaaagtcgggcttttttaatgaaaatcagaagaagctattacgcttcgggggagaagagactaccccaaagccggagaaggatgaaattgttattttcaaaagctttctaaaggctggattaagattccccctacatgggattattgcagaggtactgaagaggttcggtatctattttcaccagctgaccccta

SEQ ID NO: 35546 - DNA, 302 bp, Zea mays
tgaccacacggctcagcttcgtatctcgctatttaagttgcaaggtctctaagattcggcaactacccccaataacttataaatctggatgttttcttttaaacttggaccctgcccatgttgttttgcaaatgttgaaatttcaagctttgaatgcaaggttaatatattgtaacattcagatgaatttcccgtcaagtttcttgactaacactcctataactcttaggtaaaggttaatctattgagggcttattgaaattaaataaacatgaatttgctatcaattttaaattaatggg

SEQ ID NO: 35547 - DNA, 187 bp, Zea mays
aggagcaccatctcagcatgcatgtgatgaccacttctaaacctctggagctgctgataatgacctctttggacccgccgtctatctgagcataagaggaagtaagtatggtctatgtattattgagacttttcccgcttccttgggtgttctttttgcatgataagtctgaaacccaagggaccct

SEQ ID NO: 35548 - DNA, 416 bp, Zea mays
accttgcaggtttatgcatcctttggctcaagctggattatcgacagcggatgcacaaaccacatgacgagggagaagaaaatgttcacctcctatgtcaagaacagggattcccaagacaccatcatctttgtagataggaatcaaggcaaggtcaaaggcttatgcaagacaaccatcacatctgagcattcaatctctaatgtgtttttagttgaatcgctcgggtataatttattgtctatgagtcaactatgtaacatgggctataattgtttgtttacaaatattgatgtatctgtcttaagaaagagtgatggttcattagcttttaagggtgtttagacggaagctctacttagtgatttttcgaaagagaatgccatctatatgcatgcttaatgctaaactaatat

SEQ ID NO: 35549 - DNA, 442 bp, Zea mays
acagccatcttggcttctctatgataaagtactctgtggcggggagaccagtctgcattttttcaaatgtttcttggaatttcgcttaacccaaaaccaagaagaaaagcaccagtcaccaatccaaaggtatttgagcatgccattgcaaatcccacaataccaccatccctgtcaagaaaagttattttaggtcaaacgccctactagatacatgtataacagacagctggtttcagaagatatatactcactgggatgaaagcaaagcatcattcactgggaataaaggcagtacctcgatagaaccactgattatgttttattcatctcatgaaccaaatgtgattgtgcaacactaatctaggcactaaacttctttttctcgaacacgcaagagaattgtgcatcatttcatgaagagagagaacaggatactgac

SEQ ID NO: 35550 - DNA, 276 bp, Zea mays
gatagataagtggagttttacattaaggccctggttggcacagattattttcaacttcttcacacaattaagcagaagttcttgcaaacaggtagcttctgcagcaacttattaggtcagctgcttctcagaatacactaaaagcatccaacaagcagaagctgcttttcaccagcttattagataagctgctttttcacaagcagcaactgtgccaaacagggcctacatactacaaagctaatagctatatggatggacctaacgataatatgc

SEQ ID NO: 35551 - DNA, 385 bp, Zea mays
ctcttgggtcgatgaacaagataaaggaaaaggacaccactcgaaaagatatactagcaagaaaagtgacctctaatgaatcgatcaatgatgagacaatggatgataatgagacacgaggaagagaacctattgatagtacttccaagtggcttgttcctgtgaacaagctagatgctactccaaatgatataccagtagggaaagtggtatcttgtgactcgagcaatgatgaggcaatggatgacaatgatggcattatcttggaagatgatgacaactctagggcgctagttgtgtatggacaaaaacaagatatgtgtctcacgggtcttccggttggtccttccgggtcacaccacaagcaatctctggaccatgatat

SEQ ID NO: 35552 - DNA, 403 bp, Zea mays
  unsure (1)..(403): unsure at all n locations
aatgttcatattgagaaagacaggatttgtagcgcatgccacgccgggaagcaagttggcactcatcatccacacaagaacatcatgactagtgacaggccactggagctcctacacatggatctattcggcccgatcgcttacataagcatcggcgggagtaagtactgtctggttattgtggatgattattctcgcttcacttgggtattctttntacaggaaaaatcccaaacccaagagaccttatagggattcttgagacgggctcaaaatgagttcggcttaaggatcaagaaaataagaagcgacaacgggactgagttcaagaactcacanaatgaaggctttcttgaggagggagggcatcagcatgagttctcttctccctacacccctcaac

SEQ ID NO: 35553 - DNA, 337 bp, Zea mays
ggtctaggaatgcccaagtagactaccttagtgttgctgctcattacataaaccttgattggcaactacagaaaacgtttcttggtcttgtgcttattgatgtggcacacaatggataatacattgctgatcatgttgctggtgtgcttgctgattatggcttcactaataaggtgtgtgatgttaccttagacaacacatcatctaatgtttccgccatgaagttgcttacacctatactgtcaccatatcttggtattgagaatgttgatgatggtgacggatcccacattgccatatctatgttcttgaatcatcgttatgcatgtcgtattat

SEQ ID NO: 35554 - DNA, 391 bp, Zea mays
  unsure (1)..(391): unsure at all n locations
atgtcacgtgcatcttctctgtcttgaactttctgggactctntcgaacaaaggcttcctttgattatgctcactgcttgagcattgcgatgcacctcttgcatcatgtccgatggcatctcttctccttgggtaagcttatgcatacctatattgacaatctcccacagactatgatgcacaccaattaaatgcgacttcatcttgtccgcccactcatcatagtttaactcactaagtgttggtaactttctgagtggagccgaatagaagttgggaataaaatttctagagtaatcaaattgaacttattgaattcgggtccattacttctggatgatgatccctccgngatgagacctaccttgctcatcaaccttgacaccaaaag

SEQ ID NO: 35555 - DNA, 354 bp, Zea mays
  unsure (1)..(354): unsure at all n locations
aactcagcctctaagggagaacacgtgataggtatgactaacgtgctattcgcaaaagatagaccttgtgcagcttgtcaagcaggtaaacaagtgggaggagcacatcacagcaagaatgtgatgaccacttcaagacctctggagctgctgcatatggacctcttcggacccgtcgcctatctgagcatangaggaagtaagtatgggctagttattgttgatgacttttcccgcttcacttgggtggtctttttgcaggataagtctgagacccaacggaccctcaagcgcttcctcaggagagctcaaaatgagtttgagctcaaggtgaagaagataaggagcgacaac

SEQ ID NO: 35556 - DNA, 382 bp, Zea mays
  unsure (1)..(382): unsure at all n locations
agcttcagcaagagagccttctgctgagctaatcaaggagtctttntccttcaaatgattntcaagctcctcaatctttntctctaagccactgataacaaattcgttctttttgccttcatcatcttgttgcaatttcaaagccttgctcagtagcaaactttgtgtcaaaagacgaagttgaattagactttcactttcgaaacactaaggctgacctgatgaaggaggaacaatagaaagtcataccttaaaatttgagtaaaacaagctatccgtgatatgttgccttctataaatgctaatgtctctttccaactntgggaatacgatactctttgacatcgtacgcataatattttgcccagtgcgaccacgaatg

SEQ ID NO: 35557 - DNA, 402 bp, Zea mays
tacaacgcaatccgcataatcagaatacattcgaatggagaaatgcactcgtaccatgtgtgttaccttaaccttgcctgaatcattgatccactgaatgtggtatggatgtggccgcggacatgtggtcaagccaagcttcttgaccaaatctgaactcaccaaactattgcagctttcaccatcaataataacacatgcacgcccattctcgatggagaagaaagtctagaacaaattattgcgttgctgcttctctgatgattcaggctgagaactaagaacacactgcaccatgatgcttcgaaggttcaccgtatcatcagcaccaagcatggcatcatcattagcagcaacatcactggagtcatcatcgtcatcctcaccatcagaagcactaat

SEQ ID NO: 35558 - DNA, 430 bp, Zea mays
  unsure (1)..(430): unsure at all n locations
tcatcttgtgccatggactcttacatgtacttgtagatcttcaacatgtcttctaaaatctaataccttaagtgtggtgttgatcatatagctcagtactatgtgtaaatctaagtccactatgcatcctgttggactacataaaatatactagcaaatgatattagtctaaatggtcatgtttatcatcaaacactanaaaacttaaatggaccatatgatctattttctttataatatccctttttggtgataggagacaacacgaccaacataagcaaataatagatacaaaggattaaaaagcaatttacttgtttggatgcaatgcanaggcaagaccatatgatgattaagaaatacaaactatatgcatagggtatacttatattgcccttgacaatngcccctttgtgtggtattataaacg

SEQ ID NO: 35559 - DNA, 321 bp, Zea mays
  unsure (1)..(321): unsure at all n locations
agctnggagaagcttcacggcttctctgggaagcgatcacagggctanggcgaggctggagttcaacaaaaagggggtgtccacgatggccgagcctgtgcaaggatggcgggcggcggtgctcgcttttcatggcgaactccggtgacctttggctcgggcggggctcggggtgtgcggcgccaacggccaaggcctcttggacgcatttataggcgagggcacgacactggcgcgcggggcggggcgaccacgcgcggtgtgcgcgctgccgcggccagtccgcgctcggccggtcaggcaagcgatcgaacacgtggc

SEQ ID NO: 35560 - DNA, 393 bp, Zea mays
  unsure (1)..(393): unsure at all n locations
tcgtcttaaccatgctctgtatgctcatgatccgaatctgaagatacctgttcacatatttcacttggaaaacattgtcaaatcattgttttgaggaccttctgaagccgaaggcccccaacatgtaaattaactgagttatagtgtaaaaagggagctatatagagggaattattggagatgaactatatgtatggaagattcttttagtgcgagatagtaaaatatattatagattacaaataagggtagatatgtaaagtgaattgtcacaaagtgccttatgcatgggatactctcccacctagcccggcccanattatgttaagaggagtaagcgacgcctttgcaatcgccatatcggtgacgaattgacgagccgcaatttggtga

SEQ ID NO: 35561 - DNA, 345 bp, Zea mays
  unsure (1)..(345): unsure at all n locations
gatccggatcagatagatttttccgatgaagaggtgaccgggatctgatgagatgaactcaccctttcttgctcttctnctgcccttgcgcgtcttccttggccgccgccgcgtcttcgtccttgctctctaacccctccccgtcgccttccttcttcttggacttgccggcggtcgccaacttctcgcccgtcccggcgccacaggcctcgctggacgtggacgacatcgacatgctgttgggcgtcagcggcgccgtcgtcgtcgctcctgcgcccgcggtggccgcggtgttcacaagaagctccctcttgactattttgtcaacggtccgcggcacgtcgt

SEQ ID NO: 35562 - DNA, 397 bp, Zea mays
  unsure (1)..(397): unsure at all n locations
gcttgctgccccgtggactgatgantttntttntggatgatggtattgtattgcaaacccttgactntggtcctactagttatgagaaggctgctgtgttacgtgccctgtatcgcgcattgtttgatgcttgtgaatcttttttttggttttgtattgcgacacctcagttggagccctgtttggctgcgaatatttcgttttgaactgctcttgttgcttgtctctccgggcaggccttgtctctcctgatggggcattatgttgtattgctgctgaaatgatgcgcatttggacgtggaaaacgttggcatccaatcaaggcggacgcgcactatatgtgtatacgctgctagcaagcgacctgtggttagtagagccagggcatcagactttt

SEQ ID NO: 35563 - DNA, 437 bp, Zea mays
  unsure (1)..(437): unsure at all n locations
gcagcttgacaacaccatntgacatcttaaattatatttctgatatcaagtatatttaattcattcctcaacatgcaaaagcggagatttatcaagtggcttaatgaaaatatccgctaattgatcttccgacctcactccttctaaaatgatgtctcctttagcaacatgatctctaaggaagtgatgacggatatcaatgtgcttggtgcgagagtgttgtacaggattattagcaattttaacagcactctcattgtcacacaacaaaggtaccttttttagaactacgccatagtctagaagggtttgtttcatatataaaatttgtgtatttcgcttcggcggttgacaagggaacactattttgctttttggagtccatgatactagtgatctcccagcaaatggcaccccctagaagtactttntctatc

SEQ ID NO: 35564 - DNA, 441 bp, Zea mays
  unsure (1)..(441): unsure at all n locations
tagagagcttaagtgccacatgtaccttagaacactcaaaaccctaatttggaaccttaataccccaaatagtgccctatagggtgatttcaagttctatgcatgtttagtcaaaagtgtatacatcaaagtgatagagtaacaaaagttaagcaactttcatgtttggggatttccatgttttgtggtgaaacttggagtaaattgcaaaaaggattcatgagtagccttgttcttaactctgaaaatagtgccaacgagccaactttggatttccatatcttttgatccatgaagggttagctataagtcattatagcaaagttgtagagatactatagtagtctatgnttgattaagtgacttagcccaagaatggtacataaattggagtaaaatgccctagaagtcgagctatcagttaagcagtaatctaaaatc

SEQ ID NO: 35565 - DNA, 401 bp, Zea mays
tataaaccagatatgaaaaccttcccaaccagagttctggatgctgcatgtacttcgcactgcccggcatggatttcatctaacagttgtttcccaatagccgaatgaatgcacttcatgaggactcccgtcgcacctcttctgtacagtgtgccccctatgagggtgtaatgggctgactgccttgcgatgtgttccgctaccgccttgtcatccggttcttcttcattttttatgtacctgatgataggctctctccagtcactggggtccgactctggttggctcaaggtgttgcattcctcttgctgatatgagagaatactcgggtgtgatatttattagacgaagaatcccggtgggacctatgcccgactggatcctagcttctacaacgcgtc

SEQ ID NO: 35566 - DNA, 357 bp, Zea mays
acaagcacctgcattgagtaatgcaagagtgagatgaaacatctcagcaagcgaattgttttgatgagatatttaaaccacaaattgaattaatcaacattttaaaagaatcacaattaagatcagaaatacttgtatatatagaactctgtagtcccaatataaccaataccatctcatttcctcgaataaccaccataggttctataacacttccctgcgtcaacaaaacttgcaaatatcacttcaatgtatgcatatgaacgcaaagtgtaggtactctgtcttcatacctctgaaggtataaaccacatatctgcaatatcacttcatgaatgcatatgaatgaatgcatat

SEQ ID NO: 35567 - DNA, 353 bp, Zea mays
tcattgtctagcttggaggcgtcaattggttgtctactcagcgtagacttctgcttcttctactccgtcgccttaaatgccaccgggtgagcttcggacgtggagggttcatcaagctcgttgatcttctttgagcctttaatcatacattcaaagctcacaaaatttccgattacttcctcgggagtcattagtgtgtatctaggattaccacgaattaattgaacttgagtggtgttaaggaaaataagagatcttataataaccttaaccacgctcgggtcatcccacttcttactcccgaggttgcgcacttggttcaccaagggtttgagccggatgaacatgtcttg

SEQ ID NO: 35568 - DNA, 286 bp, Zea mays
  unsure (1)..(286): unsure at all n locations
ttgaaataactttttggaatatgactaaaccgttcttaatgaaatcagttcatatccttgagatatgcctcttaacccttctattaaatgtatgagaagaagctttgatgaggacgaaaatatctttttgagccgaaggcgaaaaaacaccttcccttctttttgtacacagcgaagcataaaaaacaacttttcctttntttcaagctccttctttttacacgacaagaaaaaagaagttttttcttttgcgaacaacactatgctatgatgaggtatctacata

SEQ ID NO: 35569 - DNA, 356 bp, Zea mays
  unsure (1)..(356): unsure at all n locations
agcttctaaagggagaacacgtttatgtttttctaacgtcaattcagaaaaattgccgtgtgcactaaaaagcagctaaacaagtgggaggaacacatctcagctagaatgtgatgaccacctcaagaccactggagctgctgcatatggacctcttcggacccgtcgcctatctgagcataggaggaagtaagtatggtctagttattgttgatgacttttcccgcttcacttgggtgttctttttgcaggataagtctgaaacacaagggactctcaagcgctctctcagtagagctcantatgagtttgagctcaaagtatagaagattaggagcgacaacgggttcgagttc

SEQ ID NO: 35570 - DNA, 375 bp, Zea mays
ctcacgctttacttaattgatattgcaaaagaagaggtctgtctatattcatgctctaaggcttagacttgcatgggctggctgtggcatctccgcttagcacatgtggggatgaagaaccttcacaagcttctaaagggagaacacgtgataggtctaaccaatgttcatttcgaaaaagatagaccttgtgcatcctgtcaagcagggaaacaggtgggaggctctcatcacaccaaaaatgtgatgacaacatcaagacccctgtagcgtgttcatatggacctcttctgacccgtcgcctatctgagcatatgaggaagttagtatggtctagttatcgttgatgactcttaccacttcacttgggtgttc

SEQ ID NO: 35571 - DNA, 414 bp, Zea mays
  unsure (1)..(414): unsure at all n locations
agcttatgaagattcttcatctccacatggtctagtcggcggggccagagctaacccatgttagtcttagcaattaagcaagtgtcgagttcagctctatcaaaatctaccaagtatagctgaccctctaatactcccttaaatgctattgaatcatcacttcttctaaagacagtgacacctacatcagtaaatagacagttgtagcccatttgacataattgggatatggaaagcaaattgtaatctaaagaatctacaagaaaaacattggaaatagaatggtcagaagatatagcaattttaccaagacctttgaccaaaccttgatttccatccccgaatgtgatagctcgttggggatctnggtttttctcgtaagaggagaacatncttttctnccctgtcatgtgg

SEQ ID NO: 35572 - DNA, 380 bp, Zea mays
ctgcaatacctctagcttcttctcaagtcatccagttccttcaggatctctgccttctcagcatcgaactccctcgtaaggatctgcttggccttctctactgcccccaattccatcctgacgctcttaatctctccttcaaataagctacgctcttgctctgcactcgaaatctttgaccgaagctcctggttctgactctctaccaaatccctgttggccttgatctcctcgattgtcctcttaaggttgtccatttcctccatgatttctgccttctcagcttcaaatgcccttgcagctgcctccttcgccttcaccactgaacacactacttgtttaatgcacttaacctctgcttcagactgtctatatttctc

SEQ ID NO: 35573 - DNA, 421 bp, Zea mays
  unsure (1)..(421): unsure at all n locations
cgagttggtgtaacctcctccttcttttcctccgncgccttgaatgcgacgggttgagctccggatgtggagggttcgtcgagctcgttgatcttccttgagccttcgaccatgcgctcaaaactaacaaaatgcccgataacttcctcgggggtcattttagtatatctacgattaccacgaattaattgaacttgagttgggttaaggaaaataagggatcttagaataaccttaaccatttcgtggtcgtcccattttacgctcccgaggttgcgtacttggttcactatggtctcgagcacggtgtacatgtgttgtggctcctcccctttgtgaagccggaaccgaccgagctctccatgatcgtttccgcttgtaatcttggaagctcgtctcctcgtgcgcgggtgtgagacat

SEQ ID NO: 35574 - DNA, 444 bp, Zea mays
agcttcagctccatctatgttatggattgcttttgaatcattccagattccttcggcccttctggcagcttcctggcttccatgaatagcgatgggtccttgatccgaaggtatcttcatgcaaagataggcagggtgaagaattgcttcaaaagcattgagggtgccacgaccaataattgcattgtaagggtattccatgtcaacaatgtcaaacacaacttgctcagttctagtgttgttgataaacccaaaggtcactgacatggtaatcttgcccagtgctacaatttgtcttcctccgaagccacagagaggatgtgtagcatcatgaatcttatcttctggctcttgcatttgtctgaaggccttagcaaatatgatgtcagctgcactgcctgtgtcaaccaagacattgtggaccagaaatcctttgataacaca

SEQ ID NO: 35575 - DNA, 439 bp, Zea mays
  unsure (1)..(439): unsure at all n locations
gcttcaactccatctatattatggattgccttggaatcagaccagcttccttcggcccttctggcagcttcctgactcccatgaatagcaataggcccttggtccgaaggtatcttcatgcagagataagctgggtgaagaattgcttcaaaagcatttagggtaccacgaccaatgatggcgttgtaggggtattccatgtcaacaatatcaaacacaatttgctcagtccttgtgttattaacaaatccgaaggttaccggcatggtaatcttcccgagtgccacaatctgccgccctccgaagccacaaagagggtgcgtagcatcatgaatcttgtcttcaggctcttgcatctgtctgaaggctttggcanatataatgtcagctgcactgcctgtgtcaactaggacattgtgaaccagaaaccctttgatca

SEQ ID NO: 35576 - DNA, 204 bp, Zea mays
tccggtcggctcattcatcggcgatagttaggcgtttacacttggatggaaacctgcgttccactaaagattgtaccattcctttgcactgctgatagaagagccctaccacgcccttcctaacattgcgcccttaatggcaatgggcctgagcggttttatcctaccgtctggctgtttctcaccctatgggcacttatacat

SEQ ID NO: 35577 - DNA, 169 bp, Zea mays
tggccagagtgctctctactgatagagatgagcgtgatggacacgaaaccaaaggtgtggagaccgctcctatttccgaaccaatgcaccgatccggattggtgacctcggaaagaaaccctaccgccgaaacagaacaagctgctgccgatacagaacaagctggcgc

SEQ ID NO: 35578 - DNA, 374 bp, Zea mays
  unsure (1)..(374): unsure at all n locations
cctacagttgtccttgtccaacggacctcanacaaccctgtaggtgcccctgaagtacttgacaagttcgatatctttccttatctttccaggaacgtctcaccagtcttgcagacattatagaacatcggagataaagaaatgtggaagcgattacataacttacatttattaaaaagtaagatcaagttggttattacagaccagaaatataagcgagtgctgagtagtattattacacataacaagggaggcacaaactcctcccgatagttttaagcaaaagttttctatatggaggaccaagtcctcccgcatcttcactcttgtttctcctccttatgaaccaccttggcacanaagcaacagagatc

SEQ ID NO: 35579 - DNA, 447 bp, Zea mays
  unsure (1)..(447): unsure at all n locations
cttcatccccacatgttctaagcggttatgccacagccagcccatgctagtcttagctattaagcatgcatctagaccggccttctcttttgcaaaatcaactaaataaagtttgccgtctaatacacccttaaatgctagtgaaccatcacttcttctaaagacagacacatctacatttgtaaatagacagttataccccatgttgcataattgactaacagatagcaaattatatccaagagactctactaaaaacacattagagatagagtgctcattangaaatgcattttacctaacacttttaccttgccttgattcccatcaccgaatataattgaatcttgggaatctttattcttgacgtaggaggtgaacatcttcttctcccccatcatatggtttgtgcatccgctatcaataatccagcttgaacccccgatg

SEQ ID NO: 35580 - DNA, 451 bp, Zea mays
  unsure (1)..(451): unsure at all n locations
tcagcttcctntaaccccgnaacgcgatacacccttcattggggagacctttagataaacataatcccctaccagaaaatataagggcattcgccgtttgtctgtataactcttttgacgagcttgagctttcttcaaattatgaactatttttcgaactttntcttcggtttcttttaccatatcaggcttgaagaagtacctttctctcggttcagaccaatttagcggagtacgacatcgtcgtccatataaagcttcgaagggtgccatcttgatactttcctgatagctattattatatgagaactccgctaatggtaaacattcatcccatttttgtgagaagtccaacacacatgcctgcagcatatcttncagtatctggattaccctctcagtctgccccgctggttgaaggtgataagctgaactgtggagcaatttaata

SEQ ID NO: 35581 - DNA, 399 bp, Zea mays
  unsure (1)..(399): unsure at all n locations
caccctttttggtcaaatccgtctgtgactgatatcaatntgggccttagagggcgaccctctgctgaagaagtcagtactttggttgcttcgctcggggagattcctgatgatgaacggcaggtctattttgaagtgcctctgaaccctagtgatgccgacataaatgacatgcttgatctgttagctgaggattcatccgatgctgctcctaatggtacgttggcagtggtgccccttccagaggttgatacaactttggatgtcccaaaacctgtcagtactcgcccgaggcgccctagccgaaccagtcagcccgagccttctgctgatgagcaaaagaagaagagaagacgcctncggcgagtatccagctttgatgaggacgccggtacctta

SEQ ID NO: 35582 - DNA, 448 bp, Zea mays
  unsure (1)..(448): unsure at all n locations
tgagcagtgactggcttcgtttgagacccttggaagctggttatcaacatgtccttcagctnttgccatgaggtgattgtccctggccgaagagaggagtaccaggtttgtgcaacactcttgacagccatgacgaaagactntgccatgaccgccgtattaccaccatacgaagatatggttgcttcatagctcatcaagaattgcttcaggtctgaatgaccgtcgtacatggggagctggggtggcttgcaagactggggccacggtgtagcctgcagttctgttgacagaggagaagtatcatcaaaagcaaaatttccatgatggaaatcttcataccagtcgtcctccgtgtagaagccctcctgatgaagctatctgcgcggaggccttcacgtcttgtcattctgagcaagatgatgaacttcttcagaggcttcgtcta

SEQ ID NO: 35583 - DNA, 398 bp, Zea mays
caacccatattaggcttagcaattaagcaagtggcaagtccaactctattaaaatcaactaaagttagctgaccctctaacactcactgcaaggcgatagaatcatcacttcttctaaagacagcaacacctacatccgtaaaaagacaagtgttgcccagtttgcataattgagaaacagagagcaagctattatctgaagaatctacaagaagaatattggaaagagaatggtcacgtgatataacaatgttaccaagtcctctgaccaaaccttgatttccatacccgaatgtgatagctctgtggggatcttggcttttctcataagaggagaacatacttttctcccagtcatgtggttgtgcacccgctataatgaatccactgagcccccg

SEQ ID NO: 35584 - DNA, 315 bp, Zea mays
gcttctgacatgtgggcattctgaggtgttttgttcacacccgacatgcactgtttgatgtccggtgcaccggtatgggcagccctgacctttgcgcgcgctgcgcgcgcatttaatgctccgcaaggagccgttggcgccgcagagagccgttgctcctctggcacaccggacagtctggtgcacaccggacagtccggtgaattatagcggagcggctgtcgtgaaacccgaggatgacgaagtccggaggccgcggtacgttggcgcaccggacatgttcggtgcacaccggacagtccggtgaattatacc

SEQ ID NO: 35585 - DNA, 375 bp, Zea mays
  unsure (1)..(375): unsure at all n locations
gtgaaaacctgcctcaggagcttagcttcgcttaacttcttttcctgtcttatagatgaatgccactttattttctcagatagaaaaatggatgttcgcaatgaattcaattcatgtcttagagatgagaacgcttctctaaacgttcatattaatgaattgaacatttgcatgccatctatatctactgctgaaaatgttcccatttgtactatatgtagacatgcatatgtagaagctattgatgatcaccttggcatgattaaacatcctaatgatcacacttctacttcaatgcctaaattgccgatcatgaactttanaactgacaatattaaatatgctataaacttgctctattatatgagacgcact

SEQ ID NO: 35586 - DNA, 360 bp, Zea mays
  unsure (1)..(360): unsure at all n locations
agcttcttcccttctttgtcggaagtcattgtcagcccggatgtactcatccatcttctaaagcagcttctccagagtttggggaggtttcctggcgaaatattgagccgtgggtcctggctgaagatccttgatcatggcttcaatgacaatttcattgggcacttggggcgcttgtgctctcagtcacaagaaccttcggacatacgcctaaaggtattcctcatggtcttgtgtgcactggaacaaggcctgagctgtgactggcttcgtctgaaagccttgaaaactggtaaccagcatgtccttgagcttctgccacgacgtgattgtcccttgccgaanggaaaataccatgtc

SEQ ID NO: 35587 - DNA, 364 bp, Zea mays
  unsure (1)..(364): unsure at all n locations
tcggcttatcggtggaaaatgaaaccggtctaaaggggaaaaggctntctagtcctcgacagattattccttagtcgatagtaaatgtcaaggatatggatgtaattctacacaggctgtgtcctgtgcttataaatagatgaacaataacaccgtattgttcacgctgttttgtattcactcgcacgtcactcttggattcttaccttctgtcaagccgaaggtacaaatgtaattcaatatcactaatatttgtatttgatcatataatgagaatataaataatctaatgatttgatgtgatcatgttctctatatgtctcttatattcttgcttcttattattatatatatngatattatg

SEQ ID NO: 35588 - DNA, 405 bp, Zea mays
  unsure (1)..(405): unsure at all n locations
gcttnggaagagangattgattacatcattctacatgcttcgggaaagacactctctaaggaagaaaaacgagaagctcaatattatgcccaaaaacttaaatactcgaaggggccactggtgtttaatggcagcggagaaaaagattttttgtactgtctcccgaataacaaagagatatctgtcagtcgggagataggaagaagcttcggatttccgaagctagaagacggcctctcagtattgtcaaaggatgaattggctgatagtttagcatataacaacataaaggtgtgaaaatcaattnttgtatttaaaaatgaattatctcatttgtttatacttaatactatactcctcttgcgggctngatacttagcaatgccctcacggcacagaaaaata

SEQ ID NO: 35589 - DNA, 414 bp, Zea mays
  unsure (1)..(414): unsure at all n locations
attcggaccttatatactcagcttcggagcacagcggaactttttatgtgaagtctgttctatatcctctttctctgctgccttctcttcaatttctgagggttttttctcagcangctctgaaggtccggcttcggcactagcctggctcactgcagcttcaactggttttgtttcagtttcgattngcattttcgaagcctcggcaattttccctgaagaaatagagcttgaagcctttactgattctagcacatctagtacacttgccatcctttttcttttgggagttgccgcaagacctttttgtgccttcggcattgtcacttctgccgaagggcttanaacttctaatatttcttgtccttcgattcttggcttctcagttttatcaatcttcggctcagctaactc

SEQ ID NO: 35590 - DNA, 340 bp, Zea mays
ccctacgggctaaacacctgggatgaaggtggagagattaagcttcagcgccaatgatgaccaaacctctggcatgaactttagtgacttattaaaccacaaacattgagaggacacattgctgaaagacctcttaagaaaccctgacaccataccctcaatagagaaagagctggagcactctaattctcgctataggaaaatctacacctaatctaacaaggcaccgcgttcagcttgaagatggtaccaaaaccacctaagcactataccgaaaatgtggcataccacctaatgcacccactggagaagttgggaccgagcccttacatttgacatg

SEQ ID NO: 35591 - DNA, 356 bp, Zea mays
  unsure (1)..(356): unsure at all n locations
agctntgatacactgattaaacatcgccatattattgggtgtcaagagaatgatggtgtatggagattctctggtagtcatcactcatataaacaaggaatgggattgttcaagtgattcaatgggaaaatactgcgccgtcgtccgaaagctagaagataaattcgagggtctggagtttcatcatatataaagagatcggaacacggcgggcgatgtactgtccaagctcggatccggtcggactcaggttccgcccggtgtcttcgtgcaagagatccttcaaccgagcatcttgaccgatcaaatagaagagtgcaacatcatagatcaacccgagtcagactctgatgact

SEQ ID NO: 35592 - DNA, 412 bp, Zea mays
  unsure (1)..(412): unsure at all n locations
tgagtgatgctcttangtcattaacaaatcttgattaacacagggtctccaaggttcttatgttctacttaagtttctaccacatgtgatcatagtccttatcaccaaggtgtgctctagccatggtaacacctaaggtgttacagccctccccccttaaaggaatctcgtcccgagattttcaggcagagtcctctagaggggtgctactaaggcacgatggtgctactcttccttatactcgggtttctcttgttaattgctcttcaaatgtcattctctttgcaacttcagaaggaagccctttnttaagttaaaatcacaacttagactactctggttatctaagtttntcttatacttgtattaaagggcacgtggngggttttttggctacataccgacttctttg

SEQ ID NO: 35593 - DNA, 440 bp, Zea mays
  unsure (1)..(440): unsure at all n locations
aagctttataagatatgaaaatttctcccttgtntcaaatgcctttcctttgattaaacaaaactccccctcaataaaaacttcctcttagtgttcaagagggttttaagacatcaattntgaaaatactactttctccctctcttgaacacaataagataccaaattgaaaatcatgacttttgaaatttggtggtggtgcggtcctnttgctttgggctaatactntctccccctttggcatgaatcgcctaaaacggatactttgagtgaaatataagcccttatgtgcactactttctcccctttcggcaaataatatgagtgaagattataccaaagttggagacgtgctcggagcgatgacgaaggatgagttaatggagtaaagtgaaagcctttgtcttcgccgacgactccaatccctttcatataccaat

SEQ ID NO: 35594 - DNA, 331 bp, Zea mays
  unsure (1)..(331): unsure at all n locations
cccatgctaatcttatcaagtaagcatgcatctagaccgaccttctcttttgcaaaaacaactaaataaagtttgtcgtctaatacacccttaaaagctcatgaaccatcactttttctaaagacagacacatctacattagtgaatagacaattatattccatattgcgaagttgactcacagataacaaattatacccaagcgactctactaagaatacattagaaatagagtgctcatttgagattgcaattntgcctaaccctttcaacttgccttggttcccatcaccgaatattattgaatcttgcggatccttgttcttgacgt

SEQ ID NO: 35595 - DNA, 351 bp, Zea mays
  unsure (1)..(351): unsure at all n locations
agcttctaaagggagaacacgtgatatgtcttactaatgtaactttcgaaaaagatagaccttgtgcagcgtgtcaagcaggtaaacaagtgggaagctctcatcatatcaaaaatgtgatgaccacatcaagacctttggagctgcttcatatggacctcttcggacccgtcgcctatctaagcataggaggaagtaagtatggtcttggtatagttgatgatttttcccgcttcacttgggtattctttntgcaggataaatctgaaacccaagggaccctcaagcgcttcctaaggagagctcanaatgagttcgagctcaatgtgaagaaaaatatgagcgacaacg

SEQ ID NO: 35596 - DNA, 277 bp, Zea mays
  unsure (1)..(277): unsure at all n locations
ttcggcctttatactcactccgcgcagggggaaacacagccttcttgttttaatagcttccgggacagcgncaggagatactgctccatgntcttgacctccaactccaatgtagcaatcttccgtatcaattcattaactgcctgaaaagatccaagtgggtagttaacccgatgagtgatgatattttttttaattttttgtaccagagcggactaacagttgtgcttggacgaaacatacctgtggcattggattctctggcgacaagctgaca

SEQ ID NO: 35597 - DNA, 411 bp, Zea mays
  unsure (1)..(411): unsure at all n locations
agcttcatactcagctgcattgttagaggtctggaatatctactggagagcatacttgaggtgttcgcctccaggtgcagagaagagaatccctgctcctgctccctgcagcttcaacgagccatcaaaatacattcgccatacttctgccgtttctggattgtctggtacttgctgttctgtccactctgatacgaaatcaagcagtgcttgagttttgatggcagtgcgaggtctgaactcgatatcgtgggatcccaactcgcaagcccacttggctattcggccaatgacttccttgntgtgaagaatgtcccctattggaaaaccagtaactactatgaatttgtggtcgtcaaagtagtgacgcagcttgcgggcagtcaggagtactgcatacaatagcttctg

SEQ ID NO: 35598 - DNA, 475 bp, Zea mays
  unsure (1)..(475): unsure at all n locations
tcagcttacttcaagaggccgcttggtcgtgattcagccaaggtttatgcaaagtatctaagatcagagaacacatcatccactgatttggagtacctaacacggatgggtgagctatctttggaacggttatctgtctacaaatcagtagcttcaactaaggagaagaaagtggagttcatgaaaaaacaagagatgcagaaactgatattggagaggaagaagctaaatttagagaagatgaagatggaacgacaaaaggtgaaggaggacacggaacaggaggttctcatattgagcatggatttgacaaaatgtaaccccctacttcgacagtactacgaggcaaaacaacatgagatnttggcagggttactggaagctcgtcgtcaagcaagtgacagggttactggttgagaagtacttgtatttgttnttcgagaacactttatgtttctgcacttgacaattttct

SEQ ID NO: 35599 - DNA, 248 bp, Zea mays
  unsure (1)..(248): unsure at all n locations
gcttgagaaagctcttgcgtcacgccatttttttggcgtcagaatggtcatagcnggcacgcgtgcgaaataagaagtcattctcatttgcacacatgaatattaccggcagcttcagatgtaatagctgctgtgcctaatgagtgggctcactaatatctttcgcagatagctctctgcccgcagcacgtcctatgaaccagtcatgcctgctggcttgtggtatcgggatgaccgaagccctttct

SEQ ID NO: 35600 - DNA, 255 bp, Zea mays
cttaacctatctaccttactacaattagtcacatgaatagcaacagatgcctaatgctggctaacactctaactcatcatcgcagaatttaacaccgcatattgatctctctcacaacgaaatgaattgatgccgactatctaatccttacccttcgacagtcaactaccactgacactaataacgctagagacttaattattcaattcatcaatcttagtaattaaactagcattcttatttctaagattggta

SEQ ID NO: 35601 - DNA, 463 bp, Zea mays
  unsure (1)..(463): unsure at all n locations
gcaagcttgaaatacatattcactcaggagaactttccttttatagagaagatggcttgagttgattaaggactatganttggaaatacaatatcacccacgaaaaacaaatgtagtagctgatgctttgagccgtaagggtcaagtgaataacatcactactcattcgatgtcacaagaattgtgctgggaaatggaacaactcaaccttggatttctcaataatgtagaagcaacagttatggaagttgaatctactttggaagaagagattcgtaaaggacaagagtctgatgagaagataaggaaattaaagctctgattggtttgggtaaagccccacatttcacggaagatgaacaacgcacagtatggtttaagaagagattctgtgtacccgaaatcgagcacttgcgccaacttattttgagagaagctcatgattcacttactctattaccct

SEQ ID NO: 35602 - DNA, 416 bp, Zea mays
  unsure (1)..(416): unsure at all n locations
ggcccccagttatcccttccccaaaccccactcaagtgagagcctccagcactgggtctgcccttttcttaagtagctcatcatcaaccattgtcaagattctaagaacatatataagcaacaggaaacttgtatgttgtacctcatccacaacaaattgtcagatgggttttttgcggtcaaacaaaaatagacttttagaagtgacatgtgaaagaaaaggagcatccaagttaacgcacataaatacatgctacaaaaagtgcttttctttgattgcaactatatttctcgtctaatttctagctgctacaaactttatgtacatttccagtcgtacaacacatagattntgtcagtggtcacttcgacttgaatacaagtttnttagatgtaaagtggtccttatgaaagta

SEQ ID NO: 35603 - DNA, 405 bp, Zea mays
agcttccttgggctcactgggttctaccattctgtttgtgaaagacttcagtactgttactgctcccatcaatgaattgaccaaaaaagaagtacctttccaatggggagaagcacaacagaatgcgttttaagaattaaagaccaagtttacaagccccagttcatgcactcccaaacattggtaagacatttgaaatataatgtgatgcccgtgtaattgggatcagaggcgtgctcatgaaagaacaaagaccaattgcctactttaatgaaaagctatgtggtcccactctaaattattccagttacgataaaatatatgctcttgttccgagttcggaaacatggcaacgctgtctttttcctataaaatttgtgataccttgaaaccctgaatatttaa

SEQ ID NO: 35604 - DNA, 366 bp, Zea mays
  unsure (1)..(366): unsure at all n locations
agacaaatcactgcgtcctatatacaatttaactgatggttgttattacgtgatgaagagggttttgaaatactacatanagatcagttgatgcctaccaagccaatgagaatggcgatcacaaaataactattagccagtgcattcataaatgtagaaaaaattaagagtttaccttgaccacaggaaaaatcagaccctgatgtgtcatcctaatggttatcattggtactgaaccaatattatacgtgagaataacttgtcccaaaaattattgtcgttaggagctcgttacaaaccaaccgtacttttttatgctaatcgagtgattaaacctacattcatggtgagtgatagtacacaaca

SEQ ID NO: 35605 - DNA, 389 bp, Zea mays
tgctaaactgccacagagataactaagagcctctgcataggtggagttaatgtcgtcagaactatcatatactggttcagctcttcaaaggctctttgctggatcgtccccattgatagaacttcgtgacttaacactttgaagatggaagtttctctcttgctgatctggattgaatctattgaggatgccagctttctgtcataattaaccccctttgttgacttggtggtccattcgagtattgctttgatatgcttgattaacctcgatcccttcgtgagactaggcaccaaaaatttcctctcttacttcaagaccattttttggatcaacttgaccacctgctaaattggaatgtctctacaattaccatgtgatatctgctt

SEQ ID NO: 35606 - DNA, 348 bp, Zea mays
  unsure (1)..(348): unsure at all n locations
tctgcgtatcctttgcaatagatgaattcttagtgtttcatcaacatgagcgcccttcacacatatgtncatgctctcgctacattgtgtagagaccatgagtccacaataatcccgttcgaaaaatgcaggtacccactctttacaaattgcacagagattattaagagtaatgttatcgtggacatggaaatcttcatgcatcattgccatgcagactcatactccatctcaatgaaaggatgatgtattatagatttgaaccttggtttataatccacatcttcaaacctcgcatacaacttatttataaaaggcatataccttatttgcacatgccatagacat

SEQ ID NO: 35607 - DNA, 360 bp, Zea mays
  unsure (1)..(360): unsure at all n locations
tgtggccttaatcaatattctctccccctctctcttctnctgnttacctttctataataagatcctctttctgtttttctggtggctgttcaccaggttatgttcttgtttggctatttcttttttctgtttcttgttatatgctctggcgaaagggcctctatctgagttggttaggtggtctgagtagcactcctcaagtcctgagttcgactccccgtgggagcgaatttcacgctgtggttaaaaaaatcccctcgtctgtcccacgccaaagcacaggtctaaggctcaaccccggtcgtggaccttctcacatgggcttcgatgccactgtgtatgggtgggacacgggttcgg

SEQ ID NO: 35608 - DNA, 373 bp, Zea mays
  unsure (1)..(373): unsure at all n locations
actcagcttctaagggagagcacattntacgattgacaaatgtttattttgagaaagtcaagatttgtagcgcatgccaagcagggaagcaagttggtactcatcatccacacaagaacgtcatgacaattgacaggccactggaactcctacacatggatctattcggcccgatcgcttacataagcatcggcgggagtaagtactgtctagttattgtggatgattattctcgcttcacttgggtattctttctgcaggaaaaatctcatacccaagagaccttaaagggattcttgagacgggctcaaaatgagtttggcttaaggatcaagaaaattagaagcgacaacggtacggagttcaagaactc

SEQ ID NO: 35609 - DNA, 338 bp, Zea mays
ccatcttaactggtgctctaccagagcctgacacttgtatatcccctaagcttgtaacctcaactttatgagatattcccgagtctgcttactatattcatcaggaaaactgacataatttttgtttgacgtctggcccctaacatcaatatgcagtcactacaatgagaattgagagacactattatacttagacatcggcattgatgactcatatattgagggccagtattacaaattgtctcactcatggactactgtacacacaacagattgttgttgctataaactagctagacaattctgatagatgggagccacaatgactatgccacatg

SEQ ID NO: 35610 - DNA, 401 bp, Zea mays
tcgatgtctcctctacacaatataacggtatgtttactgttcttgctctgttgttgtgcaatgtgtcgaccgatgtccgtcgttcgttaaaagcggttagaatcaatctgattctagcggcgagaagaaaggatcaagcttgcgcgacgcggtagagccagatcccacctttgcatgacacgcatcacgaccaggcctcacccccgcattatcgcaagcgtcgttatgttctactgtggagaaaaggcttgcatgcggttctccatgcatgtgcatgcggtggagaaaaggctgactcattcaaacatcaccatgcaaaataaaagtaactcatgcggccatgcatgcggacgtatcatgcatgcacgagcgggtcatctaacttggagctaggaaaaaat

SEQ ID NO: 35611 - DNA, 436 bp, Zea mays
  unsure (1)..(436): unsure at all n locations
aggacctataaaactcagcttcgnattatactctcattaccttcgtccaggcccattatcctcaagggaataatgtttcatggacgaaggacattaacatttaacactttatgttgccttgttcttaattcatagcatttgagaacaagtccccaacatcattctttttaataaggctatcatcggtagcagtggatggagcactagattctaatagctcacatttagctgacagctcactatttaagtttgcaaaagtttcaaatttttctagcaaacctttataatcattttgggagctaatcaacttatttttcaaagttntaagttgagctntntgcttagtgcaaacatccttgaaaaattctacggcttccgcaagctcatctacagaggggctttcctcaccttcatcatcactactactttcatcact

SEQ ID NO: 35612 - DNA, 173 bp, Zea mays
  unsure (1)..(173): unsure at all n locations
ntgattgagcttttcctttgcacatttcatcaatgcttggacctctggcatagctggcctctcatcttcatctaccaccctaagtacaataagtagtggccctgaagctctaaagcaatcttctactgaatttcaaaactgtgtggagaagacaatgttatacacatccaatc

SEQ ID NO: 35613 - DNA, 299 bp, Zea mays
  unsure (1)..(299): unsure at all n locations
actcttgacgtaacagcgaagagcgcagatatacgcgttgagcctgaaatggtgttcggcgatcactgaggtaggtagatttaagatttttgcagacttcacctatcagcttatagagggggaaccaaagtcccaccctgaagaagctctcgaagatacaacttcatcttctttcggctctataattgtctnctctccagcagatcgaaccaggtcataatcattttctccacaatatcctagcttattcagtagaactagatctgtaactgtagactgggatctcccaaattcaacat

SEQ ID NO: 35614 - DNA, 378 bp, Zea mays
gccagcttgtgaagattcttcatcccaacatgggtcagtcggcggtgccagagccaacccatgtttgtcttagcaattaagcatgtgtcgagttcagctctatcaaaatctactaagtatagctgaccctctaacacacccttaaatgctattgaatcatcacttcttctaaagacagtgacacctatatcagtgaatagacagttgtagcccattttgcataattgagatacagaaagcaaattgtaatctaaagaatctacaagaaaaactctggaaatagaatggtcaggagatatatcaattttaccaagacctttgaccaaaccttgatttccatccccgaatgtgatagctcgttggggatcttggtttttc

SEQ ID NO: 35615 - DNA, 440 bp, Zea mays
  unsure (1)..(440): unsure at all n locations
agcntcaagaacatcttaacggaaagaggtattggctggagcttattagttattaataactttactttctttgccttgtatgatgtttttatttcattatttactaaacactcattacatcgtgtcatattgtgtgtacctaatggacttctttgctgatatttactacaagtttatgtgcgagctctaaaattaaattagaacataactaaatgtggctttaattaccgcactcatgcttttggcattcacatgtaagatatatttcctactgtgttctacaagtacggaatcacgtaaaagtacaacatggttccaaaatggaagcttgaattatgttgacagagaagtatacaggtcaactcccttccaacataacattagctctaacttaattctgctgaagtggtctgtagtctgcataactacttttcatctct

SEQ ID NO: 35616 - DNA, 387 bp, Zea mays
atctaaaataaattagcgcggggctagatcaaaattcaagggttcgacgaaggggtataaagcaaaaataaatcttgtattctaccttaatttgtcgtgcgttgggcgagcactgactgagcttcgagcatttgacgatggggacgacgcacaatgatagtgaccaagacagcgtagtgcaccagcacgggtacgaagacgacggcgggttacggcgcgacgagagcgcgagtagagcattatgttggcgtcgcggtggcaaactgtggcgtgagacgagctgtggcagggcgagctccaacggagaatcttggcacgacgacgacgacgagcaacgacgcagcgacgactagctgtgcacggtgacaaagcgcgcaacagcagcgt

SEQ ID NO: 35617 - DNA, 440 bp, Zea mays
  unsure (1)..(440): unsure at all n locations
atagcaatgaatgctgtggtaacttcacacctactcgtctggttatatagcgctgcaggtaagaaggcgaagcgccagaatttttacaccangcggacacccgctcgcactcgctgcatggtggaccgcagagaccgaacagtaactctgcaaggtggggcccgtacacgctgggagattgaatcgtttctcgacaacgagctcagggaaggtgttttttagaccttcggcgctccgaagcttaagagactnttttcacggatcaagctcgttacgaanaacgatctagcaccgcgaaaggggctactgttgggtttatgcttcgtcgccgaaggtcttataagaagaagtggtcctcggctgaagcctgttgtataagatagccgaaagttcttcttcgtgaagcttcgacattataaaccgacttatagatagaatga

SEQ ID NO: 35618 - DNA, 473 bp, Zea mays
  unsure (1)..(473): unsure at all n locations
agcttgtgaacgtatgcatggagaggactcttgcttttcttgacggacacanggcgctgtgcagtggagcacgcagaggtgagcgcgagctgaacgcaaacaacgctggcgttcaacagcctaaggccaccacgcaaggacgtagggagacttctaggtgctgtcatgtgctataagcgtggagagggccctggcttcgatggcttgagaaacacaggaggatagaacatttccagagacttatacgtattctagataggacaaacaanaacaacatgcagataaggagaggtgacgtgagggagttggcctangataggattgaagacgtcctgatgagcccccgagagcagactgtgtgatccaagtttcacctgcgctgagccgaactcaaagaaactgccagcacctgcttggttgggccacgtcgtgggggacacgccagcacgcaagatacagcacagagacaccaa

SEQ ID NO: 35619 - DNA, 433 bp, Zea mays
  unsure (1)..(433): unsure at all n locations
agcttccaatctctccaagtttcccaattaatacatgtgatcattagtgattaagtgacttgagagagtgtgatgcatgtttcatttgttgctcttgttgcttggctttcataatcgtgctttcttcttcaccttctaaaccttccaagtgttttgtaaagcaagcaagagacacctaatagtgtggtgatccttgtggggtcttagtgactcgtgtgattaagaagaagcactcgactggtcttagtgaccaattgagagagggaaatggttggaatagacccggcctttgtggcctcctcaacggagactangttctctggaaccgaacctcggtaaacaaatcatcatttcatttgtgttgatctccactcgattttgttatccccttccttcctctctctaaagttcccttgctcatattaatttgagt

SEQ ID NO: 35620 - DNA, 337 bp, Zea mays
  unsure (1)..(337): unsure at all n locations
agcttancagaagaaatntctagtatcattaatattgagctcatgccctagtctggtgaaagattgttcatcaagtggcttggtaaagatatcggctaattgatctttagtattaatgtaagaaatctcgatatcccccttttgttggtgatccctaagaaaatgataccgaatggctatgtgcttagtgcggctatgctcgacgggattgtcggccattttgatgcactctcattatcacatagcaaagggactttggttatattgtaaccgtagtcccgcagggtttgcctcatccaaagcaattgcgcgcaacaatgtcctgcggcaatgtact

SEQ ID NO: 35621 - DNA, 467 bp, Zea mays
  unsure (1)..(467): unsure at all n locations
cacctgcggctgcagctttctagcggcatggagtttaactagaaactcgaactcatccatgcttggagacttggaggaatntttggaggattgatgacgatttgggttatggttcactaaacgaggacatgacctagctntgggtttatacaaacaaactacctgcattctaccagcacacaagcacganaacaaacccaagttgcactagcggtcaaactaagaagaatcacatgccacataaacacatgtctaaaggacataacaaanaanagctaaaaattttcttataggacagcaatgcttcgcacattnttccaattatttattatcggaataaagatgagaaaagcatgtttgttcacaatcacccattattagaataaggggtgagaagcattttgtgcgcaaacaacaaacacaatgcaacaattaggatgcatgctcgtcctattcgtcctcacaat

SEQ ID NO: 35622 - DNA, 431 bp, Zea mays
  unsure (1)..(431): unsure at all n locations
agctgctgcatcgactaaagaatctatcctttgcaatggaaactcgtccttcggacaggccttattgagatcagtaaaatcgatacacattctccatttaccgttggccttctttaccataacagtgttagccaaccattctgggtattntacctctctgataactctggcactaaagagtcttttcacttcattccgagcaccttcagccttgtcatcagacatcttccgaagcctctgctttctgggtctgaaggatggattaacattgagcgagtgttcaataacatccctgttgactccgcaaagatcgttagctgaccaagaaaaaacatctttgttgttgaacaaaaaccttatcaaggttttctcctactctntggacagttgagatcccaagagcaccttctgctctgctatatcctcacaca

SEQ ID NO: 35623 - DNA, 475 bp, Zea mays
agcttagaaagcgtatgtatatatcttattgaaatgcttcacccttccaactattgtaatgagttatgcactttgggtactatcaggacttgtaataaatacatctctttctaccttgtgaaacttgagttctggaatgttaagcgtacttggtaaaagtcttccgctctatctccaatgtgtgcgtatcaaatgtgattactgtaatatacctgttatgtgggagatccttgggatgatgagttccagatggcgaactcgatagccttgttaaattacccgagtcacgtgcacagccacccgatgccattaaagcaaagattggtgcatgtgggcccgataacttgggatgggctgcacaggcatgatatcatacctttcccttctcaagaaggatgccacactcccgatccgtttgtgtaccatagtgacgagaacgcttcatgatatcgaagcttatcgttcccatcatgtt

SEQ ID NO: 35624 - DNA, 314 bp, Zea mays
  unsure (1)..(314): unsure at all n locations
agctntaccaaatggacgtgaagagtgccttcctcaatggaccaatcaaggaagaggtatatgttgagcaacctcccagctttgaagacagtgagtaccctaaccatgtctataggctctctaaggcgctntatgggctcaagcaagccccaagatcttggtatgaatgccttaaagatttccttattgctaatggcttcaaagtcggcaaggccgatcctactttattcactaaaactcttgacagtgatttgtttgtatgccaaatttatgttgatgatattatatttgggtctactaacgaatctacatgt

SEQ ID NO: 35625 - DNA, 364 bp, Zea mays
gtatgttgtgtaatactcaatgtcgaatcctatgcttaatcgatgttgtggtccatcctgttatcagcatggccaattatatatggatgaccgccactgctcagtctttactcctaattacatggcaaagagttaatggtgcttcaatatcagttgatgactataacttggtactaaagcaggatggtacactaacgtgtcactaattttttacagtgacatttttttaaaacaaatcactaacgactgtgcacatgtgatatctattgtaaaaacgtgtcaataatatcgaaatatggtaataacccactgacatcttttaattgacgtgtctctattgtgatctgtctagagacatggacat

SEQ ID NO: 35626 - DNA, 463 bp, Zea mays
  unsure (1)..(463): unsure at all n locations
agctntacaaaacacttagagagtttagagagagatgaagaaagcacgattaaggaaaccaagcaacaatagcaacaaatgaaacacgaatcactctctctcaagtcactaatcaccaatgatcatttgtctcaattgtgcgacttggagagattggatgctttgattgtgtcttggaatggattgctagctcttgtattgaatgtgtatgagtggagtgcttgggtgatatgaatggaggtggttggggttgtatttatagccaccaatcacttcctagtcgttgcttcatttctgccgaccgcggatggtccgcgcccctgctctggatggtccgcccctgcacatcaatgactgaaatcgcaacggtcagcagtaacggctatatcaatggctatagagcatttaatgcgtcgtcagatgtcagaataagcagtcgcggacgatccggtcgtgcaccctg

SEQ ID NO: 35627 - DNA, 404 bp, Zea mays
  unsure (1)..(404): unsure at all n locations
tcgatgggtgttctatgtaacaccctanaaaataaaacaaatttttataatccaaatatggtgtgtcctatggatgatcagaggccgtagatgtatagatctcatcaagatgattccgatcaatcactggtttgccttgtttggagtccggatgagtcttttcgagtgccggttgatctgagccattggatattaggattgtggaagttttcttctatttatacctccctaaccctagaatccacgtcctccacccctagcagtcgtcacccttttgtgccttgccccaagagaagagaggatgaataaagaagagaagagaggggagatgagggcatacaatcgtgcatcatcgtcgttcctctccaagaaatggntggatttcctttcctttctctcttttc

SEQ ID NO: 35628 - DNA, 443 bp, Zea mays
  unsure (1)..(443): unsure at all n locations
agcttctaaagggagaacacgtgataggtttaacttatgtgcaattcgaaaaagatagaccttgtgcagcttgtcaagcagataaacaagtgggaggagcacatcatagcaagaatgtgatgaccacatcaagacccttggagctgctacatatggacctcttcggacctgtcgcctatctaagcatagggggaagtaagtatggtttagttattgtggatgacttttcccgcttcacttgngtattcttcttgcaggataagtctgaaacccaagggaccctcaagcgctttctaaggagagctcaaaacgagtttgagctcaaggtgaagaagataaggagcgacaatgggtccgagttcaagaaccttcaagtggaggagtaccttgaggaggaagggatcaagcacgatgtctccgctccctacacaccacagcaaaat

SEQ ID NO: 35629 - DNA, 462 bp, Zea mays
  unsure (1)..(462): unsure at all n locations
agctngngcatactgcaacatggtatgactttcctgagtgagtgccacaaactcattgagcttgcgatccatgatgcctgctggtatgtgatgccctctgaatgctgccttgaactctccccactcaacaatgtggtcaaccggctgcatagcaaggaaatggtcccaccatgttcgagcgggcccacgaagctactgggtggcaaaatggaccttggccgcatctgaacaatccccattaagtagtggaaactttgattccatcaccctgagccaaacatcagcatcgagtggatcttccgtccgagtgaacaatggcggctgagtagtgagaaactcctggtacgtggccgctgctggggcacgctggtgatgatcaccaccctcgtagtgctgatgcggtggctgacgctgaacgagctatcgcagaatctcattctgctgagccataatctactgcat

SEQ ID NO: 35630 - DNA, 427 bp, Zea mays
  unsure (1)..(427): unsure at all n locations
agcttctaatcttgttgatgagggtcttgattcctgttgangtctgcgtaggctcctctcccctgatcatcacaaatcttcccatctcgccttccaccaactccattttggtgatcatggtggcgttgattccctcatgagatatcttgagggtgtcccatatttgcttggctgtgtccaagccgctcaccttgttgtattcatccctgcataaagatgctggcaaaacagtgatagcttgtgcattcttatgaatctgctcattaataaacacagggttatccgtactatcggaatgcattccattttcaactatctcccaaatactatgatggagagacattatgtgactacgcattttgtgactccaataagagtagtcttctcatcaaagtgtggatgctaccatgtggtattgatacacatg

SEQ ID NO: 35631 - DNA, 223 bp, Zea mays
  unsure (1)..(223): unsure at all n locations
ctgagctgcacttggataccagcgttgcaagtttcttttgtggntttggctgaagaatcgctttctggtcatattatcacatatggggaataaggttaccccggaaaatagtgaaatattaaattgaagcaacaacagatgtgccaagacaggagttttcttggataggaggatactatgaagattattgacgcttctcaatataggaaaccctacttattgt

SEQ ID NO: 35632 - DNA, 427 bp, Zea mays
  unsure (1)..(427): unsure at all n locations
gtgtacacctttgcaacatacaagtgtagaacaagtgcatacacattatgtatccctctcttatgttattctctgtagattacgtgtttggcacagttataagccaaaagagagaggagaagcacttttgaaagatatagtggtgatctggagcaagtggtggtactgttactctaccgaagagctgccaacagttgtgacaaactcagttctctgtaaccaacctcgatatagtggaataattggtttatcacactagtgataaacctaagcaaccataggaaggagttgaaatagactccaagtcatgctggctaacttcaacgtggatgtangcaaacatttcaggcttggtcgaaccatgggaaaaaatcttgtgtcttgggttcttggttattttcttattngcacttctactctcatcttg

SEQ ID NO: 35633 - DNA, 381 bp, Zea mays
gcttctgcaatatacacgaattattatattatacacaaccttggggcgaggaacagtaccataatatatttggctgctacagtttcgtttctctgtccggggcaagctgtcccgtaccaaccttttccgaagagatggcccggtgactggatgacagaatggttctatgtgaagaatgacctatcagtacgagaagatatcaaaggtataattatgcgccctatttggcaaagcttttgccttcggaggccgaaggttgaaatgagtgaagctgccgaagaatgccagagggccttcggcgttatctgctcttttattggaacgagagacttagtacaagagcatattgccttccgggtgtggccgctcgcggagaaatgg

SEQ ID NO: 35634 - DNA, 361 bp, Zea mays
  unsure (1)..(361): unsure at all n locations
ccagatccaacccatgttagtcttagcaattaagcaagtgtcgagttcaactctatcaaaatctaccaagtacagctgaccctctaacactcgcttaaatgctattgaatcatcacttcttctatagacagtgacacctacatcagtgaatagacagttgtagcccatttgacataattgagatacggaaagcaaattgtaatctatagaatctaccagaaaaacatcggaaatagaatgggcaggagatatagcaattttacccaaacctttgaccaaaccttgatttccatccccgaatgtgatcgctctntagggatattggtttttctcatatgaagagaacatcttgtactcccct

SEQ ID NO: 35635 - DNA, 480 bp, Zea mays
  unsure (1)..(480): unsure at all n locations
agcttaagagacttttttcacggatcatgctcgttacgaaaaacgatctagcaccgcgaaaggggctactgttgggtctatgcttcgtcgccgaaggtcttcaaaggagaagcagctttcggctgaggctgtttgcatgagacggccgaaggttcctttccatgaagcttcgacagtgtaaaccgacttaaagatagaatgactttntagtccatgaaggtctgagtcaatgttgtaagcttttataaggggcatacttgtaattcctcacaggctgcgtcccgtgcctataaataggtgaacagtacccccgtactgttcacgctgacttaacattggcttttgcgtcacacttgtattntcatctcctttccagccgaaggtacattngtattcgatattgtctctatttttctatgatgatatananaagcttaattgatgatggtatatgaatattcatgctatnnctttatgttc

SEQ ID NO: 35636 - DNA, 398 bp, Zea mays
  unsure (1)..(398): unsure at all n locations
attgcagaatgatggagagagatgggcttccaaacctaagacctttctagataaggccaaggaaagagcaaacacacacactgtgtgacaccccaggtgtctatttcgcgttatgtcgggagatttatcctaatttcgaatgctgagtgaaaaattctagttcttgaccgcgtgtatctccatttatcaagctacttgagaagggttcaccgatttccgattntattcgatcgcgagaaacaggcagttttggagcctgtaaaacttttatttctcacacgaatgcaactcgataataatctcgattataatcttgtctaagctcattgatangagctcacaagtgtagtcagatgtgtcgatcaattctcaacttatctatgctgacatttatcaat

SEQ ID NO: 35637 - DNA, 470 bp, Zea mays
  unsure (1)..(470): unsure at all n locations
agcttaaagccttgatatgtatcataggctatttatatacgaattgactcaagcctagctatgggtgcataagtttcatcaaagtccaaaccttcgacttatgaataacccttggccacaagtcgggctttgtttcttgtcaccacaccatgctcatcttgcttgttgtggaatacccatttggtacctacaacattttgattaggatgtggaactaaattacatacctcattccttgtgaagttgttgagctcctcttgcattgccaacacccaatctggatctcttagtgcgtcttccaccctgtatggctcaataaaggacacaaaaagattaatgttcacaaaaatgtgcaactcgatatctagtntgtacccccttatgaatgtccncaagggtggagttgatggngtgatctcgttgaattgcttggtggaactctgggtgtggagtctatgaccctatatttc

SEQ ID NO: 35638 - DNA, 491 bp, Zea mays
  unsure (1)..(491): unsure at all n locations
agcttcttcaccacgcgcgcgtggatatcttgatatagttgagcaatgtgtcttctccttagctgtctttgcttcttgttcccacgcaattttctttttgatcctgcaacttgtttctcaaacaaagattggcctttcttggggcggtggaggtcagcacatgataatatttngatcaattgattactagtgcaagaatgaggttcatatgagtttaaactagtaattactacctcatgagcaatatcgagcatgatatgatcatcaactagtttactatgagagtatgacaacatatcatacttttcactaagagcaagctgttctaaattcattgtttctactcgacttctaagcatacgaatttcagttttaagttgagcaacattagatagagcgtcataattattacttttgctaattaacattgaatcataccggtggaccaagacatcatgagagcacctcagctcctcatgttccttggcatc

SEQ ID NO: 35639 - DNA, 383 bp, Zea mays
aagtactgagctgcaacttatcttaatagtgcactcctgtttatatttttttaaaacccttgataatgtcagacagaatagagactccgtatacagatgatccctgcattgttttagttgagaatgccccagagatttctgttttagacgaagagtttcagatgattctgccatgacattgttgattcataaagcaaaatggagcacatacacatgataatatatggcggttcccaatacaagactacttctggactgacccacttccaaacaagtgtggacatccagctattgaccagtctattcccaccccttatactcatgactgttctcacctacatagtcctccgacctttgtgaatacctttatcatagggtttatt

SEQ ID NO: 35640 - DNA, 480 bp, Zea mays
  unsure (1)..(480): unsure at all n locations
atgtacctttctttgatgggtgcatatgagccttagatggtacacacattctatctcacgtatgtcatgagtcgaggcttgaacacataaatagaaaaggtgtggcctaactacaatgtattaggtatagtggacatggatatgtggttcacttttataagtgctgggttggctggtttttgccatgacatggcagtgctcaagagttgtatcggaagcgaactatccacacccaccagcaagtatggtggcatgcatgttatgttggcattgcatacaatgtattcatgcattacgatctagtaaatctntttatgagtntaattgtttgtgtatagggaggtattatctagtggatattggttactcaattcgtgaaggttaatttccaccatatcngaatcagagacgtcacttagaagatntaatcgaacaggagtagagactgtgtanganaagttcaattttcaccactcgagt

SEQ ID NO: 35641 - DNA, 381 bp, Zea mays
  unsure (1)..(381): unsure at all n locations
agctntatcacaccctgtggcacgtactgtcttatcatgatgccagagggactcaaaaacgccgggtcaaccttttctcacctcaccaaaagggtgctcgaaagccaagtaggccacaacattttcacctacgtggacgacatcgtcgtcgcgagcaaaaacaaagaggatcaactggccgacctcgcatagacattcgctaatatgcgggacgcacgacttcagctgaaccccgagaagtgtgtcttcggaattcgccaggggaagatacttagctacctgttgtcacaccgaggaatcaaggccaacccaacgaagatccatgccatcatcaacatgacacccncgtagtcaggcagggattgccancaactgacatgc

SEQ ID NO: 35642 - DNA, 332 bp, Zea mays
atctggacggaaggccctatacctgcttctctgatactattgaacaactccaataattctctaaaaaagagtgtgctaaagccgtgtttagcaagatgctaaatagtaattgggagtaaaaaataacttaatctctaatgattgttcatatttaggtcgaatctggttgagagcaaaggaaatcgaaggtggaggggaaaaagtctgtcgacatgatctatgaaggagcggtggtccgatgacgcaacctatcagctgagggacaacattggtccaatgatggaggagaagcttgtgttacgcacgttgaacctagttacctcgctatatgc

SEQ ID NO: 35643 - DNA, 442 bp, Zea mays
  unsure (1)..(442): unsure at all n locations
accagagaggacattangattattggaactcatacatactgatgtgtgcggaccaatgagtacgacagctaggggaggattccaatacttcataaccttcactgatgatnttagtagatatgggtatgtctacttaatgaaacacaagtctgaatccttataaaagttcaaaggggttcagaatgaagtagaaaatcagcgtggcaagaaaattaaagcactgcgatcagatcgtggatgtgaatatttgagtcatgaagttagcaatcatctaaagagtcgtggaatggatccacagcttacgccgcctggaacgcctcataggaatggcgtgtctgagcgacgtaatccgactttattggatattgttcgaacaatgaatagccaatcggacctacctttgtcgtttaggtgatcgctctaaaacagcagctttcacact

SEQ ID NO: 35644 - DNA, 381 bp, Zea mays
  unsure (1)..(381): unsure at all n locations
gaccctgtgcagcaggccaagcacggaaacaagcgggaggagcgcatcacagcaagaacgtgatgaccacatcaagacccctggagctgcaacatatggacctcttcggacccgtcgcccatctaagcataggaggaagcaagcatggtccaatgataggggatgactactcccgctccactcgggtgantcctttgcaggataaggctgaaacccaagggaccctcaagcgcgtcctaaggagagctcataatgagntcgagctcaaggtgaacaagaaaaggagcgacaacgggtccgagttcaagaaccctcaagtggaggaatttcctgaggaggaaaggaacaagcatgaaacctccgccctcacacaccacaaca

SEQ ID NO: 35645 - DNA, 332 bp, Zea mays
  unsure (1)..(332): unsure at all n locations
agcttaatgcccacaagaaactatctaatttngttaagggtaaggctcccatggttcaagataacgagggttacattctatatcctgctggttatcccgaacataagattaggagaattcacgctaggaaaccttataatgtttcacaccatgcttttatgtataagaatgaggcctctagctctaggcaatcaacccatgttaaatttcctaaaaagaaatctcctactgcatcaaatgaccataaaatttcatttaaggcttttgatgcttcatatgttttaactaacaaattatgcaaaatagttgccaaatatgttgggggcaaacac

SEQ ID NO: 35646 - DNA, 141 bp, Zea mays
cctgccgcttcatcggaaactgtcgtgccacttgcttaatgaatcgccacgcgaacccttgtgcctgccggccgtcaccaatcttatgttgacagctaatatcaaattttgacttcttcgtttatatactaattagcgtgc

SEQ ID NO: 35647 - DNA, 414 bp, Zea mays
  unsure (1)..(414): unsure at all n locations
agcttaaatatactctatctcctangattctcctttnatttatttcattaaataaataaattaacatatgcattaatcatatattctaagtgtaaaanataaagtatacagctaacacgtggtcttattttatttgaatagagaatgatgttgttgaacattttcattntgaaccactaaatttgcagtccatatgaaaaagatatgaaataaacaagttttaaagtttgaaatatgaaattagggctaaatctgtgattaaataaaagtacagggggctattcaaaagaaaccaggggcctgcgcgctaaaacataggacgacgtgttgattttctaaaaccagggggctcttatagcaaattcacacgcgaaaggggtacggggtaatcttggccatcggatcagagatcag

SEQ ID NO: 35648 - DNA, 449 bp, Zea mays
  unsure (1)..(449): unsure at all n locations
actcaagcctagctacgggtgcataggtttcaccgaaatccaaaccttcgacttgtgaatatcccttggccacaagtcgggctttgttccttgtcaccacatcatgctcatcttgtttgttgcggaagacccatttggttcctacaacattntggttaggacgtggaacaagatgccatacctcattcctcgtgaagttgttgagttcctcttgcattgccaacacccagtctgaattccttaatgcgtcttccaccctgtatggctcaatagaagacacaaaggagtaatgttcacaaaaatgagcaacacgagatcgagtggttacccccttttgaatatcgccgaggatggtgttcacggcgtgatctcgttgtattgcttggtggactcttgngtgtggcgaccttggaacctcatcatcttcctttgtcttgatcatagcatct

SEQ ID NO: 35649 - DNA, 407 bp, Zea mays
  unsure (1)..(407): unsure at all n locations
agcttattgggaattagtgttgaaatttacattgatccctattcacccncctctatgtgctctcaaacgccatccctaaacaccgtgttcaagtacaaaatgtgcactnttgtgtgatccacgggtggacagctgtcttactgctgccggtggttgaatgcggactccccatcgcattcccgtcacccccgatgccgatgggaaacgtagagtcgtcggcaacagcaccgatggacgtccgattggcggtaccgccgcctcctccacccactgcagcagcaatccatcgtcgtcgttcaccaaccccgtcggatgcggtggttgttgggaccatcactgcccgtcgcggacaggctcctcgcgctgtcgatgctccactcggccgcgtcatcttcatcggccaccgt

SEQ ID NO: 35650 - DNA, 443 bp, Zea mays
  unsure (1)..(443): unsure at all n locations
agctntaagactatcaatcaaaaatagtgtatctaacaanttttgtgaccgttttcaagttaagttacgagaatccaagatatttaattcactcctaagaaagcaaaacctagtctcatcaaggggttttgtgaagatatcgactagttgattttcggtgctcacatgaaacaattcgatatctcctttggcttcgtggtctctcaagaaatggtgtctgatgtcaatatgtttagttctagagtgttgcacagggttgtttgcaagttttatggcactctcattgtcacacaaaagtggaattttgttaaactcacaaccaaagtctctaagggtttgcttcatccataacaactgtgcacaacatgccccagctgctatgtactcagcttctgcagtgganagtgcaacacaatcttttgttcttggaactccatgatact

SEQ ID NO: 35651 - DNA, 314 bp, Zea mays
  unsure (1)..(314): unsure at all n locations
ttcacatgggggtttcatctaataaatagccgaatttgctcttccaactatggagacttttgtagagggataatagttcttactgccagcaaaaactcatatattttggttgtggagtttgggagatatacaattttgaagttaaatatactgctgtctgatacagaattcaatcgttatacttgtgagatgttntacaacttatagatgaccaaaattaattatccattggataccgaagtatataattatttgttagatacttttagaggattgtgtgaattacccttgtatattttgaagatcaaattaca

SEQ ID NO: 35652 - DNA, 352 bp, Zea mays
  unsure (1)..(352): unsure at all n locations
agcttcggcatctgaaaagatattttcctgaatgtaagagattatctcagttctccaatcctcgctatatacacgagatatgctgacgactgctctttcaaaaaattccaccgaaggtgcttctattgtttcgaataacacattcgaaggtaaaggcagcccctgcgctgctgacctatctagcaaatcagcatgctcattttgtcctcgagggatatttttgacagataacccttcgaaagaagcttcaactcttcgaaccatatccagatatttttcaagcttcggatccttatccttgcaactcttgtccatatgacccgaaacaacctgggaatcaattntaaatatg

SEQ ID NO: 35653 - DNA, 432 bp, Zea mays
  unsure (1)..(432): unsure at all n locations
tccgaccggatcttaagtcaccgcggctgcagcttcatggtgggtactctagtcttctaacaaagactgactcggacctccacaaccgttacacaactcttgattgatggagaactccacgttcacgatctatgcttcaaaccaagactgttttggactcccacagtgaccaccgctatgttggttatcaaccacatatgcggttgacatggttaagaaggttttcctgcaaatttgtctaccacccaaacatctaattntggagggctaggttgtggttgctgcttaagctgggagctagcaagctgcttggcaggcttctaagcacgtttggttacaatgctaggacgagatgagatgggacgatcccttaaataacgttgtttggttcagtgtcacgggttggaacaggactatctcagtggtgtctca

SEQ ID NO: 35654 - DNA, 342 bp, Zea mays
ttacgcgctcacttcaatgtaaaagctctttatttgaacccactgttgctactgtgtggactgttgctgcaaattatgggttgtcccgggggttcacaaaaaaccgattgtttccctttgaacattttgaaggataaagtcttctggcccaaaatacatattttgtggtagttggaaataaatttgagaaatatctgcgttgaaaaatatacattttttcaaagtttaacttttatacacatttatttcattgaacccaatttagaacttggtaaactctcaaattgtcaataccctgtctatttgaataaaattacaaaaaaactttgttgcttgttaagt

SEQ ID NO: 35655 - DNA, 398 bp, Zea mays
ggatccttaagtcacctgcggcatgcaagcttcatgaagaggaaccttcggccatctcatacaaacagcttcagccgagagccggttctttctagaagaccttcggcgacgaagcatatacccaacagtagcccctttcgcggtgctagatcgtttttcgtaacgagcttgatccgtgaaaaaagtctcttaagcttcggggagccgaaagtccaaaaaacaccttccctgagctcgttgtcgagaaacgattcagtttcccagcgcgtagtggtcccaccttgcagagttactgtttgtccctgcggtccaccgcgcatcgagtgcaagcgggtgtccgcttggtgaaaaatcctggcgcttcgccttcttacctgcagtactatataaacagacga

SEQ ID NO: 35656 - DNA, 213 bp, Zea mays
  unsure (1)..(213): unsure at all n locations
atgacatcagcctctttcanatctttcatctcgaaattgctcgatagaagaaattttaacttcttcaatcaccattgagaatntgattccaaagatcaaaaatgtcatcaacataaagacacagcttaatagactcaccccaccttaccgatagtttcacacgtggtaaattctttacacaaaacccactgtggagaagtatataaaacttta

SEQ ID NO: 35657 - DNA, 405 bp, Zea mays
atcaatgatcaaacgacatgaacgctccttaatgacacactattgttgaaacaacgtatgtcgctgattctgctctgccttctccatttgtgcactaagcacacgctgtacaatgaggctctcataatgctctgcatcatctgcatcaatctgttcttcgagtggttccttagtgcctgcatcatcagccacaagcaaagtaagtgtagcttcatccaaatcactagcagaggaatacccaccatcgtcttttaccaccaaaacacgctgattaggacaatcacgctgcacgtgtccatagcccttgcatcgataacacagaacatctcttgttctacccgtggaggctactgaagaggcactacctgctggtttctgggcagatctggtagctgaatttgtgga

SEQ ID NO: 35658 - DNA, 471 bp, Zea mays
  unsure (1)..(471): unsure at all n locations
gcttgccaaatagggcgcataaatatacccttgttatcttctcgtactggcagatcattcttcacataaaaccactctgtcatccagtcgccgggccatctcttccgaaaggttggcacggngcagcttgacccggatcgagaaacgaagctgtagcagccaaaattattgtgatactgttccttaccccaaggttttgtttcgtacgataattcgtgtatattacagaagctttttgcatcaggcttcaaaccttggcttctcacggcccacacgaagatattcaaccttataattgcctcgggggtaagttgatggagatagacttcgaatattttcagcacctctacaacgaagctgctcaagggaaatcgcagtccagctttcaaaaagcttcggtacactacaacttcattctcttcagggtgtgggcaagtttgttccccttcatcggtcctcacaatggacaaa

SEQ ID NO: 35659 - DNA, 444 bp, Zea mays
  unsure (1)..(444): unsure at all n locations
gcttctaaagaaagaacatgtgttaagacttaccgatgtctggtntgagaaatacagaccttgtgcagcatgtcaagcaagataacaaatgggaacaactcatctaagcaagaacatgatgacgacgtcaagaccattggagcttcttcatatgggaacaactcatcctaccttgaagggaagcattgaagacggggcgaggagtgctcctagagtctgacgaattgaaagttcatgcctgagggacttctcgcttcctgtgcctataagagacagatatcgagtcggcgtcgtcgttctccagccgagtagtattgttgtcgatttggcaaggagattcgccataagtgttctggggcggatngaagacatggatctgcgcgtagagatgttggtcgactcgccgcctgtagcccatgtcttgtcatcacgtctgtagagatg

SEQ ID NO: 35660 - DNA, 373 bp, Zea mays
agtcataaaatgaccccatatatgaacttgaatcacctttatacccttgggataccagaaaccctaattggaaccctggaaaaccctaaaaccaaaccctatgggcttatatgcaaaattagcccacttttggactaaagtgcaaaaaccaagccaaataagtgtcttaagtcctttggttcacaaatatgtggacttgaaagcagaaccctaagttttgggtttatttgcaaaaagtaccacttgacctctatatggcctaagtctgaaatcagtgttgtgagcacaactttgagcccttgaactgtcaaagcatatgggttttgccctatgtcaccacatcaaagttgaaggccaaacatatgagaacaac

SEQ ID NO: 35661 - DNA, 375 bp, Zea mays
agcttcgacgaaagcaagtccatccttcccttgatgcattatttacctatttctctctaccactgcctaagcctggaatatgggatggaatcgaattgcatggtgagcatgagagagcccgcattaactaatacctttgattacaagatatgggataagtaaaagggtgcaagtaacatgttttccaaacggtgtgcgatgaatggtattcaccctcatcacctcctgagtaagatgatcagggactccctggtttatgggagggcctaaagtgatggctcatctggtttaggcgtgagcagaaagattgtcctctcgtataaagaccggtttgtcatctttcattacctgtactcataaaaagtacaaccactc

SEQ ID NO: 35662 - DNA, 456 bp, Zea mays
  unsure (1)..(456): unsure at all n locations
agcttctaagggagaacacgtgatatgtctaaccaatgttactttcgaaaaagatagaccttgtgcagcttgtcaagcaggtaaacaagtgggaggagcgcatcacagcaagaatgtgatgaccacatcaagacccctggagctgctacatatggacctcttcggacccgtcgcctatctaagcataggaggaagtaagtatggtctagttattgttgatgacttttcccgcttcacttgagtgttctttntgcaggataagtctgaaacccaagggaccctcaagcgcttcctaaggagagctcaaaatgagtttgagctcaaggtgaagaagataaggagcgacaacgggtccgaattcaagaaccttcaagtggagaagtttcttgaggaggaagggatcaagcacgagttctccgctccctacacaccacaacaaaatggtgtggtagagag

SEQ ID NO: 35663 - DNA, 489 bp, Zea mays
  unsure (1)..(489): unsure at all n locations
ggatccttgagtcacctgaggctgcagcttncaatctcccagtcgttaaatgttttactatttcagcccctttcgcctttctttaggcacaggtctatctacttgtctccaccatttgtggagtgtcgattcagccatgtaggtaccaaatccggtgtaatcttagtgccaagaaaatgtgtgaccagagtccatagctgtcttgagaagacacatcccactaataggtgatggatggttttttcttcctgatcaccaagaggacaagtctcaggatgagatagtcctctcttagctagcctatctgttgtccagcaccggttttttgaataccagccagatgaagaatttgaagcgaagtggagcccaactcttccaaattctcttgcaacgtgtaaaacgtatggaaccaaaaaaagaacgcatcataagcagactcgctactgtactctccagactgagtnaattccacttatgcatttcttactt

SEQ ID NO: 35664 - DNA, 354 bp, Zea mays
  unsure (1)..(354): unsure at all n locations
gcccttgctgtggaccgtgcgatcaccaagatgacccttggacagaaccaatacaaatatccaagtctgcactacggaccgtgcggaggaatatcgcggaccgttcggactcaggcgcggaccgtccggtaagctaggaaccgaataacccgaacgtgacgggttctgaaaaatgaattatatcggtctcgcggaccgttcggggtgcacgaccggaccgtccgcgactggctttatctgacatttgacgacgcattaaatgcaatatagctcgtgatatagccgttactgctgaccgctgcgttttcagccgntgatctacaggggcggaccgtccggaccacgcatgcggac

SEQ ID NO: 35665 - DNA, 418 bp, Zea mays
  unsure (1)..(418): unsure at all n locations
tctaatcacctgangctgcagcttagatcttagactacaactcttgtctatctgacccgaaacaacctgcgaatgagtcttaagaacggcccttctgattcccatagctcttaactcccgaacgcccagaatcatggcttcatactcaccacatattgtactgtacaacgcaaaatcgagcctcgccacatgacaagcgttcactgtggatggcgatatcaacacagaggctgctcctgctccgaatggttcactagacccatcgtacaacactgccatacttgcgcatctttattagtttcttcatcctgcacacctggcgcgcaatcaacaagtaaatcttccagcgcttgacactggatcgaacacctatgcacatagtcaatgctaagtcactgagctctgcagccattttcca

SEQ ID NO: 35666 - DNA, 377 bp, Zea mays
agcttggaaatatatgttataacccttacttcagttcatgacattggcaagtacctcatcgtctaacaagggacatacgtactgaaccaagagatagagacaacacatgcacacacagagaaggtaaggtcgacatccaaacgtgtgaggcatgtccagccgtgaggttagagcataccttacgatgtgcggcgtagccgaacactggataaggtagaagtaaatatgagttccacacaacaacacttcatagatgtgcatagtctagattaaatatatggtcttaacataggaattagccaagcacacagactaaaaacacgaattacaagtgggcaagcaagccaactcactggcttgctgatagggacaagtga

SEQ ID NO: 35667 - DNA, 256 bp, Zea mays
  unsure (1)..(256): unsure at all n locations
ctcgatgaggtagcgattacgctatacgcatccgctcctaaatattgacttctatatcaactttcccactatgtatcctctattttttcatataccgcagcgattcacactacatactcgccctatataccactatcactatanaatagtatcttctatatcaactatcaatatgttatctactagcgattactcgtgtacccacaacacagtgtctaaggtgatgaacagtgacacgctagatctgcggggagag

SEQ ID NO: 35668 - DNA, 322 bp, Zea mays
  unsure (1)..(322): unsure at all n locations
agctttttanaagctcggttgatattccncctgaatgggattattgcagaaatattgaaaaggtttggaatctattttcatcagctgactcctaacgctatcgttaggctcaatgtttatatctgggctctccgaagccaagcggtggaaccgtttgctgacagcttctgccgggttcacgagctgcactatcagacgaaggccaggaaagatggtttgcatgacaattttggttgctataattntgcttatcgganaactacgaagtttcctgtaatcagctaccgaagcacatgggcagcaggctggaagtcggagtggt

SEQ ID NO: 35669 - DNA, 405 bp, Zea mays
  unsure (1)..(405): unsure at all n locations
cttcatccacacatgtgctaagcggcgatgccacagccagcccatgctagtcttagcaattaagcatgcatctagaccgacctcctcttttgcaaaatcaactaaataaagtttgtcgtctagtacacccttaaaagctagtgaaccatcacatcttctaaagacagacacatctacacttgtaaatagacaattatatcccatattacataattgactaacagatagtaaattatatccaagagactctactaaaaacacattagaaatagagtgttcatttgatattgcaatcttgtctaaacctttcaccttgccttggttcccatcaccgaatatgatngaatcttgngaatccttattcttgacgtaggaggtgaacatcttcttctcccccgtcatatg

SEQ ID NO: 35670 - DNA, 385 bp, Zea mays
atgccaggtctctttaaagctgagaaccacagcttcatcagttctgatgcggaaaaagggatccatcgctcactaagcattgatggtatacgcagtatggatgatttttacgaaacttaaaagctcttctttacgagacatgaaaagaaaggaatgtgttgtttcgccgcatgctacacaacggtatgtctaaaaagtctaacgcatctcaatagctgattacaaaccactcatatattacattcatatctatgagcactgcatattacaaagatagtttagcaaatgttacattaacattctagacgatggtttacaacagctactcttccttcagaactttttctgtagcttcgggtagcagcttcgtaactacttcatctac

SEQ ID NO: 35671 - DNA, 412 bp, Zea mays
  unsure (1)..(412): unsure at all n locations
atgaacaattgggatctgggaacaaacgctcactagcaaacaaacaaagaatacctgagtttaagggtaacgcacgctacaaattaccaagcgagctactgtaacgcatgctgcaaattacccaggaggccaggagtaggaagctactgtagctcatctacagaatcacccgaagttactggtgctgtcttacagaatagcccgataacttactcctggcgtaaaggcaaatcttacagcgacagagacagtaatctggtcgcgccatactcgcatcgtggagacaatgccgcagaaatttgacccanaccacatcggatcggaagtcgagcggtttcccagacgcccaagatctctacccaggaattngcattngtccacatggatgcggctacagatcaataatagttca

SEQ ID NO: 35672 - DNA, 451 bp, Zea mays
  unsure (1)..(451): unsure at all n locations
agctngtcgacagctntgtcaatagcatctctatttattntgattatatcaagcgcctccttgacggatgggttagcttcagggttatatggctcgaggggcagtgaaagctcagctgcattgaaacacaaatatctatcagtgccaaagctaaaaaacttacgaagatgagttataaagagcataccaataagtctcgcccgctcggcaacttcttcagctcttttggcctcttctaaagcctcatgagattctttctcattcctcttaatagcttcatcagcaatttctcgcccacccttcagccatatctcggaataaaatttcccacctaaggtagtagcttcgactgaagggtttctaacatcattagctgagaaggcaaagtttggctgagccacaaccttggcatgatcacagccaaccttctccaaaatggacgtatccccac

SEQ ID NO: 35673 - DNA, 438 bp, Zea mays
  unsure (1)..(438): unsure at all n locations
ttaagtcacctgaggcatgcaagcttcatcattgtctattaagcttcagcttccctctcttcagcttcgtcaacttgctcctcagcttcgtcatcctgtacatatttaagtattgtaagaattattcaagtttaaagggaaaggtaaacacaaggtatgattctgttaccggcttaagatgacttcgagcttcgtcaccggctatgctttgaccacccttcgtccatattattttgataaacctgtttcctatgcttccggcgagattgggaatatctaccagatctgctggtgataaactaaagttgggcctattaacaatatttctgtgtgtacaaccagacttcaagaaagcgacagcttgtgccccgagaagctatcanggcacataaatcaccatgtccggctatgaattcatcaaggtcatcaatttcaccc

SEQ ID NO: 35674 - DNA, 492 bp, Zea mays
  unsure (1)..(492): unsure at all n locations
cgacccggatcttaagtcactgagctgcagctttataggagcatacttgttattcctcacaggctgcgtcctgtgcctataaatagtgaacagtattccgttgctgttcacgcattctgatatttttgcaattgcatattctggaattctcctttttgccaaggcagaggtattattgtatttaataaatataatatgaattgtctacgatttatttactccttttttgtaccttctattntatgccaatatctattgaaatttaattacgaagatttaagcttcgtaattttactctcagcaaccttcgtccaaggttcattatcctcaacggaataatgtttcatggacgaaggacgttaacatttgacactttatgttgccttgttcttaattcatagcatttgagtacaagtccccaacattggcgcccaccttcggtgaactcacttccacttttcgagctgatggcttcgntcaatgaccgagctg

SEQ ID NO: 35675 - DNA, 421 bp, Zea mays
gtcggcgatgctagagccaacccatattagtcttagcaattaaacaagtgtctagctcagctttggtatcattaaaatcaactaaatatagttgaccatctaacactcttttaaatgctatagaatcatcacttcttctaaagacagtaacacctacattagtaaatagacagttggagcccattgtgcataattgagaaaccgaaagcaaattgtaatctaaagaatctacaagacaacattggaaatggaatggtcagaagatatagcaattgtacccaaacctatgaccaaaccttgatttccatccccgaatgtgatagctcgttggggatcgttcattttctcataggaggagaacattcttttctcaaccatcatgtgggttgggcacgcgctatcgatatccaacttgatccca

SEQ ID NO: 35676 - DNA, 416 bp, Zea mays
atcaatcaagccaagcgcataaatccaacaacaatctcattaggatatacgaggctaatacacaatgataaatatgagaataaacacttgcaattcctatgaatattaccatacacttaattatactatcatgcattccaccacaagactagatacacttacataactgatatatgtacattttattatataagaaatatgagcatcatatacatttgtaaaagtgtcttgaaagataaatatacattgtaatttatccatagaggcggggaccataattagggggacactcaagactcctaattctcagctggttacccccatcagcataaagctgcaaaggcctgatgggcgcgattaagtctgggatcagtccattcgagcgactcgatcatgcctcggccgaacctagcctc

SEQ ID NO: 35677 - DNA, 447 bp, Zea mays
  unsure (1)..(447): unsure at all n locations
agcttgaagccatggtaagtagcatttgctattnatatgcanantgattctagcctacctacaggtgcataggtttcaccaaaatccaaaccttcgacttgtgaatatcccttggccacaagtcgggctttgttccttatcaccacaccatgctcatcttgcttggtgcaaaatatccacttggttcctacaacattttggttagaacgtggaacttaatgccatatctcattcctagtgaagttagtgagctcctcttgcatagccaccacccaatccgaatcttgaagtgcttcctctaccctgtgtggctcaatagagtaaacaaaagagtaatgttcacaaaaatgagcaacacgagatcgagtagttaccccctcttgaatatcgccgaggatgagtgtaactgggtgatctcgttggactgctaggtggactcttgggtgt

SEQ ID NO: 35678 - DNA, 274 bp, Zea mays
agcgtgtggcgccctcaggcgtcttgtcttatcctatgtaccaagtcccccacttggaagtctcggggccgaacccttccggcgtggtagcgtcgcaaagactgctgataccgcgctgagtgtagtaaggccacgtcccgagcctctctcagctggtgcaaggaatcttctccgctggtctggttgccttggtcgtcgtacgcctttgtcctcggagaaccgtattctaagtccgtgggcaagacagcctctgtcccatagactagaaagaacg

SEQ ID NO: 35679 - DNA, 300 bp, Zea mays
  unsure (1)..(300): unsure at all n locations
gtaaagtgtgccgtctagtacacccttaatagctagtgaaccatcacttcttctaaagacagacacatctacatttgtaaataaacaattatatcccatattacataattgactaacagatagtaaattatatccaagactctcaactaaaaacacattagagatagaatgctcatttgatattgcaatctggcttaaacctttcaccttgccttggttcccatcaccgaatatgattgaatctngggaatccttattcttgacgtaggaaggtgaacatctcttcttncccgtcatatg

SEQ ID NO: 35680 - DNA, 421 bp, Zea mays
  unsure (1)..(421): unsure at all n locations
agcttcgcatgaccttgtgactcgattggcagtgcaaattattgcgggccagtagaatccctgtcaaatcaccttggcggcgagggccctgngccctgagtgggagccacaagttccgctgtggacttcacggatgatttctatgccttcagtctcagttatgcactttatcattgcctggctgatcccctttttgtataattgtccctcgaccagtgcgatgtccctgcttctgtgtttcagtcgtttggcctcgttacggtcactggggtgatagtgaccttgcaggtacagggtgattggngcccgccagtcttcggtcatgatgaggttgatgatgcggtggccttcgacgtcctgagttatttgcagcccctctgggttgcggaccgctggtgtgccaatgacgtggtaaaacaca

SEQ ID NO: 35681 - DNA, 450 bp, Zea mays
  unsure (1)..(450): unsure at all n locations
gcttctccctctttntctgctgagttttctcataataccattcattcgtccagccagtcggccagttagtgtgataaccaatcataagagccttggtatcctttcagtatgcgaagttgtagcattcaaagttcttgtgcagcccatcagctctatgcttcgtctgataatggagnttgtgcacccgacaaaaccgtttagcattggcactcttcccttggctccgaagagcccatatgtacacactaagtctaacagtggcattgggggtgagttgatgaaggtaaatctcgaacttcttcagaacctcaccaatcatctcgtatagggggaaccgaagtcttgctctgaagaagcttttgaagactacgacttcgtcatctttttggtctgaaatcatctcttcccagcaaatcgaactagtttgtcatcattctctccacaatatcc

SEQ ID NO: 35682 - DNA, 387 bp, Zea mays
  unsure (1)..(387): unsure at all n locations
tctcagcgtagatgatgtttatgcttctgcccccgttcatcaagaccttggtgagcctgacatcgccgacaacggtgtcgacgacgagcgggtatttccccgggctcggcacatggtcggggtggtcggcccggtcgaaagtgatgggcttgtccgaccaatctaggtagactggcgccgccaccttcaccgagcagacctcccggcgctcttgcttgcggtgccgagccgatgtattcgccgcatgccctccatagatcatgaagcaatcgcggacctcggggaaccccnctgctgggtgatcttcgttcttgtcgtcgtcgtgggccctgccaccctctgagggtggcccggccctgtggaaatgacgccgaagcatatcgcact

SEQ ID NO: 35683 - DNA, 388 bp, Zea mays
agctcttaggtgttctcaacttgagttaatttttaccccattaatccctatttagggttgaattccctatcaagggtcctatttgcaaaacacttaaacaatacaacttgtttgaaatttttgcctagtgaatgcactctatgtgtgtcaaacatatgcaatgctaatgcttatgatgtcatgctcaagttttagttacggtaacaccaggggtgttacactacctcttaataagaataaaacatttactcccaaaaactctaaagtaagaaacattatgctttttaccagtgaggagttcatacgatgttttcttgaggattcggtgaagatataaacggttgatggagtagcaggcggtgttaattgcctttcaccaaaactgatc

SEQ ID NO: 35684 - DNA, 357 bp, Zea mays
  unsure (1)..(357): unsure at all n locations
aaacagtgcaaatagcaatgaatgctgtggtaacttcacacccacctgtttgtttatatagtgctgcaggtaggaaggcgaagcggtggaactgttacaccaggcgcgcagtaactcatacccgctgtgcagtggaccgcaaagaccaaacaataactctacaaagtgggcttggcacgcgctcggaagtcggatcgtttctccgcaacgagctcagggaaggtgttttttggaccttcngcttcccgaagctgaagaggttttttttcacgggccaagctcgttacgaagaacgatctancaccgcgaaaggggctactgttggggtcgtgcttcggtatgccgaaggtctcacac

SEQ ID NO: 35685 - DNA, 429 bp, Zea mays
  unsure (1)..(429): unsure at all n locations
agcttgacaacgaggaaatgacgctcatattctgagcttacgccaaatcctcagcaaaggagggggaaggattactaaccccgctccaagaaagtgtgctacaaatgtggtaagcccggtcattttattgctaaatgtccattatatagtgatagtgacaggggcgatgacatgaaggaaaagaggaaggataagaatagatactacaagaagaagggcgacgatgcccatgtatgccgggaatgggactccgatgaaagctccaccgactcctcctccgatgaggacgccaccaacatcgccgtcaccaaaggcctcctcttccncaacgtcggacacaagtgcctcatggcaaagtatatcagaaagaagaaggtaaaatctatagcctccactaaatatacaacatctagtgataagggtagctct

SEQ ID NO: 35686 - DNA, 401 bp, Zea mays
  unsure (1)..(401): unsure at all n locations
gatccttaagncacctgcggcatgcaacttctaagggagaacacgtgatatgtcttaccaatgtttatntcgaaaaagatagaccctgtgcagcttgtcaagcagggaaacaggtgggaggctctcatcacaccaagaatgtgatgacaacatcaagacccctggagctgctacatatggacctcttcggacccgtcgcctatctgagcataggaggaagtaagtatgggctagttatcgttgatgactcttcccgcttcacttgggtgttcttcttgcaggataagtctgaaacccaagggactctcaagcgcttcctaaagagagctcataatgagtttgagctcaaggtgaaaaagataaggagcgacaacgggtccgaattcaataacctttcagtg

SEQ ID NO: 35687 - DNA, 352 bp, Zea mays
aagtcacctgaggcatgcaagcttgccagattagtaaaacaatatcttctaccttcacagcaatggcagaccataccagttacttggcccttctcatgctggggactggatatgattggacctttcaagaaagctcaaggaggatacactcatgtgtctggagcaatacgacaaattactaaatggatagagttcaagcccattgcttcttaaccccagataggcgtgggaatcataaagacataatattcacattctggatccatacagcatcatactgacctggatcaacttacaagtagagttctcgattttgcaacgaaaacttcatacaagatgcttctatacacat

SEQ ID NO: 35688 - DNA, 412 bp, Zea mays
agcttcggaaaccaactctcttcgacattgtgctgataatcttcaccccaatttgatctcaaatacatcctaaggcttcttcgttaattctgccgaagagcatggctcctggctggtagccacatgatatagcatattcctgtagctcctccttctcagccttggataattcttggccaattatattttgaaagttgaagctcttttcttccgaaatatcttcggcaatttccttctctttctcaagcacctgcgattaggacttcttctgcagccgcaacagtctcctccgcagccaaatccaagagcactgtatcaatagcagataatgtactctccagattggtagcttcggcagtggcagcttcagcagaagcaacaaactccggcagctggtgttatttttatgctg

SEQ ID NO: 35689 - DNA, 238 bp, Zea mays
acattagcagtgcgagtcacttattaaacactagttgctgaccttacactcctaatgcactgatatccttttctagacagacaccactcgtaaaagacgtgtaccctttacatatgaaaacgaagcaatgtatcaggaattcagaaaacatggaataaggcaggataacattaccatcttgaccaactgattccatccgatggaactatgggactgtttctatagagaacatctttta

SEQ ID NO: 35690 - DNA, 412 bp, Zea mays
  unsure (1)..(412): unsure at all n locations
agcttcggtagatcacaacttcattttcttcgggagcaggaacgaccctgtccacgtcagccctcacaatagacacatctcgaaaataccttcctctcatattatcaagatgactctgtttatagttgatttcccgaagactacatgacttggtcgccagagccgatcttcagagtcttcgcctccactttctgcatcatagctggcgttttcatcaatatcttcagataagccttctagaatctctctagtaatcttctctatatttgtttttgctattgactcaacaaatccagcagtcttctcctcaaggagcttcntctcttcgctcagcttcgtctcagcaagcaaatttgtggtctgagacatcttatcttcggagatcacgaaaatgtgtccttaaaaccgaagc

SEQ ID NO: 35691 - DNA, 215 bp, Zea mays
ccttagccttgcgactgatgttgacatgacccgaaacagtctgggaatcagtattaactattgcccttcttattgccattgctcttaacttccgaagacctaagagcaaagtgtcctactcggaaacgttatctttgcaaccatagtcaaactttgcctgagtacaagttttaaccttggaaggtgaaaccaacacaggatgcgctcctgctccg

SEQ ID NO: 35692 - DNA, 387 bp, Zea mays
  unsure (1)..(387): unsure at all n locations
acaatagtggtaaggtcaaggtaaccaagctggtacgaattaattntgctattggttcatatcgagatggtgttgactgtgatgttgtgcctatggatgcttgtaatattctgctaggtagaccatggcaatctgattcagattgtatgcatcatggtagatcaaatcaatattctctcatataccatgataagaaaattattttgcttcccatgtcccctgaggctattgtgcgtgatgatgttgctaaagctaccaaagcttaaactgagaacnaacagaatattaaagttgttggtaataacaaagatgggataaaactganaggacattgcttgctgcaacaaaaactgatgttaatgaattatttgcttcactactggtgct

SEQ ID NO: 35693 - DNA, 495 bp, Zea mays
  unsure (1)..(495): unsure at all n locations
ctctgagtcacctgcngcatgcaagcttaagcatttctcctgaagttctttaaaagatgactgcaaatttgagtacttatccacttcagctttcaagcttgcttcaaaatatatcttttcttgctcgaatttttctgattgttggagtaattcattctttaatttgtcattctcactttggacttcagccaaagagccctccatggtctgaataacaaaatccttcttttctagtgcaccttcgtgctctttgaccatgatctcaaggtcttggattgtgaagtctttcttcttcagatcggcttcgtgattntcaattttttcagccaaatcttgaatgatagctntgtttttctcttcctccagatcttgtngcattttcaaaaccttgcttaataatatgctctgtcgaaatgatctttcgtagaacacgacccanaagattaataatattgttataaaataacanaaatattcgtaccttgaagtagtata

SEQ ID NO: 35694 - DNA, 237 bp, Zea mays
  unsure (1)..(237): unsure at all n locations
gcttttatataattggtgatatgatgcttcanaggctcatcaccttctatagtgacaccctcatgttccaaccgaanaatatgatttttcctatgtgttccatttgccactaactggaaatatttcggatttgagtcaccttcctacaagttttttacctttaccctttgataccatttgaactcctcttctcgtacaaatgcgctacaacattatttaaaacatggtttaaattta

SEQ ID NO: 35695 - DNA, 433 bp, Zea mays
gctgtgaagattcttcattccaacatgttctagtcggcgatgccagagccagcccatgttagtcttatcaattaagcaagtgtcgagttcagctctatcaaaatctactaagtatagatgaccctctaacgctcccttaaatgctattgaatcatcacttcttctaaagatagtaacacctatatctgtaaaaagatagttgtagcctattttacataattgcgaaactgaaagcaagttataatctaaagaatctacaagaaaaacattggaaatggaatggtcgggagatatagcaattttacccaatcctttgaccaaaccttgatttccatccccgaatgtgatagctcgttggggatcttggtttttctcataagaggagaacatcttctcccctgtcatatggttggtgcacccgctatcgatgatc

SEQ ID NO: 35696 - DNA, 369 bp, Zea mays
  unsure (1)..(369): unsure at all n locations
ttcgaaaaagatagaccgtgtgcagctcgtcaaacaggtnaacaagtgggaggagcgcatcacagcaagaatgtgatgaccacttcaagacctctggagctgctgcacatggaccttttcggacccgtcgcctatctaagcataggaggaagtaagcatgggttagttattgttgatgacttttcccgcttcacttgggtgttctttttgcaagataagtctgaaacccaagggaccctcaagcgctttctcatgagagctcataatgagtttgagctcaaggtgaagaagataaggagcgacaacgggtccgagttaagaaccttcagtggaggagttcctgaggatgagggatcaagctgagttctc

SEQ ID NO: 35697 - DNA, 409 bp, Zea mays
  unsure (1)..(409): unsure at all n locations
agcttgggcacgcatctgaatttcagtttatcttatcatccgcagatagatggccagaccgaaaggaccaatcaaattcttgaagatatgttgagagcctgtgcgttgcaagatcagtccggatgggacaagagattgccttatgcagagttttcctataacaacagttaccaggccagtttgaagatgtcaccatttcaggcgctctatggaaggagttgcanaactccgttgcaatgggatcagcctggagaaaagcaagtgtttggaccagacattnttgttgaagctgaagagaacatcaagatggtccgagagaatctgaagatagcgcaatcgaggcagcgaatctatgcagatacaagagaagagagctgagtttaaagtccgagactttgctatctgaagt

SEQ ID NO: 35698 - DNA, 153 bp, Zea mays
tcccgggctgatccacccgtaggtttctaaagcccgactcctccagggctaacccaacttggaacgaccgatacaccagcccatgacgccgacggtataactacaccccgaccttaatataactaagccccattcacctatgttcctgtttcc

SEQ ID NO: 35699 - DNA, 433 bp, Zea mays
  unsure (1)..(433): unsure at all n locations
taacacagtgcgctgcctggcacgggcgctctgttcaccagcagacccagcaggcacgccgcctgttggatgaccttgacgccgcctgccagcggatgggacgagacgcattaaatgctgagagggcatatcgcccgtcagcgcagtggcaggcggcgcgtcctctcctcaataaatgcaggcgctgcacggctttacgtcaggctcggtctgatggcttatgtcatgggccacaagcagcggatctctgtctgagcgggaagtgaagggcaaggcctggacacgtgttagcaccggacctctactcacatcagggtcctcctcgttccgggaccttgctgaggttcggaccttactcggaggctccggacttatacgtataggggtccggnngtctttatngaggtcccgacccacgatcatactgagatgc

SEQ ID NO: 35700 - DNA, 82 bp, Zea mays
agttaatgaaagaaatacatgcaggcctgtgtggatctcacattggttctaggccattacttgcgaaaattttccgcccagg

SEQ ID NO: 35701 - DNA, 330 bp, Zea mays
gctgcctcaggattcccgcacccagcattgaggcgttcttctttttatgcataaccaatttatatatatgctactttactacacttaatgtttgtaggcttgagatgtgcacttaagtgtacgagttgcttgaaacccttagttgcatgaatactagattccttattgagatggatactattatcctacgtggagtagctgctttgctaattaggatctcggcagaagtcgagtgattcttctagcactaccgcgaggtcacgaatggattgtattgatcttgataacaggatctataatgttctattgacttagacctatggtggatgc

SEQ ID NO: 35702 - DNA, 192 bp, Zea mays
cccacatatttggcactactttgcctgatttgttagtgagcacatatgatgcattcaaagtcttatatgaaatgttaggctcattcgatgcagtatgagatttcttcttacgcatttaacatggtagaacgtctagagctatagcctcactctataaataaagcatgggagaacataatagtcttctttgct

SEQ ID NO: 35703 - DNA, 409 bp, Zea mays
  unsure (1)..(409): unsure at all n locations
ggggttcctgcanaatactgagtctattgtttggncgaagccccttgatcatgtcctcaattacaatttcattgggcactgtaggtgcttgtgctctcagacggaggaaccttctgacatacgcctgaaggtactcctcgtgatcttgcgtgcactggaacaaagactgagcattgactggcttcgtctaaaatccttgtaagctggtgattagcatatccttgagcttttgccataatgtaattgtccctggccagagagaagagtaccaagtttgtgcgacacttctgacttccatgacgaaagatttcgccatgactgcagtgttgcccccaaatgaagatatggttgcctcgtagctcattagaaactacttcgggtctgagtgcccatcatacatangatgctg

SEQ ID NO: 35704 - DNA, 70 bp, Zea mays
gcttttctactcggtccttaagcaagggattcctatttactaattgagcgatacaatgtaaagcggtatc

SEQ ID NO: 35705 - DNA, 418 bp, Zea mays
  unsure (1)..(418): unsure at all n locations
gtgataggattatctaatgtgcaattctgattagatagaccttgtgcagcatgtcaagcaggtaaataggtgggaggagcacatcacagcaagaatgtgatgaccacatcaagacccctggagctgctacatatggacctcttcggacccgtcgcctatctaagtatagggggaagtaagtatggtttagttattgtggatgacttttcccgcttcacttgggtattctttttgcaggataaatctaanacccaagggaccctcaagcgcttcctaaggagagctcaaaatgagtttgagctcaaggtgaaaaagataaggagcgacaatgggtccgagttcaagaacctacaagtggaggagtaccttgaggaggaagggatcaagcacgagttcttcgcttcctacacaccacagc

SEQ ID NO: 35706 - DNA, 424 bp, Zea mays
  unsure (1)..(424): unsure at all n locations
ggccgtctaatacacccttaaggctagtgaaccatcacttcttctatagacagacacatctacanttgtaaaaagacaattatatcccatattgcatagttgactaacagatagcaaattgtaaccaagagactcaactaaaaacacattggagatagagtgctcattagaaattgcaattnntacctaaccctttaccttgccttgattctcatcaccgaatataattgaatcttgggaatccttattcttgacgtaggaggtaaacatcttcttctcccccgtcatatggtttgtgcatccgctgtcgataatccaacttgaacccccggatgcataaacctgcaaggcaaatntaggcttgggtcttatgtacccaactcatgttgggtcctacaagggtagtgcaaatattcttagggac

SEQ ID NO: 35707 - DNA, 89 bp, Zea mays
  unsure (1)..(89): unsure at all n locations
cttctccctacaccccacaacaaaatggtgtagtggagaggaagaatcnaactctattggacatggcaatgaccatgcttgatgaatac

SEQ ID NO: 35708 - DNA, 388 bp, Zea mays
  unsure (1)..(388): unsure at all n locations
tgctntctgcatnctcaaccgaagctattcatttgctctattcttttaacaagaaagagcttcggcaaaggtaaaaaaattcaacttcatcaaaaaacaagaaattcaatcatcagatggctagggtacgctcaacagctatggttactcgcgacggagaggaagccgaaggtgccgaaatcgctccaatctctgaagtgatgaaacggtcagggctggtagtatcggaggatgcacctgccgctgaagctgagcaggttgatgctaaggaaattgaatatgaagatgattacagcgtcgtgccatctaaacccagccacctggagtttgggaaatccaccatcaccgaaggtgatatgtctaagctgatgaagttaggctatttcag

SEQ ID NO: 35709 - DNA, 431 bp, Zea mays
tctagggcttccaaacaaagccagtgacttcgcaagctttgttcctgtgcacgcaagactatgaggagtacttgcagacatacatccaaaggttcttgcggctgagagcctatacgccaatggtgcctaatgaaatcgtcatcgaggccataatcaagggctccgtctaggacccatagcacaatattttgcaaggaagccaccatagaccttggagaagcttctccataagatggatgaatacatccaagctgacaatgatttctgccaaagaaggaaggaagcgtacaagtattctgagatgactatgggcttcagaggaagacttcaccctatgcatgtcagaacgatccacaatcccaacacaaacgatgaaagtgccaatcatactcagagaagccagcacagctcacggtcttcgggaatgcaac

SEQ ID NO: 35710 - DNA, 60 bp, Zea mays
ccttattattgacgtaggaggtgaacatcttcttcttccccatcatatggtttgtgcatc

SEQ ID NO: 35711 - DNA, 460 bp, Zea mays
  unsure (1)..(460): unsure at all n locations
tccatgtatatatttatttcgtttaatcacagaccatcttaattatctatggntctaggtttatcttggtcttgcaggcgggattgccataagactggtgtccacgctgaggtgagcggtacgggtgctgagtcccaacgggagcgggggaaccaccgtccagaatacgacgttccgcacgctcagcccgcagcagggcgatctcagcacgagccctactcagctcgtctaatgcatggtccagctccgtgtttagcacggcggctaggttgactgtgctgctcaacctatgattgccctcaccgacgggtgagacaatcacgcctcctgtgctgccagatgaacggcggtggtaatacttcatgtcaagaccgtcagctgccccaccgtaaaccgagcagtagtgcgaaagcgcacgccgtgcagcatcttgcatggctgcctcagctgagtcccgctc

SEQ ID NO: 35712 - DNA, 113 bp, Zea mays
gtcagcgtgaacaatataatgtactgtcatctattatagcctgacgcacttggataatacattctgtcttgacatcatgtaccaagggaacggtagaacaacacctttcccct

SEQ ID NO: 35713 - DNA, 450 bp, Zea mays
  unsure (1)..(450): unsure at all n locations
acacatgaaactcagcttcatgagtataaagaagcaagttatgcttcgttgtgtacttaaacaagggaagggtgttttcgccttctgctcaaaaaatacaagtttcgtccacatcaaagcaattcatacacggatgaaaaggtaaaaatatattacaaggtatggaaaaaattacagagcaatgtttcattcctaaattacaatatcttttacaaagatagttcaaatttctctagagctttntgcagcagcttcatcagtatccgtcaagcttcgaatcattgaccttcggctttgtcatcctatacataacaaagcagtataaggtaaatagaaatctcgggagaaggtatgtaacaatacaagtttaatgccggcttaagatgacttcgagcttcatcaccagctaagttccgccaaccctttgtccaaatttgagttatgaatcta

SEQ ID NO: 35714 - DNA, 498 bp, Zea mays
  unsure (1)..(498): unsure at all n locations
tagcaagtggctctacaatttggtattgtcatcacagcatgatttatcacttagcaaggtcaaaaagtgcaatcacagcagctctgtccagatttggacagattcagacttgtgatttaaaaattcataactgaagattcagacatccaaacaaattgatcctagactttctagaaagctaattgaatgttctacaaattatttataaacatcactggctggtttaacatgtataaagggtaaaatacattatgaaggctgtgctgtccagaacttggacagattcagtctttacactttaaacatccataacttaatcttcaaaccaccaaaaatagtgatccaagactttttggaaagcttggcaaaagtactacacaacttttataatcaccaaggggtgattccatgttgaactgaatcaaacaattcagttntcgaaatctgttctgtcagtggacagaacacagcaaccaagttgtgaaattcataactctt

SEQ ID NO: 35715 - DNA, 438 bp, Zea mays
  unsure (1)..(438): unsure at all n locations
ggaaagtatctagatacagtccgaaggattgatgcttccttctaatgtttctctatcaaaaatattcctcatggagaaaatgaatacgctgatctgttggctaagtcagcagcccaggggctgcctataccttcagaagtattttttgaaacaataaaagcaccttcggtcgagcttcttgaaagagcaatccttaatatatcccctgtntatagtgaagattggagaactgagattatctctttcctccagggtaattttctttcaaacgacgaagcttataaaaggagaatagaagcaagagctcgaccatatgtcataatagaaggggagctatacaagcgtggggtctgttccctattgctcaagtggttatccagatccgaaggtatagaaataatgaaggacatacatgcacgtctgtgtggatctcacatt

SEQ ID NO: 35716 - DNA, 138 bp, Zea mays
  unsure (1)..(138): unsure at all n locations
agccgctgtgtccanagcgcctctaagtaaactgctatgcacaagactggcttattgtacaatacattctgaatacgaaccctttggtgggctttgagctaaggaatggaataaaagggcatcttaaactgactccag

SEQ ID NO: 35717 - DNA, 323 bp, Zea mays
tccagcccagccgtgctcgggcttcctgctccagtttgatccttccatggcgagctcgccggggatgccccttcccctgccggcgtttagcccaaaccggatctccctgcgcgcgctgctgcttctctactcggcgctctccgctcgaatttagcccagcagctccccgctcggttccgtttgccgcgccgtcgccttgctgcgcgcgccgtggtcttctttctccgcgcgccaggccgttccagagcttcctttgctccattccatggttgcgcgccgagcccctcgcgcagaccgcgagctctctgttcgccgcgcgctct

SEQ ID NO: 35718 - DNA, 186 bp, Zea mays
  unsure (1)..(186): unsure at all n locations
atcttatcttctggctctttgcatttgtcntgaaggccttagcanaaatgatgtcagctgcactgcctgtatcaactaagacattgtggaccagaaatcctttgataacacaagagataaccatggcatcgttgtgtgggtaatctttgagctgaaggcctcttgggagaaggtaatatgaatgtg

SEQ ID NO: 35719 - DNA, 497 bp, Zea mays
  unsure (1)..(497): unsure at all n locations
ntaccaaatggacgtgaagagtgccttcctcaatggaccgatcattgaagatgtctacgttgagcaacctcctggctntgaagatagtgagtaccctaaccatgtttataaactctctaaggcgctttatgggctcaagcaagccccaagagcatggtatgaatgcctaagagattttcttatcactaatggcttcaaagtcggaaaggcggatcctactctatttactaaaactcttgacaatgatttgttcgtatgccaaatttatgttgatgatattatatttgggtctactaacgaatctacatgtgaagaatttagtaggatcatgacacanaaatttgagatgtcgatgatggnggagttgaagtacttcttgggatttcaagtaaggcaactccaagagggcaccttcattngccaaacgaagtatactcaagacattctaaacaagtttgggatgaaggatgccaagcccatcaagacacccatgggaa

SEQ ID NO: 35720 - DNA, 412 bp, Zea mays
  unsure (1)..(412): unsure at all n locations
tgtggaggttcttcatccncacatgtgctaagcggcgatgccactttcagcccatgcaagtcttagcaattaagcatgcatctagaccggcctcttcttttgcaaaatcaaccaaataaagtttgtcgtctagtacacccttaaaagctagtgagccatcacaccttctaaagacagacacatctacatttgtgaatagacaattatatcccatattgcataattgactaacagataacaaattatatccaagagactcaactaaaaatacattagatatagagtgctcggatgaaatagcaattttacctaacccttttactttgccttggttcccatcaccgaatattattgaatcttggggatccttgttcttgacgtaggaagagaacatcctctnttcccccgtcat

SEQ ID NO: 35721 - DNA, 502 bp, Zea mays
  unsure (1)..(502): unsure at all n locations
tgacaacacnctttgacatcttaaataaaatttctgagatcatgtatatttaattcatttctcaacatgcaaaagcaggtcttatcaagtggcctagtaaaaatatccgctaattgatcttccgacctcactccttctaaactgatgtatcctttagtgacatgatctctaaggaagtgatgacagatatcaatgtgcttggtgcgagagtgttgtacaggattattagcaattttaacagcactctcattgtcacacaacanatgtaccttttctagaactacgccatagtctagaagagtttgtttcatatataaaatttgtgtgcaacaagcacccgcgacaatgtattccgctttggcggttgacaaggcaacactattntgctttntggatgtccatgatactagtgatctcccaagcaaatggcacccctagaagtactttntctatncaatttgcaaccggcataatccgaatcggatagccaatagatcaaagt

SEQ ID NO: 35722 - DNA, 169 bp, Zea mays
aatttgagatgtctattatgggagagttgaagtatttcctatgaatttatgtgaagcaactctaagaggacaccttcatagcccaactaagtacattcaagaaatactgaccgaagtttagaatgaaggatgccaagcccatcaagacacccatgggaaccaatgggca

SEQ ID NO: 35723 - DNA, 446 bp, Zea mays
  unsure (1)..(446): unsure at all n locations
gctttgatttcgtggagaagtcactgttcaatctagcaatctcatcttgggcttctgccagcgaacccttcatngtttgaagcatgaaatccttcttcttcagagcagcttcgtgatctttaattttgccctctaagccctcaattataatctcatttttcttgtcctcgaggtcttgttgcatcctcaaggttttacttagtagtagactctgaaaaaataaccttcatcagaagtaaccttcatctcaaaaacaataaaaagttaaggtaagaactttaccttaaaattagaataaaacaagctatcggcgatatgttgtcgccggtatctgttgaggtcggcctcaagcttcagaaaaccaacactctntgatagagtgctgacaaccttcgctccagtccgatcctgaaggcatnctaagctctcttcgtcaacaccaccga

SEQ ID NO: 35724 - DNA, 438 bp, Zea mays
  unsure (1)..(438): unsure at all n locations
tctaaccggtaacanacccaatgtatcttactttcgtgtatttgttatcaaatgctacattctagtgaagaagggtagaaattctaaatttgctcccaaagttgtagaagagtttttgttaggttatgactcaaatacaaaggcgtatagagtcttcaacaaatcatcgggtttggttgaagtctctagcgacgttgtatttgatgaaactaatggctctccaagagagcaagttgttgatcttgatgatgtagatgaagaagacgttccaacggccgcaatacgcaccatggcgattggagatgtgcggccacaggaacaacatgagcaagatcaaccttcctcctcaactatggtgcatcccccaactcaagacgatgaacaggttcatcaaaaggaggcgtgtgatcaagggggagcacaagatgatcaagtgat

SEQ ID NO: 35725 - DNA, 163 bp, Zea mays
ccttgcctttgattcccatcaccgaatatatattgagatcttgggaatctctattcttgacgtaggaagtgacatcttctcttctcccgtcatatggttgtgcatcctataatatccacttgaaccccggatcataacctgcaggcaatttatgctgggacta

SEQ ID NO: 35726 - DNA, 381 bp, Zea mays
tacagattctccgaaatagctaggtgcttcggagggtggttttattctagacatgtcagatcgattcattccacccagaatgatgacaggggaagccagcagcagaggccgcaatattcctcccaggcttctcaggcttcggggcagcaacagagttatcctcggcctccagctccaaggggcagaggcgccaggggcttctgaggaagatttggggatcaaccaaggaaaatctattgcttattctgtggtgaagacaatggccacaccaccatgatgtgccatgttaccatccagaagcaaaatgagatagcagaagctgcagcacaacagagtcagccgaagcaagtcatgcatactggctcgtaccattcgccttac

SEQ ID NO: 35727 - DNA, 161 bp, Zea mays
  unsure (1)..(161): unsure at all n locations
gcgacaatggaacgaagttcaaaactctcaaatgaaggatttcttgaggaggagggcatcaagcatgagttcccttgtccctacacacctcaacaaaacagtngtgtggagagaaagaatagaattctcttatatatggcgaggaccatgcttgatgacta

SEQ ID NO: 35728 - DNA, 408 bp, Zea mays
  unsure (1)..(408): unsure at all n locations
cccagcatgccagaagtcctttaagacattgaaagagaagttgacaacggcaccagtactgattctgccagatgttcacaagccattctcagtgtattatgatgcttcgtataccggactgggatgtgtgttgatgcangaagggagagtattggcatactcgtcctgacagttgaagattcatgagaaaaattatcctactcatgatctggaattagcagccgtggttcatgcattgaagacctggaggcattatctttatgggcagaagtgtggtatctacacggaccacaagggtctcaaatatatattcactcagtcagagctaaacatgagacagcgaagatggttagagttgatcaaagattatgagctggagattcattatcacccaggcaaagcaaatgt

SEQ ID NO: 35729 - DNA, 176 bp, Zea mays
  unsure (1)..(176): unsure at all n locations
tccaagatcacagagttgtcccactggataataaaatgaagctcantggtgcaactaagagaacatttgatattgataagtcatttgagattgccaccttgccaagtccttgcacttttcttttgaggtgtctccaaatgtgattntatcttgaccatcaacattctcatctaatg

SEQ ID NO: 35730 - DNA, 90 bp, Zea mays
  unsure (1)..(90): unsure at all n locations
actactaaatgtgtagttcaccctaaatcaaaccccnctttgagttatactatttctcttgagatatgttccattattcgtacatgactg

SEQ ID NO: 35731 - DNA, 173 bp, Zea mays
tggtggccgatggaaaacacaaatccttgaaatcttggctgtttactgcttgccgttgtcaactgttagctcggacggtactccgaagcggcaaacaatgttctgccaatagaatttttgggcagtctttgatgtgattgtggaaacggccctcgcttcaatccatttggtga

SEQ ID NO: 35732 - DNA, 519 bp, Zea mays
  unsure (1)..(519): unsure at all n locations
tcagcagcgattctgccctctctaggacgaacttgaggaattctatctcacaacgctctcctctgaanttgtcaaacaccaccttggtgatgcgtgtctctaggcagctgatggagccaacctcctcccagaacttcaaattgaacttgccattttgctcatcagtttcatgtgactgcaaaatcacccggggtatatatgtcactccactaataacagactaacagtcatgctagaaggttttcagagagagattgaaattagtacaggctacaaggacatggggtgaatgggatctcaccagaacatgcaatgtctccacattgtgaaagcatctcaggaaggtgggcagcatcttgacttccttgcggattctgaactgcatcttcaaggccaagatcttgacacttggaaccatgttagatggngtcatctntgttccactctacaccacaatngacaaccattactgccatggattaaaatngaaggaaacatttgggaccgatacacatatag

SEQ ID NO: 35733 - DNA, 453 bp, Zea mays
  unsure (1)..(453): unsure at all n locations
tcgactggccggtggacacgctggtcccgtcgcatctgcttactaaggacaccacgctggtgtccaggtacttcatcctctactacgacaacgacaacgtgctgcggctccgctacgacggccccgacgcatcgagcatctactggccgaatacggactacgccgtcttcccgaacggccggacatcctacaacagctcgagggtcgccgtcctcgacgacgccggcgtcttcctgtccagcgacaacctgcaagtcgtcgcctccgacctgngagtccccggaatcaagagacggctgaccatcgatccggacggcgacctgaggatctacagtctggagtctggacccatcgactgtgggttggacagtgacgtgggcggctatggcgcatgcgtgctccactcacaggctgtgcgggcagaacgccatctgcgtgtacttgccgagcctc

SEQ ID NO: 35734 - DNA, 266 bp, Zea mays
gctcgtgctcaagctattcaaaccgaaggttagagttaatgaaagaaatacatgcacgcctgtgtggatctcacatctgatctaggtcgttacttgaaaaatttccgtcaggatttattggcgaatgagcttctgatgcacataattggtcaaaagtggaagggtgtcaaaatgtgcaagagataaaaacaaccttcgtccttgacacagctcatacaacccacttggccattacataggtggcgccttgactttgtatgttccgt

SEQ ID NO: 35735 - DNA, 165 bp, Zea mays
cattcttttcctttgtcccttttagcttcggcattattccattcactcagcgtcgggaacaccttataggccagatattcttggactagatctctggtgctgatctgctcggctaccaccctaaattctgccacagcttgttggcacggtgaccccgacgtcatg

SEQ ID NO: 35736 - DNA, 444 bp, Zea mays
  unsure (1)..(444): unsure at all n locations
gaataccctgactacgaacgactaaacaagggtgtctaatggcaaaagagaaaaaggattgttagtgttatgagcagataggctgctaggatggtaaaacaagacgaanaaactttgaaaaagagaaaatccagtcctgagccaaagatggcgacctcgaagaagagaaaaactgcaactccagagccgaagatgtctgagatagaagaggaagctccttcgacgccttctgctgccgaagtagaagaaattntaaaggtaatgactgaatccttacctatcaagctgctaagtccactggggccgcaactgacgaagcttttacagaagaaggacgagccttcggcagggaaaaaggcggttgggccaaaaaagcaaagaattgttactattatgcaagccattgaggaaacgccaccgncggcctcagcatcaaaaataaca

SEQ ID NO: 35737 - DNA, 94 bp, Zea mays
cttggcctgcgtgcagccgacgtgccactgggacctgcgaggatctgctccttcggttcgggacgcattagcatggtgatgacctttttgatat

SEQ ID NO: 35738 - DNA, 456 bp, Zea mays
  unsure (1)..(456): unsure at all n locations
ctgtagttgtacccaatagctcacatcaacacccgaagttcacatttttatatcaatttcagactntctcagtctgtgttaattgtagtagtgactggttcagcagattcatggtttgttaacttgtttaacagggaaaacctaaaatgaaaaaaaactgcagggagcaggaacttctatatggatgaaaatggcagcagcaaagtattcagaagcatatttaaaaaaatatgtgaacaacatcaacagaacagtgagaaaaacctgagtggttacacaaataaaatgcatganaaataatcatgatattatgataatggttagtcgaccaaaccaaatagtaaaagcatacaaacctgaagtagaacttccgaagtgataaatccaaatgcatattcgccaattcttgggtgcctaatgatgaccacttctttgaatgcatgctcngtttgatct

SEQ ID NO: 35739 - DNA, 146 bp, Zea mays
  unsure (1)..(146): unsure at all n locations
actccttctggatatgcttacatcactacatcctcangacaatgtgcatgctcatgaagacctatggaagatatacaacatgatgacatatgtagccatatgttcnaaacccctatggctctacgtgagtcatgaagctcctgatc

SEQ ID NO: 35740 - DNA, 502 bp, Zea mays
  unsure (1)..(502): unsure at all n locations
tagtccatccttagctggatatgtnggtactttattcttgcatcatcgttgtgcttgccatattatcaatntgattgtgaaatgcggcttgaaaagactgcaaccttaccttgattcatttagaactgcaattgtcttcttgaatgcttctaatcagcgtattgctgcatttaatggttattgtngtgctatgaatgtacgacctcgtaaatttggcattgatatgcccgtgagatggaattctacatatcttatgcttaagcatttaattccttacaagggaacctttggtgtgttcatggacactaactatcctagaaaaccaggtgaacctaatcttgtgacaaattcgcattggtatgtggctgaaaagttgcttcagtttcttgaactgttntatgatgctactgtgaccctttctagggtttactatcctacatctccacttattatgcataatattcttgacattatccagcatttaaatcagtatgaaaatgat

SEQ ID NO: 35741 - DNA, 110 bp, Zea mays
  unsure (1)..(110): unsure at all n locations
tctggtanaagaaacatatatgccttcgtgagacataaaaatgtgtcatgtttcaactttgatgagaagttttcctcaccactcgcatcctatgataatacgaattattt

SEQ ID NO: 35742 - DNA, 391 bp, Zea mays
  unsure (1)..(391): unsure at all n locations
tatggtgagcaacctctcggctttgaagatagtgagtaccctaactatgtctataaactctcaaaggcgctttatgggctcaaacaagccccaagagcatggtatgaatgcctaccagaattcttatcactaatggcttcaaagtcggtaatgccgatcctaccctcttcactaaaactattgaaaaagacttgtttatatgccaaatttatgttgatgatattatatttgggtctactaacaagtcatcatgtgaagagtttagtaggatcatgattcaaaaattcgagatgtcaatgatgggggagttgaagtattttctaagatttcaaatcaagcaactccaagatggcaccttcatctctcanactaagtacattcaagacatact

SEQ ID NO: 35743 - DNA, 476 bp, Zea mays
  unsure (1)..(476): unsure at all n locations
tatgaagattcttcatcccaacgtgggctagtcggcgatgccatatccaacccatgttagtcttagcaattaagcatgtgtcgagttcagctctatcaaaatctaccaagtatagctgaccctctaacacacccttaaatgctattgaatcatcacttcttctaaagacagtgacacctacatcagtaaagagacagttgtagcccatttgacataattgagatacagaaagcaaattgtaatctagtgaatcaacaagaaaaacattggaaatggaatggtcaggagatatagctatttttcctaaacctttgaccaaaccttggtttccatccccgaatgtgatagctctttggggatcttnggttttctcgtaggaggaagaacatttcttctccccggtcatgtnggttgtgcacccgctgtcgatgatccaacttgagcccncggatgcataaacctacaaaacaagttta

SEQ ID NO: 35744 - DNA, 85 bp, Zea mays
  unsure (1)..(85): unsure at all n locations
taccccaaaatggctaactaacactgttatggtaaaaaaggccaatggcaaatggcgaatgtgtatcgattntacagatctcaac

SEQ ID NO: 35745 - DNA, 485 bp, Zea mays
  unsure (1)..(485): unsure at all n locations
tcaatcaatctatcacctaagaggatcaaaagcagtagtatgtatatgcatanatcactcatgtgtattgcagaaacagaatatcactatgaatttcagcaaaatagaaccattccctcatcatatacaaatcaaaccacttatcccactgatccagcttgggcttctgatcccacagatacagcttggcttgcaaagacaaccaattaccaatcacaacccacaatttgcttgaaagttaagtacatattcaacaacaataagaccaacaaagccttttatgcccaagtaagttggggtaggcaagagctaaaacacaacaagagccacaagttaagagtccggcacgtgatatctattntccattattcctaattcaggctaaatctttgggtatataccatcatttcaggtgtactcttacgggctgcttctatatcaatatcggcgttcccttgccgcttttccattactgcacgccttat

SEQ ID NO: 35746 - DNA, 168 bp, Zea mays
  unsure (1)..(168): unsure at all n locations
tcctctgttctgcanntttttcaacatataggcggttctagcaaaccaaactaatcactcaacaatcataaaccgatcttagcacatagctaacatccacaaatcaaaccaatccaaactagctgaaagcanatgactagctcggggtgacttggccatatgtgctta

SEQ ID NO: 35747 - DNA, 401 bp, Zea mays
  unsure (1)..(401): unsure at all n locations
ntaccaaatggacgtgaaaagtgccatcctcaatggaccaatctaggaagaggtctatgttgagcaacctcccggctttgaagatagtgagtaccctaaccatgtttacaaactctctaaggcgctntatgggctcaagcaagccccaagagcatggtatgaatgcctaagagatttccttatcactaatggcttcaaagtcggtgaaagggaaatgtgcccttgggccatttctaagtattttggtgattgagtgccaacacaagtgcttaaatgtgaatctatacccatggatggacaaagtgcaaatcaagagtaaaggtatgtttctaagccttagtacattggtttgaaaactaatgtattgtgtctaagtgcttgaaacaggagaaatcgagtca

SEQ ID NO: 35748 - DNA, 441 bp, Zea mays
  unsure (1)..(441): unsure at all n locations
cgacgcgagtatgcgactctntggtattgtacaatcgaatctaccaagccgcacttaggcaacggcacgcccgcacctggaagatggaaggccaaatgttgccgctcgacactcaccattcgccctaaactaagttgggcagacaggcataactccaccactctagatgggtatgggtacctgtcgggtatagaataactgatgtgtccgggtatgggtgtggaattgtatccgcccatgggtacatgtattcaagcagagaagttttagtttaacgggctgagtctgggtaacaaaaaatcggcgggtcttcacccattgccatctctacgcacgcacatcgagccaatcagccggtaagtgaacggcgaacgacgatatgttcggtaagaatgactgtgtcacatcatactgctctgaccgttaaccaccccactgtac

SEQ ID NO: 35749 - DNA, 148 bp, Zea mays
tcatgggttgatctttgacacaatgcatttcaaaaggctaggtgtaaaatgctcaatgcctaagttgtcaattgcttttgccaaatttgttttgagaagccatttatgggaccatttatttcagttggcttaaaatattaagaactta

SEQ ID NO: 35750 - DNA, 349 bp, Zea mays
  unsure (1)..(349): unsure at all n locations
nttagcttatcatggagcatngtaacaacctcctccttttggtctaagtgttccttcttcttgaccaagcttctctccttccgggtcacctcctcctctcggtgagacaccttccggatgtcctccttgaagtcctcacgctcttgctcaagctcggcccgctctgaggcaaattggcaggacgccgccttagtgcgcttctccagttgggtgctccagtcgtcgaggcactggtgctcggtctcgagcgcctcccactcccactggatagccgcctcggtttcatggagggcctggtgagcgcgagccagcacctgagggaggggagtcagtgttactccagtttgac

SEQ ID NO: 35751 - DNA, 456 bp, Zea mays
  unsure (1)..(456): unsure at all n locations
ngagtcagttcttctacagagaattattgatgcccaaagaaccgacaagggtatgaagcacattcatgaganaatagaagtcagcaaagctaattgcttcagaaaggatggtcaaggaatagtatggttcaatgatcgcatagttgtgcctaaagatgctgaggtccgccaacaaattttggatgaagctcatcttagtcgatattccatttatccccgaagtactaagatgtatcaagacttgaagcaacattattggtggacaaaaatgaaaattgagatcgcacgctatgtggcaagatgtggcacctgcagacgtgtcaaggcagtacacatgaagaccgctgggccactgcaatctttgcccatcccaacttggaaatgggaggatattagcatggacttcattgtggggttgcccaggacaactaaagggtttgactccatatgggtcat

SEQ ID NO: 35752 - DNA, 79 bp, Zea mays
ctaaactctcttttttatattaccttcgtaacggtttgagtattctaaatttcacttcgtttgcagagtatgtattaag

SEQ ID NO: 35753 - DNA, 145 bp, Zea mays
  unsure (1)..(145): unsure at all n locations
gtggggacaagatctaancacagtgtcccttcttggagcatttagaacaaagtctatcatccttgttaataatcaagccatntttaatgtatggacatgacctaatcaagtgcccctcttcaaagcattcactacacctcataat

SEQ ID NO: 35754 - DNA, 482 bp, Zea mays
  unsure (1)..(482): unsure at all n locations
catatacagcaatgtacaagcatcagagcagcactaaccttctgttgaaatgttctataagatcaggagaaggtatatgattccatcagatgctatcagtaattgtgtttagtttcctatgcaaccctcatgtgttttatgtatttcaaacctgaccgcagcattgctctagcttttctatcaggggcacatcctgatgtgatcatttcttcatagataacaggaacctgttaaatcatcgacaaaaccacaatggtcagagttcaggtcatgtgtctattccaccagtggagcttgcagttttacagctatagaaattgttcatgatctgtagatntttaaaattaaaggcaactaattggtttacaagaataaaaaacagtagcttacactctaattatnggtgttgttggtcacatatttgaacgtnacagtactaataacattatttttgttgttaagttaaccgagtcaatccacac

SEQ ID NO: 35755 - DNA, 171 bp, Zea mays
cacacttataatcggaataacccgtcagtccctcagatctagtctgatagagccacttaactaggatcaaattccacaatctcactcgaaggtgagtcacagatgagatacaataacacaggaaacctctaattaagtgctgagttattacataaatcggagtttttgagt

SEQ ID NO: 35756 - DNA, 432 bp, Zea mays
tttgaggaggcttcctagcaaaatactgtgttgttgtgttctcaagagaagtcctttgatcatggcttcaataacaatatcatttggcaccatcggcgcctaggctctgaggcgcaagaaccttcgaacatatgcctgcaaatattcttcatgatcctgtgtgcattggaacaaagtttgagcagttactggcttcgtctaaaatccttgaaagctagtgaccaacatgtctttcaatttctgccatgatgtatttgttcttggcctgagagaggaataccaggtttgagaaacactcctcactggcatgacgaagggatttgccatcatagccgtgttgacaccatatgatgatatggtcgcttcatgactcatcagaaattgcttcggatctgaatggccatcgtacatgggtagcttgggtggcttgta

SEQ ID NO: 35757 - DNA, 471 bp, Zea mays
  unsure (1)..(471): unsure at all n locations
tcactcacagttctgattctattggtaaaggaaaataagtacatatcttttactgtgcatctagttatactttatgcctagagttatagaaaaaaaactatgtatctacaaaggccaaaacaacttaaattttggaataagtatggtctttcatgctatgtatagatattttacacttattgctaagaagttgatttcaccactgatgcatggacatggacatgcattatctatgtgcagggggcatacattggaaagagtttttgtgaatctgctgctcgaagtcgcagaagatgaaatatcttttcggacagtagtcagagattngaaaaccaaaaggccaatgctgcaattagttcttcttagctcanaagcatggttatcttctggttggtgctatganaatgataccaatggttcacatggaacaacagatctgcagcctagtggtaaactcttgtattctgatta

SEQ ID NO: 35758 - DNA, 496 bp, Zea mays
  unsure (1)..(496): unsure at all n locations
accttaaatctcagctaaccttgtacgaggataagctacctttgtttcaaaggtggatggttcttaagtccctttgaaatccttaagggtaattgcttaaaatgtttccaacatgctttcataagtgcatagtctgtcgtgagcatcacacttttgttatgatacattgcacttcaccttttctatgatatagatatgttctcattaacctaattatgtgcacttggcatttaaggccaaaatttgtattcttctcaaagcacatatttagggggagcaatctatattatatagaactgtctaagcttaattgacnatatccttttaccatgtccctttcgtttggtacatttgcatatttcctatctctcttatgccaaggctaagactaatatgtttccatgagtatcttgtgtttaagtcttagattgaaagggaaatagagtattcggcanagacaccgcttccactctacaccatcagtattatctatcct

SEQ ID NO: 35759 - DNA, 440 bp, Zea mays
  unsure (1)..(440): unsure at all n locations
tcgcgagagaggganatgggtcctaggtctcctgaggagtctatgtgttgcggagtggagctcgatgctngagtgtgtccatctccgtcgtccttgctgcccgtcctctctcccctntctctngagaaggccctgngcatccccttttatagacacaaggggatggtccagttgtacatatgggggtgttgctatgtgctaacgtggcctgcggagaagtgctcgagccctgtagaagcgtagctggcggtgcggtcctgtgtcctgctgacgtttctttgccttcgtagagagcttgaggactattgacgtcatggacgcatgcggngaatcatcattacctgtgaccggagtaatctagatgtgactccggtctttgtccttcgtagcctgaggcagctagctagaggtagggtaatgatgtatccnctatagcgtag

SEQ ID NO: 35760 - DNA, 128 bp, Zea mays
atatgaaattgaatcttgggaatccttattcttgacgtatgaagtgaacatcttcttcttccccgtcatatggtttgtgcatccgctatcaataatccagcttgaacccccggatgcataaacctgca

SEQ ID NO: 35761 - DNA, 506 bp, Zea mays
  unsure (1)..(506): unsure at all n locations
tcttcgccaatctgagcagttcgaacgagagaagcaagatctttatgcataacttgaagccgaagctcaacaaaattcagatttgagaaaactatggacgagccttcaagaaaaatgtttggaatttagcaacaaatgcattcaacgattaagaaagattttccactcagttggagctagaagtgaaaaattcaccccctcagctgaagatctaccgaagaccttcgaacatattgagggtgagattgacgagctcgacgaagtcatagctgggcacggtgacttctgtgcctgngtagcttctcggggcactgctgcagctttcctaanagctggctgcgatcatggaaagattgtcaataggccanatntcactttatcaccatcaatcctagatgacattcctgatctcgcccgaagtatctctaatagaattgtaaaaatgatatggacgaaatgtgtgcgaganaaggctggagacgaagctcggagtcatcttgaccagt

SEQ ID NO: 35762 - DNA, 171 bp, Zea mays
tggatccttaaacgatcgttgtcacttctaccctgcaataatcttctagaatgtattttccatggaacttgtgtcatgggatagcaagttctatggctactttcttcataacgaatatggtaataccatttcctataactatggtgcacgccacatgccttgtgatgtcat

SEQ ID NO: 35763 - DNA, 435 bp, Zea mays
  unsure (1)..(435): unsure at all n locations
ngaagccatggtaagtagcataggctaataatatgcgaattgtctcaagcctagctacgggtgcataggtttcaccgaaatccaaaccttcgacttaggagtatcctttggcgacaagtcgagctttgttccttgtcaccacaccatgctcgtcttgcttattgcggaagacccacttggttcctacaacattttgattaggacgtggaactaaatgacatacctcattcctagtgaagttgttgagctcctcttgcatcgccaccacccaatccgaaccttgaagtgcttcctctatcctgtgtggctcaatagaggaaacaaaagagtaatgttcacaaaaatgagcaacacgagatctagtggttacccccttatgtatgtcgccgaggatggtgtcgacggggtgatctcgttggattgcttggtggactc

SEQ ID NO: 35764 - DNA, 381 bp, Zea mays
gcaacaacatctaccagcacagtttctgtttaccataccagtaacttggccattcgcatgctggggactggatatgattggacctttcaagaaagctcaaggaggatacactcatgtactggtagcaatcgacaaattcactaaatggatagagttcaaacccattgcttctttaacctcagctaaggccgtggaattcatacaagacataatattcaggttcagaataccgaacagtatcataactgacctgtgatccaacttcacaagttcagagttcttcgatttctgcgagcaaaaaagcattcagatcaagtatgcttcggtagcacacccaagagccaacgggcatgttgaacgagctaaccggatgatattgga

SEQ ID NO: 35765 - DNA, 144 bp, Zea mays
  unsure (1)..(144): unsure at all n locations
tcgctcgttggggatcttggtttttctcgtaagagggagaacattttcttcttcccactcatgtggttggtgcacccactatcgatgatccaacctngagcccgccgatgcataaacctacaaaacaaatttagntcttgactt

SEQ ID NO: 35766 - DNA, 474 bp, Zea mays
  unsure (1)..(474): unsure at all n locations
tattggttgtcggcttggtgtagactcctccttcttttcttccggcgccttgaatgcaacgggttgagcttcagatggctcgccaagctcgttgattttcctcgagccttctatcatgcactcaaaacttacaaaatgcccgataacttcctcgggggtcattttagtatatctaggattaccacgaatcaattgaacttgagtgggattaagaaaaatgagagatcttaaaataacatttaccacttcgtgatcgtcccacttcttgctcccgaggttgcgcacttggttcaccaaagtcttgagccggttgtacatgtgttgcggctcctctcctttgtgaagccggaaccgaccgagctccccctcgatncgttcccgcttggtgatcttggtgagctcgtctccctcgtgcgcggttttgagtacatcccacaatctcttggcgctttcaaccttgtacttgtatactcc

SEQ ID NO: 35767 - DNA, 360 bp, Zea mays
  unsure (1)..(360): unsure at all n locations
ctgatagcatgctcagtaccactgctacattccccaaaatcagctacccttggcctctagctttaagcgcaacgatgttcttgtacaagcaatatcagttgagtatggctcgcangggccttgtgttgatctcagaggtaactcagaatgtaattggtatgatgcanagtagtgcttatctgcatatggatacacatggtggcatttttgggttgcacataatangttgactggcattttaccttccattttgatatgtggcttcctttacttatttcttttatggccttggagatctttttagctcaacgcattggaaatatgcatcttcacatgtataccatcgaatacttaaaatta

SEQ ID NO: 35768 - DNA, 115 bp, Zea mays
taatcttcacactgcttataatgatagacatgaacatgacttacttacgctaacatagtgctacattaaattccttcattaagccgagggtaatttataatatgtaccggaccgt

SEQ ID NO: 35769 - DNA, 478 bp, Zea mays
  unsure (1)..(478): unsure at all n locations
tcngctccatctatgttatggatcgcctttgaatccgttcaacttcctttgacactcctgacagcttcttgactcccatgaacagcaatgggcccttgntccgaaggtatcttcatgcataagtatgctggatggagtattgcttcaaaggcattaagcgtccttcgaccaatggttctgtttgggtagtccatgtcaacagtgtcaaagacaacttgttcagttcttgtgttgtggatgtaaccgaaggtaactgacattgttattttgccaagtgccacaatctgtcttcctccgaagccacaaagagggtgtgttgcatcatgtatcttgtcttctggttcttgcatctgttngaaagcctttgcanagatgatgtccgctggactacctgtgtcaaccagaacattatggaccanaaatcccttaatgacatangatataaccatggcatcattgtgangacagtctttaagct

SEQ ID NO: 35770 - DNA, 155 bp, Zea mays
  unsure (1)..(155): unsure at all n locations
gtacacggcttgtgggtcttctccttgggtgagcataaaacgaccgagctccccctcaatcgnntcccttctggggatcttcgcaccttgtctcttcggcgcggcttgacacgtccaaatttcttggactcttaatcctgcacctgtatactctc

SEQ ID NO: 35771 - DNA, 377 bp, Zea mays
  unsure (1)..(377): unsure at all n locations
tctcagctttcacctaaagggagccattcatgttagtcttggcttaaactttttggattgaaatgaggtggaagaaatgagaagcgattnttttgcctgatgaatcaagtctctgtcgagacctatttatatagagaagagggtatgaggcagcatcttttgatgggtagacaaaaggaatcctgccatttcatcttctcaatgctgtctatcaagtttttagatctggcagcagcataaggaatctgtttcctccatcacgcgtgtgtttattaattttntactgtgccagctatngccccagtgatctatcacattgtcatgctccaactattggcaacaagaatcaacaggttagttattctactcagcattct

SEQ ID NO: 35772 - DNA, 154 bp, Zea mays
  unsure (1)..(154): unsure at all n locations
aaaataacttgctgattncataatcattattatattcttttggatttcatgtacccctattcatggttgtcactgagatgatgaaggtatgcccttcatgaccgtctggagatcattatatcccaaagaagataatgcttcgcacgacgaatgt

SEQ ID NO: 35773 - DNA, 472 bp, Zea mays
  unsure (1)..(472): unsure at all n locations
tcatcccatttgaactctntacctttctccagtagagaggtaattttgtttcatctaacttgaaaaaccttcaataaatcttctatagtatcctgccaatccaagaaaacttctaatcttggacgcantccttggttgcttccaatctagtatctcacttatctttcctgngtccactttaattccaccatcggtaatgatatgccctaagaaagcaacttccttaagacaaaaatcacacttcgataactctgcgtataactggttgtcacgaagcttctgtaggactagccttagatgatcttcatgtntttcttcattcggagagtatatcagtatgtcgtcaatgaatacaaccacaaactgatccagatattccatgaatactntattcatcaagttcataaagtatgcagatgcattagtcagtccaaacgacatgaccaaaaactcatataatccatatctcgtc

SEQ ID NO: 35774 - DNA, 142 bp, Zea mays
  unsure (1)..(142): unsure at all n locations
atcccttaatacatatgaaccaagaagccttaacaaaagctgaaacaaggtggtcaacagttctgataagcacacacccatgcncatacccgcagtgcacagtaccaacaaaaaactggcatattaaatctatctcaagcct

SEQ ID NO: 35775 - DNA, 465 bp, Zea mays
  unsure (1)..(465): unsure at all n locations
ggacattgtctcccttttggaagccaatgccatccttaatgcctgttcgtctnccactatagagcatgcttctagcaaacttaaatatttcattgtttaagtcatgctcattaattttggcactgtcggngaccataattaggggtacccccaacactcttaaactcggctggtaatcaccatcagcacaagctgcagagcctgatgggcacaattcacgtcaaggctccgtccactcaagggacacgatctcgcctcactcgagcccaaccttgggcaggaacagtagaccgaggcggattcacgcctcgcccgaaggcctnctcaagcaacaggcacaccctctactcgcccaaggcccagctcgggcaggcttcgcagtgaagcaaccttggccagatctgctcgccaaccgaccgtatcgcagaagcattcaatgcaaggatcgcctgacaccttattcta

SEQ ID NO: 35776 - DNA, 503 bp, Zea mays
  unsure (1)..(503): unsure at all n locations
ggacattgtctccctgttggaagccaacaccatccttaatgctattgtcttctcccactatagagcatgcttctagcaaatnntaaattttcattttctaagtcatgctcattaattttggcactaagttgagctatgtgatcattctgtttcttaattaaagctaagtgatcatgtatagcatcaacattaatgtctctacatctagtgcaaatagtaacatgctcaaccgtagatgtagagggtttgcaagtttttaattcaacaatcttagcatgtaaaatagcattttcatctctaagattggaaataaaagcattgcaaacatttgaatctttagccttagcaatcaattnttcattctcatttctaaggctagcaagagaggcattcaattnttctatcgtagcaattaaactagcattatcatttctacgattgacaatngaatcatcacaaatattngacttctcaaccttagcaattaattagcattctcaatt

SEQ ID NO: 35777 - DNA, 382 bp, Zea mays
aactaagctaatgcccttaaagaatgctaattttgtaagggcaaggctctcttgtttatgataatgaaggctacactttatatcctgctcattatcctgagcacaaaattacgtagattcatgctatgaaacctcatactgtttctcatcatgcatttatgtataaaaatgaggcttctagctctaggcataccacacatgttaaaatgcctataaagacaattcatgttgtgtcaaatgagcataatgtgtcatttaagacttttgatgcatcatatgttttaactaacaaatcagacaaagtagttgccaaatatgttgggggcatacacaagagctccaaaacttgtgtttgggtacccaaggtgctttgttctaatgt

SEQ ID NO: 35778 - DNA, 118 bp, Zea mays
  unsure (1)..(118): unsure at all n locations
ggtctttcatgctangacaatcantcatggaggatctgatccctaatgtcgagacgtgtggactgtatcagtntatggtgcaacgaacagactntagtgaaatggctgtcaagcaatt

SEQ ID NO: 35779 - DNA, 498 bp, Zea mays
  unsure (1)..(498): unsure at all n locations
tcggcctcgggaaccaaattttagtgtgtccgaagatgtctgtttgcaagaagatccctgctgagatgaagctaagtctcgaggaggagaagaatctgggattcctgatagcgatggcagagactaatacagagaatatcacgaaggagattctcgaaggtttgtccgaagatactgatgacagcgacagctatgatgtggaaagtagtggggaagaggccgaagatcgaccgtggcgaccaagtcactcagttnttgggaaaacaaccatcaagcagagtcacattgataatatgagggggcgatacttccgagacatatctattgtgagagctgatgccggggaaaagacttctcccacccctgaagaggatgaagttgtaattttccgaagtctcctcanagctgggcttcgattcccctctgagcaatttgtattgagtactgaaacattcaaatctccttcataactactccgaactttatagaagggatttg

SEQ ID NO: 35780 - DNA, 75 bp, Zea mays
  unsure (1)..(75): unsure at all n locations
gcgttggagtcctctggtgcaccggacactgttcggtggtgcaccgtacactgntcggtgtacaccggacatatc

SEQ ID NO: 35781 - DNA, 454 bp, Zea mays
  unsure (1)..(454): unsure at all n locations
tggacgtgaaaagtgccttcctcaacggaccaatctttgaagaggtctatgttgagcaacctcccggctntaaagacagtgagtatcctaaccatgtgtataggctctctaaggcgctttatgggctcaagcaagccccaagagcatggtatgaatgccttagagatttccttattgctaatggcttcaaagtcggaaaagctgatcctactctattcaccanaactcttgaaaatgacttgtttgtatgccaaatttatgttgatgatattatatttgggtctactaacgaatctacatgtgaagagtttagtaggatcatgacacagaaattcgagatgtctatgatggnggagttgaagtatttcttaggattccaagtgaagcaactccaagagggcaccttcattagccaaacaaagtatactcaagacattctaaaacaagttgggat

SEQ ID NO: 35782 - DNA, 158 bp, Zea mays
gacaacggatcccaattcaagaaccttcatgtggaggagttccttgaggaggaagggatcaagcacgagttctccgctccctacacaccttagcaaaatggtgtggtagagagcatgaacaggacgctcatatatatggccaggactatgcttggaga

SEQ ID NO: 35783 - DNA, 372 bp, Zea mays
  unsure (1)..(372): unsure at all n locations
tgttgaacttgcacaaatttatggtgatgacttcacagtatatgattgtatagttcttagagaccaacttgatacattcattaccgaaggaagagaagattcaagtttcctatcatgttgtgatcttggtaatcttgctatgaagatggttaagacagatagacatactgtattcccattggtttatcgtctaattgaattggctttgattatgcctgttgcaactgcaactgtagaaagagcattttcagccatgaaaatcatcaagacagaattgcgaaataagatgggtgatgaatggatgagtcattgtatgatttgctatatcgagagggatatatntgcaagtattgaagatcgtcaaattataga

SEQ ID NO: 35784 - DNA, 146 bp, Zea mays
attgactactatacctctttcaagggctttttactcttttaaaggaaagagatacagctaagaagaagtctcccattgagaaagaaatactatatgaccctcatagagacttcaatggtcacaaggtcctctattgggtagtttct

SEQ ID NO: 35785 - DNA, 445 bp, Zea mays
tataaaactcaagctttcgacgagggattcctatgcttccttcttcctaaatccgttcatgttttctcaaactagtggaactttggaaaggcctcgcagtggatccctagtcattcaccttggaagtgtctaagggtctagctaaccctggcaaatagggaaacacgtcttatgggtaaagatgtgcaatctctgcagagtgtaaaattggtatatcagtcgtgctcacggtcaagagcgactcaggactctcgcatgattaatttatggaattaaacttaatatgtcatttgcattgcattgtgggatttattattaatttgatctcttatttatttgggttggtatctacttatacttagtaactactaataaaactttgacccaatttaaaagcaatgctcagctttaaccatcttcttttgtaagccttacatttcacatg

SEQ ID NO: 35786 - DNA, 402 bp, Zea mays
cgccaccggatccatttcttcgtttttcacaacgaacatgctctattccactaatttaggtccaaaactcatgtttggggtggtttcgcgcaattttgttgtcgcacgtcactcattccgaaaacgggtgcatacaagcacgagtttttgccaccggaaccatttcttcgttttttgcaacgaacatgcccaatccactactttaggtccaaaactaatgtatggggtggttttgcgtaatttcgttgccgcacgtcacccattccgaaaacggatgtcggggtgcatacaagcactagtttttgccaccgaaaccatttctttgtttttcgcaacgaacatgcccaatcctctactttaggtccaaaacacatgtatggggtggtttcgcgcaatatcatt

SEQ ID NO: 35787 - DNA, 433 bp, Zea mays
  unsure (1)..(433): unsure at all n locations
tatggagattcttcatcccaacgtgggctagtcggcgattctatagccaacccttgttagtcttagctattaagcaagtgtcaagttcagctctattaaaatcaactaagtatagctgaccctctaacactcccttaaatgctactgaatcatcacttcttctaaagacagtaacacctatatccgtaaaaagacaattgtagcccaatttacataattgagaaactgaaaacaagttatagtctaaagaatctacaagaaaaacattggaaatagaatggtcaggagaatatagtaatttaccaagtcctttgaccaaaccttgatttccatccctgaatgtgatagctctnntgggaatcatggttttctcataggaggagaacatccttttctccccagtcatgtggtttgtgcacccgctatcaatgat

SEQ ID NO: 35788 - DNA, 99 bp, Zea mays
actccaaccaccagggagcttttatcactgctgcaactgtgagcgtgaatctgtttatcttgcaaacatgtatcccgctactcattgatgggactacgg

SEQ ID NO: 35789 - DNA, 496 bp, Zea mays
  unsure (1)..(496): unsure at all n locations
tgacantgtctccctngtggaagccaatgtcatccttaatcttatggcgtctcccattatagagcatgcttctagcaaatttaaatttctcattttctaagtcatgctcattaattttagcactaagttgagctatgtgatcattntgttgtttaattaaagctaggtgatcatggatagcatcaacattaatgtctctacatctagtacaaatagtaacatgctcaatggtagatgtagagggtttgcaaacatttaattcatcaaccttagcacgtaacatgacatttcatttctaagattggaaacaatatcattgcanacatttaaatttttggccttagtaatcaatttatcattntctatcttaaggctagcaattgattcatttaacttgtcatcttagcaatcanattagcattatcatttctaagtntgataagagaatcatcacanacatttaaattctcaacctagcaagtaattagcatctcat

SEQ ID NO: 35790 - DNA, 101 bp, Zea mays
  unsure (1)..(101): unsure at all n locations
cttgtttgaactaaaatcataaacctattttattaaatacttatagaaattangagcctatacaaaattggtctcatatttttagcattttcttgggaatt

SEQ ID NO: 35791 - DNA, 410 bp, Zea mays
  unsure (1)..(410): unsure at all n locations
tgcccgagctngagccgaggaccagccncaccggaatagtgcaatctcgctcgccggagttcgtgaacccgccggagcacgtggaccgggtaaccctctgcaccatttctcaattccttgcgcacatggccctctacatcaccccgtggagctcctcgtgcactttaattgaaccccaccgctgtggtttggccggagcaggagccgtcgacaacctccgccgcctgcgctcgtggccagggcagctccaaccacctcagacgccgacccgcacaccgacgtgactgacgtgacctccccgacgtcactgaccaccccaccagagctctactgccgccgtgatntttaccacggttactatntcagccagccagggatcgcgggttagatntaggttaagtccaaggggg

SEQ ID NO: 35792 - DNA, 181 bp, Zea mays
  unsure (1)..(181): unsure at all n locations
gctccctgcagtttcagcgagccatcaaaatacattcgccatacttctgcgngttctggagtatccngtacttgctgttctgtccactctgatacgaaatcaaccagtgcttgagtttgatggctgtgcgaggtcggaactcgatatcatgggatcccaactcgcaagcccacttggctat

SEQ ID NO: 35793 - DNA, 435 bp, Zea mays
  unsure (1)..(435): unsure at all n locations
tctaaagggagaacacgtgataggtttaactaacgtgcatnttgtttatagatagaccttgtgcagcttgtcaagcaggtaaacaagtgggaggagcacatcacagcaagaatgtgatgaccacttcaagacccctggagctgctgcatatggacctcttcggacccgtcgcctatctgagcataggagggagtaagtatggtttagttattgttgatgacttttcccgcttcacttgggtgttctttttgcaggataagtctgaaacccaagggaccctcaagcacttcctcaggagagctcanaatgagtttgagctcaaggtgaagaagataaggagcgacaacgggtccgagttcaagaaccttcaagtggaggagttccttgaggaggaagggatcaagcacgagttctccgctccctacacaccacagc

SEQ ID NO: 35794 - DNA, 81 bp, Zea mays
  unsure (1)..(81): unsure at all n locations
cttgtactttggcttcatgtgagaagaaacaccttcgcatgatcaaaaagaancgatgccgaagctaccgatgatggagct

SEQ ID NO: 35795 - DNA, 198 bp, Zea mays
  unsure (1)..(198): unsure at all n locations
tcgggaaccccatactcctagccatttcccggcagacagataatttcttttgttgtctgggaggcagtataagaagtcatcttcgtctgtgccatngaatactaaggccccctttggatacttcaattctcgggcatagtgattagcttcaaaaatctcttcttcagataatctttttcctgaagcatgtcgtacaat

SEQ ID NO: 35796 - DNA, 141 bp, Zea mays
  unsure (1)..(141): unsure at all n locations
cacatggtctaactaatcagagaaaatactanaaagttcagcgggtataccagggaaccaataagttcatatgcttccatcactttcgggtccttttcatctcataaccagctgcagaattcgtggcccataactgaccaa

SEQ ID NO: 35797 - DNA, 319 bp, Zea mays
  unsure (1)..(319): unsure at all n locations
ntagatcacaatatcgcagtaatntatcctgctgtgctttgcttcatttcctcccaacttaccatccaaaaataaagtccattaagtgtctagacgcggacctgatccaccgtagcagattgatacttttaatccatcccacactagtattgtcaagttgatgacataccaacaagttggattctgtcactccgccttttctagttttggtttcttaccacgtccacaccatcaactttctccttcaaagttacgatacttcccaatattactgcatttgtactctaactttattggttatataatacaaaattagggg

SEQ ID NO: 35798 - DNA, 382 bp, Zea mays
  unsure (1)..(382): unsure at all n locations
tacctctgaatgctctctgctgatatatgtttaactcaaagcncaaagctcacaactaaagggtggatcggtgagatggccacattgtttacctaattattaggtccagacattacaccactttgtgttaaattatatattgcccatacttctcactcgattacgcttcacattcgagggagtacatttatgttatttcgccacgtaaacgtattacacgtgtattctcttcactgaaacttcttacaccttttctttatcgaagctcattttgtgcgtcggcttcaaccacaggttctctttattaatgccgaagatttatattaacaccttccgcttcaagcacttctgacccaccgatgtattatgaagcagtttgatg

SEQ ID NO: 35799 - DNA, 139 bp, Zea mays
ctttttggctagccaaactctattgaaaggcaggggcatattttaagcaccaaatatggcacatgcatgaccgaatggtctgaccttgcagtctggatggtcagcgattatattatcccgactataatcattatccctt

SEQ ID NO: 35800 - DNA, 462 bp, Zea mays
  unsure (1)..(462): unsure at all n locations
tatgaaggttcttcatcccaacatgtgctagatggcggtgttatattcagcccatgttagtcttagctattaagcatgcatctagatcggcctcctctttcgaaaaatcaactaagtagagtttgccgtctaatacacccttaaatgctaatgaaccatcactcctaaagacagaaacatcaacatttgtaaacaaacaattgtagcccatgtggcacaattgacttacagacaggaggttataaccaagcgactctaanaacacgtttgaaatggagtgctcgttggtgatggctatcttgcccaagcctttgaccttgccttgattcccatctccaaagataatcgtatcctaggaatccttcttcttgacataggaggtgaacatcttcttcttccncatcatgtggtttatgcatccgctgtcgataatctagcttgagcccncggatgcataatcct

SEQ ID NO: 35801 - DNA, 489 bp, Zea mays
  unsure (1)..(489): unsure at all n locations
tgccacagttgtgacagccattgtctcgtgccggcttcttgttttctacngcgccaccttgggcacctncacgggcaccaccctcagcatgtcctcgcgccccggcctaggcgcctccacgcgccttgcgcggcttgccgcgtttgcggcctcgtgtcgaggaggactcccccttcttgtcaccttggcaggcctcccactgctcccgagtgagatgtagcttcccgtcgatagtgataggcccagagggagcctatggttcgtcgccgtcgaccaccttgagacgacctatcgcctcttcaatcgtcatcgtggagaggtctagcagagactcgatcgagcgagcaatctgcttgtacttctcggagatgcaacggaagagcttctcaacagctctcttctcatcgtaggtgtcgtcgccgaactgcaccatcttctgcaacagagtggtgaggcggagagcanagtcataacatcctcacctgcagt

SEQ ID NO: 35802 - DNA, 82 bp, Zea mays
aattgaatgtctatagggagtgatattttagattcagtcagcaactcaagaggcccttttaccaacaaacatcaaatatata

SEQ ID NO: 35803 - DNA, 382 bp, Zea mays
  unsure (1)..(382): unsure at all n locations
ntgcaggagaaggagatgatatgaagcccttggggtgcttgatatagtcaattcaatatctattaactcaagctatcaatcttaaatatatccaagattgacccgaagttacttaaatttattatattcaaaattcatatcatctcgagaaagattttgatgttgtaggaaataaagaactatcccatgcagaaagatcaaggcctacaacatggaggaaagccaaaggatggtaacacttatgttttaggtgcacgcatcttaaattatgttttctcatgtgtcttattgtcggtgttctgaaacctgnggggtccctagaccgacgagtgaattgtcgccgcgtgccctagcccagatgggtcaacgcgaggcggaacgc

SEQ ID NO: 35804 - DNA, 155 bp, Zea mays
ctcgggtatcatgatgtgcactctttattgaccgcagatgctcggtgagaatttttgacgaagacccggcgggactgagtctaccggatccacttgacagacaatcggcggcgtgtcgactcttcttatatgaactcaaccttaattattttact

SEQ ID NO: 35805 - DNA, 499 bp, Zea mays
  unsure (1)..(499): unsure at all n locations
ggtggaggaccagatcatcaaagcatataagtttctggatgataatgttcacccacagtttgttgatgaagcaccagaagaccaatcaaggaagggacccatggataagttcgcaagaagaaggtttgcgtgttggcattgttgcttcttcaataagctagctgccaagcgaaacctagaagcctgaagatgatctttgagtagccagaatcagcgtttgcaatcagcaaccagatgctccaccagaccagatcttgttgaagttccatctcctcgaagagttgcaaagtgaagatatgtagctgaagtaaagctatacccataacccttctaagccgaatctcgaggatgagattccttttaagtggggtagatttgtagcatcccananattcaaatcctgaaattntctcaaactcgctctaaattcanaatgaatntcaatntcatttcnaatggttgttgcgagttgattcaacaaataaagatagtggctata

SEQ ID NO: 35806 - DNA, 464 bp, Zea mays
  unsure (1)..(464): unsure at all n locations
ggcccaaaagctccttcctttcttgcgaggatatctgttatgctcataagcatttgccctgcatgacaaatctgcctcatcgccatgaattcccttctctaggttggttttcagtaaatttgcgagccctatgacctaaatttcaaagcagacagtcatgccttaattggctgtccataaaatggaggctgaaatttactttcaaagataatgatacatgcccctccatattcttgcagagcagaataattatgatccctagtcatcactgtcagctgctcctctccaattccaaaatctcgtgggagaatntctgcataaaaagaacggtaatcaagtattacaaaagtagtattgccatttttatacaactacacgtaaatatgtcggtaggtcctcaaattagtagcgatcaatccttgacanagatgttntccatgggaacaaatgtcactgatattaca

SEQ ID NO: 35807 - DNA, 178 bp, Zea mays
  unsure (1)..(178): unsure at all n locations
gtctgagatattttgctgatcctgatcccccgactgcactagtaatcctgatacggataggtgctcggtggatggcgctacacacacgacagctggtccttgcttggcggcttggcgatgctgcactttgttccgtacngtataggggccgtcatgtgattcatggatgaattttgga

SEQ ID NO: 35808 - DNA, 403 bp, Zea mays
  unsure (1)..(403): unsure at all n locations
nggtgacaatggagaagcaaanatccttgaagtcttggctgtttaactgcttgccgttgtcaactgttagttcggacggtactccgaagcggcaaacgatattttgccaaaagaatttctgggcagtttttgacgttattgtggaaacagtccttgcctcgatccatttggtgaagtactcgacagcgacgaaggcgaacttaaggttcccctgagcggtgggcaggggcccgacaatgtccaggccccagcgctggagaggccatgtgtgggcgatcagctntgtatactgcgaggggctgcctgaccgaggagaaaacttctggcaggcttcgcaggacctttgtgacccgattgcagcgcagatcattgcgggccagtaaaaaccttggcggatcacctt

SEQ ID NO: 35809 - DNA, 144 bp, Zea mays
  unsure (1)..(144): unsure at all n locations
atattcatatatatgcatcttgcatctcatttaggaccganagaagatgatcgtgcaagtgatgtggtgccaacacaagatgcagttggtggacgacctgaagaatggacttaaccagtggatgctcgctaagcgagtacccct

SEQ ID NO: 35810 - DNA, 430 bp, Zea mays
  unsure (1)..(430): unsure at all n locations
cggctttgnataaatgtaagattatgtaattcgctttcgcatttctttatctccgatgttctataatgtctacaagatgggtgagacgttcctggtgaggtaaggaaagataccgaacttgtcaagtagttcatgggcacctacagggttgtctgatgtccgttggacaaggacaactgtaggtgggcctaattacttgggaggttccgtcacaggggtggccggaatcgtccggtccacgtgcgcaggcgggtgctctcgtctgcggcggttgttccggccgaaccacggcgatctagttcaatccaatggcacggtgagcttcacgggtgacgtataggctaggtgtacaaggaatcgaagaatggagtagaggaatacctggtctacgctcaccggcggtcgggcgaagtctgcgaccatggactgg

SEQ ID NO: 35811 - DNA, 170 bp, Zea mays
  unsure (1)..(170): unsure at all n locations
catccccttatgaacgacttttgaacttcttcgcctatattcggcggatttagctctgcattcccttggaacactttgagcagagacttacactgcgtccttaggaacactttttgagcttcgcaaactacctggctccttngaacactttttgagtccagcaaattact

SEQ ID NO: 35812 - DNA, 443 bp, Zea mays
  unsure (1)..(443): unsure at all n locations
tgtntatgctcaaacttaggaagaattggaaagggattaattatggataccagagggcaaccatattnttcctagcatgcctaagacatgtagttcacaagaaaaatctattcaaccatagtttagtggaaagaaattacactcactattattcaggaaaaacagagaanattttgaaaagtcataagaaaataatcataaggagaaaacacccataccttaggaatgactattcttttgctaagaagaacttaggaaaaatgaaagttctgtttgacattnttcaattagtaagttagttataagtgtctttttggtattaaaccttggaaaatcataactaaataaccatttggtgaccctctgtgatattnggcacagaagcatgttattaaccatagatactagcaaaaataacccttagtacagaacccacacctaga

SEQ ID NO: 35813 - DNA, 365 bp, Zea mays
  unsure (1)..(365): unsure at all n locations
ccgcacccgcattcatatcacattcaatgtgtttatcaatagtggtaaggtcaaggaaccaagctggtacgaattaattttgctattggttcatatcgtgatgttgttgactgtgatgttgtgcctatggatgcttgtaatattctgctaggtagaccatggcaatttgattcagattgtatgcatcatggtagatcaaatcaatattctctcatataccatgataagaaaattattttgcttcccatgtcccctgaggctattgtgcgtgatgatgttgctaaagctaccaaagctaaaactgagaacaacaagaatattaaagttgttggtaataacaaagatgggataanattgaaaggaca

SEQ ID NO: 35814 - DNA, 513 bp, Zea mays
  unsure (1)..(513): unsure at all n locations
ggccaaatcatgccacttacaagacaaacctataggaggatgatgattattatcaataagtctgggaccttttgtgtcatgagtactttcatgagagccttaatccttattctattcaagtttttttggttcctaagaaagatgatttttggtacatgtgtgttgattatagatccattaataatatcaccattcaataccgccaccctacacctagattagaagaaatgtttgatgagttaagtgattgttatattttctaaaaaattgacatatatagtggttagtggttaccaccagattcgtatggctttaggagataaatgaaaaattgcatataaaactaagtttggcatgtatgagttgttagtaatgactttngggataactaacgcacctagcacttccatgagatngatgaataagggtttacgtccatccattcgtaaattgtggagggttattttaatgatatactcatttacaacaagtaagtggatgagcattcacgtg

SEQ ID NO: 35815 - DNA, 162 bp, Zea mays
  unsure (1)..(162): unsure at all n locations
gatttacttatgggaagtaggaggtaagtctatggatcacattgtangctcggttcatagcggatggtcgtcgtcatgggtctaacgacgatgaccaccttgcgaagtaaatatgatcgagttgcaataaaagaagtcaggctatgtcactgtatgatggga

SEQ ID NO: 35816 - DNA, 413 bp, Zea mays
tcggcctgcggaggccgaaggttgaaatgaattaagctgtcgatgtatgccagagagccttcggtgttatttgttcttttattggaacgagagatttggtacaagagcatattgccttcagagtatggccgctcgcggagaaatgggaaatgccgcaagaaaccataaaggaggctgacgaaggtggacttatcaggctgaaatatactttcaaattcggagataaattcgttgagccagatgatgactggctaaaaagcattgaaaatttaagtgatgaactgcttggggcttactcgaaggccgaagatactgcattgtcagcagccttcggaggccgaataaagaataggctgaaccgggtgtttgacgcgatcgggtttgtctaccctgattatcgctatcccattcga

SEQ ID NO: 35817 - DNA, 82 bp, Zea mays
ggggcctgattgtaggccataccccgctagggaactaagatatatgagtggcgggatattttctatagatgaagaaacctta

SEQ ID NO: 35818 - DNA, 178 bp, Zea mays
ctctgatgcaaattggcaagacgccggcttaatgcgcttcttcagttgagtgctccactcctcgaggcacttgtgctcggtctcgagcgcctcccactcccactggatagccagctcatgttcatggatggcctggtgagcgcgagccaccacctgagggaggggagtcagtgttact

SEQ ID NO: 35819 - DNA, 170 bp, Zea mays
  unsure (1)..(170): unsure at all n locations
agtgaaaaagataagaagcgacaacgggtccgagttcaagaaccttcangtggaggagttccttgaagaggaagggatcaagcacgagttctccgcttcctacacaccacagcaaaatggtgtggtagagaggaagaacatgacgctcatctacatggcgaggacgatgc

SEQ ID NO: 35820 - DNA, 487 bp, Zea mays
  unsure (1)..(487): unsure at all n locations
acacaagatactcagcttctaaaggagaacacgtgataggtctaaccaattttctaatatatagaccttgtgcagnctgtcaagcaggtagacaagtgggaggagcgcatcacagcaagaatgtgatgaccacatcaagacctctggagctgctacatatggacctcttcggacccgtcgcctatctaagcatatgaggaagtaagtatggactagttattgttgatgacttttcccgcttcacttgagtattctttttgcaggataaatcttaaacccaagggaccctcaagcgcttcctaaggagagctcataacgagtttgagctcaaggtgaagaagataaggagcgacaatgggtccgaagtcaagaatcttcaagtggaggagtaccttgaggatgaagggatcaagcacgatgtctccgcttcctacacaccacagcataatggtgtggtatagaggaagaacatgacgcttatagacat

SEQ ID NO: 35821 - DNA, 486 bp, Zea mays
  unsure (1)..(486): unsure at all n locations
ntgagcaccaatcatgatgtctggttttgggtcaagtagacttattctntgagcacccatcatgttgcagctcgagaacgagctgcttgtccaggaagggtgtagtgtcagagcataaggaggcccaccaaggggctgctgcagcagcagccatgggccctccaaggggattagataaggatagttagagataagattagaagattagttgagattatttangagattagttgagattatctaagaaggttatcagttagtagtttgttgagagtttttangagagttttaaggagataaggatctctagctagataggggcggtagctggcctatntatgtaatcaatggatgagaaataaagcangcaagtgttggggacttgttctcanatgatatgagttaagaacaangcaacacaaaacattaatggttaaatanccttcgcctttcgagcattatttcccttagaatataatgatcttc

SEQ ID NO: 35822 - DNA, 112 bp, Zea mays
ctttcctgaaggctggctgcgatcatggaaagaatgtcataggccaattcacttatcacctcatctaagacttctgatctccccgaagatctcaatagattataaaatgatt

SEQ ID NO: 35823 - DNA, 508 bp, Zea mays
  unsure (1)..(508): unsure at all n locations
tgtagatggttggcagtcagtaattcttctgttgatatgtgtctaacgccatcagtgatagttgtactttgtaggtacacaggttggtctagaaagaagtgtatgcatgattaattntacagacaattattctatactccctccgtcctaaaataaacccacatcacactcaaactttttaaagtttatctacaaatatcagaaatgtataatatttgcatctctaaataattatagtataaaagtatattctatatttaataaaatgatacatattatacatcatatatatttgtattttatataaatttagttaaactttaaaatattgtaagtcttggaaagtatgtaagatatgcgtttgagggagtactctagaagacatatatgaataggctgtctccagcagcatctttaaaggaatattctctgtcttttacagtacactctaaaagattatgtcctctatatcttctcagtcttcagcaacgtcttttaaaatcggtca

SEQ ID NO: 35824 - DNA, 446 bp, Zea mays
  unsure (1)..(446): unsure at all n locations
ggtcattggctggacaacaagagttgataaccctattatatgatggttctatcaatatagggaagttaataggtgtcgagaatgttctttgtcaccttaccaactaagaaaaaatgggttgagtagttattgtttgggcaaatccactttgactcattttatagtttacatacctccatactacctttgtttactgcgtatttatgttgatgcactttccaatgatacataagaaaagtatttcaagtccttatagggaaggcatcggttcattcactgtattgaatacaaatataagattngtttccctaaaaattagaggtctctttcaacctttgggctcctctttggtcaaaaagaattctgatggctaagttctaagaaattgattagatcgtgaacaaagagtgtgtcgtctgaaagactattatttaagcataaaaaag

SEQ ID NO: 35825 - DNA, 488 bp, Zea mays
  unsure (1)..(488): unsure at all n locations
tcggcatgacnagcagaaaggggaaccgacctatagatgtaattgccaattggacctcgaagaatcactatagagttatcgataaatgtaaagggcattaatgtaattttacacgggctgcgtcccgtgcctataaatagatgaacagtattctcgtactattcgcgctgacttggcattcacttttgcgccacgcctatattttctttccttcaagccgaaggtacatttgtaatttatctttgtctacacaagtaatataaatatattaataataatgtttacagaaattatgctattttctgtatnttgtttgaacgttcttcatttnttaccatgatcatgaaggtacgtccttcatgaccttcgtcctaaattcattatatctgaagggaaataatgattagaanggacgaaggccntttgatattaaccnatttatgtgccttgttcttgattcatagcatttgagaacaagtctncaacat

SEQ ID NO: 35826 - DNA, 97 bp, Zea mays
cacgttaagaaacacatacatatcctttgttaaaaaatggaattaagatgcatgcatgtttgcttgcttgctttgcatctacaaagtaaagacatgt

SEQ ID NO: 35827 - DNA, 389 bp, Zea mays
  unsure (1)..(389): unsure at all n locations
cttaaactagcttggctagctgagcattgggctttggtaatgccttataggtcctantgcttatgagatgagtggaccattcttgaagagagcaaagcaaaaggtattggatagattcaagaatcaccatgaatcatggcagctcacaggttgctcggtgatgacagatgcatggacagacaggaagggtaggggagtgatgaacttggttgtccatagtgcacatggggtctgtttcttagattcagtggactgctcagcagtaaagaaagatggaaaatatgtgtntgaccttgtggacagatacatccaagagatangggaagaaaatgttgtccaagtggtgactgacaatgcaagtgtcaacacagcagcagcaagtctaatgg

SEQ ID NO: 35828 - DNA, 82 bp, Zea mays
cttgctttgtagctacaaagtatagtcatgtagggctggccaagtatccgtactggccgtcggcagtggcgccattggcgct

SEQ ID NO: 35829 - DNA, 418 bp, Zea mays
  unsure (1)..(418): unsure at all n locations
ctaagctngtaccgctctgcatggggtgccatctgatcccatatccaatcttcttcctcacgagccaaccaaacaaaacacgggaactaatctgcagttgatagcgttgcaagctgctttcatttccgttcccgctaccctacccaaaccaaacagcacctacatggtaacgtaagcttcttttttttattctatttcaatacaatntacaatttcaaacttgtttaaaatgcacaaccaagaaacactcggcatagatgcaaattcatgattttatttatcatttatttattaatttaatctttcatgatggcttataaatgttaaatgagcaagaaaaatcacagttgaaaaggtattccttatttcttaattgttntaatagaaaataatntataatgtacaatctctatcctaa

SEQ ID NO: 35830 - DNA, 61 bp, Zea mays
tcaaccctcagatgttagattctaacagggagagcgacacatgaagaggtcggcgttgtgc

SEQ ID NO: 35831 - DNA, 423 bp, Zea mays
  unsure (1)..(423): unsure at all n locations
gctggcatttatgctactgcccacatgatgtgacatgatctgggaacaagagggagaanaagaagaactataagaaggcaaaggcgaggctcatcttggcaaggagtgggattcggattgctcttcgtccgactccgacaatgaaggactcgccgccaccgccttcaacaagtcatccctcttccccaacgagcgtcacacttgcctcatggcaagggagaagaaagtaagcactcataatactagtacttatgcttcttcaagtgaggatgagtctagtgatgttgatgagatagattactcatgcttattcaagggattagatagaaccaaggtagacaaaattaatgaattgattgatgccttgaatgatangaatatacttctagaanagcaagaagannttgtgatgaagaacatgat

SEQ ID NO: 35832 - DNA, 87 bp, Zea mays
tactgggtaactggaaaatgggatgtcttattattgtgataaaattggattgggcgctaataatgttatatattattacactgtaaa

SEQ ID NO: 35833 - DNA, 418 bp, Zea mays
  unsure (1)..(418): unsure at all n locations
actcagcttcggcttggctaannatttggcagcaaaacagtgcaatagcttttaatgctgtggtaactctacacctacccgtctgtttatatagtgccgtatgggggaaggtgaatcgtcaaggtctcccgcaccgagcaaacagctacccgcactcgctgaacggtgggccacaaggtccaagaaggtgaattgctgcggcgcgcgtaactgctgcaagatggggccaccgcgcgcgcggattattctaatcgtttctcgccaacgagctcagggaaggtgttnttcggatcttcgtcatcccgaagtctagaagacttttcacagatcaagctcgttatgaanaacgatctagcaccgcgaaggggctactgttgggggtatgcttcgtagccgaagatcctaaagaaagagaaca

SEQ ID NO: 35834 - DNA, 504 bp, Zea mays
  unsure (1)..(504): unsure at all n locations
cttttcttgtganattgtcttgtcttgccatctcttttcttgaaggaattgttgttcttattctcactgtcacttgcattgacttttttgcccttgaatttgttcttcttaggctttgagaattgatgatagagatggtcaagcccatcatagttataatgatccatttcatagatgggccttcccttgctacctatgagaacttcttccttgaatcaaatttgatgccttctcgattgagcttctgtcatcttggtcgtgttcaccataagcatgagatttacatcattgactntattgtcactgagatttcaatatcttcttgaactttaactntgttcttctcatgattttccttgagagacatatccttcttatttgaagaagagccatcttcatcatgaatgtgcatgtacatctcatgagcattgatcttctctaagatttgagttggagtcatggtggatagatcattttggttaagcacaatatgatgtggtcata

SEQ ID NO: 35835 - DNA, 393 bp, Zea mays
  unsure (1)..(393): unsure at all n locations
atctgagcagttcgaacgagaaatgtcttgttctttatgcataacttgaagccgaagctcaacaaaattcagatttgtgacaactattgacgagccttcaagaaaaatgtttggaatttagcaacaaatgcattcaacgattaagaaagattttccactcagttggagctagaagtgaaaaattcaccccctcagctgaagatctaccgaagaccttcgaacatattgagggtgagattgacgagctcgacgaagtcatagctgggcacggtgacttctgtgcctgtgtagcttctcggggcactgctgcagctatcctaanagctggctgcgatcatggaaagagtgtcaatatgccaaatttcactttatcaccatcaatcctagatgaca

SEQ ID NO: 35836 - DNA, 87 bp, Zea mays
gtgcgtatctttgcaaaagtcactgtgtacgggcgcttccctgctccatatcctacctttttgctgtgaagtccaagtcaatatatg

SEQ ID NO: 35837 - DNA, 451 bp, Zea mays
  unsure (1)..(451): unsure at all n locations
ttcttcttacaaacagtgctggacatccccattgttatgtgcttgggcgaatgaaacccttatccagcaattcttgcaactgcttcttcaactctgccaactcagcgggtggcattcggtagggcctcttggaaattggggtcgttcccggttgcaactcgacggcgaattcaatatcccggtccggtggcattcctggcaattcatcagggaagacatctgcatactcacagaccactgggatcttcttcaggggtaactccgtcatagagaaggcacatgactgagaagaaccctgactaggcagaattaaagtgaaattcccgcagaatggagaattaacttccacggtacggctggctacatcaagcacaacttggtgcaaggtcatccaaattgctcctagaataatgccacattntccatcccacacaaaagagtggtttgacat

SEQ ID NO: 35838 - DNA, 179 bp, Zea mays
  unsure (1)..(179): unsure at all n locations
gtcatcttcattcgttccattgaatattactgccccctttggatattntagttccttngcataatggatggcttcatgagnttcttcttcggatagcttcttccccgaagcatgtcgtatcatgtaatcacgcatgctgacaggtgcttcggggatggcggtgtcagtttcttcaacta

SEQ ID NO: 35839 - DNA, 449 bp, Zea mays
  unsure (1)..(449): unsure at all n locations
tataatactaagctttagtttctaacttggttaggtttacccctttaaccactatttanggttaagtcctttaaccagggtttcatttgcaaaaacattaaaacaatacaacttgtttgaaatttttgcctagtgaatgcactctagatgtgtcaaacatatgcaataccaatgctcatgatgtcatgctcaagttttagttatagtaaccaccagggtgttacatccttccccccataaaagaatctcgtcccgagattacgatcctagggtaggtaatggtaaagaaaacacatcacanttttatttctttattnttggtacaagacaggggtaatgtgggggttacttctttattataacagctatacaggctntacanattacatgaagctaggaagcctgcgaaattcttattcaagaagtcttgagtttcccaagtagtctca

SEQ ID NO: 35840 - DNA, 108 bp, Zea mays
accaccaccaccgacgcagcgagggacagcagccagaaggggagtcaaaacaatcaccttcagagagacttcagagaggagtccgaagctcgcacagtcaatagcact

SEQ ID NO: 35841 - DNA, 465 bp, Zea mays
  unsure (1)..(465): unsure at all n locations
ctatgatactcagcttacgggcactggcaagctagccgaagcactggcttgcttttatgatggctggagtgggctggccacgatggccgaagctctggcggcaatggcgggcggaattgagctcgccggagctaagggaaagtggctggccggtgagggtgagtgcggggcgaagtggggcgcgcctgggaaggctttatatgcacggcgcggtgcacgggcagtcgtggaccggcgagcgtgcgcgggcgtgcactgggaggcgcggtgcgcgaacgggcgtgaaccgggggtgtcagccacggtcgaacacgtgttcccgttgcctctgcccctattcaagcgccgattgggagcaaatcttcgcgaatntgggcaagatcgctatgaaggatttgttcacctgaccaagctttgtcttttgtgtatggacatcgcgccggtttatgctanggacacggagtt

SEQ ID NO: 35842 - DNA, 491 bp, Zea mays
  unsure (1)..(491): unsure at all n locations
tctaaagggagaacacattntaggactaacaaatgttcaatttgagaaagacaggatttgtagcgcatgccaggcaggaaagcaagttggtgcccatcattcacacaagaacatcatgacgaccgacaggccgcttgagctactccacatggatctattcggcccgattgcttacataagcatcggcgggagtaagtattgtcttgtgatagtggatgattattctcgcttcacttgggtgttctttttgcaggaaaaatctcaaacccaagaaaccttatagggattcttaagacgggctcaaaatgagttcggcttaaggatcaagaaaattagaagcaacaatgggacggagttcaagaactctcanatngaaggcttccttgaggaggagggcatcaagcatgagttctcttcttcctacacgccacaacanaatggtgtagtggagaggaagaatcgaactctattagacatggcangaaccatgc

SEQ ID NO: 35843 - DNA, 414 bp, Zea mays
  unsure (1)..(414): unsure at all n locations
tgtgaagggtcttcatccctacatgtgctaagcggcgatgcctcagccagcccatgctagtcttagctattaagcatgcatctagactggcctcttcttttgcaaaatcaactaaataaagtttgccgtctaatacacccttaaaagctagtgaaccatcacttcttctaaagacagacacatctacatttgtaaatagacagttatatcccatattgcataattgacttaccgatagcaaattatatccaagagactctactaaaaacacattagagatagagtgctcattagaaattgcaattttacctaacccttttaccttgccttgattcccatcaccgaatantaatgaatctttgggaatccttgtctngacgtaggaggtgaacatcttcttcntcccccgcatat

SEQ ID NO: 35844 - DNA, 388 bp, Zea mays
  unsure (1)..(388): unsure at all n locations
actcagcttctgtgtcgtnccttgcaacaaactctcatattgctttttcttaagtcagaaatgcctgaaaccgatgcagcttgcatacatgactaagggtgatcactataccactactaacagagcaatcgacttaagtcggaaacaccttaagttggtgcgacatgctcacgcatacaagactaagggtgattactataccctactaacagagcaatcggcttaagtcgaaaacgccttangtcggtgcggcatgctcacgcatacatgactaagggtgattactatagcctattaacaaagcaattgacttaagtcagaaatgccttaagtcggtgcaacatgatcacacatacatgactaagggtgatactaaaccctactaacg

SEQ ID NO: 35845 - DNA, 182 bp, Zea mays
taaactaccaacgatgtgctgtcatcggaaaggctaatgtccgtttcgagctttgggaaaccaatactctttgatagagtaccaataaccctcgctccggtatcatcccggacacagcccaaactttcatcatcgacaccaccgaaaagaagtgtctccggccgatatccgcaagatatgac

SEQ ID NO: 35846 - DNA, 439 bp, Zea mays
  unsure (1)..(439): unsure at all n locations
ttcatccttcttctntacanacaaggctggacatcctcaatgctaagtacgtgggcgaataaaacctttgtccagcaattcttgaaattgtttcttcaattctgccaactcagcgagtggcatctggtaaggcctcttggaaataggtgtcgttcccggctgcaacttgatggcgaattcgatgtcccggtctggtggcattcctggtaattcatcaggaaaaacatctgcatactcacagaccactggaatcttcttcacaagtgactccatcatagcaaaagcacacaattgagtagaatcttggctaggtagatataacaccaggtcttcggatgtaggagaacggatctccagagctctggcagctacatccaacactactcgatgatgagtcatccagtcggctcccagaatgatgtccataccctctaatccc

SEQ ID NO: 35847 - DNA, 395 bp, Zea mays
  unsure (1)..(395): unsure at all n locations
cgctntctgcatcctcaaccgaagctattcagtttgctcatgctttgtatcaagaaagagcttccgcaaagttaagaaaattcaacttcatcaaaaaacaagaaattcaatcatcagatggctagggtacgctcaacagctagggttactcgcgacggagaggaagccgaaggtgccgaaatcgctccaatctctgaagtgatgaaacggtcagggctggtagtatcggaggatgcacctgccgctgaagctgagcaggttgatgctaaggaaattgaatatgaagatgattacagcgtcgtgccatctaaacccagccacctggagtttgggaaatccaccatcaccgaaggtgatatgtctaagctgatgaagttaggctatttcagtgaagc

SEQ ID NO: 35848 - DNA, 324 bp, Zea mays
  unsure (1)..(324): unsure at all n locations
aacccatatgagggttatctattaagcaagtgtcgagtccanctctattgaaatcaactaagtatagctgaccctctaacacttccttaaaagctattgaatcatcatttcttctaaagatagtaacacctacatccgtaaaaagacagttgtaacccattttacataattgagaaactggaagcaagttataatctatagaatctacaagaataacattataaacaagcaccttgggtaccaaacacaagactttgaccccttgggtttgccccaacatatttggcaactacgttgcctgatttggtagtgatgccatatgat

SEQ ID NO: 35849 - DNA, 267 bp, Zea mays
  unsure (1)..(267): unsure at all n locations
ttccctcgaacatgccctcaacgacgatggtattgtgcactgtaagtgcttgtgctctcacacggaggaaccttcngacatactcctgaaggtactcctagagatgttgcgtgcactggaacatacactgagcatggactggcttcttctataatccttgtaagctggtgattagcatatacttgatcatttgccataatgtgctcgtccctgcctagagagagagagaccatatttgcgcgacacttatgactttcatgacgaaag

SEQ ID NO: 35850 - DNA, 450 bp, Zea mays
  unsure (1)..(450): unsure at all n locations
gcttcttcaccatgggatcacggatatcttgagattgtttagcgatgcatntccctttaagttgtgtcaagctcatctttagcctctcatnttcttctttgagcttttgattgtatcatcattgtcctgcaatttaactcanaaaaaattgcttgtcgacggacaacaagcattagcacatggtaatatagtatcaatatgaacacatgtgcaagagtgaggttgttgngaatttaagttttctattacaacctcatgagcaatgtttaatatgatatgatcatcactaagattttcatgataacatagaagcatatcatattttttttgaaaagctagatttttcaattttagcttttctactcggtccttaagcaaggtattcctatttactaattgagcgatacaatgtaaagcgttatcttgctcaattggaaatagttcatacct

SEQ ID NO: 35851 - DNA, 429 bp, Zea mays
  unsure (1)..(429): unsure at all n locations
aaactaagctttaagggaaccactatggatatcaatgtcaattcgaaaagtttaccttgngcagcatgtcaagcaggtaaataggtgggaggagcacatcacagcaagaatgtgatgaccacatcaagacccctggagctgctacatatggacctcttcggacccgtcgcctatctaagtatatggggaagtaagtatggtttagttattgtggatgactcttcccgcttcacttgggtattctttttgcaggataaatctaanacccaagggaccctcaagcgcttcctaaggagagctcanaatgagtttgagctcaaggtgaaaaagataaggagcgacaatgggtccgagttcaagaacctacaagtggaggagtaccttgaggaggaatggatcaagcacgagttctccgctcctacacaccac

SEQ ID NO: 35852 - DNA, 195 bp, Zea mays
actgaaagagaatggcgctcgatataatcttcccaacctaagcaaggaggggaagacacactccgctcaaaaggttgtccaaatgggaacaccgcatctatttttaaagtctatataaaggaagtgaccgagcaccacagaggggtaagaaggaaaaaaagatctacatagaaggcggcatcccatgttgcggga

SEQ ID NO: 35853 - DNA, 492 bp, Zea mays
  unsure (1)..(492): unsure at all n locations
ctaagctcgccggctatacacccttaaaggctagtgaaccatcacttgttcttttgttagatacatctacattcggaaaaagacaattatatcccatattgcatagttgactaacagattgcaaactgtaaccaagagactcgactagacacacattggagatagagtgctcatgagaaattgcgattgtacctaacccttttaccttgccttgattctcatcaccgaatataatagaatcttgggaatccttattcttgacgtaagaggtaaacatcttcttctcccccgtcatatggctcgtgcatgcgctgtcgataatccaacttgaacccncggatgcataaacctgctaggcaaatntacgctcgggtcttaggtacccaactcatgttgtgttctacaatgttagtgcaaatatgcttacggacccaaatgcaagttttgtcatccttgcattatgcctctaacttcctagacactattntccta

SEQ ID NO: 35854 - DNA, 179 bp, Zea mays
acaaatttgtattcatcattcacacaaaaacatcatgacgactgacaggccactctagcttctacatatggacctattcggctcgataacttacataagcatcggggggagtaagtactgtctaattattggggatgactattctcgcttcacttgagtgttctttttgcaggaaaaat

SEQ ID NO: 35855 - DNA, 273 bp, Zea mays
ataataccttcggcgacgaaccacacacccaacagttaccaaagtgtgggtatcccctgcattttggtctacctattatggcaatggagttagttatatagttgggaaaccttttattccactttcctctttatctgacaagctgtgttgtctgtgtgggagatcagtgaagatgctcatctgttcagtgttgttgaaggattctatactcatttcttatgctgcaagatttgccagatcagttctgatgtgtggttgcattctgaagatgtc

SEQ ID NO: 35856 - DNA, 353 bp, Zea mays
  unsure (1)..(353): unsure at all n locations
tatgaagagtacttgcagacatacatgcaaaggttcttgcggctgagagcctacacgccaatggtgcctaatgaaatcgtcatcgaggccataatcaaaggctcccgctatgacccatatcacaatattttgcaaggaagccaccatagaccttggagaagcttctccataagatggatgaatacatncaagctgacaatgatttctgcctaagaatgaaggaagcgtacaagtattctgagatgactatgggcttcacacgaagacatcaccctatgcatgtcacaacgatccacaatgccaacacanacgatgaaagtgccaatcatactcagagaagccagcacagctca

SEQ ID NO: 35857 - DNA, 238 bp, Zea mays
  unsure (1)..(238): unsure at all n locations
tgcacctccactcgccttttcttagcaaaatcactaatcaagttgccgtctatacaccctaaaagctatgaaccatnttacttcaaaacagactcatttactttgaaatagacactacttccatagtcatagggactgcaatagtaatttatccaaagactcaactaaaacacataaacaacagggctcattataatagaaacttgctaacctacacttgcttgttccatcacaaatg

SEQ ID NO: 35858 - DNA, 324 bp, Zea mays
tacaccaagaacaaagctacataatcgtcattgattagggaccttcccccttcgaagcattatctcccttaggatataatgacctccacacgaaggccatgaatgacatacccttctcattttagtgagagatacattgaatcatgacactctatacatacaaagaatataaacaaccattccaaaatattataccactcacctctttaattaataaacatgaacaaacatcaatagcaattatattacatatgtaccttctgcttgatagaaggttaaatagcggaagcgatgcatgagtgatcacaagtcaccgtgcacact

SEQ ID NO: 35859 - DNA, 324 bp, Zea mays
gcttgtgaacagttgatgttcacgaggtatatattctcttcagcaaaccatccgaggcgtgtgctcttatgttatgacctatcccaccagatagcgctcgtttgatctcactcatccgaacagcaagagaaaaccttgtttaggtttttgttcaataacaaggatgtttctgcttggtcatcccatgatctttgtggagctaatagagatgttatcgagcactcgctcaatgttgatccatccttctcacccagaaagccaacgcttccgaaaatgtcaaatgataaggccgaatgcgcttcgaacgaagtcaaaagactcctc

SEQ ID NO: 35860 - DNA, 506 bp, Zea mays
  unsure (1)..(506): unsure at all n locations
tagcaagtgctcntacaatttggtattgtcatcacagcttgatttttctcttagcaagggcaaaaagtgcaatcacagcagctctgtccagatttggacagattcagacttgtgatttaaaaattcataactgaagattcagacatccaaacaaattgatcctagactttctagaaagctaattgaatgttctacaaattatttataaacatcactggctggtttaacatgtataaagggtaaaatacattatgaaggctgtgctgtccagaacttggacagattcagtctttacactttaaacatccataacttaatcttcaaaccaccaaaaatagtgatccaagactttttggaaagcttggcaaaagtactacacaacttttataatcaccaaggggtgattccatgttgaactgaatcaaacaattcagttctcgaaatctgttctgtcagtggacagaacacagcaaccaagcngtaaaattcataactcttaaaccgtc

SEQ ID NO: 35861 - DNA, 339 bp, Zea mays
agctagacgcggaagctcgactctttgtggttatcatagaactccacgatggatagcgaaactcgacggcgaacggtgcgacgacaaatgatgacaactggcgaagccaacgacgagccgatcaaactaaaactatacgacaccgaccggcacacgggctacagaacggcgggcggcgaaatccgagctggagctcgcgacaacaaggagcacgacgcgcaggcatctggacaggtacaggcgagtggggtcaaggacagtacgttgccgcggccatggaaaatattggagcacggagtgcgacagcacgatgacgttgacgaagcatcgactgtgagc

SEQ ID NO: 35862 - DNA, 419 bp, Zea mays
tctctatcaaaaatattcctcatggagaaaatgaatacgctgatctgttggctaagtcagcagcccaggggctgcctataccttcagaagtatcttttgaaacaataaaagcaccttcggtcgagcttcttgaaagagcaatccttaatatatcccctgtttatagtgaagaatggagaactgagattatctctttcctccaggggtaattttctttcaaacgacgaagcttataaaaggagaatagaagcaagagctcgaccatatgtcataatagaaggggagctatacaagcgtggggtctgttctctattgctcaagtgtttatccagatccgaaggtatagaattaatgaacgacatacatgcacgtctgtgtggatctcacattggatctatgcctttgcttgcgaaaagttt

SEQ ID NO: 35863 - DNA, 443 bp, Zea mays
agcttatcaaagaagatggacattgtatttgttatggcgctctatgccgggttgatggcctccaggaatcttcggcattactttcaagcatattatgttattgtgccttcgccgcaacctttaaaagacataatgaggaatagagaagccactacgaggatcagaaaatgggctgccgagctcaatgaattttctatagattatgtgcacaggtccttaattcagtcccaggcgttagcagatttcattgctgataggacgccacgggctcaggaagaagtaacaaaggatgcccaagcctggacagttttctgtgatggttcttgggggacattcggtgcaagagccgctgatgtcctagtaccgccctcttatagtagaacatgctatgcagcaagactgtgtcttatatgttcaaataacattgctgaatactaagccct

SEQ ID NO: 35864 - DNA, 475 bp, Zea mays
  unsure (1)..(475): unsure at all n locations
tccagcccagccgngctcggcttgcctgctacagtntgattctctcatggcgagctcgccggcgatgccccttcccctgccggcgtttagcccaaaccggatctccctgcgcgcgctgctgcttctctactcggcgctctccgctcgaatttagcccagcagctccccgctcggttccgtttgccgcgccgtcgccttgctgcgcgcgccgtggtcctctttctccgcgcgccaagccgttccagagcttactttgctccattccatggttgcgcgccgagcccctcgcgcagaccgcgagctctctgttcgccgcgcgctctagagttctccctgcacgcgctcagcttcaattctgttgctgcgcccactggttattcttcttgctcacccggcttgccgtggagcgttcctgcgcgcgtgtccattgttccacacgtgctgccgaaagtctatgtcagttcgccttagcgcg

SEQ ID NO: 35865 - DNA, 461 bp, Zea mays
  unsure (1)..(461): unsure at all n locations
agcttcagctccatctatgttatggattgcttttgagtcantccaattgccttcggcccttcttgcagcttcctgacttccatggatagcaatgggtccctgatccgaaggtatcttcatgcaacgataggcaggatgaaggattgcttcgaaggcattaagagtaccacgaccaataattgcattgtaagggtattccatgtcaacaatatcaaacacaacttgctcagttctagtgttgttgatgaacccgaaggtcactgacatggtgatcttgcccagtgctacgatctgtcttcctccgaagccacaaagaggatgtgtagcatcatgaatcttatcttctggctcttgcatttgtctgaaggccttagcaaaaatgatgtcagctgcactgcctgtatcaactaagacattgtggaccagaaatcctttgataacacaagagataaccatggcat

SEQ ID NO: 35866 - DNA, 494 bp, Zea mays
  unsure (1)..(494): unsure at all n locations
ntaccanatggacgtgaagagtgccttcctcaatggaccgatcaaggaagaggtctacgttgagcaacctcctggctttgaagatagtgagtaccctaaccatgtttataaactctctaaggcgctttatgggctcaagcaagccccaagagcatggtatgaatgcctaagagattttcttatcactaatggcttcaaagtcggaaaggcggatcctactctatttactaaaactcttgacaatgatttgttcgtatgccaaatttatgttgatgatattatatttgggtctactaacgaatctacatgtgaagaatttagtaggatcatgacacaaaaatttgagatgtcgatgatggnggagttgaagtacttcttgggatttcaagtaaggcaactccaagagggcaccttcatttgccaaacgaagtatactcaagacattctaaacaagttngggatgaaggatgccaagcccatcaagacacccatgg

SEQ ID NO: 35867 - DNA, 396 bp, Zea mays
  unsure (1)..(396): unsure at all n locations
agcgtgcatctagacgggnctctggttttgcacaatcaaccaaataaagattgtcgtctagctcaccctgtaaagctagtgagccatcacaccttctaaagacagacacatntacattagtgaatagacaattatatcccatattgcataattgactaacagataacaaattatatccaagagactcaactaaaaatacattatatatagagtgctcggatgaaatagcaattctacctaaaccttctactttgccttgggtcccatcaccgaatattattgaatcttgaggagccttgttcttgacgtatgaagagaacnatctctnttcccncgtcatgtgggttgtgcatccggtgtggataatccacgttgaatccgcggatgcattaacct

SEQ ID NO: 35868 - DNA, 404 bp, Zea mays
  unsure (1)..(404): unsure at all n locations
gcagcttaccatgagaagtgtgtctgtgtggtttctttattcatgctctnggggttcattggctctgagcggggcatcgaggccaacccggagaagatcgttgtcatcaccagcatggggcccatcaaggacttgaagggcgtacagagagtcacgagatgtcttgcggctctgagtcgcttcatctcgcgcctcggcgaaagaggtctgcctctgtaccgcctcttaatgaaggccgagtgcttcacttggacctctgatgccgatgataccctcgggaacctgaatgcgctcctcacgaacgcgcncatcttggcgcccctactgccggagaagcaggctaaaatagcctctgggcgaacaacgtattccccggacgtcttctcctgatacccgcatcaagc

SEQ ID NO: 35869 - DNA, 411 bp, Zea mays
  unsure (1)..(411): unsure at all n locations
gctcgacaacaccctttgacatcttanataacattggtgagatcaagtatatntatttcttttgtcaacatgcacaagcaggccttatcaagtggcctagttaaaatatacgctaattgatcttccgacctgactccttctaaactgatgtatcctttagagacatgatctctaaggaagtgatcacagatatcaatgtgcttggtgccagagtgctgcacacgattatcagctattttaacagcactctcattgtcacacaacaaatgtaccttatctagaactacgccatagcctagaagagctacgttcatatatacaaattgcgcgcaacaatcacccgngactatgtattcncgtttggcggtngacaatgcaacactattgngctttctcgatgtccatgatact

SEQ ID NO: 35870 - DNA, 453 bp, Zea mays
  unsure (1)..(453): unsure at all n locations
agctntaccaaatggacgtgaagagtgcctttctattgtactcaatcaaggaagaggtctatgttgagcaacctcccagctttgaagatagtgagtaccctaatcatgtttacaaactctctaaggtgctttatgggctcaagcaagccccaagaccatggtatgaatgcctaagagttttccttatcactaatggcttcaaagtcggtaaagtcgatcctacactctttactaaaaccattgcaaatgatttttttgtatgccaaatttacgttgatgatatcatatttgggtctactaacaaatctacttgtgaagagtttagtaggataatgattcaaaaatttgagatgtctatgatgggagagttgaagtatttcctatgatntcaagtgaagcaactccaagaggacaccttcatcagccaaactaagtacattcaagaaatactga

SEQ ID NO: 35871 - DNA, 401 bp, Zea mays
  unsure (1)..(401): unsure at all n locations
cgtggagagttcactgttcaatctagcaatctcagcttgtgcttctgccagcgaaccctccattggttgaagcatgaaatccttcttctccagagcagcttcgtgatctttaattttgccctctaagccctcaattataatctcattnttcttgtcctcgaggtcttgttgcatcctcaaggttttacttagtagtagactctgaaaaaataaccttcatcagaagtaaccttcatctcanaaacaataaaaagttaaggtaagaactttaccttaaaattagaataaaacaagctatcggcgatatgttgtcgccggtatctgttgaggtcggcctcaagcttcagaaaaccaacactctttgatagagtgctgacaaccttcgctccagtccgatcctg

SEQ ID NO: 35872 - DNA, 464 bp, Zea mays
  unsure (1)..(464): unsure at all n locations
agcttagccatgaacgaaatatgtgtttgttatagttatacaaaacaacatcatagtacacaattttgtttttcaaaaaatcagagatgtatttcattatgtactatactaatataccaattttcaagttctaattattctacaataagagatgtaaataattttctattatttttgaacccttcacattggatagaatttttctccttctatatatcttaaaatagaatagaataaaacttaaaatttaatgtagcaataaagtaaataatgaattatatttatagtatttattcttaacctcatgcaaaanaacattaaaagtagcatcacaatcgcataatgcttcgcaggacactcatttgatccctcgctcccgtgcacagccacagtgttcgtccaaaaaccggcgacgccggcccaagaagcacatgaagcggtcattatgtcgcgctgctcgctca

SEQ ID NO: 35873 - DNA, 459 bp, Zea mays
  unsure (1)..(459): unsure at all n locations
tcttacttgcgagtattggtagcaaatgcttcattctagngaagaagggtagaaattctaaatttgctcccaaagttgtagaagagtttttgttaggttatgactcaaatacaaaggcgtatagagtcttcaacaaatcatcgggtttgggtgaagtctctagcgacgttgtatttgatgaaactaatggctctncaagagagcaagtngctgatcttgatgatgtagatgaagaagacgttccaacggccgcaatacgcaccatggcgattggagatgtgcggccacaggaacaacatgagcaagatcaaccttcctcctcaactatggtgcatccnccaactcaagacgatgaacaggttcatcanaaggaggcgtgtgatcaagggggagcacaagatgatcaagtgatggaggaagaagcgcaaccggcaccttccaacccaagtcgagcgatca

SEQ ID NO: 35874 - DNA, 446 bp, Zea mays
  unsure (1)..(446): unsure at all n locations
tacagattctccgaatagctaggggcttcggagggtggttttattctatacatgtcagatcgattcattccacccagaatgatgacaggggaagccagcagcacaggccgcaatattcctcccaggcttctcaggcttcggggcagcaacagagttatcctcggcctccagctccaaggggcagaggcgccaggggcttcggaggaagatttggggatcaaccaaggaaaatctattgcttattctgtggtgaagacaanggccacaccaccatgatgtgccatgttaccatccagaagcaaaaggagatagcagaagctgcagcacaacagagtcagccgaagcaagtcatgcatactgcttcgtaccattcgccttacattccagagtatgtangcaaccaccctgcagcttctattgcttctgcaagccaatcccaggcatct

SEQ ID NO: 35875 - DNA, 372 bp, Zea mays
agcttctaaaggggagcacagtgtagttctttccaatgttcattttgagaaagataggatttgtagcccatgtcaagcagtgaagcaggttggagctcatcatccacataagaacatcttgacgaccaagaggccgcttgagctactccacatagatctattcggcccgatcgcttacataagcatcggtgggagtaagtattgtctttgtaattgtggatgattattctcacttcacttgggtattctttttgcagaaaaaatctcaaactcaagagaccttaaagaaattcttaagatgggctcaaaatgagttcggattgagaatcaagaagattagaagcgacaatggaacgaagttcaagaactctc

SEQ ID NO: 35876 - DNA, 482 bp, Zea mays
ctaagcttgccagaccaatgacaacattgctggctaagaaggttgatttctattggttttaccatgccagaagtcctttaagacattgaaagagaagtagacaacggcaccagtactgattctgtcagatgttcacaagccattctcagtgtattatgatgcttcgtataccggactgggatgtgtgttgatgcaagaatggagagtattggcatactcgtcctgacagttgaagattcatgagataaattatcctactcatgatctggaattagcagccgtggatcatgcattgaagacctggaggcattatctttatgggcagaagtgtggtatctacacagaccacaagggtctcacatatatattcactcagtcagagctaaacatgagacagcgaagatggttatagttgatcaaagattatgagctggagattcattatcactcacgcaaagcaaatgtggttgcagatgctctta

SEQ ID NO: 35877 - DNA, 361 bp, Zea mays
gacatgcactgcatggcttgtctttttcaaataccacatcctttaatcctctaaccatatctttctttaatactttcttgagtgtgctcattccaacatgtgcaagcctcctatgccaaagccattcaagagaagctttgtgtgaagaggcaagcttcttaaagtctgctatcttctgaagtgaaatccactaagtagagggtgttgtatctaaatcccttgaataccattgattcatcatctatgtttgttacaatgacctctgatggagtgaataaacattgaagtccaagatcacagagttgctccactgataataaattgaagctcaacggtgcaactacgagaacatttgatattg

SEQ ID NO: 35878 - DNA, 302 bp, Zea mays
  unsure (1)..(302): unsure at all n locations
atatgattattctctgtccaaataaattacgatcattcactatctgtgtatgcctaagctatacgttactatatgtaatcatctatctatctaataagataaaggaataggaaatcctactggtcaataaatgtttaatcttgcgagaataataatatgtaatgtgcggatntatccctggtttaacttttatgtctcattaattaagtggaattaatgatgtactcatggagatgacaaccttccaaataacaactctaaatgtgtagttcccctataacaaaactcctttgagttatact

SEQ ID NO: 35879 - DNA, 381 bp, Zea mays
  unsure (1)..(381): unsure at all n locations
tccagcttgtggagaggtatgcgtatgaatggtatttcttgacgncatgaataaaataacttgtttaaaaatggcatgtgcataatatcgactctcttcccatggcagatggcttcggatagaaccacgcctaccgcctccgggattggagcaagacttcctctatgagctgagggagaggctggctgagaagggggtgagacccacctccccgcacctccagaactaccactagacctagcccaaattctggccaatcaaaccagactcattgaagtcctcactcgaagtctggagaaccaacgcccatgctgtggaaggcccccagacaggatgggagaatctctgagactgaagcctctcactcttgcggggtccacc

SEQ ID NO: 35880 - DNA, 509 bp, Zea mays
  unsure (1)..(509): unsure at all n locations
gacctataaaactcagcttancagcgattctgccctctctaggacgaacttgatgtactcgtatcttcaacgctctcctctgaatttgtcaaacaccaccttggtgatgcgtgtctctaggcagctgatggagccaacctcctcccagaacttcaaattgaacttgccattttgctcatcagtttcatgtgactgcaaaatcaccgtgggtatatatgtcactccactaataacagactaacagtcatgctagaaggtttcagagagagaatgatattagtacaggctacaaggacatggggtgaatgggatctcaccagaacatgcaatgtctccacattgngaaagcatctcangaaggtgggcagcatcttgacttccttgcggattctgaactgcatcttcaaggccaagatcttgacacttggaaccatgttagatggngtcatctttgttccactctacaccacaattgacaaccattactgccatggattataattgaagga

SEQ ID NO: 35881 - DNA, 392 bp, Zea mays
  unsure (1)..(392): unsure at all n locations
agctagcctgcggcaagaatatcacccgcatgccaacggagncgnggaacgcgccaatggaatatatttcacagctgtcaaaaagatgctccttgactaaaaaagggcaggtgggccgatttgttacccgaggcggtctgggcgctaaacaccactgagtgcagggcgactgggtttactcctttccgccttttatatggatcggaggtcatgaccccacattaaataaaacatgggtccccgcgaacagtttcgtcagcccgtcccgtacgcgacaaacccacttcgaaagatctcatcgatggagaccgagtctttcccctacaggctctgaataaatacaatgcctacacaaaagcatggcgcgaccacccacgcattcttaggaaatt

SEQ ID NO: 35882 - DNA, 333 bp, Zea mays
  unsure (1)..(333): unsure at all n locations
ttctctactacgacaacgaccacgtgctgcggcttcgctacgacgggcccgacgcattgagcatctactgggcgaatacggactacgccgtcttcccgaacggccggacatcctacaacagctcgagggtcgccgtcctcgacgacggccggcgttttcctgtccagcgacaacctgcaagtcgtcgccttcgacctgngagttcccggaatcaagagacggctgaccatctatccggacggcgacctgaggatctacagtctggagtctggacccatcgacggcgggttggacagtgacctgggcggctatggcgcaggcgtgctccactca

SEQ ID NO: 35883 - DNA, 409 bp, Zea mays
agcttccttcgaaagataggctgtcttttattctctcgaagacaaaatgagcatgctgatgtgctatctaagtcagcatcatatgggctgcccttaccttctgatgtgttcttccaaacaataaaagcaccttcggtggaacttcttgaaagagcagtcctcaatatatctcctgtttacagcgaagaatggagaactgagatcatctcttaccttcagggtaaagttctttcagatgacgaaacttataacatgaggatatgaggcaagagctccctcatatgttatgatagaatgggagttgtacaagcatggagcttgtgctcctctactcaagtgtttatctacagccgaaggcattgaattgatgatagaaatacatgcacgcctatgccgaactcacattgga

SEQ ID NO: 35884 - DNA, 247 bp, Zea mays
  unsure (1)..(247): unsure at all n locations
ggagtatgtgctccgttgctcaaatgcttatccacaaccgaaggtatagagttaatgaaagaaatacatgcatgcctgtgtggatctcacatcggatctaggtcgttacttggacaaattttccgtcaaggattttattggccgaacgcagctccggatgcaccaaaatnggttacaagtgccaaggttgcacaaatgtgcaagagatcaaaaacaaccttcgtccttgacacagctcatacaaccc

SEQ ID NO: 35885 - DNA, 465 bp, Zea mays
  unsure (1)..(465): unsure at all n locations
agcttagtgggttctttattcttaaatcaactttatgttcatgctcaattntggttcacataagatgatggttcttgggttagcacttgagagaaaccctaggtgacactggggtgtcacagggatattcaaagttcaaggcatccattactcggttcatccttcgttttggttgggtgccgaaggctgcagtcatcagctgatcttcttttttagtgtaattacccaaaatttcgttgcacatagtttctatcatttctaaccattcttggcatggccctttgaattgtttctcaaatttgaactgataaggcagtcgcacaagttcattcttttcctttgtcccttttagcttcggcatattccattcactcagcgtcgggaacaccttataggccagatattcttggactagatctctggtgctgatctgctcggctaccaccctaaattctgccacagctt

SEQ ID NO: 35886 - DNA, 405 bp, Zea mays
  unsure (1)..(405): unsure at all n locations
agagaaaaaggattgttagtgttatgagcagataggctgctaggatggtaaaacaagacgaanaaactttgaaaaagagaaaatccagtcctgagccaaagatggcgacctcgaagaagagaaaaactgcaactccagagccgaagatgtctgagatagaagaggaagctccttcgacgccttctgctgccgaagtagaagaaattttaaaggtaatgactgaatccttacctatcaagctgctaagtccactggggccgcaactgacgaagcttttacagaagaaggacgagccttcggcagggaaaaaggcggttgggccaaaaaagcaaagaattgttactattatgcaagccattgaggaaacgccaccgccggcctcagcatcaaaaaataacaccagct

SEQ ID NO: 35887 - DNA, 457 bp, Zea mays
agcttggtgccgatggagaaacaaaagtccttgttatcttggctgtcaaactgcttgccgttgtcaactgttagctcggatggtactccaaagcggcaaacaatgttctgccagaagaacttttgggcagtctttgatgtgattgtggaaacagccctcgcttcaatccatttggtgaagtattcgacggctacgaaggcgaacttgaggttcccctgagcggtgggcaggggcccgacaatgtccaggccccaccgctggagaggccatgtatgggcaatcagctttgtatattgcgaggggttgcctgaccgaagagagaacttctggcaggcttcgcatgaccttgtgactcgatttgcggcgcagatcattgcaggccagtaaaaccctagtcggatcaccttggcggccagggcccttggccctgcgtgcgagccgcacgtgccactgtgga

SEQ ID NO: 35888 - DNA, 508 bp, Zea mays
  unsure (1)..(508): unsure at all n locations
tgtagttgtacccaatagctcacatcaacacccgaagttcacaaactaatatcaatttcagactttctcagtctgtgttaattgtagtagtgactggttcagcagattcatggtttgttaacttgtttaacagggaaaacctaaaatgaaaaaaaactgcagggagcaggaacttctatatggatgaaaatggcagcagcaaagtattcagaagcatatttaaaaaaatatgtgaacaacatcaacagaacagtgagaaaaacctgagtggttacacaaataaaatgcatgaaaaataatcatgatattatgataatggttagtcgaccaaaccaaatagtaaaagcatacaaacctgaagtagaacttccgaagtgataaatccaaatgcatattcgccaattcttgggtgcctaatgatgaccacttctttgaatgcatngcttgtttgatctgcatgaaattgtgaattgcttagacacatttgaattatgattcttagaatcat

SEQ ID NO: 35889 - DNA, 448 bp, Zea mays
  unsure (1)..(448): unsure at all n locations
agctntagtacatctagcatacacctcgccgtatctatgttatcctgacctcatgcaaccaagttgaactcaagcttcacctcaccaccaacatggagtcaagtccgactcggacgctgactcaagttcgtacttggattcatatgactcttgagattgctttgtgttcatggcaaacttcaatatcaagatggtcaccctgcagaccatgtcaacgatgatggtgactcgacaacaaaaggatagagaaaccaagaagagctacaacaacatggatgagatgctcacgactagattcaagtggttgactttcatggccagcaagtccatacaatggcaacctataatattatgactgcaaaactccttctggatatgcttacatcactactccctcaagacaatgtgcatgcccatgaagacctaaggaagataaacaacatgatga

SEQ ID NO: 35890 - DNA, 358 bp, Zea mays
  unsure (1)..(358): unsure at all n locations
gcttagtccatccttagctggatatgtnggnactatatgctggcatcatcgatgttctttccatattatcaattcgattgcgaaatgcggcttgaaaagactgcaaccttaccttgattcatttagaactgcaattgtcttcttgaatgcttctaatcagcgtattgctgcatttaatggttattgtgttgctatgaatgtacgacctcgttaaattggcattgatatgcccgtgagatggaattctacatatcttatgcttaaacatttaattccttacaatggaacctttggtgtgtcatggcactaactatcctaaaaaccagtgaacctatctgtgacaaattccattggatgt

SEQ ID NO: 35891 - DNA, 443 bp, Zea mays
  unsure (1)..(443): unsure at all n locations
agcttangaaccttgcgtgcaagtgagtgttcatttctttgtaagagaatttgagttgtgttaatttctgctttgctgactccaaatgacgtggtggcagggtgattggaaggaaatttgttgaggtggagatggacctgaccaaagccaatagtgaggggtacctatgggggaataggattgcatctgtggactccgacaagaagaagcaaattcttgccgtcattggagtttacactgggtttggacccgtataaagagaaacctttgcttcatcaagctgatggccggctgcccaaagcactaccagacacaatgctttgccgtcagcctgaaaaaaactcgacaaactctttaccgagtactttaggaccgattatctattttttctattaatgttaatatatgaaaatctggttagagttaacatatatgcctttgtg

SEQ ID NO: 35892 - DNA, 440 bp, Zea mays
  unsure (1)..(440): unsure at all n locations
tggacgtgaagagtgccttcctcaatggacctatcgatgaagttgtctatgttgagcaacctctcggctctgaagatagtgagtaccctaactatgtctataaactctcaaaggcgctttatgggctcaaacaagccccaagagcatggtatgaatgcctacgagatttcttatcactaatggcttcaaagttgggaatgccgatcctaccctcttcactaaaactattgaaaaagactcgtggatatgccacatctatgttgatgatattatatatgggtctactaacaagtcatcatgtgaagagtttagtaggatcatgattcanaaattcgagatgtcaatgatgggggagttgaagtattttctaagatttcaaatcaagcaactccaagatggcacctcatctctanactaagtacattcagaatacttagaag

SEQ ID NO: 35893 - DNA, 247 bp, Zea mays
caatgccaccctaattgctgtctacggtcatagtggtgccgtcttttgttaaatttttgtgttctctcataccgaagcgtttatatggcaagaagtactatttatcgtagcatttacaacaaagttacgccgggttctttatttgtgcatgatgtttgccaattatgaatgcttcgcagccccacgtgagttctcgagtgcgagggcgagttctatctttgtcttacctggtagatatgatctatca

SEQ ID NO: 35894 - DNA, 420 bp, Zea mays
  unsure (1)..(420): unsure at all n locations
tcttagcaattaagcatgtgtcgagttcagctctatcaaaatctaccaagtataactgaccctctaacacacccttaaatgctattgaatcatcacttcttgtaaagacagtgacacctacatcagtaaagagacagttgtagcccatttgacataatcgagatacagaaagcaaattgtaatctagtgaatcaacaagacaaacattggaaatggaatggtcaggagatatagctatntttcctaaacctttgaccaaaccttggtttccatgcccgaatgtgatagctctttggggatcttnggttgtctcgtaggaggagaacattntcttctccccggtcatgtggttcgcgcacccgctgtcgatgatccaacttgagcactcggatgcataaacctacaaaacaagnttagttc

SEQ ID NO: 35895 - DNA, 386 bp, Zea mays
  unsure (1)..(386): unsure at all n locations
agcttaactaacagatgactagataactttgtccaggctgattccattcccttttgttttttcctttttaaaggctatagtcctacagaaatggacaagttgtgaggtaagggtttctagtggctcacacagctgtgcaacccagtaccacgctgccaacaacaaaacaaaagttggaccagcaggatttcctcccctaaatcgaccataaaccacagagaaagagagaaacctgccatctatccacagagaaagaaaaggcacggatgagaatggcgtgtttgccctttttagtggctctgaacaacaagatacaattccttttttatcctctgttctgcattnttttcaacatagaggcggttctatcaaaccaaactaatcac

SEQ ID NO: 35896 - DNA, 400 bp, Zea mays
ttaccaaatggacgtgaaaagtgccatcctcaatggaccaatctttgaataggtctatgttgagcaacctcccggctgtgaagatagtgagtaccctaaccatgtttacaaactctctaaggcgctctatgggctcaagcaagccccaagagcatggtatgaatgcctaagagatttccttatcactaatggcttcaaagtcggtgaaagggaaatgtgcccttgggccatttctaagtatttaggtgattgagtgccaacacaagtgcttaaatgtgaatctatacccatggatggacaaagtgcaaatcaagagtaaaggtatgtttctaagccttagtacattgttctgaaaactaatgtattgtgtctaactgcttgaaacaggagaaatctagtc

SEQ ID NO: 35897 - DNA, 430 bp, Zea mays
agctttactttcatcttttgtgctccgatgtgtgttttgattgctggatagtggtgctgagccctgcttatgcctcttcttgagcactatccttttctgcttggtcatggtgagtcattgcgcattttttagggcccactttgctctctttaaagacttgtctggcttttatctgacttttggtcgttcgagagagcctctcttctattcctttttctggttatatatgctcatgtggtggggttgacaatgcactcatcaagggggagattgcgaacacgaggttgacttgtcccttaaggtttgggttgatgatgaatgattgtcaacaggtcgcactatacgatagtcagcggactgaactaaatgtgagattgtgtatgtgcaaccatgtcgttcgactggtggcggcaagtgtggagcatatgga

SEQ ID NO: 35898 - DNA, 344 bp, Zea mays
ggtgcgacgcgagtatgcgaactcttgttattgtacaatcgaagttacctagccgcacttaggcaacggcacgcccgcacctggaagatggaaggccaaatgttgccgctcgacactcaccattcgccctaaactaagttgggcagacaggcataactccaccactctagatgggtatgggtacctgtccggtatagaataactgatgtgtccgggtatgggtgtggaattgaatccgcccatgggtacatgtattcaagcagagagtttttaagttaacgggctgagtctgggtaacaaaaaatcggcgggtcttcaaccattgccatctctacgcacgcaca

SEQ ID NO: 35899 - DNA, 413 bp, Zea mays
  unsure (1)..(413): unsure at all n locations
agcntatcctaaggagagatgagagtgttttttctctgctagngngnnattcatatgcttcttgcagtattatatgtgttgcatcatatggactagtgcttccgttgctatgaattaattggcatctattgtgttcattctgaaatagacagtcatgttgataatgatgcatgtggtttatggtgcttaagattgctttaaattagtatctgagtctaaattggtctcttaatggtgaatagtggtagggtgatattcctgtgagatatccactaaattgaatggtgtgtaactctgattacgtgcattgtgtggtatagcatcatggtttgatctctgacacaatgcatctcagaaagtgcctaggtgtagaaatgcttcaaattgcctaagtatgtgccaattgacatatt

SEQ ID NO: 35900 - DNA, 418 bp, Zea mays
ctaagctttagctatatggagcattgaacaacctctctttgtcttttgttcttctttgaccaacttctctcttcgggtcacctctcctctggtgagacaccttccggatgcctccttgaagtctacgctcttgctcaagctcggccctctgaggaaattggcggacgccgcttatgcgcttctccagttgggtgctcagtcgtcgggcactggtgctcggctcgagcgcctcccactccactggataccgctcggttcatggaggcctgggagcgcgagccacacctgaggaggggagtcagtgtactccatttgacccaaccggaccgcgccaaaatatctcggaccctcgagtggcggaggacaactgaccgcccccaccctatacgaggtgcatcacgatacctcgtggttgcac

SEQ ID NO: 35901 - DNA, 430 bp, Zea mays
  unsure (1)..(430): unsure at all n locations
agcttatccttagggtcattgtatgacntttattctaaagtctttnnggtttcttatcttgggttaagntttacccctttaaccactatttagggttaagtcctttaaccagggttctttttgcaaaacactttaaacaatacaacttgtttgaaaatttttgcctagtgaatgcactctaggtgtgtcaaacatatgcaatgccaatgctatgatgtcatgctcaagttttagttatagtaacaccaggggtgttacagcggcgacttctaatggggtggcggtgggcgcagcgagactcatggctaacgcaatcaaggccgcaaaagctgctaccgagcacctacgctacatatgtgttnnttatccttgntatcattcctcctccgacgttggagtcttccttgccaagtgcattgggtgctttata

SEQ ID NO: 35902 - DNA, 372 bp, Zea mays
  unsure (1)..(372): unsure at all n locations
gctcttcgcctgngacacgggtatcttgagaatgctgatctatgtcttcttccctttaggcgggggcacgctcatctctatcctcatattttgcttcttgagctcttgatatgtatcatcatttgttactgcaaattctagctcaaaggaagatatgcttgtcgacggacaacaagcattagcacatggtaatgtaggttcaatatgaatacatgtgcatgagtgaggctgttgagattctaagtttctatcacaacctaatgagcaatgtttaatatgatatgatcatctctaagattgtcatgggaacatagaagcatatcataatttgtcttgaaaagctagaattttaactattagctattctacttg

SEQ ID NO: 35903 - DNA, 459 bp, Zea mays
  unsure (1)..(459): unsure at all n locations
agcttgtcaagcattatttggtacccatcgcttgatgggtccaacacggttagtcaacaaagatctaggaacccaaaagtcctttgtgttagcactaggtaaactcattacctttctagcacaagttgcaattttgggttgcctagttacatgagaattaattgacaagctaggagtggaattgttaccaatgggacaatccttgcattgatgtcccttctttcggcatgtgtagcataggcgtttttcaagttttgaagttttcttctttcctagtttgttgcttgctacatggttagtaaaaactttcctttctaaccctatgcctttttgttttaagtggggacaagatctaagcaagtgtcccttcttggagcatttaaaacaaagtctatcantccttgttaataatcaagccattttaatgtagggacatgacctaatcaagtgcccctcttc

SEQ ID NO: 35904 - DNA, 465 bp, Zea mays
  unsure (1)..(465): unsure at all n locations
actcagctngaaacatatacagcaatgtacaagcatcagagcagcactaaccttctgttgaaatgttctataagatcaggagaaggtatatgattccatcagatgctatcagtaattgtgtttagtttcctatgcaaccctcatgtgttttatgtatttcaaacctgaccgcagcattgctctagcttttctatcaggggcacatcctgatgtgatcatttcttcatagataacaggaacctgttaaatcatcgacaaaaccacaatggtcagagttcaggtcatgtgtctattccaccagtggagcttgcagttttacagctatagaaattgttcatgatctgtagatttttaaaattaaaggcaactaattggtttacaagataaaanaacagtagcttacactctaattatggtgttgtttggttcacatatttgtaacgtaaacagtaactaataacatta

SEQ ID NO: 35905 - DNA, 459 bp, Zea mays
agcttgaggccgacatcagccgctaccgacgattgtatatcgtcagtagtttattctattctatttcaaggtaaaacctttacttaggcttttcattgctttaacgatgaaggtgttttctgacgaaggttgtttttgcgcagagcatgctattaagtaaagccttgagaatgcaacaggaccttgaagataaaaaacatgaggttataattgaaggcttagagagcaaaataaaagatcacgaagctgctcttgagaagaaggattttgaacttcaatcaatggaagtgtggcagaaccacccgaattattccagcttaagtgcctaagtcacgcctcaggggccgtaacacacttaaatcggaataacccgtcagtccctcagatctagtctgatagagccacttaactaggatcaaattccacaatctcactcgaaggtgagtcacagaagaaata

SEQ ID NO: 35906 - DNA, 433 bp, Zea mays
  unsure (1)..(433): unsure at all n locations
ctcaagctttccaggttggaggaggcttcctagcanaatactgtgttgttttatctcttagaagtcctttgatcatggcttcaataacaatatcatntggcaccatcggcgcctacgctctgaggcgcaagaaccttcgaacatatgcctgcaaatattcttcatgatcctgtgtgcattggaacaaagtttgagcagttactggcttcgtctaaaatccttgaaagctagtgaccaacatgtctttcaatttctgccatgatgtatttgttcttggcctgagagaggaataccaggtttgagaaacactcctcactggcatgacgaaggattntgccatcatagccgtgttgacaccatatgatgatatggtcgcttcatgactcatcaganattgcttcggatctgaatggccatcgtacatgggtagctg

SEQ ID NO: 35907 - DNA, 459 bp, Zea mays
  unsure (1)..(459): unsure at all n locations
agcttaataccagctacctcattctacaagctatggctatatggnggaatagcagatgaatgggaattgttagggtgagtgtagtacgttcgtttcatattcaatcatacatttcggttacataatacgaatttgacgttatgttctcttaggtctttgtatgtaggatgcaaagatttttcgaagcaactttatgattgatctgttaagttatgagtagagatggtaatgggtacccgaaacccgatgagtttttaccctattagggtacgagtttgggtcaattttcatacccatgggtttgttaatgggcataaatctatacccgacgagtttatgagtatgagtttgttcctatagtacccaaacccgtgaacccatgagttttttaaacccgaccaaacctagtgcatattgtcatttcattttataaaggaacaacaaacttgttattcctta

SEQ ID NO: 35908 - DNA, 462 bp, Zea mays
  unsure (1)..(462): unsure at all n locations
ctaagcttactcacagttctgattctattgtanaaggaagataagtacatatctnttactgtgcatctagttatactttatgcctagagttatagaanaaaaactatgtatctacaaaggccaaaacaacttagattttggaataagtatggtctttcatgctatgtatagatattttacacttattgctaagaagttgatttcaccactgatgcatggacatggacatgcattatctatgtgcagggggcatacattggaaagagtttttgtgaatctgctgctcgaagtcgcagaagatgaaatatcttttcggacagtagtcagagatttgaaaaccaaaaggccaatgctgcaattagttcttcttagctcanaagcatggttatctctctggtggtgctatganaatgataccaatggttcacatggaacaacagatctgcagcctagtggtaaact

SEQ ID NO: 35909 - DNA, 411 bp, Zea mays
  unsure (1)..(411): unsure at all n locations
agcttgcatgacaaanacgtgaatgccataaatctgtttcatcaganaaataaacataattcaccatgttattacacacatcatgcagtgataagcggaacaaacctccgcagtcatattctttaccaacaaaagtaccatgtttcgacacaacacatttatttgactcaagaacaactttgtatccatctcgacatagcatagaagcactaatgagattcttctcgatagagggcacatgctgcacgcttcttaatggcaccgtcttttccgaagtaaacttcagaatgaccgtaccaacaccaagaacatgagcacgcgagccattttccattaacaaggtgtcagacctcccgacctattaggaggagaacatagatgcatcagcacacacatgaatatttgcaccac

SEQ ID NO: 35910 - DNA, 285 bp, Zea mays
  unsure (1)..(285): unsure at all n locations
aaactcccatgcctcaagaaaccaggggtttttttatatcccgctgggttatctcaggagtagaataaggaaattcatgccnagaaaaatcattctgtttctcaccatgcctctatttataaaaatgaaggttctagctctaggcggtctacatatgttaaaatgccctagaataaaactcccattgcatcaaatgaacataacatctcatttaagacctttgatgcttcatatgtgctcactaacaaatcaagcaatagaatttgcaaatatgttgagggcaaa

SEQ ID NO: 35911 - DNA, 444 bp, Zea mays
  unsure (1)..(444): unsure at all n locations
gcttcgcgagagacggaaatgggtcctatgtctcctgaggagtctagtgttgctgagtgtatctcgatgctngagtgtgtccatctccgtcgtccttgctgcccgtcctctctcccctttctcttgagaaggccctgngcatccccttttatagacacaaggggatggaccagttgtacatatggaggtgttgctatgtgctaacgtggcctgcggagaagtgctcgagccctgtagaagcgtatctggcggtgccggcctgggtcctgctgacgtttctttgccttcgtagagagcttgangactattgacgtcatggacgcatgcggngaatcatcattacctgtgaccggagtaatctagatgtgactccggtcttgttccttcgtaacctgaggcagctagctagaggtagggtaatgatgtatcccctatagcgtaatc

SEQ ID NO: 35912 - DNA, 452 bp, Zea mays
  unsure (1)..(452): unsure at all n locations
agctngnggaggttcttcatccacacatgttctatgcggcgatgccacagccagcccatgcaagtcttagccattaagcatgcatctagaccggcctcttcttttgcaaaatcaactaaataaagtttgccgtctaatacacccttaaaagctagtgaaccatcacttcttctaaagacagacacatctatatttgtgaacagacagttatatcccatattgcacaattgactaacagatagtaaattatatcctagtgactctactaaaaacacattagagatagagtgctcattagaaattgtcaatttacctaacccttttaccttgccttgattcccatcaccgaatatgattgaatcttgggaatccttattcttgacgtaggaagagaacatcttcttctttcccctcatatggtttgtgcatccgctatcaataatccagcttga

SEQ ID NO: 35913 - DNA, 382 bp, Zea mays
  unsure (1)..(382): unsure at all n locations
ctcgaagccgacgctcaacagaattatatntgagaaaactattgacgagcctgtctgaaaaatgtttggaatttagcaacatatgcattcaacgattaagagagattttccactcagttggagctataagtgaagaattcaccccctcagctgaagatctaccgaagaccttcgaacatattgagggtgagaatgacgagctcgacgaagtcatagctgggcacggtgacttctgtgcctgagtagcttctcggggcactgctgcagctntcctaatagctggctgcgatcatggaaagaatgtaataggccaatttcacttatcacctcatcctatatacattctgattccccgaagatcctatagattgaaaatgattga

SEQ ID NO: 35914 - DNA, 420 bp, Zea mays
gcaagcttctttggatgtggagaaggtggatccctttccgttggcgtaaacagtgggtcactgagaggatcagtatgaggtggagaagctagtggagccctgaatggcgatgcttgtggcggtgatggtggggtcagaaagaggatgaggagcagcacgtgaagttcgaagaagtaatgacgattgacaataggatatgcaggtgatgactattacgttaggggttgagcatgcgatgatgatggtggtggatcaaccaattggacatcccatcaaggccaaaggatgaaattcttgatagtctatccatgtgtgtcaatacctttgggaccttggatgtttagcaagtcgtccttggatccttagacgatcgttgtcacttctaccctgcaataatcttctagaatgtattttccatgg

SEQ ID NO: 35915 - DNA, 400 bp, Zea mays
  unsure (1)..(400): unsure at all n locations
ngaagccatggtaagtagcataggctaataatatgcgaattgactcaagcctagctacgggtgcataggtttcaccgaaatccaaaccttcgacttaggagtatcctttggcgacaagtcgagctttgttccttgtcaccacaccatgctcgtcttgcttattgcggaagacccacttggttcctacaacattttgattatgacgtggaactaaatgacatacctcattcctagtgaagttgttgagctcctcttgcatcgccaccacccaatccgaaccttgaagtgcttcctctatcctgtgtggctcaatagaggaaacaaaagagtaatgttcacaaaaatgagcaacacgagatctagtggttaccctcttatgtatgtcgccgaggatggtgtc

SEQ ID NO: 35916 - DNA, 452 bp, Zea mays
cacctgcggcatgcaagcttgaggtcctgaggaccaaactctctttttttgtggatgaaatcgtattgtttacaaagaataaggcaccactcattggagtgaaaaagtggaaagatatagagctcaatgttagatcttctatagcctctgacgtactggtatgtgaaatttctttacttgagccctaacagttagctagaactattagtggtctactattcccaaattactagacaattaaccttctctttatatcaaaactgaaacagcgaaggtgggagtttctaaccaatgaggacgcgcatgaaaagatctggtctattgctaacgagagatacaaaggatggcgatcatacgttagctcaacataccatgcatacaatatttatgctgaaaggatgacaaacaagcctgaagatgtacacatcgtcgagtggcatacatggtgttga

SEQ ID NO: 35917 - DNA, 332 bp, Zea mays
  unsure (1)..(332): unsure at all n locations
caacatctaccagcacattatcttttttactcataccagtaactggccattcgcatgctgtggactggatatgattggacctttcaagaaagctcaaggaggatacactcatgtactggtagcaatcgacaaattcactaaatggatagagttcaaacccattgcttctttaacctcagctaaggccgcggaattcatacaagacataatattcaggttcagaataccgaacagtatcataactgacctgngatccaacttcacaccgtcagagttcttctatttctgcgagcaaaaaagcattcagatcaagtatgcttcggtagcacacc

SEQ ID NO: 35918 - DNA, 451 bp, Zea mays
agctcgtgaagatacttcatcccaacatgggctattcggcggtgccagagccaacccatgttagtcttagcaattaagcaagtatcgagttcagctctatcaaaatctaccaagtatagctgaccctctaatactcccttaaatgctactgaatcatcactttttctaaagacagtgacacctacatcagtaaatagacaggtgtagcccattttgcataattgagatacagaaagcaaattgtaatctaatgaacctacaagaaaaacattggaaatagaatggtcaggagatatagcaattttacccaatcctttgaccaaaccttggtttccatcaccgaatgtgatcgctcgttggggatctcggtttttcttcgaggaggagaacattatcttctcccagtcatgtggttgtgcacccactatcgatgatcaacttgagccccgga

SEQ ID NO: 35919 - DNA, 339 bp, Zea mays
  unsure (1)..(339): unsure at all n locations
nggaggcgtctatnggttgtcggctcggtgtagactcctacttcttttcttccgtcgccttgaatgcaacgggttgagctatggatggctcgccaagctcgttgattttcctcgagccttctatcatgcanctcaaacttacaaaatgcccgataacttcctcgggggtcattttagtatatctaggattaccacgaatcaattgaacttgagtgggattaagaaaaatgagagatcttaaaataacatttaccacttcgtgatcgtcccacttcttgctcccgatgttgcgcacttggttcaccaaagtcttgagccggatgtacatgtgttgcggct

SEQ ID NO: 35920 - DNA, 385 bp, Zea mays
  unsure (1)..(385): unsure at all n locations
agctnntatttagtgtacccaggaccacgaagattacctctaggcatacgtccgaaggtttctgcgtctgaaggcacaagcgccaacagtgcccaatgaaatagtcattgaggccatgattaaagggcttcggccgggaccttcagcgcagtactttgccaggaaaccaccacaaacgttggagaagctgctccagaagatggacgaatacattcgagctgacaatgacttccgccaaagaagggaggaagcattcaggttctctgaaatgaccaggggcttcggaggaagatttcacccgaggcacgttaggtcaattcataactctgctcaaactgatgatcgagggagtcagcagcaaaggccacaatacttcttacaagct

SEQ ID NO: 35921 - DNA, 488 bp, Zea mays
  unsure (1)..(488): unsure at all n locations
tattgatngaagtnggtgcaaatggtggctgcatgcctcttgcttttcatttctcgcaaggagttttcgccacacgagtagcggtttctaagactgatagcatgctcagtaccactgctacattccccaaaatcagctacccttggcctctagcttttaagcgcaacgatgttcttgtacaagcaatatcagttgagtatggctcgcaggggctttgtgttgatctcagaggtaactcagatngtaattggaatgatgcaaagtagtgcttatctgcatatggatacacatggtggcatttttgggttgcacataataggttgactggcattttaccttccattntgatatgttgcttcctttacttatttcttttatggccttggagatctttntagctcaacgcatnggaaatatgcatcttcacatgtatacatcgaattacttaaaattattgtcttgcaatccatttctgctacctctagcta

SEQ ID NO: 35922 - DNA, 412 bp, Zea mays
  unsure (1)..(412): unsure at all n locations
agcttatcagtctcgatctcattgttggttcccctcatatccactctcgtataaatctctgacctgataatctccgtattaatcataaaataattctctgagttgaagaaagttcttatgtgaagctctttngccaacaatctttgcttcaacttcagtcacattttctgagccatactctcataggctccatctatatttgctatgtggatttcattggttacgtttggtaatggtgtcatgactaacgactgatggtgccgcgacgacgagtccttaacttcttaattcgttttagagtgctaagtcgcgcgtctcgccgcgcgacaatcctttntatttatcttcacctgcttataatgattagacatgaaacatgactttactttacgctaaacatagtgtctacatt

SEQ ID NO: 35923 - DNA, 414 bp, Zea mays
tcggctccatctatgttatggatcgcctgtgaattcgtccaacttctcttgacactcctgacagcttcttgactcccatgaacagcaatgggcccttgttccgaaggtatcttcatgcataagtatgctggatggagtattgcttcaaaggcattaagcgtccttcgaccaatggttctgtttgggtagtccatgtcaacagtgtcaaagacaacttgttcaagtcttgtgttgtggatgtaaccgaaggtaactgacattgttattttgccaagtgccacaatctgtcttcctccgaagccacaaagagggtgtgttgcatcatgtatcttgtcttctggttcttgcatctcgttgaaagcctttgcaaaatgatgtccgctggactacctgtgtcaaccacaacattatgga

SEQ ID NO: 35924 - DNA, 406 bp, Zea mays
  unsure (1)..(406): unsure at all n locations
agctnggaggcgtcaatggggaccctacttgttgtatagtcttctctcttctcctctggtgccttgaatgcaacgggttgtgcttccggtaaaaaagaggatgccccttgctcgatgatcttcttggagcctttgatcatcaatttaaagctcacaaatttttctatcacttcctcgggagacattagtttgtatctaggatcaccacaaattaattgaacttgagtggggttaagaaatacgagtgatctaagaataaccttgaccatttcatggtcattcccatttgtgctcccgaggttgcgcacttgatttaccaacgtctttatccggctgtacacggcttgtgggtcttctccttgtgtgagcataaaacgaccgacttccccttcatcgtttccctctt

SEQ ID NO: 35925 - DNA, 395 bp, Zea mays
  unsure (1)..(395): unsure at all n locations
atgggaagcctatcgatgtatactctctggcttaaactgtcntggcattgacatgaggtggaagaaatgagatacgattnctttgcctgatgaatcaagtctctgtcgagacctatntattgagagaagagggcttgaggcagcatctcttgatgggtatacaaaaggaatcctgccatttcatcttctcaatgctgtctatcaagtttttagatctggcagcagcataaggaatctgtttcctccatcacgcgtgtgttcattaattntttactgtgccagctattgccccagtgatctatcacattgtcatgctccaactattggcaacaagaatcaacacgttagttattctactcagcattcttggcactattgcatgctcatccgattac

SEQ ID NO: 35926 - DNA, 460 bp, Zea mays
  unsure (1)..(460): unsure at all n locations
agcttcggctttggaatgagggcgtgtgatattatgatacagcccgatggcaacatggatggatgccgaagctatggctaaaggagcttcggcttggtatgatagcaaagatgaaggatgaaaccgatctaaggaggaaaagactacttagtccttgatagtttgtattatgattaagagtaaatgtcaggggtatggatataatcttatccgggctgcgtcccgcgcctataaatagatgaacagtaacaccgtactgttcacgctggattgtaaccactattgcatcattcccgcatctccaccttctggcaagccgaaggtatcattgtaatataaatattattgatgcttattcatgtttaggatatgagaataaaaataacttgctgattcataatcattatttatattcttttgtatttcatgtaccnctattcatgtttgttcactgagatga

SEQ ID NO: 35927 - DNA, 371 bp, Zea mays
caataaatcttctatagtatcctgccaatccaagaaaacttctaatcttggacgcatcctttggttgcttccaatctaatatctcacttatctttcctgggtccactttaattccaccatcggtaatgatatgccctaagaaagcaacttccttaagacaaaaatcacacttcgataactttgcgtataactggttgtcacgaagcttttgtaggactagccttagatgatcttcatgtttttcttcattcggagagtatatcagtatgtcgtcaatgaatacaaccacaaactgatccagatattccatgaatactttattcatcaagttcataaagtatgcagatgcattagtcagtccaaacgacatg

SEQ ID NO: 35928 - DNA, 463 bp, Zea mays
agcttgccacagcatcaaatagccgacctgaggtcatttctgatctctctagttgagagaaatcatttctactatcttgccttctagagacagtcttggaagatgagtctgcactgtcgaacagcatatgtcgaagatcataagcattcccatccacactcatgcttgcaggatctccaggtaaaaaggaaccaaaagcattatcaactcgccagaatatcatgttagtgttatccctgaaaaattcagttaaaggacataatgcatgagtgtgaaatatcaaatatctatagccatacatcaaatacagaaacaggttcaggtaatatatatttgacctcagtgcaatgcaatcccttagattacatgatgaaaccaaagaagcagttaaacagagagctgaagacaaaggtggttcagcagttccagatgaagcaacacaacccattgcaacataaccccg

SEQ ID NO: 35929 - DNA, 343 bp, Zea mays
  unsure (1)..(343): unsure at all n locations
ggacattgtctcccctttggaagccaatgccatccttaatgcctgtgcgtctcccactatagagcatgcttctagcaaatntaaattnttcattttttaagtcatgctcattaattntggcactgtcggggaccataattaggggtacccccaacactcttaaactcggctggtaatcaccatcagcacaagctgcagagcctgatgggcacaattcaggtcaaggctccgtccactcaagggacacgatctcgcctcactcgagcccagccttgggcaggaacagtagaccgaggcggattcacgcctcgcccgagggcctcctcaagcaacaggcacaccc

SEQ ID NO: 35930 - DNA, 440 bp, Zea mays
  unsure (1)..(440): unsure at all n locations
agcttgtgcagagtccgattgaactaatcttcttatattcccgacctcattgcaacatgacaccagaaggtccaacccaaaaagcgttggctgagtttaaaattatttcagagcatatcagcacaagagacctggttcaagagtttttggctttcagggtttttcctactttaaaagaatgggaaatgccgaagctagagggggagaagaaagaaggggaacttgtgcggttaccttactattacaagtttaagaaatattttaaaacaccttgccaagagtggctggacacaattgaaataatgtgcaatgaaatactcggaaattactccaaaaaagaggatcagttgatgactgcggccttcggtacccatccgaagcgaagactgaatcgagtgctgtgacgccttgtgtttgaataccctgactacganaatctg

SEQ ID NO: 35931 - DNA, 352 bp, Zea mays
  unsure (1)..(352): unsure at all n locations
ctaagctgacatgctcctgttgaagccacaccatcctaatgccgtacgttccacttagacatgctttagcanattaaattttcattttctaagtcatgctcataattgttggcactaagtgagctatgtgatcattttgtttcttaattaaagctaagtgatcatgtatagcatcaacattaatgtctctacatctagtgcaaatagtaacatgctcaaccggagatgtagagggtttgcaagtttttattcaacaatcttagcatgtaaatagcattttcatctctaagaatggaaataaagcattgcaaacattngaatctttagccctagcaatcacattttcattctc

SEQ ID NO: 35932 - DNA, 347 bp, Zea mays
  unsure (1)..(347): unsure at all n locations
ttaatcacctgcagctgcaagcttaaatgctttagtgatgatttggaacgccattttactctgtcaagtaccccggtggcaatgccatttcatacttcgttttaagcctactttaaggactacatctcatggaattaggatggtaccaaattttacactataaatattgaggtattaaggatcagatcaaattatgatcagctctattgctattcatttgngaagtaaaaagtattaagggccttaattaattgtaaataaacatttggatcatgatctattatcacctctacatgaaactaaaatgagttgaattgtatacgtgtgtttaaccgtctttttcttgg

SEQ ID NO: 35933 - DNA, 375 bp, Zea mays
  unsure (1)..(375): unsure at all n locations
ctacattctatatcctgctcattatcctgagcacaaaattaggtagattcatgctangaaacctcatactgtttctcatcatgcatttatgtataaaaatgaggcttctagctctaggcataccacacatgttaaaatgcctacaaagaaaattcatgttgtgtcaaatgagcataatgtgtcatttaagacttttgatgcatcatatgtcttaactaacaaatcagacaaagtagttgccaaatatgttgggggcaaacacaagagctccaaaacttgtgtttgggtacccaaggtgcttgtttctaatgtgaaaggacccaagaccgtttgggtacctaagaacaaggcctaanattgtttgtaagttatgca

SEQ ID NO: 35934 - DNA, 400 bp, Zea mays
  unsure (1)..(400): unsure at all n locations
agctngcangtcgttttaaatcaaagttttctcttggagatgatgctgactgtacaccaaccactgattcagaagcccaatcctcagctgtgggcactgaatctatggacacagaagacttccttatgtacattccgactattccattgacaccccacgattgacctattccaaaccgaaggtttctattggtgtatactgctcaaggcggactgtgaaccaatacactctggcatctgacaccaatattcaatttttccacactcaactccacgttgatgttttttggggcaccttggtggatacaacatttcataaacatcaagtgattgattggtctttcatgctaggacaatcagtcatggaggatctgatccctaaggttgagacgtgtggactg

SEQ ID NO: 35935 - DNA, 352 bp, Zea mays
gcttcgcctcggaaccaattttagtgtttccgaagatgtctgattgcttaagatccctgctgagatgaagctaagtctcgaggaggagaagaatctgggattcctgatagcgatggcagagactaatacagagaaaatcacgaaggagattctcgaaggtttgtccgaagatactgatgacagcgacagctatgatgtggaaagtattggggaagaggccgaagatcgaccgtggcgaccaagtcactcagtttttgggaaaacaaccatcaagcagagtcacattgataatatgagggggcgatacttccgagacatatctattgtgagagctgatgccggggaaaagact

SEQ ID NO: 35936 - DNA, 385 bp, Zea mays
agcttctgacttgtgagcccgcctgtgtgtctcttgcacaccggacatctactgttccttgtccggtgtgccggagtgggcgcgcctgccatctgcgtgcgcagagcgcgcattaaatgcgcggcagagagccgttggcgcggaggtagccgttgctccggagttgcaccggacagtccggtgcacaccggacagtccggtgaattatagcggactagccgttggagtttcccgaagctggcgagttcctgaggccgacctcccttggcgcaccggacactgtccggtgtacaccggacagtccggtgaattatagcggagttgcctctggaaaatcccgaaggtggcgagtttgcgttggagtcctctggtgcaccggacactg

SEQ ID NO: 35937 - DNA, 367 bp, Zea mays
  unsure (1)..(367): unsure at all n locations
ntatcanatggacgtganaagngccttcctcaacggactcttctattgttaggtctatgttgagcaacctcccggctttaaagacagtgagtatcctaaccatgtgtataggctctctaaggcgctttatgggctcaagcaagccccaagagcatggtatgaatgccttagagatttccttattgctaatggcttcaaagtcggaaaagctgatcctactctattcaccaaaactcttgaaaatgactngtttgtatgccaaatttatgttgatgaatattatattgggtctactaacgaatctacatgtgaagagtttattaggatcatgacacagaaattcgagatgtctatgatggcggagttg

SEQ ID NO: 35938 - DNA, 443 bp, Zea mays
  unsure (1)..(443): unsure at all n locations
agcttctaaagggagaacacgtgatatgtctttctttgttcatttcgaaaaagatagaccttgtgcagcttgtcaagcaggtaaacaagtgggaggagcacatcacagcaagaatgtgatgaccacgtcaagacctctggagctgatgcatatggacatcttcggacccgtcgcctatctgagcataggaggaagtaagtatggtctagttattgttgatgacttttcccgcttcacttgggtgttctttttgcaggataagtctgaaacccaagggaccctcaagcgcttcctaaggagagctcanaatgagtttgagctcaaggtgaagaagataaggagcgacaacggatccgaattcaagaaccttcaagtggaggagttccttgaggaggaagggatcaagcacgagttctccgctccctacacacctcatctaaatg

SEQ ID NO: 35939 - DNA, 317 bp, Zea mays
tgttgatgacttcacatgttatgattgtatagttcttagagaccaactcgatacattcattaccgaaggaagagaacactcacgtttcctatcatgttgcgatcttggtaatcttgctatgaagatggttaagacagatagacatactgtattcccattggcttatctgctaattgaattggctttgattatgcctgttgcaactgctactgtagaaagagcattttcagccatgaaaatcatcaagacagattcgcgaaataagatgggtgatgaatggatgagtcattggatgatttgctatatccagagggata

SEQ ID NO: 35940 - DNA, 444 bp, Zea mays
  unsure (1)..(444): unsure at all n locations
agctntaaaggttaatcttcacctattattatttattttaaattctcaacgcaaaggtatggaacaaactgcttcaattggaagctgatcaatagtagttcctttcaagtggcattctttcaattggtaataatatattctatggaaagaaatgtcaatatgaacgttaaattccttttggattaaatttgtaaattggtgcatattgttaattcactcatccatgtgcattaacttaaaaggaatttaatttatgcctttatgcctcataaatgatgatttatttgacattcatatataaatatcatcattcattaaatacttcattgtactactaatacctcttttcaaagtgcttttttactatctttaaaaggaaaagagataacaagctaaagaaggaagtctccacaattgaagaaaagaagaatactcatacgacac

SEQ ID NO: 35941 - DNA, 416 bp, Zea mays
taaaactaagctttcgacaaggattccatgctgcttcaactaattctttttgttgtccaactatggaacctggaaagcctccagtgatccctatcattcaccttgaagtgtctaaggtctactaaccctgcaaatacggaacacgtttatgggtaagatggcaatctctgcaagtgaaaattggatatcagtcggctcacggcaacagcgactaggactctcgctgataattatggaataaacttaatatgtatttgcatgcattgtgggattattataatttgactcttattattgggtggatctactatctagaactacaataaacttgacaagttaaagcaacgtatctttaccatttcttggtaacctactttccatgaccccacgaaggacttatcctttattcccaattg

SEQ ID NO: 35942 - DNA, 370 bp, Zea mays
  unsure (1)..(370): unsure at all n locations
agcttctaaagggggaacacgtgttaggattaacaaatgttcatttcgagaaagacaggatgtgtagcgcatgccacgcgggaaagcaagttggcactcatcatccgcataagaacataatgacgaccgacaggccactggagctcctacacatggatctattcggcccgatcgcttacataagcatcggcgggagtgaagactgtctagttattgtggatgattattctcgcttcacttgggtattctttntacaggaaaaatctcaaacccaagagacattaaagggattcttgagaccggctcaaaatgagttcggattaaggatcaagaaaataagaagcgacaaccggacggagttcaagaactc

SEQ ID NO: 35943 - DNA, 444 bp, Zea mays
  unsure (1)..(444): unsure at all n locations
ggccaccggatccatntcttcgtntttcacaacgaacatgcgcattcttctaatttaggtccaaaactcatggttggggtggtttcgcgcaattatgttgtcgcacgtcactcattccgaaaacgggtgcatacaagcacgagtttttgccaccggaaccatttcttcgttttttgcaacgaacatgcccaatccactactttaggtccaaaactaatgtttggggtggttttgcgtaatttcgttgccgcacgtcacccattccgaanacggatgtcggggtgcatacaagcacgagtttttgccaccgaaaccatttctttgtttttcgcaacgaacatgcccaatcctctactttaggtccaaaacacatgattggggtggtttcgcgcaatttcattgccgcacgtcacccattccgaaaacgggtggtcgggtgcatac

SEQ ID NO: 35944 - DNA, 389 bp, Zea mays
agcttggcattaatagctatttgtttgattatgatagcgaccacgatcaagggaacaagaaggagaacaagaataactattacaacgcaaatggtgatgcgcatctatgcaaggagtgggattcggattgctcctcttcccactccgacaatgaaggactcgccgccactgccttcaacaagtcatccctctttcccaacgagcgttacacatgccttatggcaagggagaagaacgtatgtactcgaaactctacttatgcttcttcaagtgaggacgaatctagtgatgacgatgaaatagattatccatgtttatttaatggcctacatcgaaccaaggtagataaaattaatgaattgattgatgtcttgaatgatagaatatgc

SEQ ID NO: 35945 - DNA, 375 bp, Zea mays
  unsure (1)..(375): unsure at all n locations
tatggagattcttcatcccaacgtgggctagtctgcgattccatttccaaccctcgttagtcttagctattaagcaagtgtcaagttcagctctattaaaatcaactaagtatagctgaccctctaacactcccttaaatgctactgaatcatcacttcttctaaagacagtaacacctatatccgtaaaaagacaattgtagcccattntacataattgagaaactgataacaagttatagtctaaagaatctacaagaaaaacattgganatagaatggtcaggagatatagtaattntaccaagtcctttgaccaaaccttgatttccatccctgaatgtgatagctctttggggatcatggtttttctcat

SEQ ID NO: 35946 - DNA, 304 bp, Zea mays
  unsure (1)..(304): unsure at all n locations
agcttgtggcgtcctcggtggtcttgtcgtatccnaagcaccaagtctccaacttggaagcctcggagccgaatccttcgggcgtgatagcgtctcaaagactgttgatacagcgctgagtgcagtaatgctacttcccgagcgtcttccacctggtccaatgaatcctctcggctggtttggttgttttggtcgtcgcatgcctttgcccttagggaatcgtattctaagtccatgggtaggatggcctccgncccatataccatgaaaaacggcgagaaacccgtggctatgctcggtgttg

SEQ ID NO: 35947 - DNA, 420 bp, Zea mays
  unsure (1)..(420): unsure at all n locations
tctccattatagagcatgcttctagcgaatataaaattctcattntctaagtcatgctcattaattntagcactaagttgagctatgtgatcattttgttgtttaattaaagctaggtgatcatggatagcatcaacattaatgtctctacatctagtacaaatagtaacatgctcaatggtacatgtaaagggtttgcaaacatttaattcatcaaccttagcacgtaacatgacatttcatttctaagattggaaacaatatcattgcaaacatttaaactnttggccttagtaatcaatntatcattttctatcttaaggctagcaattgattcatttaacttgtcaatcttatcaatcaaattagcattatcatctctaagtctgataagagaatcatcacaaacatgtaaattct

SEQ ID NO: 35948 - DNA, 454 bp, Zea mays
  unsure (1)..(454): unsure at all n locations
tgcaagcttacccatgatgaggcatgtgaccagtnattagttctctattcatcaagcctacatcgataaagttcttaatcgactcatacggagacactacaccgagactgtcttctcatgcaagtcacccgctcggtctcatagggcaggcactacttaaaagtttagggttgtggtatcaaacattttccaaatcatttctaacttcacccaaagtttctaaatattatctaaagcttatccaaaaagtatggtgatttatggagntactaaataatttctaaaattccaggaaaatcggggtaagcccttttaaatattacataattccttgtttgaactaaaaatcataatactatntgtattaaatactatagaaacttaggagcctaacaaaattggtctcatatttctagcattgtcttgcgaatttctatggttttcctaattctgc

SEQ ID NO: 35949 - DNA, 370 bp, Zea mays
  unsure (1)..(370): unsure at all n locations
cactcaagctggcccgagctngagccgaggaccagccccaccggaatagtgcaatctcgtctcctctagttcgngaacccgccggagcacgtggaccgggtaaccctctgcaccatttctcaattccttgcgcacatggccctctacatcaccccgtggagctcctcgtgcactttaattgaaccccaccgctgtggtttggccggagcaagagccgttgacaacctccngcgcctgcgctcgtgtgcagggcagcttcaaccacctcagacgccgacccgcacaccgacgtgactgacgtgacctccccgacgtcactgaccaccccaccagagctctactgccgncgtgatttttaccacggttacta

SEQ ID NO: 35950 - DNA, 376 bp, Zea mays
  unsure (1)..(376): unsure at all n locations
agcttggacagnacatcggacggcgcgtctctatcatgntctatatgacgaaactccagacgctcgaatttatcttataactttcggacgacggcgcactattttcccattgaatcacttgaacaatcccattccttgagtatctgactgatgactaccagagaatctccatacaccatcagtctgttgacacccagagatatggcgatgtttaatccgtgtatcaaagcttcatactctgctgcgttgttataggccgggaatagcatctggagagcatacttgaagagctcgcctccatgtgcagagaatagaatgggtgcagctgctctctgcagtttcaacgagccatcaaagtacattcgccatacttctg

SEQ ID NO: 35951 - DNA, 310 bp, Zea mays
agaacacgtgataggtccaactaacgtgcatggcctttaattattaccttgtgcagctcggcaagcacgtaaacaagtgggaggagcacatcacagcacgaatgtgatgaccacttcaagacccctggagctgctgcatatggacctctactgacccggcggctatctgatcataggaaggagtgagtacggttcactgattgctgatgacttttcccgcttcacttaggtgtatctttctcaagagaagtctgaaacccaagggaccctcaagcacttcctcacgagagctcaaaatgactttgatctc

SEQ ID NO: 35952 - DNA, 459 bp, Zea mays
  unsure (1)..(459): unsure at all n locations
agcttagcatgatcgcaagcagccttctccaagatgggcgtggccccacgggcaccagcgaaagcacaaaaatctcttcgatcactaagaacttcttcgaaagcttcaacttcgccatttatccattgaaagatctcatcaggatttccacgaataaatttctactcgaaggaataggcttcaaccttagtaaagttattccttaaattcttagcgcattccaaggatatttcataacatttttcattggcagcacgaagctcatcgacattcttttgcgctcttgatctttcaatttcacatatctcatgcttcaccacttcaacttcaaacatttcagttgcttcagcaaccttcctctntagttcttgtactttggcttcatgtgagaagaaacaccttcgcaagatcaaaaagaagcgatgccgaagctaccgatgagggagcttcatagtgtac

SEQ ID NO: 35953 - DNA, 331 bp, Zea mays
  unsure (1)..(331): unsure at all n locations
tncggaaccccatactcctagccatttcccggcagacagataattctttgttgtctgggaggcagtataagaagtcatcttcgtctgtgccattgaatactaaggccccctttggatacttcaattctcgggcatagtgattagcttcaaaaatctcttcttcagataatctntttcctgaagcatgtcgtacaatataatcgagggctttgaaggatagcttcggggcggcagtgtcagtttcttcaaccaaagttggctctgccatttttgtttcttcggcttccaagggttttaccttggtgggctctgaaggcccagcttcagattc

SEQ ID NO: 35954 - DNA, 452 bp, Zea mays
agcttgagttggccctcataaagaacgtcatactgattataataatacggcaacacaactagtgtcaatcgatcaaatgttaaaacacgatctgtttaaacttgacatagattcgtcatacagcatgctttccagtagtccgcccgaactactgtctcaacagctcaagggtgcaacgatgtcatggatcaaacatgcacagaagtagagcagatgccagggggtgggggcaagaaaaggaacattaacatcaccagaaactcctgcatcacatagttaataactctcggaagagattatgagatacctatgacatgccgaaacagcatgtctatgaagcaaaaaccattcgactggtgtatgtaacacatggtctaactaatcagagaaaatactaataagttcagcggttataccagggaaccaataagttcatatgcttccatcacttt

SEQ ID NO: 35955 - DNA, 318 bp, Zea mays
  unsure (1)..(318): unsure at all n locations
ntagatcacaatatcgcagtaatntatcctggcttgctttgcttttttcctcccaacttaccatccaaaaataaagtccattaagtgtctagacgcggacctgatccaccgtagcagattgatacttttaatccatcccacactagtattgtcaagttgatgacataccaacaagttggattctgtcactccgccttttctagttttggtttcttaccacgttcacaccatcaactntctccttcaaagttacgatacttcccaatattactgcatttgtactctaactttattggttatataatacaaaattagggg

SEQ ID NO: 35956 - DNA, 417 bp, Zea mays
  unsure (1)..(417): unsure at all n locations
caactgangcgtgcgagcttctgcacgcacacagagactctcatgctatgatttctagtccgccgactaatcacgatcaggcgggctgattggctatctgggctccatagctggaccactcgactagataggctggtcgtcctggtcatccgactaatcgcttattatggcgactaatctgcccgattactgtttactattagttccgactagggtattgttattgggccattgtcagcccatctacagtatactttagaccaccctctcctctcctctgatatacctagcccgcaaacagtgcactacgtcgcctactctcctcttgccagcccgactattgtagcccttgcccttatatacacttggtcgcggtggctgctccttcatacctacagcttancggtggctacatca

SEQ ID NO: 35957 - DNA, 461 bp, Zea mays
actagctaaatctatatccttgaagctctagctgaataggtgtactattttcacaaactcaacaataaaatggtcaatcgtcgagatggccacattgtctacctatttatagggtctagactttacacaactttgtgttaaattatattttgcccatacttctcactctataacgcttcacattcgacggagtacatttatgttatttcgccacgtaaacgtattacacgtgtattctcttcactgaaactgtctacaccatttctttatcgaagctcattttgggcgtcgtcttcagccaaaagttctctttattaatgccgaagatttattttaacaccttccgcttcatgcacttcggacccaccgatgtattatgaagcatcttgatgagggttcaactggtagaggtgagattcctttacgtcatattgtcaaccctgacttgaacaccacctaaa

SEQ ID NO: 35958 - DNA, 469 bp, Zea mays
  unsure (1)..(469): unsure at all n locations
cacctgcggcatgcaagcttatagntttagggcctataatattaatttattgataaatcattaccggctgaagatttggtgtggaagacaattctgccattgaagactaaggatcgcaagtttgacaagtgatctctaagctgggaagggccttataaggttatacaggtaatttctgcaatgcatatatgttggaaactttactagaagacaagttacttgaagcattgaatgactgtttcctaaaattgtttgatcctattgtatggcagtaggcatagcaagccgatgttctcacatgaggttgtattccagaaaacttgtaaggggcaaggtgctttttggctagccaaactctattgaaaggcaggggcatattntaagcaccaaatatggcacatgcatgaccgaatggtctgaccttgcagtctggatggtcagcgattataataatccagactataatcat

SEQ ID NO: 35959 - DNA, 455 bp, Zea mays
  unsure (1)..(455): unsure at all n locations
cataaaactcagctatgaaggtctcatccaacatgtgcagaggcggtgttcttccttcccatgtnagtcttagctattaagcatgcatctagatcggcctcctctttcgaaaaatcaactaagtagagtttgccgtctaatacacccttaaatgctaatgaaccatcactcctaaagacagaaacatcaacatttgtaaacaaacaattgtagcccatgtggcacaattgacttacagacaggaggttataaccaagcgactctaaaacacgttcgaaatggagtgctcgttggtgatggctatcttgcccaaacccttgaccttgccttgattccatcttcaaagataatcgatcctacgaatccttcttctgcataagaggtgacatcttcttcttcccatcatgtggttatgcaatcgtgtcatatctacttgagccccggatgctaatctg

SEQ ID NO: 35960 - DNA, 387 bp, Zea mays
  unsure (1)..(387): unsure at all n locations
agcttgttccaatgcgcgcaagaccttgtattttactcttcaggcgtatgttcgaagggtcttgcgtctgagagcacaagcgcccacagtgcccaatgaaattgtcattgatgccatgatcaaggggcttcgaccaggacctactgctcaatacttcaccaggaagccccctcagactctagagaagctgcttcagaagatggatgagtacatctgggccgataatgatttctgccagagaagggaagaagcttataggttttctgagatgactaggggcttctgaggcagaatccaccctangcatgtcagatcaatccacaactctcatcacagtgatgatagaggaagccagttttataggccacaacatagctcacaatcttc

SEQ ID NO: 35961 - DNA, 282 bp, Zea mays
  unsure (1)..(282): unsure at all n locations
aatatctattaactcaagctatcaatcttaaatatattcaagatggacccgaagttacttaaatttattatattcaaaattcatatcatctcgagaaagattttgatgttgttgaaataaagaactatcccatgcagaaagatcaaggcctacaacatggaggaaaggccaaggatggtaacacttatgtcttaggtgcacgcatctntaaatatgttttctcatgcgtcttattgtccgtgttctgaaacctggggggtccctaaaacgacgagtgaaatt

SEQ ID NO: 35962 - DNA, 440 bp, Zea mays
  unsure (1)..(440): unsure at all n locations
agcttctccgccagtctgaacagatggtgncttatattctagagctcaatgcaagacttgaagccgaagctcaacaaaattcagatttgagaaaactattgacaagccttcaagaaaaatgtctggaatttagcaacaaatgcattcaacgcttaagaaaggtgttttactcagttggagctagtagtgaaaaattcaccccctcagctgaagatctaccgaaaaccttcaaacatattgagggggagattgacgagctctacgaagtcatatctgggcatggtgacttctgtgcctgtgtggcttctcgaggcactgctgcagctttcctgaaggctggctgcgatcatgcacagattgtcaataggtcacaattcactttatcaccatccatccgtggatgacattctctgatctcgccccgagtatctcgaatagat

SEQ ID NO: 35963 - DNA, 461 bp, Zea mays
  unsure (1)..(461): unsure at all n locations
ctaagcttgccaaagctcctcctttcttggaggatatctgttatgctctttatcattngccctgcatgacaaatctgcctcatcgccatgaattcccttctctaggctggttttcagtaaaattgcgagccctatgacctaaatttcaaagcagacagtcatgccttaattggctgtccataaattggaggctgaaatttactttcaaagataatgatacatgcccctccatattcttgcagagcagaataattatgatccctagtcatcactgtcagctgctcctctccaattccaaaatctcgtgggagaaattctgcataaaaagaacggtaatcaagtattacaaaagtagtattgccatttttatacaactacancgtaaatatgtcgtaggtcctcaaattagtagcgatcaatccttgacanagatgttttccatgggaacaaatgtcactgat

SEQ ID NO: 35964 - DNA, 431 bp, Zea mays
agcttcaagcccagcggaggaatcttgtgtctttcacgtctcgctcgggcgccggtggggccccctggccattctatacaatcggaaatttgttggcgctaccatgggcagcgacagaaaccttcgcttgatgcagtcgtgtaggatttgtttctgtggggacacacggatgggctggtggcttccgtacattaatggtgcaaggtaatttaagcaagcgtgacagcttttgtgactagtctacagacgaaggagcgtatatatttttttttctacgaccgactgtagattaagaagaattctttcgtccaaagcacagcctcttgagttgccgagtctgagatattttgctgatcctgatcccccgactgcactagtagtcctgatactgataggtgcttggtggatggcgctacacacacgacagctgg

SEQ ID NO: 35965 - DNA, 403 bp, Zea mays
cgacccgggatccttatagtcacctgcggcatcaagcttgagaaacatgtatgttatgttctatatgttctttccctagctgactgggatatatgaattccatagacatttatacatatgccctctgttaaacttgagttgggatgctcttgtgtgatcaatagaacaactaatgataagccgtatcaaattaaataaacgctctgtacttatggggtcgtatttgtgttgtgtaaatatacaaaatgtttgtcgtcttttactggtgttaaatgttgggcgctcgatgatatgtagttagctaacgctaatgtgtggctgcttatgacgtctcactacttagtgtttaatgtcctaacatgtacttaaagtatcttgcgctagttcattatattcatatata

SEQ ID NO: 35966 - DNA, 306 bp, Zea mays
  unsure (1)..(306): unsure at all n locations
cgcttttganatanatgtaagattatgtaattcgcttccgcatttctttatctccgatgttctataatgtctacaagatgggtgagacgttcctggtgaggtaaggaaagataccgaacttgtcaagtagttcaggggcacctacagggctgtctgatgtccgttggacaaggacaactgtaggtgggcctaattacttgtgaggtttcgtcacaggggtggccggaatcgtccggtccacgtgcgcaggcgggtgctctcgtctgcggcggttgttccggccgaaccacggcgatctagttcaat

SEQ ID NO: 35967 - DNA, 434 bp, Zea mays
  unsure (1)..(434): unsure at all n locations
agcttattttgtgccttagcacatgtttattttttcgaagcattctccgaagatcaacttcgtattcgattcgtgccattgatgcaatataatgtatgatgtgatgttatgcggaatgatgtgatgatgtgatgcaaaatgatgttgatgccgaagacacacattcacactcccccactggaacacaatctctgcattcccttaggaacgactgaaatctctntgtcgtttatttttcggcttcaccgcttatttttcagtgtaagttctgcatccccttaggaacatcttttgaacttcttcgccttctatttcgacgctataagttttgcatccccttaggaacgacttttgaacttcttcgccttatatttcggcggtatttagctctgcattccctttggaacgacttttgagcagaacacttacactgc

SEQ ID NO: 35968 - DNA, 339 bp, Zea mays
  unsure (1)..(339): unsure at all n locations
ggtntatgctcaaacttaggaagaaattggaaagggatttaaaaatggaaaccagtgggcaaccatatttttcctagcatgcctaagacatgtagttcacaagaaaaatctattcaaccatagtttagtggaaagaaattacactcactattattcaggaaaaacagagaannatttgaaaagtcataagaaaataatcataaggagaaaacacccataccttatgaatgactattcttttgctaagaagaacttacgaaaaatgaaagttctgtttgacatttttcaattagtaagttagttataagtgtctttttggtattaaaccttggaaaatca

SEQ ID NO: 35969 - DNA, 389 bp, Zea mays
  unsure (1)..(389): unsure at all n locations
agctcgatggactngtagactatatgtaatgtttgtttatgtttatgcgatgtttggacttgtgtcgtgtggtcttttggacgaatgtgtatgtgtgtaaactcgtgtttgagacttgtgtcttggactattgtgtgtatatatgtatgcagggtttaaaatataaaccctgttctaaaggcttcttatcctgtgagggagctagaatagggtttatattttaaaacataataattagaacacgaccaagccgacattcttaaggccacgtcagctaagtatatcatgttaccaacatacttaaaggcacgtggcaacgcgagcgattggcctattggccatttaagaacgtttgtcctaatggccgacgttcttaattattaagtacg

SEQ ID NO: 35970 - DNA, 237 bp, Zea mays
acaagtgggaggagtgcatcacagcaagaatgtgatgacctcatcaagacccctgaaactgcttcatatggacctcttccgacccgtcgcctatctaagcatatgaggaagtaagtatggtctggttatttgtgatgacttttcccgcttcacttgggtgttctttttgcaggataaatctgaaacccaagggaccctcaagcgcttcctaaggagagctcaaaatgagtttgagct

SEQ ID NO: 35971 - DNA, 397 bp, Zea mays
  unsure (1)..(397): unsure at all n locations
catgccacttacaagacaaacctataggaggatgaggattattatctataagtctgggnacctttgggtcatgagtactttcatgagagccttaatccttattctattcaagtttttttggttcctaagaaagatgatttttggtacatgtgtgttgattatagatccattaataatatcaccattcaataccgccaccctacacctagattagaagaaatgtttgatgagttaagtgattgttatattttctaaaaaattgacatatatagtggttagtggttaccaccagattcgtatggctttaggagataaatgaaaaattgcatataaaactaagtttggcatgtatgaagtgttagtaatgacttttgggataactaacgcacctagcact

SEQ ID NO: 35972 - DNA, 396 bp, Zea mays
  unsure (1)..(396): unsure at all n locations
agcttggccatacttgcttaactgagagttcacagtctataggtcatggngaagctaatgcgcttgcccgtttgaactctaccatgtagggttaattggaacaccgctgtgtcattctgtgaacaccaccgagggcagtgtccacgtcgactaaccaaaccgtatcttcttcgggcgaacttgggtgagcaccgtatgtttgatgtattactggtacttgttgtgaccttggattgaaccctaccatgctcgagaccttggtacacctcactggagctcatcgatccttcttcaacgtggctagtgagactctatgtggtttgaggttgactaacttaagggaagtangaggtaagtcttacggatcacattggtatgctcggttcatagcggatg

SEQ ID NO: 35973 - DNA, 386 bp, Zea mays
  unsure (1)..(386): unsure at all n locations
aatgaattaagctgtcgatgtatgtcttatagccttcgggggtatntggtcctttattggaacgagagatttggtacaagagcatattgccttcagagtatggccgctcgcggagaaatgggaaatgccgcaagaaaccataaaggaggctgacgaatgtggacttatcaggctgaaatatactttcanattcggagataaattcgttgagccaaatgatgactggctaaaaagcattgaaaatttaagtgatgaactgcttgnggcttactcgaaggccgaagatactgcattgtcagcagccttcggaggccgaaaaaagaaaaggctgaaccgggtgtttgacgcgatcgggttngtctaccctgattatcgctatcccattc

SEQ ID NO: 35974 - DNA, 463 bp, Zea mays
agcttataacaggaggatagaagcaagagctctatttatgtcataatagaaggggaattatacaagcgaggggtctgttccccgttactcaagtgtttatccatagccaaaggcatagaactgatgaaggaaatacacgcacgcctgtgtggatctcacattggatctatgcctttgctcggaaatgtttttcgttaaggagtttattggccaaaagcagcttctgatgcagcggatttagttcaaaagtgcgaaggttgtcagaaatgcgcaagagatcaaaaacaaccttcgtctttaactcaattaatacaacccacttggtcgttgcaaaggtggggccttgatttgctaggtccattaccaccagcatatgggaacttaagatatattgtagtggcagtggaatatatttctaagtagatggaggcacagccttagccacaatatcttttggtactat

SEQ ID NO: 35975 - DNA, 379 bp, Zea mays
  unsure (1)..(379): unsure at all n locations
tagaccgtgtgcagcttgttgaacacggaaactagtgggaagatcgcatctctacaagaatgtgatgaccacttctagacccctggagctgctggatatggacctcttcggacccgtcgcctatctaagcatatggggaagtaagtatggtttagttattgctgatgatntttncngnttcacttgggtgttctttttgcaggataagtctgaaacccaagggacccttaaacgcttcctcacgagagctcaaaatgagtttgagcttcaagtgaaaaagataagaagcgacaacgggtccgatgtcaagaaccttcaagtggaagagttccttgaagaggaagggatcaagctcgaattctccgctccctacacaccc

SEQ ID NO: 35976 - DNA, 207 bp, Zea mays
  unsure (1)..(207): unsure at all n locations
cagcttgtcaagcaggttgactagtgggaggagcgcatcacagccagaatgtgatgaccacatcaagacctctggagctgctacatatggacctcttctgacccgtcgccttctaagcataggacgaagttagcttggactacctattgttgatgacttttccccctcactngcgtattcttttgcctgataatcttaacccaagga

SEQ ID NO: 35977 - DNA, 375 bp, Zea mays
agcttaggttaccatgtcagagaggctattatactagactacacaaatgcctacctcttctcgtacaccttctgtttgaatagaacggcatcgcccctacaaacatcacctgcactgagtatgattattgccatgcataattttctatgcagttaaatgaaagtttatttccaagtaagaccacacctttacagttgatacaaaaggatgaccgaggataaattctccttggatccgcatctttgaacctataaagaaagggttaataaacattacatgtgtcgatgtgtgtcaagttctgaaaactgtcacagtgctacatctaggcacatcaaacgaagcgagattaagatcacttaggtgaaccctgtgcat

SEQ ID NO: 35978 - DNA, 421 bp, Zea mays
  unsure (1)..(421): unsure at all n locations
tcatgatgtctgngtttgggtcaagtatactctgtctttgagcacccatcatgttgcagctcgagaacgagctgcttgtccaggaggggtgtagtgtcagagcataatgaggcccaccaaggggctgctgcagcagcagccatgggccctccaaggggattagataaggatagttagagataagattagaagattagttgagattatttangagattagttgagattatctaagaaggttatcagttagtagtttgttgagagcttttangagagttttaaggagataaggatctctagctagataggggcggtagctggcctatctatgtaatcaatggatgagacatanagcangcaagtgttggggacttgttctcanatgatatgagttaagaacaangcaacacanaacattaatg

SEQ ID NO: 35979 - DNA, 352 bp, Zea mays
aagaaatgtatgcatgattaattttacagacaattattctatatctcctccgtcctaaaataaacccacatcacactcaaactttttagagtttatctacaaatatcagaaatgtataatatttgcatctctaaataactatagtataaaaggatattctatatctaataaaacgatacatattatacatcatatatattcgattttatataaattagttaaactctaaatattgtacgtctggaagtatgtagatatgcgtttgagggagtctctagagacatatatgataggctgtctccacagcatctttaaagaatattctctgctttacagtacactctaaagatat

SEQ ID NO: 35980 - DNA, 387 bp, Zea mays
  unsure (1)..(387): unsure at all n locations
agcntgctgcttggtgtgcatgcgagagctactatgtatcttgcattatgtgcaccgcggcggaactgcgaattcaatcataccggccgtctattattggttgtattccgaatccgcgccacacccgtgctggtatgggtgggcgcacaggcatatagagacagggctgtttatgacatcaccccaacccattctttttttacgtatataaaaaaaagagagcacaccctaactcagcctcaaatcgcgttggggattaaactgatggataagctgacactgatccgccgaatcgaaaggtatggaaagaatacactcgacaacccaccacaaaatggctgaactgagatcgactgccacgcgcaccgtacagcactgcaccgtaca

SEQ ID NO: 35981 - DNA, 359 bp, Zea mays
  unsure (1)..(359): unsure at all n locations
ctcagcttgtattggctggacacaagagntgataccctattatttgattgttctatcaatatagggaagttaataggtgtcgagaatgttctttgtcaccttaccaactaagaaaaaatgggttgagtagttattgtttgggcaaatccactttgactcattttataagttacatacctncatactacctcttgttactgcgtattcatgtggatgcacttttcaatgatacataagaaaagtatttcaagtccttatagggaaggcattggttcattcactgtattgaatacaaatataagaaattgttccctaaaaattagacgtctccctcaacctttgggctcctctttggtcaa

SEQ ID NO: 35982 - DNA, 362 bp, Zea mays
  unsure (1)..(362): unsure at all n locations
agctncagatatatctatattgtggatttgctttgaacagtccaattcctcatcggtctttctggcagcttcctgactcccatgaatatcaataagtccctgatcccaaggtatcttcatgcaaagatctgctggatgaagaatcgcttcgaaagcattgagtgttccgcgaccgaagatagcattgataggatactccatgtcgaccatgtcaaacacaacttgctcactccttgtattgttgatgaatccgaacgtcactggcatggtaatcttactgagcgctacaatatgtcttgctccgacaccacaaagagggtgcgcatcatcatgaatctttgctgaagcctctgcatttgtct

SEQ ID NO: 35983 - DNA, 344 bp, Zea mays
  unsure (1)..(344): unsure at all n locations
acctcgaaaatactatagattatcgataatgtaagggattaatgtaatttacacggctgcgtccgtgcctataatagatgaacagtttctcgtactattcggctgactggattacttttgcccaccctatttttctttcttcagccgaaggacattgtaattatctttgctaacaagtatataatatataatataatgttaccaaatatgctattnttgtatttgttgacgtcttatttttacatgatcatgaagacgtcttatgaactcgtctaatcattatttgaaggaatatgataaagacaaggctttgaataacattatgtgctgtctgatatacattg

SEQ ID NO: 35984 - DNA, 368 bp, Zea mays
acaaacgagtgcctgcgcgtgaccgcgtcaccgggtactcgggtaaccacagcatcggtcaggacatcacgattagaacatatggagcctgatcggatggccgctgagatatgataattctgagcgtctgaacggatgtaagttcatagccttaacatagaatatgttgcatctattcatacagattgactctttcatacaaacacctagatatgatctcaaataaacttaacgcccgcggggattcaaaataagatgctacggataaccaaccataccgatagcggatgaatacagatcagcttgcttttcacgacgaacgcacagtggtactttacccatatgcatgacgtgcgttaacagatgac

SEQ ID NO: 35985 - DNA, 359 bp, Zea mays
  unsure (1)..(359): unsure at all n locations
atgcttgaggcaattggagctatgtgttatgtctgatatgtcctagcgcttatgagatgagtggaccattcttgaagagagcaaagcacaaggtattggatagattcaagaatcaccatgaatcatggcagctcacacgttgctccgtgatgacagatgcatggacagacaggaagggtangggagtgatgaacttggttgtccatagtgcacatggggtctgtttcttagattcagtggactgctcagcagtnaagaaagatggaanatatgtgcttgaccttgtggacagatacattcaacagataggggaagagcactgtgtccaagttgtgactgacaatgcaagtgtcaacaca

SEQ ID NO: 35986 - DNA, 420 bp, Zea mays
agcttcaatgagtagaggtggagtggacgtcttattgtttgcatctcaaaagaaccttatatatatttgaagatagtccatttaatgatttacaagacctacctctgttaggatgatccttatgaaaatagatatgctcttgttgacaggcatatacttctgtgaatcaaagttgttctcctaaaatcgttctttaaccgtggcaagaaagaatgttacgacatgcggtgacttcttcaccagcatgcatgttcagcgcgagggacaaataaatggatagaggcaaatacacaggatggtacagtcacacgataatagctatgttgcacgtcaagatacacgtccatatcctttgttaagaatggagtatgcatgcatgcatgtatgcttgcttgctttgtagctactaagtaaagtcat

SEQ ID NO: 35987 - DNA, 427 bp, Zea mays
  unsure (1)..(427): unsure at all n locations
tgcgacactaagatactaagctngtaccgctctgcatngngtgccatctgatcccatatccaatcattttcctcacgagccaaccaaacaaaacacggtaactaatctgcagttgatagcgttgcaagctgctttcatttccgttcccgctaccctacccaaaccaaacagcacctacatggtaacgtaagcttcttttttttattctatttcaatacaatttacaatttcaaacttgtttaaaatgcacaaccaagaaacactcggcatagatgcaaattcatgattttatttatcatttatttattaatttaatctttcatgatggcttataaatgttaaatgagcaagaaaaatcacagttgaaaaggtattccttatctcttatctgttttaatagaaaataacttataatgtacaatctcta

SEQ ID NO: 35988 - DNA, 392 bp, Zea mays
  unsure (1)..(392): unsure at all n locations
agcttgctctaccgatgcaccatcaagctcaatgcatttgggcattgcaaagacgaagctaggcagccatactgatagagtatactgccaacagaagaggtaaacaaatcacagtggatctatgggcaattgcggggctgacctganaggaangcnacaggggagatgcatggttgaaagtggaaggcaagagcgacgagcccgagcatgacccaggcgatggccgacacaagcaccagctgcacgacgcccctgcatgacaccatccacatcgttgcagtgtccgtcttcgacgccacggtcatgatgctgccgctgcttgatactgaatcgaaccctcagatgttagattcgaacagggagagcgacacatgaagaggtcggcgttgtgc

SEQ ID NO: 35989 - DNA, 388 bp, Zea mays
  unsure (1)..(388): unsure at all n locations
tttatggctaactgtcccgacatgatagtgatcaggatcaatgtatcaagaggcgagaaaagaagaactataagaaggcaaagggcgaggctcatcttggcaaggagtgggattcggattgctcttcgtgcgactccgacaatgaaggactcgccgccaccgccttcaacaagtcatccctcttccccaacgagcgtcacacttgcctcatggcaagggagaagaaagtaagcactcataatactagtacttatgcttcttcaagtgaggatgagtctagtgatgttgatgagatagattactcatgcttattcaagggattagatagaaccaaggtagacaaaattaatgaattgatngatgccttgaatgataggaatatactttt

SEQ ID NO: 35990 - DNA, 459 bp, Zea mays
  unsure (1)..(459): unsure at all n locations
agcttgtaccttanaacaataggatacaagaagctggagtggttgtctgaaggcttttgaactgcttgaagcattagtgtagctatggtgcttttgtgactgatcagctctagagcagctagattgatgtagttgtggcttttgaactgcttcaagctggagtgatgtcgctgtggttcttttgtgactgatcatctctggagcttttgtgaatggtctagctagctatctgtaaatgatctagttgtgaatgatattataattgtgatgcttttgtgaatatataattgtggcgcttttgtgtttatgtgatggatatattactgcggtatactgataaattgtgtatgtctttatgatttgtgtataaaaatctgtgatctgtggtgcttaattaaatgtatattattattaataacaactgtaaaagggtgactttctgttggttgctaatgtata

SEQ ID NO: 35991 - DNA, 398 bp, Zea mays
  unsure (1)..(398): unsure at all n locations
aacagtgcaatagcaatgaatgctgtgtttactntacacctacccgtctgtttatatagtgccgtaggggggaaggtgaatcgtcaaggtctcccgcaccgagcaaacagctacccgcactcgctgaacggtgggccacaaggtccaagaaggtgaattgctgcggcgcgcgtaactgctgcaagatggggccaccgcgcgcgcggattattctaatcgtttctcgccaacgagctcagggaaggtgtttttcggatcttcgtcatcccgaagtctagaagacttttcacagatcaagctcgttatgaaaaacgatctagcaccgcgaaggggctactgttgggggtatgcttcgtagccgaagatcctaaagaaagagaacacctttggcaaattct

SEQ ID NO: 35992 - DNA, 386 bp, Zea mays
  unsure (1)..(386): unsure at all n locations
gagcttctcttggacaagagacgcacttaccgctgatttctaanctgcgacatataacaacagacgagctcctggcgctggtggagttaatgtccttagatctatctaatactgctttagctcgtcgaaggctttctgctgaactgatccccattgaaaaacttccgctgacttcagcacttcaaaaaatggtgcatagtggtgcgtcctgaaaccgaagttgggcccgcagcgcccgcggaagctgaacctgccgcaactgagcaggcggccggacaagactttccagatgctagcgcatctctggagaacgatgtggctgaataagccaaatcccctatgtgggggacaaatatcccccaagtccacctgaaagacaagatgcc

SEQ ID NO: 35993 - DNA, 442 bp, Zea mays
  unsure (1)..(442): unsure at all n locations
ctaagctttncacctttttcttgggaaanggtctagactagccatctgtttttttgtttgttttgnngttcttattctcactgtcacttgcattgactnttttgcccttgaatttgttcttcttacgctttgagaattgatgatagagatggtcaagcccatcatagttataatgatccatttcatagatgggccttcccttgctacctatgagaacttcttccttgaatcaaatttgatgcctcctcgattgagcttctgtcatcttggtcgtgttcaccataagcatgagagttacatcgttgactctattgtcactgagatttcaatatcttcttgaactttaactttgttcttctcatgaatttcctagagagacatatccttcttatttgaagaagagccatcttcatcatgaatgtgcatgtacatctcatgagca

SEQ ID NO: 35994 - DNA, 308 bp, Zea mays
cattctcacatgtgctaagcggcgaagccacagacgagccatgcgagtcttatccattaagcatgcatctagaccggcctcttcttttgcaaaatcaactaaataaagtttgcgcgctaatacaccctctaaagctagtgaaccatcacttcttctaaagacagacccatctatatttgtgaacagacagtgatatcccatattgcacaattgacttacagatagtaaaatatattctattgactctactaaaaacacactatagatagagtgcgtattagaaattggcatttatctaaccgctttac

SEQ ID NO: 35995 - DNA, 452 bp, Zea mays
  unsure (1)..(452): unsure at all n locations
tcttcgccaatctgagcagttcgaacgagagatgtctgatcttattgctaaacttgaagccgaagctcaacaaaattcagatttgagaaaactattgacgagccttcaagaaaaatgtttggaatttagcaacaaatgcattcaacgattaagaaagatcttccactcagttggagctagaagtgaaaaattcaccccctcagctgaagatctaccgaagaccttcgaacatattgagggtgagaatgacgagctcgacgaagtcatagctgggcacggtgacttctgtgcctgngtagcttctcggggcactgctgcagctttcctaaaagctggctgcgatcatggaaagatngtcaatangccaaatttcactttatcaccatcaatcctagatgacattcctgatctcgcccgaagtatctctaatagatttgtaaaaatgatatgga

SEQ ID NO: 35996 - DNA, 442 bp, Zea mays
agcttcacggcctcaccaggaagctatctgatttcttggatcgaacggaggaggacgggaaaggggctggccacggtggttgctcttgggcggcactagcgggtcgcggggaggtcgccggagctaaaggctggctcgggaaagtcaggcgaggtacggaggaggcaacggggaatgcagcagagcactggggcgggctttatagccgtggagcgggcgtggtcacgggcggtcgtgggcgcgcggggggtcgcgcacgggcgtgctctgagcgcgcccccagatgtcagcccgcgtcgaacacgtggaagctcgcttctgccatggttcaacggcggatttgagcaccatagcgtgcgtatcttgtgcaagtcactgtgtacggtcgcttccctgctccatatcctacctatttgctgtgagttccaagtcaatatatggt

SEQ ID NO: 35997 - DNA, 336 bp, Zea mays
  unsure (1)..(336): unsure at all n locations
cttcttccanacagtgctggacatcccttcgcgttttgcttgcgcgaatganacccttatccagcaattcttgcgactgctgtcttaactctgccaactcagcgggtggcattcggtatggcctcttggacattggggtcgttcccgggtgcaactcgactgcgaattcaatatcccggtccggtggcattcctggctattcatcacggaagacatctgcatactctcagaccactgggatcttcttatgggtaactccgtcatatagaaggcacatgactgataagaactctgactaggcagaattagagtgaaattctcgcacaatggagaatt

SEQ ID NO: 35998 - DNA, 422 bp, Zea mays
  unsure (1)..(422): unsure at all n locations
agcttcgnttctcagtctgataacttcggagcgtaaattattaaacgcaatttcatagctntcatcttcggcgctcttttgggctcttagtgcgttgcttaagatcaggccctatacgaaaaagaattcatataagacaaaaggaatgagttgcgtaaaaataagggggtttttcaagtgtctaattcctataccttcaggctgttgtacgcaagactgtctgcgagatcttctttcgtcatggcgcttaatccagattcaagcttcgggaaaccaatacttctggccatttctcggcagacagatagctctttgttgtcaggcaggcagtataagaagtcatcttcattcgttccattgaatattactgccccctttggatatattagatcctttgcataatggatggcttcatgagtttc

SEQ ID NO: 35999 - DNA, 386 bp, Zea mays
  unsure (1)..(386): unsure at all n locations
tactaagctttaggtttntaactgggttaggtgtacccctttaaccactatttatggttaagtcctttaaccagcgtttcatttgcaaaaacattaaaacaatacaacttgtttgaaatttttgcctagcgaatgcactctacatgtgtcaaacatatgcaataccaatgctcatgatgtcatgctcaagtcttagttatagtaacaccaggggtgttacatccttccccccataaaagaatctcgtcccgagaatacgatcctatggtaggtaatgtgaaagaaaacacatcacatttttatttctttatttctggtacaagacacgggtaatgtggnggttacttctttattataacagctatacaggctttacaatttacatg

SEQ ID NO: 36000 - DNA, 350 bp, Zea mays
  unsure (1)..(350): unsure at all n locations
tcacctgccgcatgcagcttcggccacagcaaagattttttgttcgttacgccaagggcagaggcccaggggcttctgtggaatgttatgagatcagccaagaaaaatttattgcctattctatggngaagacaagggccatactcaccaggatgtgtcacgttacgatccagaagcagaaggagatatcagaagcagctgcgcaacaaagtcagccgaagcaggtcatgcatactgcttcgtatcattcgccttatattccagaatatgtaggcaaccaccctgcagcttctgttgcttcggcaagccaacttcaagcattttggcagcatcctccaccaccaccaccg

SEQ ID NO: 36001 - DNA, 315 bp, Zea mays
aactaagctcacggctctggcaagctagccgaagcactggcttgtccacttgatgtctggagtgggctggccacgatggccgaagctctggcggcaatggcgggcggaattgagctcgccggagctaagggaaagtggctggcccgtgagggtgagtgcggggccaattggggcgcgccttggaaggctttatatgcactgcgcggtgcacgggcagtcctggaccggcgagcgtgctctggcgtgcactgggaggcgcggtgcgcgaacgggcgtgaaccgggggtgtcagccacggtcgaacacgtgttcccg

SEQ ID NO: 36002 - DNA, 255 bp, Zea mays
  unsure (1)..(255): unsure at all n locations
atagcttaaggaacctttagatacgagtttttttttaagatngaccagccgcagaacagtgggcctattacctgacatctgcaccgcaggcgtgactctccatgatcattcgccacgttcatactcgtggataactgctggatatgtatatttccttcctgggtctttgcggaaattcaaccaaactaaggatctacacgctaaaggctgtaagtaaaaattagacatgacgattaacttaatgagctctagaga

SEQ ID NO: 36003 - DNA, 363 bp, Zea mays
agcttctatagggagaacacgtaatatgtctaactaatgttactttcaaaaaagatagaccttgtgcagcttgtcaagcacggaaacaggtgggaagctctcatcatgccaaaaatgtgatgacaacatcaagacccctggagttacttcatatggacctcttcggacccgtcgcctatctgagcataggaggaagtaattatggtcttgttagagttgatgatttttcccgcttcacttgggtattctttttgcaggataaatctgaaacccaagggaccctcaagcgcttcctaaagagagctcaaaacgagtttgagcttcaggtgaagaagataaggagcgacaatgggtccgaattca

SEQ ID NO: 36004 - DNA, 405 bp, Zea mays
  unsure (1)..(405): unsure at all n locations
cttcatccctacatgtgctaagcggcgatgccacttccagcccatgctagtcttagctattaagcatgcatctagactggcctcttcttttgcaaaatcaactaaataaagtttgccgtctaatacacccttaaaagctagtgaaccatcacttcttctaaagacagacacatctacatttgtaaatagacagttatatcccatatggcataattgactaaccgatagcannatatatccaagagactctactaaaaacacattagagatagagtgctcattagaaattgcaattttacctaacccttttaccttgccttgattcccatcaccgaatataattgaatcttgggaatccttgttcttgacgtaggaggtgaacatcttcttctcccccgtcatatg

SEQ ID NO: 36005 - DNA, 369 bp, Zea mays
  unsure (1)..(369): unsure at all n locations
agcttgatggcgctggtcttactcgtccaacttcttcatgtactcttcaaaatcttttcgctcagcggccgataaattatctatagtcagtattgtggtgctgcctacgggaacgtcattgagatctttagaatcggtcattgtagcctgattttaatagatctaaattctcttgtccctagtggagtcaccaaaaagtattgtggtgcctnttcgacccaaacaccaatgatccttatatcccgctcacggggattcgataccttggggacctctctgcgaggcactggacggtccgcgatatgcaccatatcgtccacatgtaggtcagtgtcaagcagataattacgctcttctctgcaggtacat

SEQ ID NO: 36006 - DNA, 381 bp, Zea mays
  unsure (1)..(381): unsure at all n locations
tctgtgttcgtccacttgcaaacaaactctcaaatagcattcatcttaagtcagaaatgcctgaaaccgatgcagctngcatacatgactaanggtgatcactataccactactaacagagcaatcgacttaagtcggaaacaccttaagttggtgcgacatgctcacgcatacaagactaagggtgattactataccctactaacagagcaatcggcttaagtcgaaaacgccttaagtcggtgcggcatgctcacgcatacatgactaagggtgattactatagcctattaacaaagcaattgacttaagtcagaaatgccttaagtcggtgcaacatgatcacacatacatgactaagggtgattactanaccctact

SEQ ID NO: 36007 - DNA, 326 bp, Zea mays
  unsure (1)..(326): unsure at all n locations
ctttctgactgagagagaaacctcggatttagttctactatnttagcttcagcttctgccaataagccttcggtttgttgaagctcatactccttcttttaagagcagctgattgggctcttattttgctttctaaactctcaattataacttcctgttttttatcttccacatcttgctgaattttcaaagctttactcanaagcatactctgcgcacaaacaaccttcggtagaaaacatcttcgttgttgaaacaataaaagttaaagaaaagattaccttggaattggaatagaatacactaccaacgatgtgctgtcatcg

SEQ ID NO: 36008 - DNA, 388 bp, Zea mays
  unsure (1)..(388): unsure at all n locations
tcgtgggcgaataaaacctttgtccagcaattcttgaaattgtttcttcaattctgccaactcagcgagtggcatctggtaaggcctcttggaaataggtgtcgttcccggctgcaacttgatggcgaattcgatgtcccggtctggtggcattcctggtaattcatcaggaaaaacatctgcatactcacagaccactggaatcttcttcacaagtgactccatcatagcaaaagcacacaatngagtagaatcttggctaggtagatataacaccaggtcttcggatgtatgagaacggatcttcagagctcttgcagctacatccaacactactcgatgatgagtcatccagtcngctccagaatgatgccatacccctctatcc

SEQ ID NO: 36009 - DNA, 415 bp, Zea mays
  unsure (1)..(415): unsure at all n locations
cacaatcctcgaggacaccgggtggtgtaccaggtcggccctagagccggagtggccccaaacatctagagatgcaaaggcagggatgtcgtccaatagtggcagagcgaggggtcgcgacgaggaccggaggaacctggtgcccacgaagacattgtggcagctgcagtcgagccgcagagcctgccagccgtgggacgatgcagaacagttcccaaagcagattgtgacaccagattcgggtgtagaaggagaggatccanagccaagcgacaaactgtaggaaatctgatggtcgtcangggcttgaggatggggaanggtggangatagcgaaaagcgaaccactcggggtgcacctcgtatgagcggggggtggagcagtcctgcatccaccaaggcctgcaagttttcg

SEQ ID NO: 36010 - DNA, 299 bp, Zea mays
gtctgattggcttgctgtccctgcgcgcccgctgatgcaattactgtcggtccgcccatggtcacgccgactgccacgcctgtccccacggctgacagacccgtaacctccgcacttaatgtctttgttgggtcatgcgcacggtgcctcgagtcgctgcattggttttgaaaacttatcttctcagtctttgctatggcccgaggagacgcggcattggcgcgagcggcggtgcgacttctctgcacccagaaaacagcacgccgggtgcctgacatgtgggcctaggccttcatgct

SEQ ID NO: 36011 - DNA, 434 bp, Zea mays
  unsure (1)..(434): unsure at all n locations
gcagctttaccacatggacgtgaaaagtgccttctttaatggaccaatcaaggaagaggtctatgttgagcaacctcccggctttaaatatagtgagtaccctaaccatgtttataaactctcaaaggtgctttatgggctcaagcaagccccaagagcatggtatgaatgcctaagagatttccttatcactagtggcttcaaagtcagaaaagacgatcctactctctttactaaaaccattgcaaaagatttgtttgtatgccaaatttatgttgatgatatcatatttgggtctactaacaaatctacttgtgaagaatttagtaggatcatgatatagaaattcgagatgtctatgatgggggagtngaagtatcttctacgatttaaaggtaagccactccaagagggcaccttcatcaaccaaacca

SEQ ID NO: 36012 - DNA, 488 bp, Zea mays
  unsure (1)..(488): unsure at all n locations
gcttgtaaacgaatataggatctctcaatagagactcgttgatccaatntataatatatactgtactattattagttatgctatacgatgtagatatttatgtattgtggtacacagcgtaaaaaatatgtttcctactgtatacgcacaaatttatgatgacaagaatgtgcgttgaaaggaaaataaattgtctgcaagaaaacaaaaggtttgatttaaaattctttatttcgttcataaaagtaggatctctataacaaccatgtaggtaggatcgttggaaccagtttatgatatatactgatactaattatgctacacgatatagatatttatgtagtgtggcacaccgcgtaaaaaagatctattttctgctgcatgcgcaccaatntaagatagcaacaatgtacgtttgaaggaaagtgattgtcatgtatggaaacacacaaactgatttaaatgcttaaatttcttcataaatatcg

SEQ ID NO: 36013 - DNA, 424 bp, Zea mays
cttaatgccaatttctccccttttatatatctccaaataggatacaaagaatataaaggatagaaattatgattaagcgagatgtgaacacactatcatgaaagggatccttatatggcacaaaggtaatggataagtgtcataagtgatgtacctttgtcgtttaccttttcaaggggtttccagacttgtgttggttttagaattcatttgtaagctcttgttggcataattgtgacataagtccaagatatcaaatgaagattgtcatactaactgaaagataaatcttgatacctggagtctaaatgtcacctatcattttcttatcacaacaagaggcaacatgaaaattgcacaagtatggattatgcaactagtgttcatgtatgaaaaatatcaattgaaaacaccatttatacaa

SEQ ID NO: 36014 - DNA, 369 bp, Zea mays
gtagcataggctaataatatgcgatttgattcaagcctatctacgggtgcataggtttcaccaaaatccaatccttcgacttgtgaataccccttggccacgagtcgagctttgttccttgtcaccacaccatgctcgtcttgtttgttgcggaagacccacttggttcctacaacatattggtcaggacgtggaactaagtgccatacctcgatccttgtgaaattgttgagctcctcttgcatcgccatcacccaatccgcatcttggagtgcttcctctaccctgtgtggctcaatagaggaaacaaaagagtaatgctcacaaaaatgtgcaacctgagattgagtggttacccccttatgaatg

SEQ ID NO: 36015 - DNA, 432 bp, Zea mays
  unsure (1)..(432): unsure at all n locations
aacttctaagggagaacatgtgataggtctaaccaatgttcatttctaaaaagatagaccttgtgcagcttggcaagcacggaaacaagtgggaggagcgcatcacagcaagaatgtgatgaccacttcaagacccctggagttgctgcatatggatctcttcggacccgtcgcctatctaagcatanggggaagtaagtatggcctagttattgttgatgacttttcccgcttcacttgggtgttctttttgcaggataagtctgaaacccaagggaccctcaagcgctttctcaggagggctcaaaatgagtttgagctcaaagtgaaaaagataaggagcgacaactggtccgagttcaagaaccttcaagtggaggagttccttgaagaagaagggatcaagcatgaagtcttcgcttcctacacacc

SEQ ID NO: 36016 - DNA, 377 bp, Zea mays
cggcggcatgacgaaggtgatgcatgccgaatattatctagctcattatatggaagtgagtgcaccggatgtgggcaccgatgttggggacttgttctaccatgctctaacggtagaacacagccacagtatcatgttaaatatcaaagtcctctcgatcctactagggttattaacctttgcgaataagggaaactggacgaacgttatgaatgtcataccttcttaatcatgataggaaatactataagtgtatacaccttaacgctgaagataacatgatgactctgcacatcataatactttatcctatataacgactgatataacaacaccaaatacagatgtccttttgcttcgagagatatggtcaagtg

SEQ ID NO: 36017 - DNA, 385 bp, Zea mays
ggaagcctctgtctttgccgaagactccaattccctttcaatatacctatgactacgtttgaaatagactcgaaaacacattagtcatagcatataaaagagatatgatcaaaagtatataaatgagctatgtgtgcaatctatcaaaagaagttgcgagaatcaagaatattgagctcatgcctaagtttggtaaaagtttgttcatcaagaggcttggtaaagatatcggctaattgatctttagtgttaatgtaagaaatctcgatattccccttttgttggtgatccctaagaaaatgataccgaatggctatgtgtttagtgcggctatgctcgacaggaatgtccgccatcttgattgcactctcattatcacatagca

SEQ ID NO: 36018 - DNA, 353 bp, Zea mays
  unsure (1)..(353): unsure at all n locations
cacatcttaggactaaccaatgtttattttgagaaagacaggatntgtagcgcatgccaagccgggaagcaagttggcactcatcatccgcacaagaacatcatgactagtgacaggccactggagctcctacatatggacctattcggcccaatcgcttacataagcatcggcgggagtaagtaccgtctagttattgtggatgattattctcgcttcacttgggtgttctttttgcaggaaaaatctcatacccaagagaccttatagggattcttgagatgggctcaaaatgagttcggcttaaggatcaagaaaattagaagcgacaacgggacggagttcaagaactc

SEQ ID NO: 36019 - DNA, 404 bp, Zea mays
agcttgaaccgagagctcgcgtcaccggataagccaaatcgcgctcaccggagttcaagaactcgccggcgcgcgtggaccgggtaaaccccttcaccatttcccgattcattgcgcgcatagcctctgtgtcaccccgtgaagctcctcgtgcaccctaattgacctatgccgccgtggtttggccggagcaggcaccgccgtcgatccccgccgcctgtgttcgtggccaggggagctccgaccacctttgacgtctacccgcacatcgacgtgaccgtcgcgacctcctgaacatcgtcgaccacctcgccggacctccctcgccgccggtaagccgcgccaccctttctttttccgcggctactgtttcagttaatggagggactgctggtgagagggag

SEQ ID NO: 36020 - DNA, 344 bp, Zea mays
caaatattcatttgataaagatagaatttgtagcgcatgccaagtagggaagcaagttggagtccatcatccgcacaagagcatcatgacgactgacaggccgcttgagctactatacatggacctattcagcttgattgcttacataagcatcggcggaagtaagtactgtctagttatcgtggatgattattctcgcttcacttgggtgttctttttacaggaaaaatcacaaacccaagagacattaaacggattcttgagacgggctcaaaatgagttcagattgagaatcacaaacccaagtaagcgacaatgggacggagttcaagaaatctcaaatc

SEQ ID NO: 36021 - DNA, 420 bp, Zea mays
agcttgtggaggacctcttcttcgaagcatatatgtttctggatgagaagaagtcacccaagttccgttgatgaagcactataagaccaatcaaggaaggaatccatgtgggagttcacaagagaaaggtttgcgtgttggcatcgatgcttcttcaataagctagctgccaagcgaaacctaaaaggctgaagatgatctttgagtagccagaatcagcgtttgcaaccggatgctcctgataggccagattttgttgaagctctatctcctcgaagagtctgtaaagtgaagatatgtagctgaagtaaagctatacccataacccttctaagtcgaatcttgaggacgagattccttttaagtggcgtagaattgtagcatcccaaaaattcaaatcctgaaattttctcaaactcg

SEQ ID NO: 36022 - DNA, 341 bp, Zea mays
tcttctcggactgcggcgtggtcagtagtgttcaacgcattaagcttcttctcgggctggtctcggacggcggcgtgtggaggctggccgtctgggagggagccgccgagccgtggcctctggactctggaggctggaccggcaccgctacccgctggagagagcagttgagcagagagtatgagaggacggcggcgtttgctacggctcacggctaggagaccagagagcaggaggacggcggcgtttgctactatgctacggctcacgcgcggctgagagagagcatgaggacgactgcgtttgctactactatgagagagcagagagaggagcggacg

SEQ ID NO: 36023 - DNA, 72 bp, Zea mays
ttaatactgaatgtgaagattgacattgcatttcctaaacttaacaggttgtcctaacaaaggagttaaaac

SEQ ID NO: 36024 - DNA, 413 bp, Zea mays
agctttgccacatatgacgcataattatactcttgatgtcttctcgcgctgataggtcattcttcacataaaaccattctgtcatccaatccccgggccatctcttccgaaaggttggtacaggacagcttgccccggaccgagagacaaaactgtagcagcccaagttattatggtactgttctttgccccaaagctttgtttcatataataattcatgtatattacagaagcttcttgcatcaagcttcagaccttggcttctcgcggcccacacgaagatatttagccttataattgcctcgggagtaagttgatgaagataaacttcgaagattttcaacacctccaccacgaagctgctcaaggggaatcgcaatccacctttcaaaaagcttcgatacaccacaact

SEQ ID NO: 36025 - DNA, 353 bp, Zea mays
tgtgttctagatataccgacatgtctttctcgtttggtcagtgttaagtaataaccaacaaatccatctaaaaaggtgaaggaaatatgtgatgcctaagaggagggggagtgaattacgacttctaaaactttctctaaattaggccacaaataaatccctagagcaaaacctatgcaattaatcaaactagaaatgtgcaaactaagttttgtctaagtgttgctatctctaccataatgtataggtttcaatcctaaacaacataagtatataagacaagattgaaacttaaatgcttaatgtaaatgcgaaggctaaagagtaaggtaaagatgcaaactctcgtggat

SEQ ID NO: 36026 - DNA, 332 bp, Zea mays
ctcaatttcgcttatgggacacatcagcaactctcctgtctcgtgatgcctagaccaacccacatactcttttgcgtaatacatgattctttggcaacttatgattattcggggaaacctcccccaatagttggatgatgtctttgaagcactgttagaaatgttggcttccactttatcgccattagacttgtgagagttccaataactgtcacttgagtgtgcccgtgcagtctatctttatccgctgcgagaacccgaacaatttttgaacattgtgtgaagcctcccctgctcctcggtgaccttttaacctccctaccatgatcatg

SEQ ID NO: 36027 - DNA, 460 bp, Zea mays
tctaaagggagaacacgttatatgtgtgactaacgtgcatatacgaaaagatagaccttgtgcagcttgtcaagcaggtaaacaagtgggaggagcgcatcacagcaagaacgtgatgaccacttcaaaacccctggagctgctgcatatggacctcttcggacccgtcgcctatctgagcataggagggagtaagtatggtttagttattgttgatgacttttcccgcttcacttgggtattctttttgcaggataagtctgaaacccaaggaaccctcaagcgcttcctcaggagagctcaaaatgagtttgagctcaaggtgaaaaagataaggagcgacaacgggtcccagttcaagaaccttcaagtggaggagttcttgaggaggaatggatcaagcacgagttcttctgtccctacacaccacacgcataatggtgtggtagagatgaacaac

SEQ ID NO: 36028 - DNA, 381 bp, Zea mays
  unsure (1)..(381): unsure at all n locations
tgaatttcagaattctgaatntcagaattctgaatttcagaccttgagccaaagatcaagcgtgttcaccttgatccctaactcgattcctaatggccccattaacaaaaatgtgcctaactaacccctctgtcgcatgccaaaagatggcattgggacgcgagccctatacatgacaaagccctggatttgccttgggtttgagcagggagacagaccggatttctgggctccatatctctgcaaccagtaggcaaaatcctatgacccccacacaagatcggtagcttgtanggaggagaagaggttttgtgcactgaccaaggcgagagcaggctcggatgagtgaccacacgcaccagaacttgggcagaacgcacg

SEQ ID NO: 36029 - DNA, 317 bp, Zea mays
caatgaatgctggggtgacttcacacctacctcgctgtttatatagtgctgcaggtaagaacgcgaagcgccaaaatttttacaccaggcggacacccgctcgcactcgctgagtggtggaccgcatagaccgaacattaactctgcgaggtggggccgctacacgctgggagattgaatcgtttctcgacaacgagctcatggaaggtgttatttagaccttctgcgcttcgaaacttaagagacttttttcacggatcaagctcgttacgaaaaacgatctaacaccgcgaaaggggctactgttgggtctatgc

SEQ ID NO: 36030 - DNA, 435 bp, Zea mays
  unsure (1)..(435): unsure at all n locations
ctgcaagctttaataagataggcaccaattatagatttacatgtcatggatgttcagtgagcgccatattcttttctctaaaatagtgtaactgaaatactaagtgtgctgctgctacgctgagccggatactcagggaaaaacaatttgggattgagatgagccggatacaaggtctacctggtggggagagaaacaaggtatgtgcaatagagtactaacgaaagtgcaacattcgaagcatgctaacaattaaaagttatgtagaagtttagaaaaaaaactcttggcatgacacaaatgaactagatttacaaatgaactagaaacatataattctttctcaatgcatcctagatttacaaatgaactagaaacatataatntacctgaattattgtttggttattcgtggattgggaatttgtggggact

SEQ ID NO: 36031 - DNA, 478 bp, Zea mays
tcgcacctctgaactaactcggctgcatcgttcttcgctgttggccaatagaatcctgacctgaacaccttcccgactagcgttctggaggctgcgtgtattccacattgcccggcatggacctcctccagaagttgcttcccagtggacgggagaatgcacttcatgaggacgcctgatgcaccccttctgtataatgtctccccaatgagtgtatagtgagccgactgtctggcaatgcgctctgccgagttcttgtcgtctggttcttcttcattctttatatacttaatgatcgaccttctccagtcatcagagtctgactcgggttgatctatgatgttgcactcttctgtttgatccattgagatactcggctgtagaatttcttgcacaaagactccgggtgggacctgagttcgactggaccctagcttggacagtacatcggctgttgtgtccgatctctttctacatg

SEQ ID NO: 36032 - DNA, 430 bp, Zea mays
  unsure (1)..(430): unsure at all n locations
tcattttattgctaactgtcctgataatgaaagtgactcattaaaggggaacaaaagggagaagaagaagcactacaaaaaggccaagggcgaggcgcatatangcaaggagtgggattcggattgctcctcctccgactccgacaatgagggactcgccgccaccgccttcaacaaatcggccctctttcccaacgagcgtcacacgtgtctcatggctaaagaaaagaaagtaagtactcgaaactctacttatgcttcttctagtggtgatgattctagtgacgatgatgaaatagactattctagtntatttaaaggtctagatagaattacgattggcaaaatttatgaattaattgatgcattgaatgagaaggatatactcttaaagaaacaagaggatttattgtatgaagagcatgataaa

SEQ ID NO: 36033 - DNA, 430 bp, Zea mays
  unsure (1)..(430): unsure at all n locations
acgcatctatgacactcagctaggctntagattctngggcaattgaagataagattgacatacttgcacatatatgaagggtatggtttcaagtatctttgatatatattagtgactntgaagtgcagatgacaataatttcacccctcccgattcctttatggtgatgtggtaagttgtttatggcttaatgcttgatataatttatttctgaaattttgatatcgttttattaatgcggtagatatcgctggtcatttgtgagaatgaagttgttattatgcttgtgatatacaagtatgcctatgttgttttcactatgtttttcatggtcgagttttattacaataatattgttatatatgcttgactgaggatgtttctaagaggagtgtgaattgtgtgttttggggcacaaggtaatcatcaa

SEQ ID NO: 36034 - DNA, 432 bp, Zea mays
  unsure (1)..(432): unsure at all n locations
agcttactcccccctgggaagggccgttcatcatcaccaaactattgaagcccgggacatacaagctggccaacgatcaaggcgaggtctacagcaacccttggaacattgaacagctacttcgcttttacccttaaaaatgtttcaagtcgttcatgtatctcggtccctttacatgtacaaataaaaagtctaaccgtcaagggaggatcagccttgcctcagcaaaaactgaccctccctcgggggctagaaggggggaaccccctctgcgtcaaattttcatcggaaaaattttctaccaaagcgactttcgtgcctttcgactatatcgataacggaatcctaaaaacgagcgagagagaccttgaacggcaaggccgaccaagccaagggactcctacgcctncgggatacggatacctcactcat

SEQ ID NO: 36035 - DNA, 381 bp, Zea mays
  unsure (1)..(381): unsure at all n locations
ctcaagcttcgcnaggtgaacganaatagagatttggagaatggagttagggttcaagtgttcatgttgatgtgataaaaatcaaggataccacggaaaaaaggagatatgggaaggccgaggccgctaagaaggaaaggagtgtaaaccactgactcatgggtatcttcagttgggacagtggtcccgtggcaagaacaccaagaacagagttcccgtggagggagaaccccgatggaaacaaggcggagaagctcaacttcagaaatcacagacatatggttacctgcgaaaggtaactgactgttggggtcgatggcggggatcactgcagcagacgagttcgcggatttcctcttgggcgccatcttgtttctcgct

SEQ ID NO: 36036 - DNA, 423 bp, Zea mays
gagatcatgtgttaggactaaccgatgtttgttttgagaaagatagaccttgtgcagcttgtcaggcagggaaacaggtgggaagcactcatcacagcaagaatgtgatgacaacatcaagaccactggagcttcttcacatggacctcttcggacccgttgcctaccttagcatcgggggaagtaagtatggtcttgtaattgttgatgatttttcccgcttcacttgggtgttctttttgcaggataaatcagaaacccaagggaccctcaagcgctttctaaggagggctcaaaatgaatttgagctcaaggtgaaaaaaataagaagcgacaacgggtccgagttccagaatctgcaagtggaggagtatcttgaggaagaaagcgtcgagcatgagttcttcgcttcctacacaccac

SEQ ID NO: 36037 - DNA, 318 bp, Zea mays
  unsure (1)..(318): unsure at all n locations
ctcaagctttagtacttanattcctacttactatgaaattgttggttcttgagatatgtatgaggcactacacttagggggagtattcaaaactcaaatcgttcatgaaaacccctagtgcaaagccaaaatgcaaatctcaccatttgcctattttctctaaaaaatatctagcctatggcaaaatattttgaaaattatgggaaaatatatgagggggccaatacctgtaccaacaggtgttcttttgtatgattataagttgggatttggtttggttaaaaattagatagaaaaatttgaaaaattcaaaatccc

SEQ ID NO: 36038 - DNA, 414 bp, Zea mays
gcttgcttaatagcatactctgtgcagaagcaacttttgtcagcaaacaccttcgttgttaaaacaatgaaaaaatcaaagaaaagtttttaccttgaaattagaatagaataaactaccaacgatatgttgtcgtcggtagcggctgatatcggcctcaagcttcgggaaaccaatactcttcgacagagtactgataacctttgctccagttcggtctcggaggcaacctaagctttcatcgtcaataccgccgaatagtagcgcccctggctgatacccgcaggatatggcatagtctctcaactcttctttctcagcctttgacaattcttgtccaattaagttttgaaagttgaaattttcctcttctgaagtatcttcggctattgtcttctcttttccaggcactat

SEQ ID NO: 36039 - DNA, 440 bp, Zea mays
  unsure (1)..(440): unsure at all n locations
tcagctccatctatgttatggattgctnttgaatcagtttagtttccttcggcccttctggcagcttcctggcttccacgaatagcgatgggtccttgatccgaaggtatcttcatgcaaagataggcaggatgaagaattgcttcgaaagcattgagggtgccacgaccaataattgcattgtaagggtattccatgtcaacaatgtcaaacacaacttgctcagttctagtgttgttgatgaacccgaaggtcactgacatggtgatcttgcccagtgctacaatctgtcttcctccgaagccacagagaggatgtgtagcatcatgaatcttatcttctggctcttgcatttgtctgaaggccttancaaatatgatatcagctgcactgcccgtgtcaaccaagacattgtggaccagaaatactttgataacaca

SEQ ID NO: 36040 - DNA, 288 bp, Zea mays
agcacctaataaagaaaaatgattagttaaaaggcaacgttagtagccctgaacatgcttatgaaagtttgcctaatataatgaaaatacttacaaacacaatgatgaactgctaacaagctacaaagtatatggatagcacccatgagacacctaaattaaaaacaattaaaaatgatataaaaggatgcctctacttacagtcgggcactatgcagggcatgaagggtatgaccgctaagttgagcaacttctgatgggaccaccctcggtcgcaagtgcacttgt

SEQ ID NO: 36041 - DNA, 368 bp, Zea mays
atttgtatccgaggtccttagtttatcaaagaaaaattatacagagttggagaaggtactgtatgctgtcttgatggcctccagaaagcttcggcactattttcaagcttacaacataattgttccttcttcacaacctctgaaggatattatgaggaaccgagaagctactggaaggattggaaaatgggctgcagagctcaatgaattttgtattgaatatgttcatagatcttcgattaagtcccaggcgttagcagacttcattgccgactggacgccacgggctcatgaggaagaaacaaataaagacgccgacgcatggacaatgttttgcgatgggtcttggggaaccttctgagcgggag

SEQ ID NO: 36042 - DNA, 421 bp, Zea mays
  unsure (1)..(421): unsure at all n locations
agcttgccaattcttgtcaaaacaatagcatttaccagcacagcaacaacagaccatacctgtaacatggccatttgcgtggtggggactggacatgattggacccttcaagaaagctcagggaggctatactcacgtgttggtcgccattgataaattcaccaaatggatagaatacaaactcattgcttctctaacttcagccaaggcagtggaattcatacaagatataatatttagatttgggataccgaatagcatcataaccgacctgngatccaatttcaatagctctgaattctttgatttctacgaacaacggagcatccagaccaaatatgcatcggtagcacacccaagagccaatggtcaggtggaaagggctaatggaatgatactggaagcactcaagaagaaagtc

SEQ ID NO: 36043 - DNA, 426 bp, Zea mays
  unsure (1)..(426): unsure at all n locations
ntatcaatatttactatgacaatttcttttccaggttgttctccaatgcaatggaatntcaaggtccatatctcaccagtcaacctgccacacaaatatattctaagcaaacaatgactaaaacagtgttgtaaaaagatttcattcaacaattaagaggtatgaaaacaatatactataattatgatctgcgccaaggccaaagcagtagagaacaatatgggtagatagatttttacttgtcaggaagatcaaagaagacgttcttcccggccataatctcgtccacaatccgtgtaccaagttggctaccattgtcgttggtgcacatattagcttcattgcttgtcggctgcaaacctccttgagtcgtcatcatatgtcaggaaaatagatgctgacaggacagggaacgaaaaaatcatg

SEQ ID NO: 36044 - DNA, 421 bp, Zea mays
  unsure (1)..(421): unsure at all n locations
tcagcttctaaagggggagcacantttacgactaacaaatgttcattttgagaaagacaggatctgtagcgcatgtcaagcagggaagcaaattggaattcatcacccacacaagaacatcatgacgaccgagaggccgcttgagctacccacatggatctatttggcccgattgcttgcataagcatcagcgggagtaagtattgtcttatgattgtggatgattattctcgcttcacgcttcacttgggtgttctttttgcaggaaaaatctcaaacccaagagaccttaaagagattcttgacacaggctcaaaatgagttcggattgagaatcaagaagattagaagcgataatggaacagagttcaagaactctcaaattgaaggatttcttggggaggagggcatcaagcatgag

SEQ ID NO: 36045 - DNA, 437 bp, Zea mays
  unsure (1)..(437): unsure at all n locations
ntaccaaatggacgtgaaaagtgccttcctcaatggacttatcaatgaagaggtctatgttgagcaacctcccggctttgaagacagtgagtaccctaaccatgtctataagctctctaaggcgctttatgggctcaagcaagccccaagagcatggtatgaatgccttagagatttccttattgctaatggcttcaaagtcggaaaggtcgatcctactttattcactaaaactcttgaacatgacttatttgtatgccaaatttatgttgatgatattatatttgggtctactaatgagtctacatgtgaagaatttagtaggatcatgacacanaagttcgagatgtctatgatgggggagttgaaatattttctaggatttcaagtgaagcaactccaagaggggcaccttcattagccaaacaagtatactc

SEQ ID NO: 36046 - DNA, 419 bp, Zea mays
agcttcagctccatctatgttatggattgcttttgagtcaatccagtttccttcggcccttctggcagcttcctgactcccatgaatagcgatgggtccttgatccgaaggtatcttcatgcagagataagcaggatgaagaattgcttcgaaagcattgagggtgccacgaccaataattgcattgtaagggtattccatgtcaacaatgtcaaacacaacttgctcagttctagtgttattgatgaacccgaaggtcactgacatggtgatcttgcccagtgctacaatctgtcttcctccgaagccacagagaggatgtgtagcatcatgaatcttatcttctggctcttgcatttgtctgaacgccttaacaaatatgatatcagctgcactacctgtgtcaaccaagacattgt

SEQ ID NO: 36047 - DNA, 390 bp, Zea mays
  unsure (1)..(390): unsure at all n locations
cgcttgcactttctattgatcattcctgtctaatcccagtgttaaacttattttcattaaatgagtcacttagctgtgtaaagcaaatgcagtttttcgttaggatcaaactgcagtgtgtggtacattcctaagcatgggcagtaaattcaagatctttaagatcaggacgaactaaaacagatgcatggttgagaaattcctgtgaganaataaaattgtccaattttaaattcttgcttccaaaccaagcctaactaaaactactacttgctgaaaacattatcccttgttctctcagggaatttggatgtttttgcttgaggtaaatgctcattgtccagtttgatgcttttaagttcttcacttaatgagctaaagatactttgt

SEQ ID NO: 36048 - DNA, 419 bp, Zea mays
agctttaccaaatggacgtgaagagtgccttccttaacggaccaatcaaagaagaggtctatgttgagcaacctcccggctttgaagatagtgagtaccctaaccatgtatataagctctctaaggcgctttatgggctcaagcaagccccaagagcatggtatgaatgccttaaagatttccttatcgctaatggattcaaagccggaaaggccgatcctacactctttaccaaaacacttgaaaatgatttgtttgtatgccaaatttatgttgatgatattatatttgggtctactaacgaatctacatgtgaagagtttagtaggatcatgacacaaaaattcgagatgtcaatgatgggggagttgaagtatttcttgggatttcaagtgaagcaactccaagagggcaccttc

SEQ ID NO: 36049 - DNA, 426 bp, Zea mays
  unsure (1)..(426): unsure at all n locations
ntanggtaaaagtcataaaatgacccctaaaacaaagttgaatcacctttatacccttaagataccagaaaccctaattggaaccctggaaaaccctaaaactaaaccctaggggcctatgtgcaaaattagtccacttttgggctaaagtgcaaagaccaagccaaataagtattttaagtcatttggttcacaaatatgtggacttgaaagccaaaccctaagttttggactcatttgcaaaaaggaccccaattttgattcctatgctaagtctgaaatcaggattatagacccaactttggggctgtgtagctttcaaaatagtgaggattcatattatgtcaccacatcaaaattgtaacctgattataaagaacaactttgttaaggttcaagcatgatctatgaaaatttgagaaaacc

SEQ ID NO: 36050 - DNA, 411 bp, Zea mays
cagcttgtgaacagtacaaattcagaagggagaaagcagcttcagcagatcaaccgaagcccatgctcttatgtgaggacatagcagagcagaaggtactgttaggctctcaactatccgaaggcaggaaaaaaccttgataaggtttttgttcaataacaaagatgtttttgcatggtcagccaatgatctatgcggagttaatagggatgtcattgagcactcgctcaatgtcgatccatctttcagacccagaaagcaaaggcttcggaaaatgtcagatgataaggccgaaggtgctcgcaacgaagtcaaaagactcctcagtgcaggagttatcagagaagtaaagtacctaaaatggctggctaacactgttatggtaaaaaaggccaatggcaagtggtgaat

SEQ ID NO: 36051 - DNA, 378 bp, Zea mays
  unsure (1)..(378): unsure at all n locations
ttgaccattttgtttatagcattgatcacattatgtgcagcccaggcactctaggcaccgccacaccaagcattggtccacggcacgatggcaagcagagcaggttgaattgtgtaggtaatacagaatcatcattgtagagtgctttgcccgccggatggtatcaaactggaattgattgtcttggcagtgcttcaagaaatcgatcctgctgtcaaaatacttactttccattgtcggatctccatcatcagtctctggaagaggttgtacctccatctgtcagacagttagccactacggttagtatattgatccatccatgcatctattgaatagaaacaagtgtcaacttatttcatcggngaaaaaaatcga

SEQ ID NO: 36052 - DNA, 355 bp, Zea mays
ttccgatccgcagggagagctgacgaggctgacctctcccaacccgtagagggagctgatgttggagcaacgtgcgctgatgtcgatgctccaggcctgaagctaacgtgcgataggtcccttgtgagggagtccgcgtcgtatgcctgcttgggagcattgactgagcgtggggcgccgcctgaggcgcggttgcgatcattttgtctctgtcttctgctgtgggaggtacactagcggaagtcttgttgtacatcctttggccagggggcaggcgtggcctcgctcctcttggctagagaaaatggtggtagaagcccgaggtgtttccaggcaggaagagcgtcatgttgtg

SEQ ID NO: 36053 - DNA, 340 bp, Zea mays
ggaatacaccaaaccccagcccaccacgcacaaattaccgttaagacctaaaatttagcgtcccgccgagctctggcgaccaagacgccgcgagatcgagcagcactgagctcccaattttcctatccgcgcagatcccccggagaaaaggcccacaccattctccccctccaaaaaatccccaaacccgatcacgttacggaccctccgcacgacgccccgcccgcccgattcaccaccctgcagacgcgcacccgggagaaaccccgcgaattccggcccgattcaggcgagacctacctcgatcagcgcggcacggcgcgacggcgtctggatcggg

SEQ ID NO: 36054 - DNA, 431 bp, Zea mays
aaccctaaataggagtaaaggggttaaacttaacccaagttgagaaaacctaaaagctttagggtaaaggtcataaaatgaccccaaaaataaacttgaatcacatttatacccctgggataccagaaaccctaattggaaccctgggaaaaccctgaaaccaaaccctaggggcttatgtgcaaaattagcccacttttgggttaaagtgcaaaaaccaagctaaataagtattttaagtcatttggttcacaaatatgtggacttaaaagccaaaccctaagttttggacttaaatgcaaaatggacctcatttgagttctattctaagtctaaaaatcagagaattggctcaactttggagctttgcatctttcaaattatagggtttttgccctaggtcaccacatcaaaattgtagcccaattata

SEQ ID NO: 36055 - DNA, 415 bp, Zea mays
tcagctccatctattattatggatggctttgagtctgtccaatttccttctgcccttctggcagcttcctgacttccatgaatagcaatgggcccttggtccgaaggtatcttcatgcaaagataagctggatgaagaattgcttcgaaggcattgagagtaccacgaccaatgattgcattgtaagggtattccatgtcaacgatatcaaacacaacttgttcagtccttgtgttgttgataaatccgaaggtcactagcattgtgattttgccgagtgctacaatctgccttcctccgaagccgcaaaggggatgtgtggcatcatgaattttatcttctggctcttgcatctgtctgaaggccttagcaaatatgatatcagctgcgctgcctgtatcaaccaaaacattat

SEQ ID NO: 36056 - DNA, 432 bp, Zea mays
agccacctgcggcatgcaagcttgtgaagattcttcatcccaacatggtttattcggcggtgttagagccaacccatgtgagttttagcaataaagcaagtgtcgagttcaactctatcaaaatgtacgcaagtatagctgaccctctaacactcccttaaatgctattgaatcatcacttcttctaaagacagtgacaccaatatcagtaaaaagacagttgtagcccatttgacataattgagaaacagaaagcaagttgtaatctagagaatctacaagaaaaacattggaaatagaatggttaggagatatagtcaatttaccaagacctttgaccaaaccttgatttccattcctgaatgtgatagctcgttggggatctttgttttctcataggaggagaacattctcttctcccctgtcatgtgg

SEQ ID NO: 36057 - DNA, 460 bp, Zea mays
ctaagctaataatgcatgtgtgtcatgttagatgattcttctgatttgatcgttttattgagtttcatagggattggtgcctatgtgctagttaaacttacgttgtcttggttgctattgtgtggtcaatagaagaacatatgaataactaaggtgagcgtagtaaatgcgtgtacttgtgatatcgtattggggttgcgtaaaaaaataaaatgtggtcgtcttgttaatggtgttaataatgaacgccgataacgtatgaatagctagcgcttgtgtatagtcgatgcagcgtctaactaattggtgtttagttcgctaccatgtattgtatatcttgtggcggttttcaccataattcgtcatatgcatcttgcattccatttacgactcagagatgccgatcgagcaactgatgtggtgccaccacaaatacagttggtggacaccctaaaaatga

SEQ ID NO: 36058 - DNA, 343 bp, Zea mays
agcttgccttcgcctcagtctatcatccgctgtccatcggagttgttgaacgctccaatggaataatcttcacagttgtcaaaaagatgctcctcgatgaaaaagggcagatggaccgatttgttacccgaggcggtctgggcactaaacacgactgagtgcagggcgaccgggtttactcctttccgccttctatacggatcggaggccatgaccccacaagatataaaacatgggtccccgcgaacagttccctcagccgtccccgacgtggacgagccaactttataggatttcattgacggagatcgagtgttcgccctacaggccctaaacaaatacc

SEQ ID NO: 36059 - DNA, 335 bp, Zea mays
tgtgcacacctctgtgaagctccccgagcaaggaatcggttgttccttcgctggagaagccagtccgcgctcgccggagttctcacccccgccggagcacgtggaccgggtaagccactccaccatccttcaattccttgagcacacagtcgttgcgtgaccccgtgatgctcaccgtgcacctggattgcgccagttcgccgtagtttggccggtatactcgccgccgacgatgacacccgcctgcacgcgtggaccgggcgattccggccaccttcgacgccgagccgtacctcgacgtgaccgccagaagtctcccaagacgaccccaccct

SEQ ID NO: 36060 - DNA, 370 bp, Zea mays
gatgataaggggcgatgagccaacacaatcatacaaccggctcaagacccttatcaacaaaataaggagctacggaagcacgcgatggacggaccacgacgtcgtccgattgatgctaaggtcctttaccgttcttgatcctcatttggtgaataacattcgtgagaatcccaggtacaccaaaatgtcgcccgaagaaatccttggaaaattcgtaagcgggcgaatgatgatcaatgaagcgaagtacgtggacgacgctctaaacggtccaatcaatgagcctcaacccgttgctttcaaggcaacaaggagcaaggaggcgttacccagcaaggtagcacaaattgaggccgcctgacttaatgat

SEQ ID NO: 36061 - DNA, 367 bp, Zea mays
  unsure (1)..(367): unsure at all n locations
ttggcgaccaagtgatcgaactcttcgagttctacgaggctgaagaccctgatcatctatttggtgaaggcaagtgtcctctgacccattatgtcccattcacttttaatgcactgtcccgcattacttaattgaaacctaaggattgactagctttccatttaccttatccttgtttaccttttgggttatcatggttagcattatgctattgctttacttgaatcaatgaacatgatgtgaatacttatgatactatgatgttatcccgatgatgttcttgtgatactttanggggctcaagctgtttcctgaatgcctctccgtaaggaccttgttggggagtgacaacccgggataacagtgc

SEQ ID NO: 36062 - DNA, 350 bp, Zea mays
aattgccatggtctaccaaatatacatagatcaagcctgcatacgttccacattacagattatattatcatggagtgaaccaagtgaatactccacacggaccttacgtgttaccttaagtctaccactgtcgttgaaccattggatgtagtaggggtgtggatgtggaatcatatacagctcaagctatattaccatagttcggcttgctaatatagttgcactttccttcctctataataatacgacaagacctttcctaactacacatttagtctggaacaaactgtgagctggttttgatcaccttaaaaattgggcactaatacacttcttacaccaggctctat

SEQ ID NO: 36063 - DNA, 422 bp, Zea mays
  unsure (1)..(422): unsure at all n locations
tagctaagataatgatactagatatcgagaagctaanaattgatattagactcatctagtgctnttggcaaaccaaacccctcagccaaatagttgcatggtctagaggtagaggagtagtttcctcacaccaggtaattctagctgagtattagtatactcagccttgcttgtgacatatattttgcaagtacgcttcacgatatggttgatggtgtgacttggcctaccaccctgccactgggttggacggacgagtgggatgctgcttccgctggataggagcaagaggagtagtgggctaggccttgcccaattcctcgctaccgacgatatcgattatccgctgcatcttattttatgaacttatatccgctacttgaaaaactccgatctatgtaataattcagtactttaattga

SEQ ID NO: 36064 - DNA, 368 bp, Zea mays
gctgcggccttgcagttgcacgtatgcttctgttccacaagtttcgtccaatgatgctctttcggtgcttctccaatgcctcacatgacgcttaaatcttggttttggtagtatgatgaattatagtaagggtatcttacacttgcagctctgctgcgcacctgttggaggtaacttgctcgaccatgcgaagcatctgcacgatggcctttttagaaggatacccaagtatcttttgctcgcctgctcaagtcatcactatgcctgcaaatggggtgagttgaaatggatattttacgtgggtttaagaaatggtcttgttctggtgggttgtgatgggttttaattattaaccggttgggttgggt

SEQ ID NO: 36065 - DNA, 443 bp, Zea mays
  unsure (1)..(443): unsure at all n locations
ttggatcagggagtcgctatagagggaagcgtccccgttgtccaagttttgggctctgttgatggcactgagttggttcctgctggttcgttgcaagctgcttcgggtggcgaccttacgcccggtcatcaattgatctctcatgatttgggagtcccttcgttcttttccaacctccaagtactgtgatatattttagcttgatttttacaccgcatgaactgctatcattacactcatctgttctccttatcaggctttggtggacgggatggctagccagctgaggttgcaaggtgcttctgttccagaaggagctttgtctcttgcacgttggaatccagtgttacttcaacatcgtgtctctgacttggaagcgaccaatgctgngtagtggcttattgcttctctttgtcttcattattgaactggcttacattctg

SEQ ID NO: 36066 - DNA, 415 bp, Zea mays
agcttttgatgactatgcgcctttcctcgttgtctagcttggaggcgtcgatgggtgttctacttggtgtagactcctccttcttctcctccgtcgccttgaatgcgaccagttgtgcttcggacgtggagggaccgtcaagctcgttgatcttccgtgagcccttgatcataaactcaaagctcacaaaattcccgattacttcctcgggagtcattagtgtatatctaggattaccacgaattaattgtacttgagtagggttaaggaaaataagtgatcttagaataaccttaaccacctcgtggtcatcccatttcttgctcccgaggttgcgcactttattcaccaaggttttgagccaagtgtacatgtcttgaggttcctccccttggtgaagacggaagcgaccgag

SEQ ID NO: 36067 - DNA, 331 bp, Zea mays
  unsure (1)..(331): unsure at all n locations
tcacgggctactggcggagctagcctaagcactggctgggctggatgtgtggctggagtgaactggccactgcggccgaagctctggcggcaatggcgggcggaaatacgctcgccggagctaaggaacggtggctggccggtgagggtgagtgcggggcgaaatggggcgcgcctgtggaggctttatatgcacngcgcggtgcacgggcggtcgtggaccggcgtgtgcgcgcgggcgttcactgggaaggcgcggtgcgcgaacgggcgtgaaccangggtgtcagccgcggtcgaacacgtgttcccgttgcctctgcccctgttca

SEQ ID NO: 36068 - DNA, 415 bp, Zea mays
  unsure (1)..(415): unsure at all n locations
agctttgtgtagcctcatgtagctnattaaagtgcggcaagagttgggtgctaaaaaaggcaatgagtggtattatctgcagaaatgatctagcttgccaatccaaatacccaagaagcattgaaaggtagaaaccaataaccatttgaatgaaatgatggtttgtacaaacaatatgcttgcatacatttagagcacaacttcatttctataatttgatccattggacaagctgtttgaccatacaaccatggctcaccaatacaatattacgataaaataatctcaaaagctatcaaattaatccaaaaaagaaattttggaattacaatgccaacaaaattccacctaagctgcacattacagtatcatccactggagtagcaattatttgtaagcaaattcacatatatag

SEQ ID NO: 36069 - DNA, 420 bp, Zea mays
  unsure (1)..(420): unsure at all n locations
ngaagttcagacatttatgggcattgttgaaataatgtgtggtgaatgcgatggttcaagtggtcttgtgagagacccatcccacatatgtgttgaataaacattgttccgctatatgacataatttggcaaatgacatgaattaaaatatgtagttaataggattctaaagatccgtcatgagatccaaggaggactcatattcttgaattataaacattcaagcacattgatacctataaaaatagtttttatgcatatgattaagactctntttcctaagggtcactttaggtacaagattccaaattgtgaaatccacttggtatttagaaatgaaaaggtatgaatgatcagaggtaatccacaattaatgagaaagttataaagaatccgagcaaagattagtgggaagtggtg

SEQ ID NO: 36070 - DNA, 361 bp, Zea mays
tatgctagtcttagcaattaagcatgcatctaaaccggccttttcttttgccaaatcaacttagtaaagcttgccgtctaatacacccttaaaagctagtgaaccatcacttcttctaaagacagacacattttcatttggaaatagacagttatatcccatattgcataattgactaaccgatagcaaattatatccaagagactctactaaaaacacattagagatagagcgctcatttgaaattgccattttacctaacccttttaccttgccttgattcccatcaccgaatataaatgaatcttgggaatccttattcttgacggaagaggtgaacattttcttctcccccgcatat

SEQ ID NO: 36071 - DNA, 403 bp, Zea mays
  unsure (1)..(403): unsure at all n locations
tcggagccgaagcaactccagctntgaacgaagccatcatctcagtttgtggatgtgagttcaccggaggtgggcgccaatgttggggacttgttctcaaatactatgaatcaagaacaaggcaacacaaaagaaggttaaatggttaatgcccttcgtccttcgaaacattatttcccttgggatataacgatcttcggacgaaggtcatgaaagacataccttcattatcatgatatatgatagtgttaatggggaacatatgaaatacaaaagataacacacacatttatatattattattaaatcatttctattttattaacacggaaaaatataaatgacattaaattacaagtgtacctttcgctttgaatgaaagcaaagttacagcgtgatgtat

SEQ ID NO: 36072 - DNA, 366 bp, Zea mays
  unsure (1)..(366): unsure at all n locations
aagaaatttacgtaataacacacaaactcaatagcttgaaagataattgcaattcatactagttcataaaggataccttgatgcattttttagaagccacaaaaaactctgtttaaaggcaccacataaagccaaactatcaacagctgataactgcctctggttccttccagcccaaagattatgcaaaaaatcaaaaacaaattgttgtcccatgactgctttaggtggcatagagtccaaaaactgaactagaagaggatatgaaacttgtttggacccataacatccattntgtacgaaatgccaaacccgactgaggacaactttgtgaatattacaatatgaccaagcctctggaaactt

SEQ ID NO: 36073 - DNA, 359 bp, Zea mays
  unsure (1)..(359): unsure at all n locations
ntaattgggtcaaagtttcatgttgtatcattcccatgttcaactnttccattacttgacatagggtggtgtcagaggtccttactgtaagacaatgacaggaagctntgtgactcagtgcatctgccaccacattagcttttctaggtgttagtggatttccaaatcataatctttaatcagctcaagtcatctcctctgcctcatgttcagttctgactgggtaaaaatatatttcagacttttatgatctgtatataaatggcaagtatttcccagcaaataaggacgccatatcttaagggcatgaacaactatagctaattccaaatcatgagttggatagagcaactcatgcc

SEQ ID NO: 36074 - DNA, 338 bp, Zea mays
tacgtggtcgcatgcgccgctgtgtactacaagctcccgcgaagtccgtgcttggacgcggtccatagcagctgcaccgcgcttgtccattcgttagcaggggggtctcatggttgtcgccaacgtcaacgactctcgggttgttctggacaccgcatccgacgacgacgtcattacgccgtccagctcatcgtccacctgaagcccaacctgccacgtaagtcgctactgaccggacatgaattcttgtgcgctgggatgatggacgttgctgacgttgtgtgagtgtcctctaacatgatgtatgtagtggaatagcgcatcctgtggtgcaacgg

SEQ ID NO: 36075 - DNA, 449 bp, Zea mays
  unsure (1)..(449): unsure at all n locations
ctaagctagcaaagaattttagaatcagaatttgagcttatcttaagtctggtaaaagaatgttcatcaagtggcttggtaaagatatcggctaattgatctttagtactaatgtaagaaatctcgatatcccccttttgttggtgatccctaagaaaatgataccgaatggctatgtgcttagtgcggctatgctcgacgggattgtcggccattttaattgcactctcattatcacatagcaaagggactntggttaatttgtaaccgtagtcccgcagagtttgcctcatccaaagcaattgcgcgcaacaatgtcctgcggcaatgtactcggcttcngcggtggaaagagcgaccgaattttgcttctttgaagcccaagacaccaaggatcttcccaagaactggcaagtccccgatgtgctctttctattgattttgcaccc

SEQ ID NO: 36076 - DNA, 438 bp, Zea mays
  unsure (1)..(438): unsure at all n locations
tgcagcttctaagggagaacacgtgataggtttgactaacgttcaattcgaaaaagatagaccttgtgcagcttgtcaagcaggtaaacaagtgggaggagcacatcacagcaagaatgtgatgaccacttcaagacccctggagctgctgcatatggacctcttcggacccgtcgcctatctgagcataggaggaagtaagtatggtctagttattgttgatgacttttcccgcttcacttgggtgttctttttgcaggataagtctgaaacccaagggaccctcaagcgcttcctcaggagagctcanaatgagtttgagctcaaggtgaagaagataaggagcgacaacgggtccgagttcaagaaccttcaagtggaggaagttcttgaggaggaagggatcaagcacgagttttccgctccctatacaccaca

SEQ ID NO: 36077 - DNA, 374 bp, Zea mays
atgtccttggtcctcggagccagaagagtcatatgtcttgaccactagactactagtgatgataatttgtgatagaaatatgaagatcttgtagagtcttgttgtatcctctctactcctaatgatttcttcgtacgagagcagtaatatttgttgttgaagatggatcctacgcggataccagtattgtttcgttcttgccaagcagttatcatcatttgcttcatcaaaagctagttatatggtgattttttctagataaaatgaaattttggtcttgtctgttctattccaaagcttctctttttgctgaacaatgaagagatcgaaataatgctatatagaacaatttggtatataatatgaggagaaat

SEQ ID NO: 36078 - DNA, 431 bp, Zea mays
agcttgccgtacccctccctcgccggccgtatttattactctcatcgtcgtcgagctgtcgccgttacgtgccacgtgtttgtgcgctggtcctcgtcgtaatgactcactgggtgtatgtccggtgatcaccggtgcgactgccacggtaaaagccacctatgtctgacgccgtgttcttctctgattccggccgccagctttgcccggccaaattgtgcgccaccgctgaagcctcctataaatggatggcccgggcagctgcgctacatcgtcgcgaaaccagagccccactcccaccctcaatcgttctccagcgttcaccaatttcggattctccccaaattaatttccgccaccataacagccgcctcttcgtggcccgcgctccttaggttagaacatacccaattgcttaatgttctagcctc

SEQ ID NO: 36079 - DNA, 101 bp, Zea mays
actcaagcttatgtatgatggcttttctgacagccgatggacataagtcttagtctgatggtccgcctaccagccctcggatattctcccttatgtccgac

SEQ ID NO: 36080 - DNA, 424 bp, Zea mays
  unsure (1)..(424): unsure at all n locations
ttgctcaacttggaaatcatgttgccatattatntggcattcctcgcgcaactgcaagcttaatactagattcagcaactcacaggcagctggtatatctatacatttctttttatcctatgaggaaagataatcattgtgaaaaatcacaaaaatagcagtcatcttgatcactttgctttggagcgttataatttacaatagaaaccaaccatacctgtgaggcaataacgaaatgcatatatgtagaaatcctggaaattggatggccttgtaacctggatttataaacagatgaaagtggtgagcaacgaatagcaatatgtaatgcataccaacggtaaacaaccttgcttatcacaacatgtgccttttctgtggatctcgtcataccgtttactttagtataccccttcagtcaaaa

SEQ ID NO: 36081 - DNA, 347 bp, Zea mays
  unsure (1)..(347): unsure at all n locations
tagcaaacaccaaccttctttatgggtccttcttgatagtacaatgattcctatactcaagngaaataaaatataattaagtaaactccttgagtcattggtgtcttctatgtgatttcttcatggtgttgcttcataaggatcacaaacatcttttntctcaccttttgaagcaaacacaaatcaagctctgtgacttgaaccatttcaccatatatgagttcaaatcatggctataggtcaccttactgatgcatcaacacaatataactctgcatagttgattagttcttctatttagtgtaaggactctattcttcaccataaccatggtacctttgtccaca

SEQ ID NO: 36082 - DNA, 361 bp, Zea mays
  unsure (1)..(361): unsure at all n locations
ttgagagttcttgaactccgtcccattggcgcttcttattttctttatccttaagccgaactcattttgagcccgtctcaggaatccttataaagtctcttgggtttgagatttttcctgtaaaaagaatacccaagtgaagcgagaataatcatccacaataactagacagtacttactcccgccgatgcttatgtaagcgatcgggccgaatagatccatgtgtaggagctccagtggcctgtcagtcgtcattatgttcttgtgtggatgatgagtgccaacttgcttacctgcttgacatgcgctacanatcctgtctttctcnaaatgaacattggttagtcctaaaatgtgttct

SEQ ID NO: 36083 - DNA, 317 bp, Zea mays
tgcttgtcttcttcacattaaccatatgcatccatcgcaggcctttcttctaaagttggacgggaagtttgacccggaccaaaacaaactgtacacctaattttgcgatactgtccttaccccaagttagttcgaagaaatcgtgatatgcagaacttttgcataggcttaaaccttggcttctccggccccacgaaatattcaccctatgatgcctcggggaagtggtgaaatagattcaaaatttcacacctctcgacaactcctcagggaaatgctccactttaaaaagcttcgacactacgacttcttctttc

SEQ ID NO: 36084 - DNA, 427 bp, Zea mays
tctaaagggagaacatgtggtacgtttaactaacgtgcatttcgaaaaagatagaccttgtgcagcttgtcaagcaggtaaacaagtgggaggagcacatcacagcaagaatgtgatgaccacttcaagacccctggagctgctgcatatggacctcttcggacctgtcgcctatctgagcataggagggagtaagtatggtctagttattgttgatgacttttcccgcttcacttgggtgttctttttgcaggataagtctgaaacccaagggaccctcaagcgcttcctcaggagagctcataatgagtctgagctcaaggtgaagaagaaaggagcgacatgggtccgaattcagaaccttcaagggaggagttcttgggaggaaggatcagcacaattctcgctcctacacaccacacaaaag

SEQ ID NO: 36085 - DNA, 422 bp, Zea mays
agactttataattggtcctctgcggagttgtattgtcattatttggttatagttattactttttttcagatatgttttatacatataagttgtttatggctttcgttaagtacttcgttctcctctggagtcatttactatgttacaaaaaggttcacattactttataaagttgttttgttacattattctcttgtgcgaccatgccattttgtgctattaattaaaatgaacgaacggaactcatttgcatgtttataaataagaaactgaaaacaaagtttctttttgtgatatggtgattagtatgttcgagtcaaggtagactaaatatagtactagcaaataaaaatcaaacagagtatgcaagatttaaataattctaagctaggtaccattagattgagcatatcttttgtatc

SEQ ID NO: 36086 - DNA, 433 bp, Zea mays
  unsure (1)..(433): unsure at all n locations
ctgctcaggccttcttcntttatctattcaggaaccttgctggaacactaccccacttaaaaagaatgagggtagatctcttgaatcttgcggatttgaactccttgaagtacctcataacaagggtgttactgggccttcttctgctgttgctacttgagcaggctgcggagaaatgactgacacagggttgattctgggagaaccttcttcttatcttctcttcactatcttcttttctcttctcacttttcacttttcacttttcactgcctctttctttctatttgctcttcccactggaggagtctatcgatgagtattaccatcatacagaggaggaaaccaaagactatgaaccatgtacaacagtcttcactcaagaatcaccaagcattgtgatcctagggcgagggagtgtgaaaatgagtgc

SEQ ID NO: 36087 - DNA, 232 bp, Zea mays
cggggacttcatttttcttacaatgggactattacatgaaatagacttcaaaaaggtattagtcccaaattcttagattatagagtaacctccccctgaatttgtgcatacacgttttgaatacttgtaggagacatgcactttgatttgatatcaataggggcaaattatctataatctgagcttttggcacatataagttaaatgatacccccgctgtttctttttagtt

SEQ ID NO: 36088 - DNA, 430 bp, Zea mays
tcttcggtccctttgtagtgttatcctgatatggttaggtaagcttcaccttgccttttcttttggtgaagtccttagtgaggcaagtcttttattgcttgggttcttcattttcccttgcaatctcttttgaccacaggaaaacatttaaagaacgtcggctaggaaccaacatacttaatctaataggccgacgtacttaagttaagtacatgggttactgacttacttactctgtcatacttaatcaaataagtcgtagtcacaccgacatacttaaacttaagtacgtcagtccaccgaccagccgacttacttatggtagataagtatgtcgatccacccacacaactgacatacttaactagataagtacgtcggcctaagaaaaccgacatacttatctaacttaagtacgtccgcaccgaca

SEQ ID NO: 36089 - DNA, 413 bp, Zea mays
agcttataataagagaatggaagcaaggacttgaccgtatgtgataatagaaggggaattatataaacatggagtctgttctccactactcaagtgtttatcaagagctgaaggtattgaattaatgaaggagatacatgcaggtctgtgtggatctcatattgggtctaggcccttgctgggaaaagtgtttagacaaggattttactggccgaaggcagcttcagatgcagcagagctagttcaaaaatgtgaaaattgtcaaaaatgtgcaagagaccagaaacaaccttcatctctcacccagctaatacaacctacttggccgttgcaaagatggggcctggatttgttaggcccacttccaccaacgcgaggtaatttgagatatgttgtggtggttgtagaatatt

SEQ ID NO: 36090 - DNA, 341 bp, Zea mays
ttcatgagaatatgagtacaaagttgtttttcagtacttcttatcaccctcagactgatggacagactgaaaggactaatcaagtattggaagatatgttgagagcttgtgcccttcagcatggtagtagttgggacaagagtctaccttatgctgagttctcatataataatagctaccaagccagtttgaagatgtcaccgtttgaggctttgtatggcagaaaatgcaggactcctctatattggattagactagaggaagacagttctttggatctgaacttattcaagaagcagaagaacacgttcgtctaattcgagaagaattgaaggtagctc

SEQ ID NO: 36091 - DNA, 405 bp, Zea mays
catacttgtaattcctcacaggctgcgtcctgtgcctataaatagtgaacagtattccgttactgttcaggcattctggtaactgcaatcgcatattttggaattcaaccttttgcaaggcagaggtattattgtattcaatgactggatatattaagaaaatataatataatttatctatgacttgtttacctcttttgtatcttttatgtcatcttgcaatatctattggaattttattacgaagatttaggcttcgtaattttactctcatcaaccttcgtccaagatccattatcctcgagggaataatgttttgtggacgaaggacgttgacatttaacactttatgttgccttgttcttaattcatagcacttgagaacaagcccccaacagtgagttc

SEQ ID NO: 36092 - DNA, 359 bp, Zea mays
  unsure (1)..(359): unsure at all n locations
ntatcttgtngatttcacaacaagtaaagtgacgcctgttacctgtttagtggcaaagtccgacaagggttggctatgacatcgccggctagcccatgtcggtatgaggaatttggccaaacttcaaaaggataatcacatcattggactaacaaatgttgtatttgagaaagatagggtttgtggtgcatgccaagcangaaagcaacatggaggcccacatcaatcaaagaatgtggtcacaacaaagaggccattggagcttcttcacatggacctcttcggacctgtggcctacattagcattggtggtagtaagtatgggttagtcattggtgatgaattttctccgatcacct

SEQ ID NO: 36093 - DNA, 421 bp, Zea mays
agctcttgaacgtacttagcacatgccggtgttaatggttaccggttaacctattacctgagtgaagccgggcgcggactttattcctcatgcgacctgagactgggtctcccatgctagctatggtgggtacaagtgcggtcactgcacggcggcagccggggtcagtggagcattgtatgccaaggcggtgaggcctggacgcgaacggggaatcgatggggaccgttgacatgtgtggggtcggagtaccctgacatgtcgtgtggttaggtttaccttgcaaggttaaaactcgattcaaatcgtctgcttctcgcagctaatgagactgcttgattccttgtactgcatcgagtaagaagtgaaatgtggttacatgagataacttgttgattgaactaaatgcttgtaccatgta

SEQ ID NO: 36094 - DNA, 453 bp, Zea mays
tgtggaggaccagatcatcaaagcatataagtctctggatgagaagtggtcacccacgttccattaatgaagcaccaaaagaccaatcaagtaaggaatccatgtgggagtttgcaagaggaaggattgcgtgtcgacatctatgcttcttcaataagctagctaccaagcgaaacctagaagcctgaagatgattctttgagtagccagaatcagcgtttgcaatcagcaaccagatgcccctcaaaggacagattttgttgaagctctatctcctcgaagagtctgcaaagtgaagatatatagctgaagtaaagctatacccataacccttctaagccgaatctcgaggacgagattactttaagtggggtgatttgagcatcccaaaattctattctaaattttctcaactccctctaaatcaaatgaattcaaatttgtttcaaatgt

SEQ ID NO: 36095 - DNA, 144 bp, Zea mays
tctcttgagtgtgtctagaattgaatgcctagctcttgtaagtggttggaagtgtgaaaacttggatgcaatgaatggtgggtggttgggggtatttataaccccaaccaccatactaaccgcttggagacgttgtctgtcaaa

SEQ ID NO: 36096 - DNA, 425 bp, Zea mays
  unsure (1)..(425): unsure at all n locations
ctggatattcttcatcagaacactacggatattgttataattnttcttcacgaagcatgaaaagaagggaaggtgtttttttcgtcaaagactcaaaaacggtacgtatgtaaaatttcatgcatcgtaaagaattgaaccataaaaacaagtatattatattcaggattacaagatgttacacatattacatttcagaagtttttacaatatcacttaatcttctctaagtacaacttccgcagcttcgttcaggagccgattaacaacttcatccatgatagcttcagccatctttttaatttcgtcgtctcctttcgggtgagggcccggagacgctttattaggatctgaaggaggacaggatacggctacattgctattacaaattgcgaaagaagtttaaacccaaattacacacaata

SEQ ID NO: 36097 - DNA, 403 bp, Zea mays
gaaactgttacattatctattactaccgctgaagaaagagctgcacatctggatggtgcattgaaagaatgcatgaagcacgtaagggctgttaaggaagaaggtgagcagaagctacatgatgtagtctttgcaaaaaccaaacagtgggagaagataaaggccgagttataagcaaaattacttgaatttgaacaggaactcataagggctggtgctgagaatgatgcactcacaagagcacttcaagaacgggcagaactgttgatgaaaattgatgaggaaaaagctcaagcagaagctgagattgaaatcttaaagagcacaatccaatcaggcgaaagggaaataaattcacttaaatacgaattgcatgttgtctccaaagagcttgaaatccgca

SEQ ID NO: 36098 - DNA, 344 bp, Zea mays
  unsure (1)..(344): unsure at all n locations
tatattctagagcaaactagttagtccaattatttatgttgggcaattcaaccaccaaaatcatttaggaaaaggtttaagcctatttcccttttaatctcccctttttggtgatttatgccaacacaaacgaaagcaaatatataagcgcagaattgaactagtttgcataaggtaagtgcaaaggttacttggaattaaaccaatttacatttcataagatatgcatggattgctttctttattttaacattttggaccacgcttgcaccactntgtttatntttacacaatcttttggaaattctttttaaagttcttttgcaaatagtcaaaggtaaatg

SEQ ID NO: 36099 - DNA, 442 bp, Zea mays
  unsure (1)..(442): unsure at all n locations
ctgaagcatgcaagcttttttaaagctaggctgcggntcctcttatagcagattgtggttgaagttttaaagatatatcacgtctaccttcatcaaattactcccgaagcaattataagaatgggaatcttcgtctgggccgtgaggagccagggcttggagccaaatgcaaaaagtttctgcagtatgcatgaactgctatatgagacaaagccctgtggtaaagagcagtatcataataattttggctgttatagtttcattgcccgttctggctcaagctccccagtgccgacttttctgaagagatggcctggagactggatgaaagaatggttctatgtgaaaaatgatttaaaggcatgagaagacattaaagagataatcatgcgccctatctggcactgcttctgccttcggaagccgaaagtagagattgatg

SEQ ID NO: 36100 - DNA, 336 bp, Zea mays
  unsure (1)..(336): unsure at all n locations
ctggcgttgggttagggatattgngagtcatctttctatgattgggctgcagcagtacttaaaattatgggatgagattggacaggtgactctttcacaagaggcggacaggcttgtttggagacacacgacttctgggtagttttcctcaaagtcttgctataatgccttcttcctggggtccattttctttgagccttggaaacgattgtggaagacttgggcccccctaaatgcaaattttttctttggctggctataaggaatgaatgttggactgcggacagacttcagaggagagggttacattacccggcgagttgccccctatgtgat

SEQ ID NO: 36101 - DNA, 324 bp, Zea mays
gatgggcgtaggggccgaccctgatggcgatacagcatattctagggccaactgactgcgatgaacaaagtgcgatcaaccatgtcacatctgacttctctaggtgagagcactaatagaaggaactttatctctctcttataagctgacgatatgatgaattatatcccatacatatatacggatcaacattcgccgaaaccatacatgcgaattatatgctctattgctctaaggatgatactctgatcatttcagcgcttgtaacatagattcattatctatgctataacacccctgttcgcatggctcattgaatgacaa

SEQ ID NO: 36102 - DNA, 394 bp, Zea mays
taatgcaccttacagtccatttcacactagaacataggcatactgcaacggaaactttttgtgcttccaatacaaacgcttccactccgttactcatacttctccaccactccgagcaactctcttttctttgcggagaaactaacattcaaggaaatgacttcattcttgtgggagagagttaaagctcaaacgcacaacgacttcgtctttggtataatcttaactcacttattatgaccaaacgggaagattgcaccttccaggctctaatgattccatttttgccaatcatgcaaaaaggggaaaaatatccctaaccaatagacgctccacatccccaattaaaacttatgctttcaaatctttacattggacctatttgtcaaagggg

SEQ ID NO: 36103 - DNA, 435 bp, Zea mays
tgcaagcttcttgtagaagggatgatgagtacagtgcgccgctcggcactggcgcactgttcgacaacagactggtcagccacgccgtctgctggatgaccctgacgccgtctgccagcggatttgacagggcgcattaaatgctgagagggcacatcgcccgttaacatggtggcaggcggcgcgttctctccacaataaatgtaggggctgcttggctgtatgggccttacgtcaagttcggcccgttggcttatgtcacgggccacaagccacacggcaggagcgggtctccgcctgagcgggaagcatatggcaaggcctggacacgtgccggcaccggacccccactcatgttggggtcctcctcgtcccgggactttgccaaagcccggatcttactcggagggacctggggcttacccgagggacccc

SEQ ID NO: 36104 - DNA, 413 bp, Zea mays
ggtgaaggttcttcatccccacatgtgctaagcggcgatgccacagccagcccatgctagtcgtagcaattaagcatgcatctagaccggcctcttcttttgcaaaatcaactaagtaaagcttgccgtctaatacacctttaaaagctaatgaaccatcacttcttctaaagacagacacatctatgtttgtgaataaacagttatatcccatattgcacaattgactaacagatagtagattatatcccagaaactcaactaagaacacattagaaatagagtgttcatttgagattgcaattttacctaacccttttaccttgccttgattcccatcaccgaatattattgaatcttgggaatccttgttttgacgtaggaggtgaacatcatcttcttacccggcatat

SEQ ID NO: 36105 - DNA, 235 bp, Zea mays
cttgtcgcttaacacgcgctcactgctcagttccgattattgagttcccgttgctacatattttgcctctactatgttgagctggagtcctttgagattgttgaacctattgtgattaatctttaaggaactagatcagtagactgttgtatgattcgaagcaggatttacctccagcagaggatgtgtcttatcgattattgttgatgatggggagctgctaacgaagatagtt

SEQ ID NO: 36106 - DNA, 484 bp, Zea mays
  unsure (1)..(484): unsure at all n locations
ctcagcttcagttcgtctccctcacgctcaagcctggcagaaaattgtacttggccttttaatnatgaatatgtggaaacttaacactttcttcttccgaagttatttctgacgaatcaggcttcataccggagtttcgttcgattccgacagacaagctctggcgatggttaaaaattttggcagccaaatagtgcaaatagcaatgaatgctgtggtaacttcacacctactcgtctgtttatatantgctgcacgtaagaaggcgaagcgccaaaatttttacaccaggcggacaccgctcgcactcgctgcatggtggaccgcagagaccgaacagtaactctgcaaggtggggccgctatacgcttggagaatgaattcgttctttacaacgagctcatggaaggtgtattttagaccttctgcgcttcgaagcttagaagactttttcactgatcaagctcgttaccaaaaatgatct

SEQ ID NO: 36107 - DNA, 417 bp, Zea mays
agcttgaagatagtgccgaagcttcctggatgtcatcaagacattttacaataccttctccaactctgtataatttttctttgataaactaagaacctcggatacaaaatatattggggcctgcctcttaacttggcctttaagcttttcctgaacaaatgctgcacttaccgctgagtgcgaagctgccacatataataacaaaagagcccctggcgtcggcggggttaatgttgttagatctattaaatactgtttcaagctttcaaaggccttctactggattggtccccattgaaagacttcggctgacttcagcacttcgaagaataggaagtttctctttggtgatctagatatgaatctggtgagagacgccaccccttctgtcaatcttttagccacctttttttactt

SEQ ID NO: 36108 - DNA, 432 bp, Zea mays
cttctaagggagaacatgtggtaggtttaactaacgtgcatttctaaaaagtattaccttgtgcagcttggcaagcatgttaacaagtgggaggagcacatcacatcttgaatgtgatgaccacttcaagacccctggagctgctgcatatggacctcttcggacctgtcgcctatctgagcatatgagggagtaagtatggtctagttattgttgatgacttttcccgcttcacttgggtgttctttttgcaggataagtctgaaacccaagggaccctcaagcgcttcctcaggagagctcaaaatgagtttgagctcaaggtgaagaagataatgagcgacaatgggtccgaattcaagaaccttcaagtggaggagttccttgaggaggaagggatcaagcacgagttctccgcttccttcacaccac

SEQ ID NO: 36109 - DNA, 418 bp, Zea mays
agcttgtgaaggttcttcatcctcacatgtgctaagcggcgatgccacagccagcccatgatagtcttagcgattaagcatgcatctagaccggcctcctcttttgcaaaatcaactatataaagtttgccgtctagtacacccttaaaagctagtgaaccatcacatcttctaaagacagacacatctacatttgtaaatagacaattatatcccatattacataattgactgacagatagtaaattatatccaagactctccactaaaaacacattaaatatagaatgctcatttgatattgcaatcttgcctaaacctttcaccttgccttggttcccatcaccgaatatgattgaatcttgtgaatccttattcttgacgtaggaggtgaacatctttttctcccccgtcatat

SEQ ID NO: 36110 - DNA, 386 bp, Zea mays
  unsure (1)..(386): unsure at all n locations
tgaagccatggtaagtagcataggcatgtaatatacgaatngactcaagcctagctacgagtgcataggtttcaccgaaatccaaaccttcgacttgtgagtatcccttggccacaagtcgggctttgttccttgtcaccacaccatgctcatattgcttgttgcggaagacccacttggttcctacaacattatggttaggacgtggaactaaatgccatacctcattcctcgtgaagttgttgagctcctcttgcattgccaccacccaatccgaatcttgaagtgcttcctctaccctgtgtggctcaatagaggagacaaaagagtaatgttcacaaaaatgagcaacacgagatcgagtagttacccctttatgaatatcg

SEQ ID NO: 36111 - DNA, 416 bp, Zea mays
  unsure (1)..(416): unsure at all n locations
agcttcngtatcacaaaccgncttaaagatataatgaccttttagtccataaaggtctgagtcaatgttgtaaactttcataagggacatacttgtaatctctcacaggctgcgccctgtgcctataaatagtgaacagtattcctttactgttcacgcattcctgtatctgcaatcgcatcattcggaaaccaatctttgccaaggcagaggtataactgtattcaataattaaatatactgagtaaatgcaatgtggttcgtttatgattcgtttacctttgatactctatactttatgttattttatacaatctattaaactacaattacgaagatttaatcttcgtaatcgtattgtcgtnnaccttcgtccaaggtccattaatccccaaaggaataatgcttcgttggat

SEQ ID NO: 36112 - DNA, 431 bp, Zea mays
  unsure (1)..(431): unsure at all n locations
nggatattattcatcagaatactacggatattgttgtgataaatgaaaattcttcttcacgaagcatgaaaagaagggaaggtgttttttcgtcaaagactcaaaaacggtacgtatgtaaaatttcatgcatcgtaaagaattgaaccataaaaaaaagacaagtatattacattcaggattacaagatattatacatattatatttcagatgtttttacaatagcacctagtcttccctaagtactacttccgcagcttcattcaggagttgattaacaacttgatccatgatagcttcagctatctttttaatttcatcatctttcggnggagggcccggagacgctttagtatgatctganggaggacaggatacagctacattgctattacaaattgcgaaccgaagttaaanatcaaaattacca

SEQ ID NO: 36113 - DNA, 417 bp, Zea mays
  unsure (1)..(417): unsure at all n locations
agcttgagtagagtatgattgatcttttcatgacatggctctngtagacaaacattctcaatggaaatattccttaatgtggtgtgtggagcctccttatcatctaactcatcgagatgaacctcctccacttaggagccattagtctcatcatacacaacatcacaagaaacttcaacacaccctgtggatttgttgaatactctatatgctcttgtgtttgagtcacaaccaagtaaaaaaaccttctataactttgggatcaaatatagaatttctacctcttttcaccaaaatatagcatttgctcccaaatactcttaaatatgaaacactgggtttgttaggagatcataagatgtcttattgcgaagtcggtgaagatataatcggctaatagtgtggcatgtcgtgttg

SEQ ID NO: 36114 - DNA, 439 bp, Zea mays
  unsure (1)..(439): unsure at all n locations
tccttgatctcatagggtccaatgtatctaggagctaactngcccttgatcccgaatctctgcacactcttggtgggtgataccttaagatagacatgatctcccacctcaaactgtagaggcttccgcctcttgtcatgatagctcctttgcctggcctgagcagcttccaagttcttggtaataaccctgactnttgcctctgcctcgagtaccaagtctggcccaaaaatttccctttctcctgcttgagaccagtttagtggggtcctgcaccttctcccatacaaagcctcaaaaggtgccatctttagactggactggtagtctgtattgtacgaaaactctgccaaagacagacacttgtcccaatccttcccgtagtgtagtgcacatgctcgcaacatatctttcaaaatcttgatcaccctttccgtct

SEQ ID NO: 36115 - DNA, 413 bp, Zea mays
  unsure (1)..(413): unsure at all n locations
agcttccccaccgtctaggccgtcagcgcctcctacngaccgaccttcggctctttggctataatgtctggtttgattcccttgagtggggacacgaacgagagccttccggtggctgcgtccgtcctgagaccatggctgttgctgcagaggtcgctggcgagtcgcccggagcttgtcgccccacaggccccccagtgtggaggttgttcatacccgcggggacggaaccggagttctgtttttaatggcaccttgagtgccggtgtctgttcattgtggctgtcggngcctgaacatgtatgtatcttctgtacggagccctgttttttcctcatttcgagcaccaggcctcgcctgtcggtttactgaaccgcttaaccaagtgtgagttgcctcttgccaaagtgata

SEQ ID NO: 36116 - DNA, 385 bp, Zea mays
ttggaatgaggccagagagatagttgggtctttcctcgtctgcttgtgctctgagatgcctctgtgtgtgttgtgtctgcaagcgcaagtgcggtttctgttggtcgcttggccagcgaccttgcaggtggtgccagagctgcttggggtcatccttgtcttctcctgctggaacaaccccttgggtaacagacttgcagaggtcggcaggtatggcgcaatacagatccacacacagcttgaagaagagcgacatctcggtgaggatgccacacgtgagctggtgggatggcgtgaggtaagagagctggtccggcatcgagaacgggctgtggtcgaaccctgccacctcgacaggctcgcccatggtcgtgcgcgtgcacgc

SEQ ID NO: 36117 - DNA, 417 bp, Zea mays
  unsure (1)..(417): unsure at all n locations
agcttcttctctgtctctccgaagtaacctagcttcatcatcatcggcatatcggtctcggagacagtagatnttccaaaatctaagtggttgggctttgatgggactaaaatgttgtagtcgtcctcttcatcaacattttcttcctcgacatcaacttcttcagcctcagcagtatatacatctttctcaacaatcacctctgtcacaaccaatccagattgcttcataacttcggaaatcggggctgtttcggtggtttcagcctcctctccgtcacgggtcactctatcagttgaacgtactttggccatcacgtgttgaatttcttgcagttcttgagaatgttgatgatttttatggtttagaccaagctccctcatatgcggaagctaaatcaaaatgatgcttagcttg

SEQ ID NO: 36118 - DNA, 458 bp, Zea mays
  unsure (1)..(458): unsure at all n locations
ntatgggtgatagcttcgacactgcttttgagaggatctgccgaaggtgtttctttcttcaggatcttcggctacgaagcatacccccaacagaaatcattaatatggccgaagctattgtcgacgaagttgttaccaaaatgcttaatgaagctgcagaaaaagttctgaaggaagaacagtagttattgtaaaaaacatttctaggatattaatgtaacatttgctgaactaagcctgtaatatttgatgtttataattttgaatctaatatgtaagttttttgtaattcaattctttgcgatgcatgaaatnttatgtacatnaccgttttgagccttcggcgaaaaaacaccttcccttcttttcataattcgtaaagaagagcttntatgcctcgtagggcatccgcacttctaaaaacatcaatgcttcgtaacaatagacccttcttcaca

SEQ ID NO: 36119 - DNA, 325 bp, Zea mays
ttttttgccttttcctccatctcgcgcgatgctacctatgatcccataacaagatgcaatcatcgcctattatatatgaactagacccctccacctctatacaaggaatgggatttctaaggggagaaagcatccgcatttgcgcgtctgccgaggtatgtctcatacccactgagccgacgggtcgacacccttctcactaacggtcgaatcaacggcgggaatctcctcacgcgggcgcgggcgcggctgctctgttttcttccctgcagattattcacccagcccgtccgaaccctaccctccttcgcggagagcctgggct

SEQ ID NO: 36120 - DNA, 376 bp, Zea mays
  unsure (1)..(376): unsure at all n locations
tatctcggcgtgctgccgtattatggtttatggaagtatctgtatcactgccgccctgngatggaccgggggcaacatcagttggtcggaggtgccagcttggagatgcgtcgtgggcggaagaccgagtatctcgagatacccctcaaagacagcattaaaggttggcgtctggagtggtttatagttgataattatggaaattctctcccctcccggtcaggaagacagccagacgttcgtactccgagttggactgagtctcccacagatcaagaagtggccgaggcaggcgtgttgcttactgaagtcggattactgaaagagagaggtctgactgccgaagctgtggtcacagaatttgtttcaagaacat

SEQ ID NO: 36121 - DNA, 412 bp, Zea mays
  unsure (1)..(412): unsure at all n locations
agcttattatgtgactaaaattgataaaactactttttagctgggcatgtttggactccatgagataaaacgaagtggctaaagtttattcactttaggtgctatataaacatccaatgaagaagagctaanaataattaaaatagtaaaattaatggtatccttttagctctctatatatatttggatcttaagctcctaaagtgactaaactttagaccctgttccaaaccactacaactaatggttagccactaaaattagttgagagatttagaacgggtcaattaatggaccaactaattatcacttatacctctcaaattactattagttgttagctgccttggcccagctaataactcattagctagctaacaattagctctagaggtttggaacaagttcttaa

SEQ ID NO: 36122 - DNA, 369 bp, Zea mays
tggaaccagccctggttccgtttggccggtcttggtgctcgccagagctccacagcgcgcgccgttgtcgaggaccttcccctgtgaagagatagaagatcgagggcctttctgcgaagtgtcagcgactcccgaaaacagtgcttatgctcatttcagattagccagaacaccgaggacccttcttcaaagccgccatcgcgggcgtgggcgcgccccgtttctctgtatagttgggccgcctgagctgaaatcagactaggactgttcattctttatctttttctttttataacagaactaaaacaattctagaaaatggtagaaaaatcctaaaattgtgaaaccaagtttcctagactttttatt

SEQ ID NO: 36123 - DNA, 445 bp, Zea mays
  unsure (1)..(445): unsure at all n locations
ngtctttagctncatccttttcttcatcccaaattggtgatatccagagtagcagtccaataaacttatgagttccaaagaagctgctgcatctacaagggagtctattcttggtaaactcatcttttggacatgccttgttgagatctgtgaaatcaatacacattctccatttcccattagccttcttcaccatgacaatgttagcttgccattctggatatgttacttctctgatgacaccagcactgagaagtctctttacttcattcggagcacctttggctttatcctcagacattttccgaggtctttgctttcttggcctgaaagatggatccacattgagtgaatgctgaatgacatctctgttaacaccacagagatcattagctgtccaagcgaagacatctttgttgtaaacaaaaatcttagcagagtcttt

SEQ ID NO: 36124 - DNA, 441 bp, Zea mays
  unsure (1)..(441): unsure at all n locations
catgcaacctngaagctggactatgcgctatgacgaatgaggatcttgcttattaccttgcatataatagcctgaaagtgcgataattgtatatctaaaaatttacacattatcgaatcattctatcattcttataataattcttttttcatataaggtttaatactaagcaacgctctgagagcgcaaaagaatgctgaagactaaagttattatattgctttcaacatcttacgagcagaagttttcaagctgatgaacgaagctttggaaaaagataaaaatctgcttacactagtggataaaatagaggaagacgaaactacctttaaggctcaagctgaagcccataaacacgaaattcaagatcttcataaacaactggccaaggctaaagaagaactccttctttaagaaacataacatgaacttattgatcaa

SEQ ID NO: 36125 - DNA, 343 bp, Zea mays
atattccatatatttggagtatattcccatcctgaagatatgactaaacgctccgctgcacttttgtttgaaactaatgatctaaaatacgaaagaaatgatgcccctttattctatatgcagcgagtgagcattgaggaccattccatattgccatcactcaaaaagcagttgccccctctgataattatacatggcatccatcggacccgagaaattaccgatcgacctcaaacgacacgcaggtttgccactttgcctgacaacatcctaacgttactcacgtaccattccaatcaccctctgtcgcaccatctcgatcaccgatattgggacacaactt

SEQ ID NO: 36126 - DNA, 436 bp, Zea mays
  unsure (1)..(436): unsure at all n locations
agctttacctagttgtttttgcaaaagaagatgccggtctagatgcatgcttaatggctaagacttgcatgggctggctgtggcatcgccgcttagcacatgtggggatgaagaacctccacaagcttctaaagggagaacatgtgataggtctaactaatgttcatttcgaaaaagatagaccttgtgcagcttgtcaagcanggaaacaagtgggaggctctcatcacaccaaaaatgtgatgacaacatcaagacccctggagctgctacatatggacctcttcggacccgtcgcctatctgagcataggaggaagtaagtatggtctagttattgttgatgactnttcccgcttcacttgggtgttctttttgcaggataagtttgaaacccaagggaccctcaagcgcttcctatagagagctcaaaatga

SEQ ID NO: 36127 - DNA, 435 bp, Zea mays
  unsure (1)..(435): unsure at all n locations
tcatactagcttccttaccccaacgcatacgcccttattggctgacctttagtnacatgtctcctcagaaatatagggcattcgccgattgtctgcataactcttctgacgagcttgagctttcttcaaattatgaattattctttgaactttttcttcggtctctttcaccatatcaggcctgatgaagtacctttcaccaggttcagaccaatttagcggagtacgacatcgtcgtccatataaagcttcgaagggtgccatcttgatgctctcttgatagctattattatatgagaactccgctaacggtaaacattcgtctcatttttgtgggaatttcaaaacacatgctcgcagcatatcttcaagtatttggttcaccctctcagtctgcccactggtttgaggatgataagccgaactgtggagcaa

SEQ ID NO: 36128 - DNA, 436 bp, Zea mays
  unsure (1)..(436): unsure at all n locations
agcttatgaagattcttatcccacatgggctagtcggcggtgtcagagccaacccatgttagtcttagcaattaagcatgtgtcgagttcagctctatcaaaatctaccaagtatagttgaccctctaacacacccttaaatgctattgaatcatcacttcttctaaagacagtgacacctacatcagtaaaaagacagttgtagcccattgacataattgagatacggaaagcaaattgtaatctaatgaatcaacaagaaaaacattggaaatggaatggtcaggagatatagcaattttacccaatcctttgaccaaaccttggtttccatccncgaatgtgatagctcgttggggatcttggtttttctcgtaagaggagaacattttcttctcccctgtcatgtggtttgtgcacccgctgtcgatgatcc

SEQ ID NO: 36129 - DNA, 414 bp, Zea mays
gctcatagaatatctaaacatagggctactaaagtatctccttttgagcctggctatgggcaagaagcaatggtgcctgttgtcacacccggatattatgggtccaaaacccgggcgcgaacataaacaccaggtgtgctgggaccaagtctcacacatatgatgcatattggcacaagatcgaatgtcacatctttactatataacaggagttctgtacaaaaataattagataattacatcatatgaggaaacgatccagcaacccaaagttgactgggagacgatggcctagacctctcacgaacacatcgcagcatcctccaagcgcctcatcctgcggtacctgttcttgacctgtgggggggtgtgagacagcaagagtgagctcacatacgttcatcgctcaacaag

SEQ ID NO: 36130 - DNA, 395 bp, Zea mays
  unsure (1)..(395): unsure at all n locations
ntacaatccccatcggcccttttagcattgccgatgattgtttctttgcctttgcctttatcagctgtatttggccgaatcaggactttcttgccctcgaagtcaatcatgttcatcggaaagggctctgtatccacctgcatttcctgaaatttcaatcgtccttcgttaatggccgattgaatctgtcgccgaaatacattacaatcattagtggcatgagaaaatgagttatgccacttgcaatatgcacgacgttttagctcgtcggcggatggaacagtgtgatttattttaatgttgccattcttaagtaattcatcgaatatcctatcacacttaccaacgttaaatgtaaacttaacctcctctttgccgcttctttgaaccggctg

SEQ ID NO: 36131 - DNA, 385 bp, Zea mays
tcaaggaccaaacaggaagaggtctatgttgagcaacctccctgctttgaagaaagagagtaccctaaccatgtatataaactctctaaggcgctttatgggctcaagcaagccccaagagcatggtatgaatgccttagagatttccttaacactaatggactaaagtcggaaaggccgatcctactttattcactaaaactcttgaaaatgacttgcttgtatgccaaatttatgctgatgatattatatttggggctactaacgagtcttcatgtgaaaaaattagtacgatcatgacgcaaaagttcgagatgtctatgatgggcgagtcgaagtatttcttacgatttcaaggtaagcaactccaagagggcaccctcct

SEQ ID NO: 36132 - DNA, 439 bp, Zea mays
cagcttaatataatcaagccgtgctgcatgatacaacaatggttattaatcaatcaatgtatccatcagttcatttttcgacaagtgtgtttatttaaacataagatgtaagcatggggttgtacacatagctttatgcattgaattccaattgaaactaaatatcagaaaccaagaagactaaccacactgatcttacaaagaccgttagctggcactagaacagcaagtcagtaaccaactattttcgtaagtcattatataatgggagatctaaaacagatttacaagttcaaagccagcataacatatagccacacaaaatgattcatgccttgaaataagcatgtaatcaagttccatttttaaatggaactgaaattcacatcttgacatgacacaatatcagattactagctaaacaaataactatttcatg

SEQ ID NO: 36133 - DNA, 423 bp, Zea mays
  unsure (1)..(423): unsure at all n locations
agctntaattctgataataaattcttttctcacaacaattcactaaggcataccgacatagctctgaattctgcttctgcagttgagcgggataccactgattgttttttgcttctccatgatacaagatttcctccaacaaaaacacagtaacccgaagtagatctcctgtcatccagacaacttgcccagtctgcatcacagtaaccttccacatctaaatgacaatttcttttgaaccacagtcccttccccggacagctcttcaaatatctcaaaattctatagactgcatctaaatgtccactccttggatcatgcatatacctactcacaacacttactgcgtaagttatatctggccttgtgtggcataaataaattaaccgtcccacaagcctttgatatctttctttgtcaata

SEQ ID NO: 36134 - DNA, 407 bp, Zea mays
  unsure (1)..(407): unsure at all n locations
tctgctcgcagacgtgagggtgagaatgcacaactcactttacagatggaagctgcaaagcgacatgcagcagagtcagcaacaaatatttcagagcttntaaagaaagacgagaacagccgtaaaaggtctcagcgttgggaatctgatagagccctattacaagaggaacttgcagcacaaaagagcaggttatttcgggttcaagaacaactccagcatgctaaagagctaaaggatcaagtgcaggtacaaactgttctatatttgcctcgttgtaagttgttaccttgttttaattggaagctcanatagtataatcatatgacctatgctcattnttattcacgtggttcatggaaatatcattactggctgtgtacttgactctattaggctgtgtgcat

SEQ ID NO: 36135 - DNA, 454 bp, Zea mays
  unsure (1)..(454): unsure at all n locations
ttctcgacccgngatccttatagttacctgcggcatgcagcttcaagctaatacttacagatactgtgcacaagagctataaaatgagtgagcaagagtggttggccaaaaagcgtgcaaaataagtttgcgggatggccgtatttatacgcttgatgcgttgaaagttgaaagaccccacttgtcattgaatgttgctattctagcaaagggaaggtgttttttcggaccttcggcataaagccttcgttcatatcacaatctgaatttattatttcaaacaaattaatattgcgaggggctactgttgggggccttctgcttccgaaggtcctcaaaaacatgatttaacagtgtttctagagtgtaatgtgtgaacaggtaccttcggacttatatcaaagagggagaacctcaaaagatacgaaggttggcagtgccgaagctgtgaagc

SEQ ID NO: 36136 - DNA, 386 bp, Zea mays
  unsure (1)..(386): unsure at all n locations
nngcatttaaattttcaggaccaacacggtcacgttattatacatgtttncagctaagccagggccaatacgcacaatcctgttgcatgaatcaatcattaacgacgtaacatgcatgcatatatgcagtttcgagcaatcaggaccccggcagaaatttaacttcagaaagaaactgcaaagttccgttcttttctttgttgcggccctatgcgatgcgcatagtccggtaccattcaaactctacaaagtttggaacttttctttgaaaggtaccattcaaactctacaaagtttggaacttttctttgaaaaccttgccgttggtccatctcagacatgaaagttatacagttatgcttgtcttcaggggtggatctacaccc

SEQ ID NO: 36137 - DNA, 422 bp, Zea mays
agcttctaaagggagaacacattttaggattaacaaatgttcattttgagaaagacaggatttgtagcgcatgccaagcagggaagcaagttggtgctcaccatccacataagaacatcatgatgaccgacaggccactggagctcctacacatggatctattcggctcgatcgcttacataagcatcggcgggagtaagtactgtctagttattgtggatgattattctcgcttcacttgggtgttctttttgcaggaaaaatcctacacccaagagaccttaaagggattcttgagacgggctcaaaatgagttcggcttgaggatcaagaaaattataagcgacaacgggacggagttcaaaaactcacaaatcaaaggcttccttgaggaggagggcatcaagcatgagttctcttct

SEQ ID NO: 36138 - DNA, 357 bp, Zea mays
  unsure (1)..(357): unsure at all n locations
ntatctagtttatttactaaagagaatgccgatatagatgcatgtttaattgctaagactaacatggggtggctctagcatcactatttagcatggtatgaagaaccttcataaacttctaaaaggagaacatgtgctaggactaaccaatgtctatttttagaaagatagaccttgcgtagcatatcaagcaggaaagcaggtgggaacacgtcattctaacaaaaacataacgatgacatcaagaccacaataacttcacatggatctcttcagacccgttgcttaccttagcatcagggaaagtaagtatggtctagttattgttgatgattattcggcttcactcgggtatga

SEQ ID NO: 36139 - DNA, 352 bp, Zea mays
agctctaaaagtatgggtgcatgataagcatcaatgtaaagatcgagggatgacaagaattaaggtgataacagtcaaacacacaacaaaggatgtattttatacaaaacttgcaaggtgtcaaagggggagcagtcaatgatgaaatataggaggcattatcctctgacagggattgaaaagggaaggctttaaagggtatgtccaaggtaagcacgaatgcaagggcatatatatcatgagggtttgaaaggtaataaccggcaatgatgtatgagaggaggttaatatacataagacaaaggatataagaacaaaaaaggatggagttaagacatgacctgccaatgga

SEQ ID NO: 36140 - DNA, 430 bp, Zea mays
  unsure (1)..(430): unsure at all n locations
tatcagcagtataagcacaaaagagagattgttgctntatcagatcagccgaagcctatgctcttgtgtgaagacatagcagagcaaaaagtgttgctgggatctcagctatctggtgcacaggaaaagactttgctaagattcttgtttaacaacaaagatgtctttgcttggacaactaatgatctctgtggtgtcaatagagacgtcattgaacattcattcaatgtggacccgtccttcataccaagaaagaagaggcttcggaaaatgtccgatgataaagccgaaggtacacaaaatgaagtgaagagacttctaagtgccggtgttatcagagaagtaacatacccagagtggctggccaacaccgttatggtgaaaaaagctattggaaaatggagaatgtgccttgattcatagatctcaa

SEQ ID NO: 36141 - DNA, 403 bp, Zea mays
  unsure (1)..(403): unsure at all n locations
gagagagggaacgggtcccatgtctcttgagaggtctagtgttgtgaagaggagtttgatgttgagcgagccgtctcagtccgtcctccttcttcccctcccttgggaaggccctgngcatctccttttataggtgcaaggaggtgacctatctgtacatatgggggtgtagctttgcgctaacgtggatggcggaaaagtgcttgaaccctgtagaagcgtggctggcggtgcagccctaggtcctgctgacgttcctttgatttcgtagagagcttgaggacagtcgacgtcatgagcgcatgccggggatcatcattacctattactggagtaattntgatgtgacaccggtcttgttcctttgtagcctgaggtggctagctaggggtaggataatgtc

SEQ ID NO: 36142 - DNA, 407 bp, Zea mays
  unsure (1)..(407): unsure at all n locations
acctataggttgatatctacaaggacggtcaacgacctcccaagttccattatacataatagattccatctcactccttactgcttccttccataagtcagcatcaggagaggaatatgcctcactaatggtagttggtgtgtcttccataaggtacactataaagtcattaccaaacgattttgataccctctgtctcttgctctatcgagtgactatagtgtcatcctcctcanggatgtgcacgtgagaatcctctgcatgatctataggaatcgacagatcgtgctcatggggaaatatagtctcatgactngtatcactaggtgtattcttcatgggacactcattcttcaaaaatgttgcgtctcttgattcatgatagatcaacatacatatcatgcaca

SEQ ID NO: 36143 - DNA, 283 bp, Zea mays
ggatcttagcacgagctcagcttacaacacggaggttccctcaaacgcttgtttagtgccttgcccaaccaaatgatgaacgtgaccttttttgattggccctttacgcctctcccatcaaatgaattacacgcagagaaccccaaccaggacaaatactgcaaatgctacaactgagtcacaaaagtcctgttctgtttgtacaaaaacaaaacgagtgacccttctctattatacagccacattattttatcgcgcaagaaaactgtttgggaccaaattc

SEQ ID NO: 36144 - DNA, 449 bp, Zea mays
  unsure (1)..(449): unsure at all n locations
tncnctaatccttgttggaggtctacacaagggaagcctcactagggcctcttcatggatagacttggtccttgttggctatcgactagtatatttattgaggtatcgagaaggtaactccatggatagccccaatccttcaccacacacaaagtgggttttcgatgtggcatctcctagatgctctccgccatattcactatgattgaaacgatgtaggcctcaaggccctcaggtacaactaatacaccaaggagtaataagtgtttattcctcacttcaaatactaagaaaacctagattaagagctatgtgtaattgtctaactaatctaagcactttgtaaagcatctatgctaatcatttattgacctttgagcactcgagtgtctagagatactangaatgagtctcaactcacttgcattttttggtagctcctacacatc

SEQ ID NO: 36145 - DNA, 423 bp, Zea mays
  unsure (1)..(423): unsure at all n locations
ataaatggacgtgaaaagtgcctttctcaatggaccaatcaaggaagaggtctatgttgagcaacctcccggctttgaagacagtgagcatcctaaccatgtctataggctctctaaggcgctttatgggctcaagcaagccccaagagcatggtatgaatgcctaagagatttccttattgctaatggcttcaaagtcggcaaggccgatcctactttattcactaaaactcttgacaatgatttgtttgtatgccaaatttatgttgatgatattatatttgggtctactaacgaatctacatgtgaagaatntagtacgatcatgacaaagaaattcgagatgtctatgatgggagagttgaagtattttctaggattccaagtcaagcaacttcaagagggcactttcattaaccaaac

SEQ ID NO: 36146 - DNA, 339 bp, Zea mays
  unsure (1)..(339): unsure at all n locations
ttagagganattctagtaaacaagctnnttctaattttggtatattggtcatgaattcctgctatggcggaggacaaattgaaaggaaaatgtgcccttgggccatttctgagtattttggtgatttagtgtccaacacaagtacctaagtgttaaatggtggacaaagtacaaatcaagtataaaggtatgtttcttagacttagtacattgttttagagactaatgtattgtgtctaagtgctggaaacaggagagatcgaattggagaagagatggccttgttcagccaaagccagctctgtctgggtgcaccggactgtccggtgcgccaggctg

SEQ ID NO: 36147 - DNA, 444 bp, Zea mays
  unsure (1)..(444): unsure at all n locations
tattgactccagtctgaaatacagaagaagacgaanacacaattagtgccttgtgaaggaggccacagtacatcgtcttcaaataaaagagtgcccgaagctcgcttcacctggagcttcttgatagctgacccatccttgttgaagtacagctccttagccgcttttactctgaagttagccctcctctgaaggcgcacattcttccccgttggagcagccataaggccaactgtagaagtggcaccgaacgtcgaggccatgtcttctactgcatgtgcggcaggagtcacattagcatgagaaaacgatcgaagcagacacataattcatagccagccttctaaccatctctcaagcaaaagggagtaacgctatctctgatgcaaatggaaagcacatattttttaccgaacaattgaacacctgctacggtcggacata

SEQ ID NO: 36148 - DNA, 384 bp, Zea mays
ggatattaatacatagataatatatgttaataaatatctccaggattagtacctataatttcacaaatataaattgtaatgatgagccacataagttgatattaaacttgaattcaaatttggattataaaatggtgaaaaaggaatggaaaatataaggataaaacaaaacccatctaactgggcctcttacctgatttcggcccaccgaaggaaacatactgcgcggcccagctggatgctcccacgcgcgcgctgctggcgctgacgaccgggcccgcgccgtcagtccctgggggccgcgcgtactaagccggtactgctcggtggccccaactgttacccttttcaagtttcgctgccatgtggtccctagcggtcaag

SEQ ID NO: 36149 - DNA, 301 bp, Zea mays
actcttgaatcttgggggattgaactccttgaagtacctcataacaagggtgttactgggccttcttctgctgttgctgttagagcaagctgcggagagatgactgacataaggttgattctgggagaaccttcttcttatcttctcttcactatcttcttttcactgtccctttctttctctttgctcttcccactggaggattctatcatagagtattatcatcatacagaggaggaaaccaaagactattgaccatgtacaacattcttcaatccaagaatcaccaagcattgtgatc

SEQ ID NO: 36150 - DNA, 435 bp, Zea mays
  unsure (1)..(435): unsure at all n locations
nacttgctttggccgaagggtcttttatacttttagaagataatgctgcctcggttngcgccaaggatatcacatgatcgcaacctctgctctccaaaatagtggcaacccccctagcacccgaaaaggcgcatatgtcttcacggccattcaaaactttttcaaagcttcggcttcgtggctggtccattcaattgggccctcggggtcgccctttacgaaattttcctcgcttgaatgcgcgccaacgttggcgaagctagtttttattttcttaacacactctattgacttttcataacaccttttcttggatgcacgaaactcttcaacgcttttctctaaatgaattgcccattggtcactgatttctcgtgtagcttctgcaactgcgcatttttttttaacttcggctagctggttctgaaaaccctc

SEQ ID NO: 36151 - DNA, 416 bp, Zea mays
  unsure (1)..(416): unsure at all n locations
gcttggctacaactggcaatctcatagcctttgaangaccttgctcaaatgtttctcatgctcttgctcattctgggaatatacgagaatatcttcaatgaacactactacgaacttgtcgaggtagtccatgaacacactgttcatcatatacatgaagtaagctggcgcgttcgtcaatccaaatgacataaccatgaactcatataatccatacttggtgatgaatgttgtcttcggtatgtctgaaggtcggatcctgagctgatgataacctgacctcagatctatctttgaaaacacactagctcctctcaaatgatcaaataggtcttcaattcgaggcaggggtacttgttcttgacagtgacttcattcaaagctcagtaatcaatgcacatcctctttgtaccatc

SEQ ID NO: 36152 - DNA, 405 bp, Zea mays
catacaaactttacagaacctctcctattcacttttctctttgatagttatcctaatgacgtttaggggactcatatgtgaaaatggtgcatggactacaaaccacatggagtagggatcccttacgggaagtcacaagtactacctatcagctctgttgtccttgtacccacccatgggacagaaaaagactcttcttggcttaatgcatcaacagggcaaatagcaagaccctcgagggagtatatgaataagtaccctccttcaaaagatctgaagatctgagtcctttgactccgcccttcaaacctataactcataacggagcatctaaatgactgaagtacccaaatggtgttgccatggctccacctagtcaaaggtagccaactagcccgagtacta

SEQ ID NO: 36153 - DNA, 420 bp, Zea mays
agcttctaaagggagatcacgtgatatgtttaactaacgcgcatttcgaaaaagatagacctcgtgcagcttgtcaagcaggtaaacaagtgggaggagcacatcacagtaagaatgtgatgaccacatcaagacccctggagctgctacatatggacctcttcggactcgtcgcctatctaagcataggaggaagtaagtatggtttatctattgatgatgactattcccgcttcacttgggtgttctttttgcaggataagtctgaaacccaagggatcctcaagcgctttctaaggagagctcaaaacgagcttgagctcaatgtgaagaatataaggagtgacaatgggtccgagttcaagaaccttcaagtggaggagtacctttgggaagaaggaatcaagcacgagttctccc

SEQ ID NO: 36154 - DNA, 175 bp, Zea mays
atcacattctcatcaagtgaggtgaacattcgtgggttgcctgtcatatgttgagtgcatacacttgcaataacccaatggctcccactggtcttgtagttcacctacattcccagacaaatcacgcttgagttttgagggcctataatgcatatgaccagtgactctttcatca

SEQ ID NO: 36155 - DNA, 407 bp, Zea mays
  unsure (1)..(407): unsure at all n locations
agcttaccacatntgatgcatgagcgctttttcttggtcttggtcttgcttggctgtcccttgcgatcctttagcgtcgtcttgaatcttttgatgatgagggccatctcttcatcattaagtccggttgcctcaatttgcgccacctttctaggtagcgcctccttgctccttgttgccttgagagcaatgggttgaggctcatggattggaccattcaacgtgttgtccacgtacctcgcctccttgatcatcattcgcccgcttacaaatttttcaaggacttcttctggcgacattttggtgtacctgggattctcacgaatattattcaccaaatgaggatcaagaaccgtaaaggaccttatcattatgcggacgacgtcgtgatccgntcatcgcgtgct

SEQ ID NO: 36156 - DNA, 429 bp, Zea mays
  unsure (1)..(429): unsure at all n locations
tctaaagggagagcacattntacgattaacaaatgttcattntgagaaagacatgatttgtagcgcatgccatgcggtgaagcaagttggagtccatcatccacacaagaacatcatgacgaccgacaggccgcttgagctactccacatggatctattcggcccgaatgcttacataagcatcggcgggagtaagtattggcttgtaatagtggatgaatattctcgcttcacttgggtattctttttacaggaaaaatctcaaacccaagagaccttaaagggattcttgagacgggctcaaaatgagttcgccttaaggatcaagaanataagaagcgacaacgggacggagttaagaactctcaattgaaggcttcttgggangaggcatcaacatgagttttctcttctacacccacaacaaat

SEQ ID NO: 36157 - DNA, 400 bp, Zea mays
tcatattttacttgtcaacctcagtactactccctaccttctatacaataataaggccgtttttggcctttgtagatacattatttttattatacatctagatgcattatagaactaattctaattattataaccgagggagagtagttcttattggtatagtaggttctgtttctcacgtgctcaattaactgttgcaggttctgtttcatcctcatataacagaggactagaagacatccacacgtaccatcaatcaaattgcaaatctctgaatttacctcataatcggacgtgcttgttgtcataccacaaacaattgattacttggagctgtagtagtctaccggactctttaacgaaacagtagtatggctgaccctccaacttcccacatggt

SEQ ID NO: 36158 - DNA, 457 bp, Zea mays
  unsure (1)..(457): unsure at all n locations
taggctatctccaacaaggcacactaaatggccttgtatgctaaatttanaggacgaactatatgctatcgccttcgtcaatagtctgtaagagggtcgctaaaatatagagtttgtcagtgtttcataccttcgacaagtaagtttattgtgcgtgttccatgctctggagggtgtgcgcgaaggacgcaagatttataatgtttcgggcagaatgtccctacctacagttatcggtggcttgcgctactggcaccattcatgatcgaactcgtagtataggttacaatcagtcgagagaaagagaagaggctcttggatctcttatcgggatgaaagtggagcttagaagttgcaaggtgaagttctaactaagtcttggcgtggcggngcttcgccctcctcgtncttatcgacgcttctttctctattcgtacttgtgggttcgtctacgtct

SEQ ID NO: 36159 - DNA, 464 bp, Zea mays
  unsure (1)..(464): unsure at all n locations
tcgggtcagggagtcgccttagaggtcagcgctcctgatgacagagntttgatctctgctagtgatactaacctggtccctactgatgcattgcgggttgttccggatggagatccttcatcgagccatcaattaacttcccacgacttgggagttccttcgttcttttccaacctccaggtaacttggtttttactgatctggctataccccaggtgtgatattgttcttacactcatttgtttttaatgtcaggcattggttgatgaaatggttggtcagctgaggtcgcagggtgcttctgtcccggaaagagctctatctctagcgcattggaatccagtgctgcttcagcggtgggtatctgatatggagatggcaaatgcatgttagtgccctntgtttcttctttgactacttgattaatcttgcttgtagctgaacactcttgctngactatttct

SEQ ID NO: 36160 - DNA, 381 bp, Zea mays
  unsure (1)..(381): unsure at all n locations
ttgagnctgtccaatttccttcggcccttctggcagcttcctgacttccatgaatagcaatgggcccttggtccgaaggtatcttcatgcaaatataagctggatgaagaattgctttgaatgcattgagagtaccacgaccaatgattgcatcgcaagggtattccatgtcaacaatatcaaatacaacttgttcagtccttgtgttgttaatgaatccgaaagttattggcattgcgatttttccaagtgctacgatctgccttcctccgaagccacaaaggggatgtgtggcatcatggcatttgtcctcgggctcttgcatctgtctaaaggccttagcaaatatgatatctgctgcgctgcctgtatcaaccaaaa

SEQ ID NO: 36161 - DNA, 313 bp, Zea mays
tggactgtatggaaacatcgtaatgactgtgtgttcaatggaaaatccccaagcctctcaactgccttgatcatggccggggatgagttgtgtttttggaatttagcaaaagcggtcttagccttctcatagacccgggctgaaactcttttggcttgtacgtgtttgtgtatgtgttgattcatgtttgtgggcgcccacttttggctttcctttctccttctattgatgaaatggtaaggaactaccctgcgtgttcgagaaataacatatgaaacatgtgttcaagctcttgtccctcactgggccacgt

SEQ ID NO: 36162 - DNA, 415 bp, Zea mays
catgcactttggtacttactatctggacattgtgagggaaaaccctacacctcttctgaaaccctacctcccaaaaccatggttgagagagggagagaataatcacatgtgaaaatcatgagtttatctttaaccaaactttaagtaactttataaccagcaattgtgggaaggaaatgtttgcataaagactcctggagaaaccccaaatctattccttaagtggagagagagctagagctctcaaatttcctctaagtcaaaaactacacctacactaaagatcaaccgtgttcaccttgaagatggcaccaaaaccacctaagttctattccaaaaatgtggcctaccacctagggcacccactggagaaagttgagcccgagaccttgagcgttgacatgccttgtcatgg

SEQ ID NO: 36163 - DNA, 360 bp, Zea mays
tgccttcgcttcagtctaccatccgcagtccaacggggttctggagcgcgccaatgggaaaatattcacagctgtcaaaaagatgctcctcgatgaaagaaaaggcatatggaccgatttattaccagaggcagtctgggcgctaaacacaaccgagtgcagagcgaccgggttcactcctttccgccttctatacggatcggaggcaatgaccccgcaagaaataaagcatgggtcctcgcgtacagttccgtcagccgtcctcgacgtggatgagccaacttcaaaagatctcattgacggagaccgggtcttcgcccaacaggccctaaacaaatatcaagcccagaccatagcatg

SEQ ID NO: 36164 - DNA, 389 bp, Zea mays
cacttctaccgctggaccacaactaggagaccgtctctcttctggaggccagaagccacaatagaaaaaccgtcagccctacgcttgatgaagaagagctataccaagaaatcatagagatggagatgctacatcaacaagtgcagaggaagaaggagaagatggcccgcctatctgagttgcacaggcaaattgacgaagcttctgaggaagttcgccatctcactcacgatgagcagaacagaaggcctcattagatagaccttcatcaggagggcttcgtcaacgaagacgactggtatgataatttccatcagggaaactatggttctgatgatgctcctcctctgtctgctgagctgcaggctacttcattggcctccatccta

SEQ ID NO: 36165 - DNA, 461 bp, Zea mays
  unsure (1)..(461): unsure at all n locations
cacgaaccgctgagttagagtgggaactatatcgcaaacttctgantaattttgatggatagtctgtccactgtgtaggaaagccttatgaagcatatggttactagcattgtgggagatcatatacacgaacatcccaagctgctcttcgactttaactcctcgtgtgtcacataacaaaccctcccttctaaggaaatctgacgtggctctaaatatttttggctccattcgaaactcggacttgcaccaactctcatgcccttcaagaatcttcttaaccttctgggcaccaaagagagaggaggtatggatatacctcttctcttcagagatgaatggaagtatagcacggagaagactanagaaaaactcctcatcgtcttcttattccttcaacaaaaactgtctagctagctctttccaagaacccatatctgaagattatttgacatgagtac

SEQ ID NO: 36166 - DNA, 418 bp, Zea mays
  unsure (1)..(418): unsure at all n locations
gcttgagtcagtcatcctgcanagaataattgacgcacaaagaaatgatgagggaatgaggcacattcatgagaaaatagaagctggtaaagccaattgcttcagaagagacgatcaaggtgttgtatggtttaacaaccgcatagtggtgcctaaggataatgagatccgccagcaaattctagatgaagcacatcttagtcgctattctattcatcccggaagcactaagatgtatcctgatctaaaacaacattattggtggacaaagatgaagattgagatcgcacgctatgtggcaagatgtgacacttgcagacgtgtcaaggccatacacatgaaagttgctggtccattacaatctctgcctataccaacatggaaatgggaagatataagtatggactttattgtggga

SEQ ID NO: 36167 - DNA, 253 bp, Zea mays
ctctccgctataattcaccgaactgtccggtgcagcaccggactgtccggtgtgccaacggagtaaccgctacaacgccaacggtcgactgcaaaagtgaacagtgaacagtgccgcctgcgcacgcatagtcagagcaggcaccaaatggcacaccggacagtgaacaggacctgtccggtggcccacatgtcagaagctccaatggttgaaccctactggttgggtgacgtggctggcgcaccggacagtg

SEQ ID NO: 36168 - DNA, 298 bp, Zea mays
aaaactttcttcactagaaaatgcgccacacctggcgaactggattttataattttgacacattctatatgataaacatagcatttcctttgggatgcacgaagcctctgagcacttaactcttaatgattaactcacctgatcactaagctcttcgtttagtttctttaagcacacgttcctctttagctctagctagctgcttctgaagatctttaatctcattgttttgggcttcggcctggatctttgagggagcttcgtccctttttacctttgctaccaatgtaagcaaaat

SEQ ID NO: 36169 - DNA, 391 bp, Zea mays
gcttatccctgacatctgatgcccgtctgtttaggaccaacggtatatatccatataccgacgggaattagttatccccgtcgtttaaggcttattcccgtcggttctaagccgacgagaattaattggattcctgtagtgggctagagtctattcgaattttattagcctatgttgctcacctttccattaagcttgaccaaatggacatgaagagcgccttcctcaatgggccaatcaaggaagaggtgttcgtggagcaacccctggcttcaagtatgacaggtacccaaccatgtgtagaagctctctaaggcgctctatggacttaataaagcccccatagcatgtgatgaatgcctcataaattttcttatttctaatgctttca

SEQ ID NO: 36170 - DNA, 458 bp, Zea mays
  unsure (1)..(458): unsure at all n locations
acaaacaaaaactcctatctactatattcaaaatctctcaagtggtagctgatccatttatcacattggcctttattttctccccctttggcatcaagcaccaaaacgggatcaatcttggcctgttaaccccattgcctcaccatagtcttcaattaagagcaaatggcaataagatttcatgagatgaactcggaattagttaccctctcatcggagtgcagtggaagtctttcatggtccaagttcaccttttccctttcaatccttcttcgagactaaattatcaaacttaagcacaaggttagtctcaaagggtcaagttgtaacacatcttcccctaaacatgtgcatcactttgcaacggacatgtgaggtccagggagtgtttgtacaacttgagcaccacaataagcaacataatgcagaatgaacctgatcaaatgcatanacacatg

SEQ ID NO: 36171 - DNA, 416 bp, Zea mays
agcttcggctttgtaaacagttttctagtgtctccgaagatgtcttaagataagaaggctgttaccgagatgaaactgagtctcgatgaagagaaaaatctggggtttcttatagcaatgtcgaagaccaacacagaaaaaatcacgaaggagattctagaaggtttgtctgaggatactggtgacagcgacagttactatgtggacagcggtggtgaagactccgaagatcgtccctggcgaccaagccattcagtttatggtaaatcaactatcaaagagaatcatcttgtcaacatgagaggaaggtatttccgggatttgtccgttgtgagggccgatgaaggggagaagacttgtccacacccttgaaagaatgaagtcgtattgtctcgaagctttttgaaagctgggct

SEQ ID NO: 36172 - DNA, 370 bp, Zea mays
tggactgtattctgcgatggttcctgtggaaccttctgggcaggtgcagctgccgttttaattacaccttccaaagttagaacatgctacacagtgaaacttgattttagttgtacaaataatattgctgaatacgaagctttgcttttgggtcttcgaaagatgaaggcaatggggataagaaaggcggttctcaaaactgattcccaagttatttctggccatgttgacaaaagttgcaaagcaagagatccaaagcttgagaaatatttggatatagttcgaagacttgaagcttccttcgaagggttttctgtcaagaatattccacgaggagaaaatgaacacgctgatctactagccaagtcag

SEQ ID NO: 36173 - DNA, 157 bp, Zea mays
tacggtctcacaatttactatctgaagctaggaacaacgagaagacgaaacggctgccacgggttgctctcggcggctctagcgggtcgcggagaggtcgccagaactaagggcaggctcagggaagttacgcgtggtaccgatgacgcaaccggga

SEQ ID NO: 36174 - DNA, 440 bp, Zea mays
tgtcatgcgcttagttatcggtgtttatgttccccacctcttctttatgagagtttgcatttcatatcattacataagcattcatgtatttgtaattgactcgtagaacacctataagaagtggtgtctgaagaagaagtctgctccaagtactgttgatccagtggtggagtttcatctaactacttaccagagtagaataattttgggatattttcctgcaataaggcaagccccggtgcatatgccacctcccttgtgtttacaaaattttatcacttatatgctgcattaggtgataggagttgattgattaaacacttgatgcattaccattcttgaaagattgttaccataccttgtcacctgttttatataagctatagatgcttattcatgcttgtagactaagaaaaatgtttttgatctatgactcatga

SEQ ID NO: 36175 - DNA, 288 bp, Zea mays
tctgatgtggcggcatcagcaaactcgttgatctttctcgaaccttaaatcatgcactcaaaacttacaaaattcccgataactgcctcgggggacaattttggatatctaggatagccaccgattaatagaacctgagtagggtctaagaaaacaaccgatcttatagaaaccttaaccacctctgggtcataccactttacccttccgaggatgcgcgcttggtcaccaaggtctcgagccgataggacagcgttgtggctcctcccattgcgaagcagaaccgac

SEQ ID NO: 36176 - DNA, 468 bp, Zea mays
  unsure (1)..(468): unsure at all n locations
tgaacacatggttaggtcttatggggtcctcaaaaccgggaggttgttcaacatacactagttcactaatcttaccatttagaaaggcactctttacatccatttggtagagcttgatattgtgtgcacaagcataagcaagtagaatccggattgcttctaatcttgctacgggagcaaatgtctccccaaaatccaatccttcaatttgagtatatccttgtgcaactaatcttgccttgtttctcactaccacaccatcttcattgtgcttgttgcgaaacacccattttgtaccaataacattgtggttctttggtctctcaacaagctcccaaacttcatttcgagcgaagttatntaattcttcatgcattgcattcacccaatcaacatcaagtagagcttcatctacaccggtaggttccatacacgatacaaaagagaaattgttcacaaatgaagcta

SEQ ID NO: 36177 - DNA, 418 bp, Zea mays
  unsure (1)..(418): unsure at all n locations
agcttcggcatntcaacaaccgtcaatttttatgctgacgagaagaagattgttgacccgacgctgtccgggttttacaaagctatggaaaaaaccaatgtagagaagattgcacatgagatgctagctgggatatctaagggttctagtgatagtgaaagctttgatgtataaagcgagaatgaaggcgccaaagattggccctggagaccaagccatgttgtcttcgagaaatcaaccatcaagcaagggcaaattgatgcaatgaggggaaggtacttccgtgatatttcaattgtgagggctggagaggaaaataatgtccctttgcttcaagctgacgaggtggtagtttatataagcttcatgaaggcagggctttggttccctctagataaattgctggtcgagatcctga

SEQ ID NO: 36178 - DNA, 348 bp, Zea mays
  unsure (1)..(348): unsure at all n locations
tgtgaggttcttcatcccaacatgtgctaagcggcgatgccacagccagcccatgctagtcttagctattaagcatgcatctagaccggcttcttcttttgcaaaatcaactaaataaagtttgccatctaatacacccttaaaagctagtgaaccatcacttcttctaaagacagacacatctacatttgtaaatagacagttatatcccatattgcataattgactaaccgatagcaaattatatccaagagactctactaaaaacacattagagatagagtgctcattaanaattgcaattntacctaacccttttaccttgccttgatttccatcaccgaatat

SEQ ID NO: 36179 - DNA, 406 bp, Zea mays
  unsure (1)..(406): unsure at all n locations
gagatagagtcattcttcactntctttgccaaacttatagcatcggcttgagatttcttgaatatatcttgagtaagaatttcccccaatacttcggttggagaagttgtagatagatcacttcttactaacatggtcacaaaggtctcatacttctccggaagagatctaaggaacttatgagtgaaatccacatccggtacattaaaaccaagtcccttgagttcattcactatctcatttaaccgattgaacatatcggatacactttcatcttctttcataatgatatgctcaaattttcctttgcacacatataagcttgacactctttacaattgtagttccttcatgaatttccattagcttaatccaaatctcatgagcagttgtgagaatcttgata

SEQ ID NO: 36180 - DNA, 420 bp, Zea mays
  unsure (1)..(420): unsure at all n locations
tagttaatacattcatgggcaccgatgggaaatcaaaggataacttgaattctcggttggaccttcaagctttaggtattagaagtgatcttcatcctataaaagttgaagaccaattttatttaccacctgcaccttactcaatgagtcctgatgagaggaaattattttgtcaagtacttaaaggtgtgaagtttcctgagggttatgcatctgatatacgtcataatgtacatgttaatgagagaaagataattgggtttaagagtcatgagagccatattattctacaacacttgttgccgcttgcattgaggaaaatattaccggaaatagttagtgctggagtgaatcgtataagtaatattttcaagagactntcatcacctgtcattcgaataagcgatatgganaagcttg

SEQ ID NO: 36181 - DNA, 412 bp, Zea mays
  unsure (1)..(412): unsure at all n locations
agcttctgattcccatcattagaagatggtttttcagtactggcgaaggatgaattggccgacagtttatcatataatagtataaaggtgtgaaaatcaaattttntgtacttaaaaacgaattttttcatttgcttatactcaatactatacttcttttgcagggcttgatccttagcaatgcccttagggcatagaaaaatatcgaagacgaaggatgcactatagctctgaacaaccttcgttcagaagtaattgaactaaggaacgaaggtcttgaaaaagataaaatattaatttcattggtgagcaaaataaaagaagacgaggctacttccaaagcccaagctgaagcctagaaaagtgaaattgaagaccttcggaaacagctggctgaagccaaattaaaatg

SEQ ID NO: 36182 - DNA, 417 bp, Zea mays
  unsure (1)..(417): unsure at all n locations
tacacatgatgaggcatgtgaccagttaaaaggtcctcaatcatcaagcctacatcgagaaggtccttaattgactcagacagagaaactacaccgagactctcttctcgtgcaagtcatccgcccggtctcagctttatcatttcaacccaaagtttggtacctaacagaggtacatcttttccgatgttgaacccatcacggccatgatggatccaccatcaaattttatttttgaaaacatcccatcccacttgaagcatcatcttttgtcaaaacaaaacattntgttttttctagagcaagactaagcatcagaaaaactttnttataaaacaggtgatcaaggaaaggtaatcaattctccagggaggaaatgcatcaattatttagcacacaacttctatcacctaatgc

SEQ ID NO: 36183 - DNA, 270 bp, Zea mays
gctgcactttaagaaacctgatagtttatcggcattcaaaagatgactggcgctgtcacagtaacatggagacgcatccacagaaggtaccactaaaccctggactgtgattggcctttcgacctcgctatctggctagagaatagttggctgttttgtgtgactttccgttactggggtctttgagataattaacccaggaccctcaccttctagaagctaatgattactcaggaaaatagacacacgtcagtaaacttagggagatct

SEQ ID NO: 36184 - DNA, 354 bp, Zea mays
tgtcaatagctatgatggcccacataggaaggtccatagcgatagctgcataaatcagttttgatgtcatcacaaactgaacatgtatagacttcccagcgcttgacataagctccgctttccagttaggcaagagagaggctacccggtcaataatagcttgaacttggtctctgggcagcttcttaattgaaagaggcaaaccacgatatttgcaaggaaagctcaaaatggagcatgaaaacagctcctggacacatgccaaactatcgtcattacagcaggcagggagcacattactttttttgcacgttggtcttgagtcccgaggctgtgccaaagagagtaagaata

SEQ ID NO: 36185 - DNA, 361 bp, Zea mays
aatgtgctgacctatgttgatgacatcatagtaaaaagcacgaagcaagagaatcatattgctgacttacaagagacatttgctaatttcacgcaagctggtcttaaactaaatccaaaaaagtgtgtttttggagtaaaaaagggcaagttccttggctgtctggtgtcaacgaagggaatcgaaggtaacccaaataatatcgaagctatccttcggatggagccgccaaattcaaagaagggagctcaacggttggcaggaaggctatcatccttaaatagatttatatcaagatcagcagaaaggaatcttaccattctttgaaatactaaagtcaacccgaagtgttccaatggga

SEQ ID NO: 36186 - DNA, 458 bp, Zea mays
  unsure (1)..(458): unsure at all n locations
tctaaagggagagcatatnttgtgactaaccaatgttcattttgagaaagacagagtttgtagcacatgtcaagcatggaagcaaattggagtccatcatccacacaagaacatcatgacgaccgacaggccgcttgaactactccacatggacctattcggcccgatagcttacataagcatcggcgggagtaagtattgtcttgtaattgtggatgattattctcgcttcacttgggtattctttttacaggaaaaatctcaaacccaagagactttaaagggattcttaagacgggctcaaaatgagttcggcttaaggatcaagaaaataagaagcgacaacgggacggagttcaagaactcacaaatagaaggcttccttgaggatgagggcatcaagcatgagttctcttcttcctacatgccacaacaaaatggtgtagtggagagaaaga

SEQ ID NO: 36187 - DNA, 371 bp, Zea mays
  unsure (1)..(371): unsure at all n locations
tgtatgtgcgagaccgttcgtgatgctcaggccangctgtcgtgcttggctcattaattgtgcctgccctccggtgcctccggactttttagccttatcgagcctttcgagcaatctccttttgtgatatatctgacatgcgaggattgcaatgacgatgtctttgcttttgcctttatcagcatttctggtgaactatgcttttgcatcgatattattgtttaacagtaaatgactgtgtgtccacttgcatctcctgaaagctaaccgccctcatttatggccgattgacctgtaacgaaaaaattatagtcttggtggatgagaaaagaattatgcacctacaatagcatgttctttaattatctata

SEQ ID NO: 36188 - DNA, 423 bp, Zea mays
  unsure (1)..(423): unsure at all n locations
gatgacccagtcgtaatgcagaaatttgagaacaatggccctaaaccgtggctgtcaggttgtttgatgacccttgccatggtacagtagttccaaactgaagaagatcacaggttcaccccccctgctcgtcgccggtgacttttcgccgggattgttgacggacagccatgattcgtgcatcgtgggcatcagataagctcggggtcacgtaaatatcgccgccatggataagcctcggtcagtagagtattccggccgccgtaccgtgttcaccgcggtggaagccgataagcccgccggtgaccgccgcctcccggccgtgcgccgcgtggctctcactttaccctgcaccgccacgacttactctaactnccngtcgatcaccggaacaanccgcacatctctggacacgtattcacc

SEQ ID NO: 36189 - DNA, 428 bp, Zea mays
  unsure (1)..(428): unsure at all n locations
ttttattgccacgntgaaaactttctctccttcagttagtttagaattctatccctagtgggatgtaccataatataggttcaattccttgcaatataaaatattcaatagtgcatataactttgacatccaccatatgtatgcactaatgtaaaggaataatatctaaccttttgggttctaagaaagatgatgtcattgccatgcgcatataaagatcatcattcgtgaaaccctcacttgtgtgtctgacgctctcttatctaagaagttcaataaggcccttccaagtgttttcaagattaatcttctaccgatatancagtcttcggtgtctcaatcattgagtttcaatcgatctcatatcaagtttgatccaatcaagacaagatgatagaagttcatgatcacttggttggatgatatct

SEQ ID NO: 36190 - DNA, 488 bp, Zea mays
  unsure (1)..(488): unsure at all n locations
gaaactaagcttctaaagggagaacacgtgataggtctaaccaatgttcaattcgaattatatagaccttgggcagcttgtcaagcagggaaacaggtgggaggagcgcatcacagcaagaatgtgatgaccacttcaagacccctggagctgctgcatatggacctcttcagacccgtcgcctatctaagcatacggggaagtaagtatggtgtagatattgatgatgatttttcccgcttcacttgggtgttctttttgcaggataagtctgaaacccaagggaccctcaaacgcttcctcatgagagctcanaatgagtgtgagctcatagtgaaaaagataagaagcgacaacgggtccgaattcatgaaccttcaagtggaggagttccttgaagaagaaaggatcaagcacgagttctccgccccctacacaccacagcanaatggtgtggtagagaggaagaacaggacgctcattgacat

SEQ ID NO: 36191 - DNA, 384 bp, Zea mays
  unsure (1)..(384): unsure at all n locations
actgaagcctttaaaaaataccaggactctactgcgacgtcctatgagcaccttgatcgactagttgctgaactntgtacacgcatggacatacaggaggcttatccctcaccaccaacttcagcctcagcttactcttctatggacgacgacgatgacgacgatgtttatgcaccgctgcgacaacgcctaccacgtaatctaccaggtttgggaggtaatggtagacgtcgtcatcataaccctgaaccaaatcatgatccatccgctaagattaaactctctattccaccgttcatggcgttctttgatgctgaagcttacttagactgcgagacgacggtagaacaaaaattaaattcccatctggcacctgagcagcat

SEQ ID NO: 36192 - DNA, 459 bp, Zea mays
tcagctccatctatgttatggataggctttgagtcagtccagtttccctcatcccttctggcagcttcctgactcccatgaatagcaatgggtccctgatccgaatgtatcttcatgcaaaggtaagcaggatgaagaattgcttcgaaagcattgagggtgccacgaccaataattgcattgtaagggtattccatgtcaacaatgtcaaacacaacctgctcagttctggtgttgttgatgaaaccgaaggtcactcacatggtgatcttgcccagtgctacaatctgtcttcctccgaagccacagagagggtgtgtagcatcatgaatcttatcttctggctcttgcatttgcctgaaggccttagcaaatatgatatcagctgcacttgctgtatcaaccaagacattatggaccagaaaccctttgataacgcaagaaataaccatagcatcg

SEQ ID NO: 36193 - DNA, 388 bp, Zea mays
agcttgaagccatggtaagtagcataggctaattatattcaattgactcaagcctagctatgggtgcataggtttcaccagaatccaaaccttctacttgggagtatctcttggccacaagtcgggctttgttccttgtcaccacaccatgctcgtattgcttgttgcggaatacccacttgggtcctacaacattttggttaggacggggaactaaatgccatacctcattcctcgtgaaatagtagagctcctcttgcatcgccatcacccaatccgaatcttggagtgcttcctctaccctgtgtggctcaatagaggaaacaaaagagttatgctcacaaaaaatgtgcaacacgataagtgagcactttcccccttatgaatg

SEQ ID NO: 36194 - DNA, 496 bp, Zea mays
  unsure (1)..(496): unsure at all n locations
tattcttanggtcattntatgactnttaccctaaagtatttatgttttcttaacttgngttaagttctacccctttaaccactatttagggttaagtcctttaaccagggttctttntgcaaaacactttaaacaatacaacttgtttgaaatttttgcctagtgaatgcactctatgtgtgtcaaacatatgcaatgccaatgctcatgatgccatgctcaagttttagttatagtaacaccaggggtgttacatagagtcaacgcatgcgatggctcangatgagacgctgcggataactaattaggcggaatgcgtcggtatgtccgatggtccactgaccactggtagccatcggaattttaatgcttgtgttcgacggtacgtagctagaccgtcggaccaaagtantttcagaanaggtaaaanattctcttaatttttgtatcttcccaatgtaaaataataatttcattccatanattctacatacta

SEQ ID NO: 36195 - DNA, 421 bp, Zea mays
  unsure (1)..(421): unsure at all n locations
atccttggaagctgaanaaacaaaaatggcagaacatattttgagtgaagaaactggcactgctgcccctgaagcatcttccaaaatacgtgattatattgtacgacatgcttcggggaagaaattatctgaagaagagatttttgaagctaatcactatgcccgaaaactgaagtatccgaagggggccttaatgttcaacggcacagatgaagatgacttcttatactgcctcccagacaacaaagaattatctgtctgccgggagatggctagaagtatggggttcccgaagcttgaagctaggctctgcgctatgacgaaggacgatcttgcagatagcctcgcatataatagtctgaaggatgagaattgtatattcggaacttgtaactnttgaatcattcttatattcttatac

SEQ ID NO: 36196 - DNA, 490 bp, Zea mays
  unsure (1)..(490): unsure at all n locations
catgagccaacatcaagagaataaagctcttgctcatgacaagngtctcaaccacgcctgcacatgctccacacaaggtaacaaacaagtcactcttccaaataagagaagatgcgctagaaagtgttatcaatgtcatgagaagggacatgagattaagtcatgtccctacacaaaggatagtggcttaactttagaaagaaagaggctcactaaccatgtagcaaccaagaagcaaggaaagaaggagtcttgcaaaattaaagatcagatttgctacacttgccgaagaaagggacacctatgcaaggattgtcccatgagtaagtatcctaagcctaccatgtcaattcattcatattcgcttatgagacccaaaaatgacatctgtgctagaaaggtaattagttcacctaanactagcacanaggccattngggtgcctaagtacttattagctaacctnggtggacccatccaaaaatgggta

SEQ ID NO: 36197 - DNA, 489 bp, Zea mays
  unsure (1)..(489): unsure at all n locations
cttaaaactaagctatcttatctgtgcattaaggatccagtatgccactcttttctcgtaagaaggcacacaagtcactaatagatctcttagttaggcgcaaactgtcatagcaatagacattataaccctggtacagattgcgcaacatttgttttttgcactcaacatttctctcttgaatttcgttaacatctaggatgtgtctaggtctccttcattgataccggtttgcaattatagccataatagaaatagctaatacaacaactctatgtcacttctttatcttcattttattgttttcatcattagtatattgatttgatatctaaaccatgtaatgtatatgcaattagacatgctggttgaaagcaaaaggctctactcaagaataaaaacactagtagtagtagcacgagttgaaaaggagaagtattggtgtagccatagagattgaaggatcgngtggacgcggtctcacacccg

SEQ ID NO: 36198 - DNA, 485 bp, Zea mays
  unsure (1)..(485): unsure at all n locations
tatggaaattctacattccaacatgtgctagacagcggtgctatagccaacccatattagtcttagctattaaacatgcatcttgatcggtattctcttttgagaaatcaactaaatagagcttgtcgtctaatacacctttaaaagctaatgaaccatcacttcttctaaagacaactacatcaatatttgtaaataaacaattatatcccatatgacataattgacttacataaagcaaaatgtaaccgagcgattctactaggaacacattagaaattgaatgctcggtagtgatggctattntacccaaacctttaaccttaccatggttcccatctccaaagatgaccgtgtcttgtgaatccttgtttttacgtaggaggtgaacattntcttctcccccgtcatgtggtttgtgcatccgctatcaatgatctagcttgtgccctcgaatacataatacctgcacggaatttaagctt

SEQ ID NO: 36199 - DNA, 495 bp, Zea mays
  unsure (1)..(495): unsure at all n locations
actcagcttctaaaggagaacacgcgataaggttgacttacttgctattcgtaaaggatagaccctgcgcagccggctaagcaagtaaacaagtgggaggagcacatcacagcaagaatgtgatgactacttcaagacccctggagctgctgcatatggacctcttcggacacgtcgcctatctgaacataggagggagtaagtatggtctagttattgttgatgactnttcccgcttcacttgggtgttctttttgcaggataagtctgaaacccaagggaccctcaagcgcttcctcaagagagctcaaaatgagtttgagcttaatgtgaagaagataaggagcgacaacgggtccgagttcaagaaccttcaagtggaggagttccttgaggaggaatggatcaagcacgagttctncgctctctatacaccacagcaaaatggtgtggtatagaggaagaacacgacgcttatccacatggcgaggacta

SEQ ID NO: 36200 - DNA, 462 bp, Zea mays
  unsure (1)..(462): unsure at all n locations
nngntcctcaacttaataacctatgatcgaatgttattgttatcatantgcagctctcgtcttcggcattcttttgcgcccttaaagcgttgctcaacattaaaccctatatgaaaagaattagtataagagcaaaataataattcaaaatttataaacttccaaatatacaattttcgcaccttcatactgttataagcgaggctatatgcaagatcgtccttcgtcatggcgcacaggccagcttcaagcttcgagaaccccatacttctggccatctcccggcagacatataattctttgttgtctatgaggcagcataagaagtcatcttcgtctgtgccattgaacactaaggcccctctccggtacttcagttctcgggcatagtgtctagcttcagaaatctcttcttcagataatcttcttccgaagcgcgcagataatataatcaagaacttc

SEQ ID NO: 36201 - DNA, 421 bp, Zea mays
ttgacaaaatatcggccacactatttaatataaacatgacacattcttaataacaaatggcttgtatgtgtctgtcgtcatccccttgcgtggccagtgtggcgccctcttgatccatcttatgcatgatcaatcactatacaccatctacattcgcaatctggccgcggtcgacgacgagtttgcttcttctccctgatagtttctgcaaacacattgtcaagatgttgtgctagcattattgtaaataagcagatttcatggaaggcaaaatcaaggtgtcgccatcataaataagccaacctctcatataaaatactatgaacagagcaatcaggtctgtaacatgaaaaataagagatgaaacatagcataatactctataccatgattaagaagtaatagtggcaaatactttata

SEQ ID NO: 36202 - DNA, 350 bp, Zea mays
cccgctgaactaaagatcactgggataaataaaataaggaggaaaagctgggatgacagatatactcaactggagctagactggactggtttaagaatcagaaaatgaatcaaggctttacattcagtcatcgtgcaagcttaataattgggccttgaattaaggctatactatcgttcattttgcaaaatttcacgtagatcttgattcacccatgttgaacttggagacggagaggacactcaaggcgcatctcatggtgcatatcatttgctctcaatccaatccttgctcatgtcccatcaagaacctattgatttcctctccctcctgtattgtttccgcctgtg

SEQ ID NO: 36203 - DNA, 449 bp, Zea mays
  unsure (1)..(449): unsure at all n locations
ntaattgggtcaaaattccatgttgtatcatactcacgttctacttttccatttcttggcatagtgtggtgtcatatgtcctcactgtaaaacaatgataggaagctttgcggctcagtgcatctgccaccacattggcttttcttgggtgatggtggatttctaaatcataatctttaatcagctcaagccatattctttgcctcatgttcagttttgactgggtaaaaatatatttcagacttttatgatatgtatataaatggcaagtatttcccagcagataatgacgccatatcttaagggcatgaacaactgcagctagttccaagtcatgagttggatagtgctcctcatgccggcgtagctgccttgaagcataagctatgactcggccctctngcattatgacacatncgagtccacnttctgatgcatcacaatacaca

SEQ ID NO: 36204 - DNA, 382 bp, Zea mays
  unsure (1)..(382): unsure at all n locations
gatccttaagcaccgcggctgcagcttactattgcctggggcctcactctttgtaaatnntaaatgaatataaatggcattcctacacttcatcagaaaaggtgttgagcatttgacaagcttgacggttggttgtaagaggtgtttgtgttcaatcactngggggctacgtgctgcccatctctntctgttttactgttggattgccttagagctacacgtggagcaaactatgccgtgaccttctcgagtctctacatcctggctgcttttgcactgattcgtattaatggctgcacattaaacattttacttgagttgcaaactcccatcttatcatggcactgactcctgatattcgctaatggctctgacttcttgt

SEQ ID NO: 36205 - DNA, 495 bp, Zea mays
  unsure (1)..(495): unsure at all n locations
ttagtaggatgtntattagcaacttgctttccagcttgatatgcactacatggctngtctttntcaaacaccacatcctttaatcctctaaccatgtccttttttaataccttcttgagtgttctcatcccaacatgtgcaagcctcctatgccaaagccatccaagtgaagctntggtgaagaggcaagttcttaagtctgcatcttctgaagtgaaatccactaagtagagattgttgtatctaaatcccttgaacaccattgattcatcatccatctttgatacaataacctctgttggattgaataagcattgaagtccaagatcacagagttgacccactgataataaattgaagctcanaggtgcaaccaagagaacatttgatattgataaatcacttgaaattgccaccttgccaagtccttgcactnttctttntgaattgtctccaaatgtgaatttatcttgtccatcaacattctcatcaagt

SEQ ID NO: 36206 - DNA, 295 bp, Zea mays
  unsure (1)..(295): unsure at all n locations
tctccccagccctcataatggatatatcgngaaaatattttcccttcatcccttcaatatggcccttgttaacactagactttccaaaaacaacatgactcggtctccatgaccgatcttcggcattcttattaccacttttcacaatcaaactatcactatcgctggaatccccagataacccaacgagcctcttattaatgattttttcaacgttggtcctttctattgcttcataaaaaccagcaagtgtggggtctacagtattctttcttcagccattcgatgatgatca

SEQ ID NO: 36207 - DNA, 462 bp, Zea mays
  unsure (1)..(462): unsure at all n locations
ttctttgtcaaattcaatccgctattctttgcaatatcttcgatcttcgatatgattgtcgagcttgtgttggtagatgtcgaattggattctctcttcttggtagattcttcaaataaaccagagaggtccaagccagttgatagagagattatatcaaatgcattcatgttgataggcttcttttcttcatgttgcttgctctcagttgttatgttggcgctcagtgaatcaaaatctgcattcttgtccacatgaggggcattcttattctgtaaatcgtacctaagtaagcttgcacctaaacccttcctaaaccatggattctncatgattntttccatcgagatccttctactagggttaggatcaagaaatccttgcanaagcctncgaacatcggtagaaaaccaacttggacatttgaagtcagctttctcaatcttcttatacatgtccatc

SEQ ID NO: 36208 - DNA, 404 bp, Zea mays
  unsure (1)..(404): unsure at all n locations
atgtgccagggagcttccgcatgacagcagaaaggggaaaccgacttaaagatgataagccaaatctccctcgaagaattactatagagttatcgataaagtgaagggcattaatgtaattttatacgggctgcgtcccgtgcctataaatagatgaacagtattcctgtactggtcacgctgacttggcattggcatcacgcttgtacccttactttcctcaagccgaatgtacatttgtaatattgtcatcatttatataagagaaacgaatagaaataaattaataagtaatgtttaaagtagttatgttattttccatattatgtacataaatcttttcttaatcttttattgtgattatgaacgantgactctcataacctttgtccgaaatccttata

SEQ ID NO: 36209 - DNA, 278 bp, Zea mays
ctgtgacaacatgtcttcatctttgccaagagtgatagtcctaaccgaagagagagtccacgttgtgcacatttttactgcattgacaaagatttcgccatgactgttgtgttaccgccatatgagatattgttgttcctaactcattagaaactgcttccgatctgagtgttcgtcatacatggggagctggggtggcttgtaagaccgaagccaacgtgtatcctgcagttctgctgacagaggagaagcatcattcaaagcaaaatttccatgat

SEQ ID NO: 36210 - DNA, 366 bp, Zea mays
  unsure (1)..(366): unsure at all n locations
ttgaattgaatatgtaaagtattgtaatttatntctctatgatgcatgaaagttacacacatactggttttgagccttcggcgaaaaaacaccttcccttcttatcatgcttcatgaagaaagagctcctttttgtaataaagctgatagaactggatattcccaagcttactttgagccttaccacattttcattttgacgaagcatgtgccgaagatgggctttgtattccacttttgtgttgctgatgcaatatgatgtatgatgtaatggtatgagaaatgatgtgatgatatgatgctaaatgatgaagatgccgaagacacacacccacacgcccacactagaacacacaagctctacat

SEQ ID NO: 36211 - DNA, 481 bp, Zea mays
ctcagcttttctttaatctttacttcggctttgtgagcttcgacttgtgcactaagtttggcttcgctagttttcagcctgtccactaaggaaagcaatatcttatctttctcaagagcttcgttctttaatgtaatgacttctgaccgaagattcccaagagctatttgacagctctcatcttctgcttccttctgggcctttaaagccttacttagaatcaagccctaataataaagaatatatgagaacataatgatagcaagaaaagctacaaatataatttattttacaagaaaaaatatatgcaccttcaggctattataagcaaggctatctacaagatcatccttcgacattgcagataggccaagttcaagcatcgggtaccccatacttttcatcatttctcggtagacagagatctctttatcgtctagcagacaataaaggaaatcatcctcgtcattgccactgtaca

SEQ ID NO: 36212 - DNA, 434 bp, Zea mays
  unsure (1)..(434): unsure at all n locations
ctgcngcatgcaagctntcttcggtggcatgacgaaggacagagcttgtcttatgtgttctataagagggaacaccggaggtgggcgccaatgttggggactcgctctcaaatgctatagattgagaacaaggcaacaccaaaacaggttacttgttaatgcccttcgtcccttgaagcattatttccccaaagatataatgatcttcggacgaaggtcatgaagggcatactctcatcatcttaacatacatatatgtataattattaacaacgaatggagcatgtaaagcataagaaataatgtgaacaataacattgtcatatatatatctcagtatatcagcctccattaatatcaagactatattgaattacatttggtaccttcggcttgacagaaaacagaggtactagcgttatgcaaaagcaaat

SEQ ID NO: 36213 - DNA, 459 bp, Zea mays
  unsure (1)..(459): unsure at all n locations
tcngaatatcacgacttcattctnctcgggagtcggacaatgtttctctccttcgtcagccctcacaatagacaagtcccgaaaatatctacccctcatattgacaagatggctttgtttgatgcttgatttcccaacaactgcatggcttggtcgccaaggtcgaccttcggaatcttcaccaccactttccacatcatagctgtcactgtcaccagtgtcttcagagagtccctctagaatctctttagtaattntctctgtgtttgtcttcgctattgatttaaggaagtcgagattcatctcttcgaaaaggcttagcttcgcctcagcgatagtgtgatacccaattntctgaaaagaagttaaatgtatttttcccttttgtttcgtgatctgtgtagttgaggttggagttttntacgaagcattcaccaataaaacagtagaatactctgt

SEQ ID NO: 36214 - DNA, 406 bp, Zea mays
  unsure (1)..(406): unsure at all n locations
ctattctaatttcaaagtaagattattctccgactttttattgtcatgaacaacgaaggtgtttttctacgaaggtagcctgtgcacacagtatgttgatgagtaaagctctgagaatgcatcaacatcttgaagataaaaacatgaagttataattgagggcttagaaagcacaataaagatccagcaactgctcttgaaaagaaggatctcgagcttcatacaacagaacgtttattggcagaagctaaagctaanattgcaaagttaaatacggagcttctctcagagtcagaaagcttctaacaggagaagccgaagatatatgctaaaatgaagactgacgtcgacaacagttcgaatctgctgaaatcattgacagagcttcaaaacagatgtctggagt

SEQ ID NO: 36215 - DNA, 513 bp, Zea mays
cggacctataaaactaagcttgcatactaagttattctttcatataaaatgtttatttattgctagaaaggtgggggccaaatgcaagggagacaagacttgcatttgggtccctaaggctattgtaactaaccttgtaggacccaacaagagttgggtacctaaaacccaagactaatttgccttgcaggtttatgcatccgggggctcaagctggattatcgacagcgggtgcacaaaccacatgacggtggagaagaagatgttcacctcctacgtcaagaacaaagattctcaagattcaatcatattcgatgatgggaaccaaggcaaggttaaaggactaggaaagattgctatttcatccgagcactccatttctaatggtgttttagttgagtcgctcgggtataacttgttgtctgctagtcaactttgtaatatgagttataattgcttatctacaaatgtagatgtgtctgtctttataagaagtgatggttcattagcttt

SEQ ID NO: 36216 - DNA, 496 bp, Zea mays
  unsure (1)..(496): unsure at all n locations
ttaaaactaagcttgtgaggttcttcatcccaacatgagcgagtcggcggtgccagagccaacccatgttagtcttagcaattaagcaagtgtcgagttcagctctatcaaaatctaccaagtatagctgaccctctaacactcccttaaatgctattgaatcatcacttcttctaaagacagtgacatctacatcagtgaatagacagttgtagcccatttgacataattgagatacggaaagcaaattgtaatctaaagaatctacaagaaaaacattggaaatagaatggtcaggagatatagttattntacccaatcctttgaccaaaccttgatttccatccccgaatgtgatcgctcgttggggatcttggtttctctcatatgaggagaacatctttntctccccagtcatgtggtttgtgcacccgctgtcgagtatccaacttgagccctcggatgcataaacctacataacaagtttagttcttga

SEQ ID NO: 36217 - DNA, 466 bp, Zea mays
  unsure (1)..(466): unsure at all n locations
agctttgaatctgtcttagaatgattgctattctcttgtattgaatgtgtatgagtggagcgctcggatgtgttgaatggatgtggttgaggttgtatttatagccaccaaccactttctagtcgttgcctcattcctgccaaccgtggatggtccgcgcacctgatctagacgatccgcccctgcacatcaatggctgaaatcgcaatggtcagcagtaactactatatcaaccgctatagtgcatttaatgtgtcgtcagatgtcagataaagcagtcacaaacgttcgaccgtgcaccccatacggtctgcgaggacgctaataatgaaatttactgaacccatcatattctggtttntctggtttttaacgaccggacggtccacgtttgaggccagactgtccacgcttggtcccggacagtgcccgcttctccttcggacagtccgtagtcttaactcat

SEQ ID NO: 36218 - DNA, 459 bp, Zea mays
  unsure (1)..(459): unsure at all n locations
caacgaggagatgactcttattattaagagcttccgacaaatactcaagcaaaggaaggggaaagattacaaaccccgctccaagagggtgtgctaccggtgtggtaagtccggtcactatattgctaaatgtccatatacaagtgatggtttgtcttctatttttgcatactgtaccatagaacaaaaggagaaaatcaatgaattgataaaatccattaacgagaagggtgaagtcttggaatgccaagaagatctactcgttaaggagaacgcaaatttgttaagctaaaaggtgcttttgctcttgaagttgaaaatgcaaaaacttgactaaagagctaaaagtaagcaatgattcaatctcttgtcttaaatttgaaaatgctagtttaattggtaagattgaagaactgagtgcttgccatgtccctacatctnaccgtgagcatgttacta

SEQ ID NO: 36219 - DNA, 418 bp, Zea mays
tgacctattaggtgttatatgacttgtactgtctagcaaagtatctattttgcctcgtatgctgtacacagcagcagacacagatgttaccagtgtcttgatattcacagaagaatcatcttttcatgtttgtgaattgttcatctcaataccaacatcattcattgcgttcacaggcacaggttctgttatcttgtcacatgtgtcagatcggcatacccctgttgatccacttagattgtctgatacattctaaagcacgttgtccaaagttatcagcttccacagcagattgccctacctgcttagaatccttcctgtcatgagtagtgcttacattcttacccctatctaaagaatttgaatcaaatctctcttctctttctttgccctaaccttacgatcgtacttcttttgt

SEQ ID NO: 36220 - DNA, 477 bp, Zea mays
  unsure (1)..(477): unsure at all n locations
tctaagggagaacacgtgataagtttgactaatgtacaattcgaaaaagatagaccttgtgcagcttgtcaggcagggaaacaggtgggaggagcgcatcacagcaagaatgtgatgaccacatcaagacccctggagctgctacatatggacctcttcggacccgtcgcctatctaagcataggaggaagtaaatatggtttagttattgttgatgacttttcccgcttcacttgggtgttctttttgcaggataagtctgaaacccaagggaccctcaagcgcttcctcaggagagctcaaaatgagtttgagctcaaggtgaagaagataaggagcgacaacgggtccgagttcaagaaccttcaagtggaggagttccttgaggatgaagggatcaagcacgagttctccgctccctacacaccacagcaaaatggtgtggtagagaggaagaacangacgctaatcgatatg

SEQ ID NO: 36221 - DNA, 419 bp, Zea mays
  unsure (1)..(419): unsure at all n locations
ttgaactctactggaacactaccccacttaaaaagaatgagggtagaactcttgaatcttggggatgtgaacttcttgaagtacctcataacaagagtgttacggggccttcttcttgctgtgctgcttgaccaggctgcagagagaagactgtcatagggttgattctgggagaaccttcttcttatcttcttttcactgaccctttctttctcttttctcttcccactggaggattctatcaaagagtattaccatcatacagaggaggaaaccgaagatgttgaaccatgtacaacagtcttcaacccaagaatcatcaagaattgtgatcttangggcgagggagtggaaaatggagttgcttgtgatttggcagaggggaattatctggagtggtttgcttgggatgggaactg

SEQ ID NO: 36222 - DNA, 484 bp, Zea mays
gacacttaaaactaagcttgcccttggaagtctttaggaggggcattaattttgtcattgtctcccctctggaagccgatgccatccttaatgccagggcgtctcccactatagagcatacttctagcaaatttaaaattttcattttctaagttatgctcggcaattttagcatccaattgtgctatatgatcattttgtcgtttaattaaagacatgtgatcatgaatagcattaatatcaacatctctacatctagtacaaatagatacatgctcaacaatagatgtagagggtttgcaagattttagttctacaaccttagcatgcaatatttcatttttacttctaaggtcggaaatagtagcattgcaaacatcaaaatccttagccttagcaagcaatttctcatttttattcttaaggctaacaagagataagttcaattcttcaatcctagcatgcaaatcatcattaacatctc

SEQ ID NO: 36223 - DNA, 454 bp, Zea mays
  unsure (1)..(454): unsure at all n locations
atactctanacgtcagctgccggcctgcaagctagtacaaagtccactcttttattcttcgtataaacccgacctcgctgcgactgactcccgaatgtccaacacatcaagcaatgaatgtattcagaattattgcagagcatatcactccaacggacctggttcaggagtttttaactctcatagttcttcccagtttgaaacaatgggcaatgccgaacataaaggggcgaaataaagaaggtgaacttgtacgtttaccttactatctcaaagttaaaaagtactttaaaacaccttgccaagagtggctagatacaattgaagtcatgtgtaatgaaatacttggcgattatcccaacaaagaagatcaattgatgaccgcagccttctgcacccgtccgaagcgaacgctaatatcagtgctggactgccttgtgtgtgaataccctga

SEQ ID NO: 36224 - DNA, 488 bp, Zea mays
  unsure (1)..(488): unsure at all n locations
tcaagcatggtcgcgtacttgtaggagttaatcaaaaagcacagtgcccaagtgccccaagcccagttggccagctcacaattctttcctggctagctgtccctgagttaatcagacaagaaactgtgattaatcacccattaggtggccagtgtctgtttaactgtgtttaaacagcctaaacgctaaacaaagggtgactggttgtttaccatttaggacaacgctgtaggagcaggacattgtctttattgtgtgcactcgctccactttccagctgtcaccgccaccgaagagcttgccgctgcagatgagtttccgtaaagaagcgagttgcattgacctgaggcagcattgcagccatggaatatttctaaaaaaacgtattctagacctgccagatgaacacacacgagattaggatgtgctgaattgtttccccagcctgatcacataacaagtangcaggctggtgaagcaattggtgc

SEQ ID NO: 36225 - DNA, 470 bp, Zea mays
  unsure (1)..(470): unsure at all n locations
agcttctaagggagaacacgtgatatgattattttatgtgcaattcgaaaaagatagaccttgtgcagcttgtcaggcaggtaaacaagtgggaggagctcatcacagcaagaatgtgatgaccacatcaagacccttggagctgctacatatggacctcttcggacccgtcgcctatctaagcataggaggaagtaagtatggtttagttattgttgatgacttttcccgcttcacttgggtgttctttttgcaggataagtctgaaacccaagggaccctcaagcgcttcctcgggagagctcanaatgagtttgagctcaaggtgaagaagataaggagcgacaacgggtccgagttcaagaaccttcatgtggaggagttccttgaggaggaagggatcaagcacgagttctccgctccctacacaccacagcaaaatggtgtggtagagaggaagaacatgacgc

SEQ ID NO: 36226 - DNA, 422 bp, Zea mays
gacgctcgggatgagctctttgttttatggggaatgtgtaacacctttgtgggacggcagtatgccagacaccacaaaggataagtcctagctgggctggttgtttataagataagtagagataaagagggagctggttagccctcatattttagtggagagattagctcccagtggttagaggtggttgagaataaagcgtcacataatctataaagaagtcgttgtagtttgtattagggtttatcaaagaaagtttatttggatggtggagctttcttggttgtcccggcgcaccctgtgccagccgacgagaccaactcctcctctagccgatcctctacccactgagatccctttcatagtcccaaacattgttatgatcaccactgcgcagtcctaggcacccacaccatatcaat

SEQ ID NO: 36227 - DNA, 416 bp, Zea mays
  unsure (1)..(416): unsure at all n locations
cactcncccttcatatgagacagagctccttcttagcctctcattctcttccttgagcttgntgtattcttgtgcataggaaacattacttgttcctgaaaattctagctcaatggaagattggctctcttgagagcaacatttgttagcacatgataatatagtttctatgtgagtacttgtgcatatgtgaggttggtatgatttctaattagttaacacaacctcatgagccatttctagcatgatatgtgaatctataagattattatgagagcacacaagcatatcatgtctttcttgcaaagctagattttcaatatttagggtttctatcatgttctagagcatagtattttctttttctaattgagcacacatgataatcatttgaagtctagtttgctaattaaacc

SEQ ID NO: 36228 - DNA, 519 bp, Zea mays
  unsure (1)..(519): unsure at all n locations
cactcaagctggccagaagtnntcttcccgctcgggcaacccttcgtagtttatcattctgattgtccacacatggccacttcaacgctgggggctggatattgtcgggccactacctacggctcaagggaacctcaagttcaccttcgtcgccgtcgaatacttcagcaagtggatcgaggccagggcagtatccacgataacgtcgaagactgcccagaagttcttctggcaaaacattgtttgccggttcggagtcccgtccgatctcacagtcgacaacggcaagcagtttgacagccaggacttcagggacttctgcttatccatcggcaccaagcttgccttcgcctcggtgtaccactcacaatccaacggcgtcgttgagcgtgccaacagcaaaattttcactgctatcaagaaaagacttctcgacgacatgaagggtacatgggctgaccaactacctatagtagtctgggccctaaacacgactgaatgccgggcaactcgattcac

SEQ ID NO: 36229 - DNA, 312 bp, Zea mays
tagtctagcattaacatgtgcgagtccactttattaaatccactaagtatagctgactctctaacagacccttaaatgctggtgaatcatcacttcctttaagacagtgacacctatatcagtaagaagacagttgtagcccaattgacataattgggaaacagaaagcaagtcgtattctaatgaaacaacaagaaaaacattggcaatggaatggtcaggtgacatagcaattatacccaaacctctgaccaacgcttgatttcatcctctaatgtgatagctcggacgggatctctgttttctcatatg

SEQ ID NO: 36230 - DNA, 498 bp, Zea mays
  unsure (1)..(498): unsure at all n locations
ctaagcttctaaagggagaacacattntacgactaacaaatgttcatttttgtttatatanggtnngnagcgcatgccaagcaagaaagcaagttggtgcccatcatccacacaagaacatcatgacaaccgacaggccgcttgagctacttcacatggatctattcggcccgattgcttacataagcatcggcgggagtaagtattgtcttgtaatagtggatgattattctcgcttcacttgggtgttcttcttgcagganaaatctcaaacccaagaaaccttaaagggattcttaagacgagctcaaaacgagttcggcttaaggatctagaaaattagaagcgacaacgggacggagttcaagaactctcaaatcgaaagcttccttgaggaggaggtgcataagcatgagttctcttctccctacacgtccacacanaatggtgtagtggagaggaagaatcgaactctattggacatggcaaggaccatgc

SEQ ID NO: 36231 - DNA, 414 bp, Zea mays
  unsure (1)..(414): unsure at all n locations
ttgagcatagcagttttattttctaattgagcactatatgacgaatgatcaatagctctaactcgctcaattgaaatgtcttcatacctttggaccaaatcatcatgagagcacttcagcttctcatgctctttggtcaacgtctccaagtacttgattttttcgatgaggatatcttctcgcttaagaagcatctccttctgttcttctgctcctttcatgagatagagcaagctcatcctggtcttcttgcttagttgagcgaagagattttgaagatcaacctcatcgtcactatcacgttcatgctcctcctcatcctcacttacgctgtcgctggcgctctcataacaacaaagcacatatgagaagtggatctgacagacgaancttgtgaggaggtggattcgtcgt

SEQ ID NO: 36232 - DNA, 319 bp, Zea mays
  unsure (1)..(319): unsure at all n locations
ngagtgcgggagatgggcaacacgcgatggagggggtggatgttgctgtaacagtgggggaggtgggcggaggctatagctgtcaaggctcggagtcgagggatggccgagacgcacggcgatggaggcggnggttgttgaaagcgggcgtancgggtggtggtggtgaccagagattcgcgcgatgatggaggtggctganagatntgcgcgttcagcatgcggctgctggcggtcgtgcggccggggattctccgcgggtgggaggggaatggcgactgaaggcggtcgtgcgtgctgggctgctgatgcggggttt

SEQ ID NO: 36233 - DNA, 469 bp, Zea mays
  unsure (1)..(469): unsure at all n locations
acctgcagctgcagcttcgcagccgatgcgtgcagcggctgaattattttttcactctgtgggagccagctctgcgaaatatacaccttcagctgaaaatctggccacaacattataatatattgaaggcgaagttgatgcccttgacgaagttattggtgggcacaccgacttctgcgccctggtagcttctcggggcacagctactggctttttgaaggctggctgcacgcatggaaacattgtgaacagaccaaacttcagcttgtcagcatcagatctgatagatatcccaagcctagcccgaagcattggaaatagattcatgacccagatctgggtaagtggcgggcgataaatggcangtgacgaagctcgaagccatcttaagccggtaaaaaacttatgtttgttactttaccttcttctttgaaatatgcacctttcttattcttgctgttggatacac

SEQ ID NO: 36234 - DNA, 451 bp, Zea mays
  unsure (1)..(451): unsure at all n locations
ttctgacttttcgagtaattcattctttaaactgtcattttccgcttggacttcggccaaggagccttccatagactgaataataaagtctttattntctaaagcaccttcgtgttctttagccataatttcaagatcttgaatggcgaagtctttcttcttcagaacagcttcgtagttctcaactntttcttctaaatctttgatgatagctttgttcttctcctcttcaagatcttgttgcattttcagcactttacttaataatatactctgccaaaacagccttcgtcagagaaagacataaaatataacaataataaaataataataataattttaccttanaattcgtgtagagcaagctgccagcgacatgatgtcgctgatacctgcagaggtctgcttctatcttcggcaagccaacgcttttggagagggttctaacaat

SEQ ID NO: 36235 - DNA, 285 bp, Zea mays
tgctgtcaaactgcttgccgctgtcgactgttagttcacacggtactcccaagcggcaaacaatgttttgccaaaagaatttctgtgcaatctttgatgttattgagaaaactgccctcgcctcgatccatttggtaaagtattcgacagcgacgaaggcgaacttaagggtcccctaagccgtgtgcaggggcccgacgatgtccaggccccagcgctggagaggccatgtgtgggcgatcagttttgttaattgcgaggggctgcctgatcgaagagaatact

SEQ ID NO: 36236 - DNA, 432 bp, Zea mays
  unsure (1)..(432): unsure at all n locations
tgngagcagtacaagttcagaagggaataagctgcttcggctgatcagccgaatcccatgctcttatgtgaggatgtagcagagcagaaggtactactgggatctcaattgtctgaagaacaggagaaaaccttgataaggtttttgttcaacaataaagatgtctttgcttggtcagctaatgatctttgcggagttaacagggatgttattgaacactcccttaatgttgatccatcattcaaacccaggaagcagaggcttcggaagatgtctaatgataaggctgaatgtgctcagaatgaagtaaaaagactcctcaatgccggagttatcagagaggtaaagtacccacaatggctggctaacactgtcatggtaaagaatgccaatggtaaatggaggatgtgtatcaactntactgatcttaat

SEQ ID NO: 36237 - DNA, 452 bp, Zea mays
  unsure (1)..(452): unsure at all n locations
acacttgaaactcaacttgtccagtaccaacatgctcatttgttttgcttttacccacttgatacctacaacagtttagttacgacgtggaactaaatgccatacctcattctttgttgagctcctcttgcattgccaccacccattctagatctctaagtgcatcctctatcctatatggatcaaaagaagacacaaaagagtaatgttcacaaaaatgagcaaccctagatcgagtgggtatccccttttgaatgtcaccaagtatggagttgacggngtgatctcgttgaatttcttggtggactcttaggtgagggtggtcttgatcttgaatctctngttcatccttcttttcttgatcaacttcatctcctccttgattgatgccttcttcttgaggtggctcattgtcttgaacttgatcttcttcttcttgagctagttcctca

SEQ ID NO: 36238 - DNA, 437 bp, Zea mays
  unsure (1)..(437): unsure at all n locations
tctaaagggagaacacgtgatagggttaactaatgtgcatttcgaaaaagatagaccttgtgcagcttgtcaagcaggtgggaggagtgcatcacagcaagaatgtgatgaccacatcaagaccttnggagatgcttcacatggacctattcggacctgtcacctatctaagcataggaggaagtaagtatggactagttattgttgatgacttttcccgcttcacttgggtattctttntgcaggataaaactaaaacccaagggtccctcaagcgcttcctaaggagagctcaaaacgagtttgagctcaaggtgaagaagataaggagcgacaacgggtctgagttcanaaaccttcaagtggaggagtatcttgaggaggaagggatcaagcacgagttctccgctccctacacaccacagcaaaatggtgtg

SEQ ID NO: 36239 - DNA, 449 bp, Zea mays
  unsure (1)..(449): unsure at all n locations
tgagcggtgactggcttcatctgatacccttgtatactggtgaccaacatgtcattcagctcttgccatgatgtgattgttcctggccgaagagaggagtaccaagtttgtgcaacatttttgactgccatgacgaaagattntgccatgaccgctgtgttgccgccataggaagatattgttgcttcgtaactcatcagaaactgcttcggatctgagtgtccgtcatgcatggggagctggggtggcttgtaagacggaggccaatgtgtagcctgcagttttgctgacacaggagaagcatcatcaaaagcaaaatttccatgatggaaatcctcataccagtcatcctcgttgaagaagccctcttgatgaagctctctgtgctgaggccttcggttttgctcatcttgagcaagatgacgaacttcttcagaggcttcgtctat

SEQ ID NO: 36240 - DNA, 460 bp, Zea mays
  unsure (1)..(460): unsure at all n locations
gcgaattgactcaagcctagctacgggtgcataggtttcaccgaaatccaaaccttcgacttgggagtatccctnggccacaagtcgagctctgttccttgtcaccacaccatgctcatcttgcttgttgcggaagacccatttggttcctacaacattttgattaggacgtggaacaagatgccatacctcattcctcgtgaagttgttgagctcctcttgcatcgccagcacccaatcagaatctcttagtgcatcctctaccctgtatggctcaatagaggaaacaaaggagtaatgttcacaaaaatgagcaacacgagatcgagtggttacccncttatgaatgtcgccgagaatggtgttcacggggtgatctcgttgtattgcttggtggactcttgggtgcggcggtcttggaccgtcatcatctctcttgtcttgatcattagcatccccc

SEQ ID NO: 36241 - DNA, 456 bp, Zea mays
acacttgaatactaagctcgctaagggacatcttccaccgatgagccatgataccctactcctgccggctccaagggagaatcggctgaagtgccataggtaactgcaatcgagttggccgaacggccgaagcgttttgcccaaggcaaagaacagcggccgaagagctagagctaggggagccgacaagactaccaaaaatcttgagcccgctaccagagccggaactgctgaatgtatccaaagctcctgcgataactcccaagagaaggaggatggccgacgtgctggtcgcagtcttggaatcgacaagggcgtcaactcctgctcctgcgaaggagactatcgaagctactacaattcatgctgaagtcgatactgggccttcagtgcccatagaaacatggcctgctgaagcgagacagagtattgaacaagaacccttggatgtcactc

SEQ ID NO: 36242 - DNA, 493 bp, Zea mays
  unsure (1)..(493): unsure at all n locations
taactgagaggtccacaagattagttatgtctttgaatctatcttcttctcttatgttatcaatataattgtcaagttgcaagtcaagttttaacaagtcagtgcttgacatgtcattaggatagaaatcagctagcttccgtaccttgtgtgcatcaaaagaagcaaaagagttggaaggatctaaggctgacatacaagaaagcaactccatattagcctcactaaaccgactatcaagctctaggctaatttgatcaatgacgaccgcaatatatacttctcttctgaagtggtcatcattggtttggttatgaacaaatcgtgatgatcttccataaggcttataatttccatccatagcaggaacttggatatcatgtntgttgcanaatgaagtgattctntgaaggaattgatcccaaccatcaagccttaattggtgcattcttctctttgccacattaacaagtgaaatngcattaataatatc

SEQ ID NO: 36243 - DNA, 496 bp, Zea mays
  unsure (1)..(496): unsure at all n locations
tgcgcattcattagaccaaacgacatgacagtgaactcatatattccatactnggtgataaatggtgtcttcggtatatccgagggtcggatcctaagctgatggtaacctgaccttagatctatctttgtgaacacacctgctcctctcaactgatcgaatatgtcttcaattctaggtatggggtacatgttcttgacagtgacttcattcaggatctgtaatcaatgcacatcctctttgtaccatctttcttctccacaaatagcattggggcttcccaaggtgatgtacttggtctgatgtagcctttctctaacaattcatcaatttgcttcttgagggtcaccaatcctggcccgaatactcgataggctctcttggaaataggggcggtgccaggtataagctctatggcanattcaactttcctttcaggtggcatgcctggttacctctcnggaaacacatctgggaattctgatactacattgat

SEQ ID NO: 36244 - DNA, 305 bp, Zea mays
  unsure (1)..(305): unsure at all n locations
gctactccactcacattaaaatctagcttcttttattatataaaatatgagatctntaaatataagtacttacatccaattattggtatgtaattntaaataatatacatgcacatgncgttttaatagcaccattacctttataatcgtcaaatctgtaccactcacatcaatcagtgctgtgctagtggtcaattgtccataatcgtgctgcacacatataccattataaatcattcataatcagcaacaaggaggtttcnngtactatttgtatacaacaacattttcctcttttataatct

SEQ ID NO: 36245 - DNA, 507 bp, Zea mays
  unsure (1)..(507): unsure at all n locations
tcagaagtcgatanactagtgtgtaacgaacatgttntcttttcttaccattntctgagaaagctcagcaatagtttgtatgttggagaatctatcatcatttctcacatcaaatatgtagaggccaagttcattgctaaggtccctcagattcccagaatcaaaatcatgtggataaagctttgctaggctcaacaacttgtccacattaaaatcacaaaacgagtctcttggactaaaagaggccgagcatacaagcaattgagagcttgtctcgttaaagcggctgtcaagctcttggagtacccaatcaataatatcattgaaacaatctacttgatagtaatgcttgtttgtgattccagatttgtgcctcctcttctttggatcaatatattcatcttccatttcccaattggcaatatcattcttctcacaaaattcatacacatcatctattaggttntcccactcttctcttctaagctcatctaattggcatctagt

SEQ ID NO: 36246 - DNA, 484 bp, Zea mays
  unsure (1)..(484): unsure at all n locations
agctntactcaacagcatactctatgcacaagcttctttttttgaaacaccttcgntgancaaaataataaaaagtcgaagaaaagtttttaccttgaagttagaataaaataaactaccgacatgatgctgtcgtctgtagcggctcatgtcagtgtcaagcttctggaaaccaatactctntgacagagtaccgataaccttcgctccgatttgatctcggacgcagcccaatttttcatcgtcaacaccgccgaagagtagtgccccttgttgatacccgctggantatggcgtattcntcaactcttctttctcagctatcgacaattcttgcccaattaagttttgaaattaaagttttctttcgaagctactttagctatttccttctccttcttaggtattggagccatggcttcttcagcggatgcgacagtttcttctgtggcatatccaaaagtatcttgtcatgttagaaagt

SEQ ID NO: 36247 - DNA, 516 bp, Zea mays
  unsure (1)..(516): unsure at all n locations
actaagcttctncatatatatcttggaactggttcatcttcctnccattttcgctcttttcatatcgngtacaccttcatccctaggccgaaggtccctttgagtatattatacttggaaaacatgttagtcatgtntttgaggaccttcggaagatgaaggcccccaacagtagcccctcgcagtattaatttgttcttgtgacaacgaattcagactacgatgtgaactaaggccagaagccgaaggtccgaanaaacaccttcccttcgctagaatagcgaaagtcaatgacaaatggggcccgccaagttgcaatgcactatgcatataaatagaagcccacagcggcgacatttgatgtgccatttctgttgctggcattattttccagaatttagactcttacttgttaattcttgtctgattntcgagcttcgtcttanagacgagtttgttccgtgttcgaagagatgtctgacgagaagaagatatccgaggatgagaagatgtatg

SEQ ID NO: 36248 - DNA, 433 bp, Zea mays
caacctcatcatccttcgtctcttgaaccacttcttcaccagcaaagcaaacaagcctgctctcagcttcaccaaaagtacccacattcttcattatgaccatatcatctgacgtcacggtggatctaccaaagtcaagatgactatggttttccgggatcaagatggtgtaatcttcttcatcttcatcaccacttctctcttcaactgtgattccttcagcttcggcagccagagtaccttctgcagcaggcccctctggcacaacaagaacctgatgcctcatcacctcttaaattggtgttgtttcagttgtgtcgacctcgtctccctcgcgagacactctagcagttgatcgcactctagctcatttaatttcaccttttgacgaagctaaccttaaacgatgaagcatttgcacgagagcacaatg

SEQ ID NO: 36249 - DNA, 444 bp, Zea mays
  unsure (1)..(444): unsure at all n locations
ctatgttatggattgctcttgagtcagtccagtttccttcggcccttctggcagcttcctgacttccatgaatagcgatgggtccttgatccgaaagtatcttcatgcaaagataggcaggatgaagaaatgcttcgaaagcattgagggtgccacgaccaataattgcattgtaagggtattccatgtcaacaatgtcaaacacaacttgctcagttctagtgtngttgatgaacccgaaggtcactgacatggtgatcttgcccagtgctacaatctgtcttcctccgaagccacagagagggtgcgtagcatcatgaatcttatcttctggctcttgcatttgcctgaaagccttaacaaatatgatatcagctgcactgcctgtatcaaccaagacattgtggaccagaaatcctttgataacacaagagataaccatgg

SEQ ID NO: 36250 - DNA, 395 bp, Zea mays
  unsure (1)..(395): unsure at all n locations
atccttaagcacctgcggctgcagctgtcagctagttagagagcgtagacttttatttgagtctgggtccagctccatggggtgttaatatatttttgtctttcccggacaacgactacaacttcgattagttntagtttaacgatctatacgtgcttttatatatatcaaaaaaaggaatatgtgtcgcatctaactttagatattgtcttctcggtgtcggcaaagagagttgggccaataccgttggctggctctggtggggtttttttttcatggccaccagcgtttaattctcctcacgccgcttagttcatgttcggatctgggcgtgggatcctttattttatccctcttcactcttcttcgngaagcacgctcgggataataatcgg

SEQ ID NO: 36251 - DNA, 478 bp, Zea mays
  unsure (1)..(478): unsure at all n locations
tgtcatgatcttngcagcctagcanatacaataggtgatattggcaagggatttgtacttttctggtctattggctcattgagttagcatcgctactcccaatagcaatgaccaccgttgaaagggctctttctgccatgaaaattatcaaaactgagttgcgcaataaaatgggtgattgttggcttaatgatttaatgatgatctacattgagagggaactatgtaaaaggttttatcttcaaaatataaggaggcatttcagaagaaggaaaagaatacgaaaatacaattgcctagatttccaagacctccaagatgtatctagcaaaattaaaggtatggctntatattacatattatctattgttacatgttntgtagaaatttatctctcatttagacaatgttctatttctttatatatatcgcgagttcttttctcgaagttgattgatcgtgtgctagatattatact

SEQ ID NO: 36252 - DNA, 412 bp, Zea mays
taagcttaccgcattgaagcatgatcgctttcccttggtcttggccttgcttggctgtccctttcgaccttttagcgccgtcttgaatctcttgatgatgagagccatctcttcatcattgagcccggccgcctcaacttgcgccaccttgctaggtagcgactccttgctccttgttgcctttagagcaatgggttgaggctcgtggagtggaccgttcaacgcgtcggcgacgtatcttgcctccttgatcatcatccgcccgctcacgaatgttccaagtactttcttgggcgtcatcatcgtgtacctgggattctcacgaatattgttcacgagatgaagatcaagaacggtaaaggacctgagcattaagcggacgacgtcgtgatccgtacatcgcgtgctttca

SEQ ID NO: 36253 - DNA, 464 bp, Zea mays
tgacgagatggcactcgtcatcaagagcttccgtcaaatcctcaaacaaaggagggggaaagactacaagtcccgctccaagaaagtttgctacaaatgtgctaagcccggtcattttattgctaaatgtcctatatctagtgacagtgatcgaggcgacgacaagaaggggagaagaaaggagaaaaataggtactacaagaagaagggcggcgatgcccatgtttgtcgggaatgggattccgacgagagctcaagcgactcctccgacgacgaggacgccgccaacatcgccgtcaccaagggacttctcttccccaacgtcggccacaagtgcctcatggcaaaggacggcaaaaagaagaagttaaatccaactcctccactaaatatgaatcgtctaatgatgataatgctagtgatgaggaggataattcgcgtattctctttgccaatcttaacat

SEQ ID NO: 36254 - DNA, 236 bp, Zea mays
tgcacaactctgatgaccactaagagatcaactcagagatggctcaatgtgttatcccatggttggccaagtccacacttgctattacacgttgtggtgtctcaacgggaaggttgagacaacccctttcacgggttcaagacccacttgaaaccacggcgattaggtttcactatactatattttgttcacgaggaatcttcacaacttggagccttctcgccttacactttgat

SEQ ID NO: 36255 - DNA, 405 bp, Zea mays
  unsure (1)..(405): unsure at all n locations
tgctatagaccttcttctttttctccatagcattgtcctttctggaacactaccccacttaanaagaatgagggtagatctcttgaatcttgnggatttgaactccttgaagtacctcataacaagggtgttacagggccttcttctgctgttgctgcttgagcaggcagcagagagatgactggcacggngttgattctgggagaaccttcttcttagcttatcttcactatcttcttttcactgaccctttctttctctttgtcttcccactggaggattctatcaaagagtattaccatcatacattggaggaaaccaaagactatgaaccatgtgcaacagtcttcaacccaagaatcaccaaacattgtgatcttangggcgagggagtggaaaatggag

SEQ ID NO: 36256 - DNA, 329 bp, Zea mays
gacccaagcacgcgctcagctacaaggcggaaaggttttttatttttttaggagggcttgttagcacctccgtttgaacatgacatcctacctgttatggctttaagccattggctaagcagcccaaacatgataagcctaagattcttttctaaggttaatcgaagacaccacttatataactctgaaattgtcgttgccatttgtgaaatatttgggtctacactctggagattatagactaaatattcaatgcatatgggatgatttttagataaggacactcaaggcctattacaaaaatctctatttaaaattgagggccacca

SEQ ID NO: 36257 - DNA, 471 bp, Zea mays
  unsure (1)..(471): unsure at all n locations
tgcattntatntatgatcaagcttatggagatatacacattcaagtgtgggagttgactggtggtggatataacagagggttntatacttcattctattgatctattctatgaacatgaataatatatgaaggcaaatagtttccctttttatttattttaccttgtgtatgccatgtgtccacacaagtgagcctatagttgtctgaggtaaaatatggctgatatatattcacaatgagtagatatttttgacatagtaatatgtccaatgaacttattgctctttataggtggtttcaagctataaagaacgaatgaggacagcaagaatatcgccgttgccgacacgggcagaacagcgcgcgtggaatctgttccaaaaattacgcagagtgccaaacagacagacagattctacaaaaacaggtagtacttgcttccaacatcagtcttattatntcattacacg

SEQ ID NO: 36258 - DNA, 456 bp, Zea mays
  unsure (1)..(456): unsure at all n locations
agctattagggtntcttaactcgggttatatttttatctctttaaccactatttagggttaagtccattaaccagggtttcatttgcaaaaacattaaaacaacacaacttgtttgagaattttgcctagtgaatgcactctaggtgtgtcaaacatatgcaatgccaatgcttatgatgtcatgctcaagatttagttatagtaacaccaggggtgttacatccttccccccataaaagaatctcgtcccgagattaaaaatcctagggtaagtaatggtaaaggaaacgcatcacatttttatttccttatttttggtacaagacaggggtgatgtgggggttacttctctattacaacagctatacaggctttacaatttacatgaggctagaaagcctgcgaaatccttattcacgaagtcttgggtttccatgtagcctcagcattcgaat

SEQ ID NO: 36259 - DNA, 462 bp, Zea mays
  unsure (1)..(462): unsure at all n locations
catcatcttcaagatattgaagcccggaacatacaagctggccaacgatcaaggcgaggtctacagcaacgcttggaacatccaacaactacgtcgcttctacccttaagatgtttcaagtcgttcatatacctcgttttttctttacatacatgaataaagtctaaccgtcaaggaaggatcagccttgcctcggcaaagcccgaccctccctcgggggctagaagggggaaccccctctgcgtcaaaantttcctcgaaaaagtcttttgccagaacgtctttcgcgcttttcgactgcttcgatagcggggtcctaaaaacgacgagagtacacgtaagcggcaaggccgaccgagccganggactcctacgcctctgggatacggatacctcactcatcaccttccgcgataagtaactcacgctcggacaagtgatcatgctgccgaacatgtccta

SEQ ID NO: 36260 - DNA, 386 bp, Zea mays
atctctattcttctattttcaaaaaccctcacagaaactctattctactattttcaagaactcccaagagggcgccgaaccatttaatacattggcctatattttctccctctttggcatcaaacacacaaacaggaataatcttggcctcttaaccccattgcctcaccaaagtcttcaattaagagcaaatggccatcaaaattcatgagatgaacttggaattagttaccctctcatcggagtgcagtggaagtctttcatggtccaagtccacctttttccctttcaatcctcccacaaagactcaatcaagcaaactcaagcaaatgggtagtctcatagggtcaagattgtacacatctccccctaaacatgtgcatcac

SEQ ID NO: 36261 - DNA, 385 bp, Zea mays
  unsure (1)..(385): unsure at all n locations
tgcattcccacatctcaaatcacttagcataagatagcagaacagataatcattccacaaacactacttgattaactaagcttgcattcccatatctcaattcacttagcataaagaaagcagaacaaaaaatcattccacaaacactcacatcgatgcagcccttataaagatgctccctccagaaccacctncacccttctcattgctatccccaccgttggcgagaactgtgccattcatgaccaggtcctcagcaaacagccacacgatgccaccaccggcaccaccatagtccttctcaacgctggtcgagcccnctttgctcccgtagctccaggggtgttcgaggtcagaccatgcataggcatcgccgccccatgaa

SEQ ID NO: 36262 - DNA, 422 bp, Zea mays
ctgcagcttgaacctggtagtgcatggctcatttatattaattgactcaagcctagctacgggtgcataggtttcaccgaaatccacaccttcgacttgggagtatcctttggccatgagtcatgatttgttccttgtcaccacgccatgctcatcttgcttgttgcggaacacccatttggttcctacaacattttggttaggacgtggaactaaatgccatacctcattcctagtgaagttgttgagctcctcttgcatcgccaccacccaatccgaatcttgaagtgcttcctctatcctgtgtggctcaatagaggaaacaaaagagtaatgctcacaaaaatgtgcaacacgagatctagtgtgtaccccattatgaatgtcgccgaggatggtgtcaacggggtgatctcgttgga

SEQ ID NO: 36263 - DNA, 476 bp, Zea mays
  unsure (1)..(476): unsure at all n locations
ggccttcgcctcagtctatcatccgcagtccaacagagtcttttaacgcgccaatcggaaaatcttcacagctgtcaaaaagatgctcctcgatgaanaaagggcagatggaccgatttgttacccgaggcagtctgggcactaaacacgactgagtgtatggcgaccgtgtntactcctttccgccttctatacggatcggaggccatgaccccacaagaaataaaacatgggtccccgcgaacagttccgtcagccgtccccgacgtggacgagccaacttcaaaggatctcattgatggagaccgagtcttcgccctataggccctaaacaagtaccaagcccagacaaaagcatggcgcgaccacgcagtcatcccgagggaattcagcgaagggacctcgtacttgtccgaacaggtaggacagagtccatgggcaagcaggagcccaagtgggagggcccctttatagtc

SEQ ID NO: 36264 - DNA, 374 bp, Zea mays
  unsure (1)..(374): unsure at all n locations
taatatcaaaagcaacaggccttagaaacataacgacgtcatcagcatacaaagaaatcatgtgctggagagatcgtgacgataggggtcgcagcaacccctccaacgaagctctttgaattgtcgagttcagcgcgtccatgacaagaatgaagagcatatgtggtaagggatcgccttgcctcaagccccttagatgtctgatgccctcatctagcaacccatttatgagaattttcgtcgacgagattgtcaacagcccactaattatgtcacaccagatctgaccaaaacccagtttcctcanaacttggagaaggaaggcccaagagacagagtcgaacgccttggaaatgtctaatatgaagaggata

SEQ ID NO: 36265 - DNA, 492 bp, Zea mays
  unsure (1)..(492): unsure at all n locations
ggtagaagataaataccagagcagatttgtccatatgctcgcctgagagtctanggactcaaatgaaaagatactagaaggaaggtttattctaggaggatttcaaaaggataaacatagcaaatatcttatcaaaccaggatatatgatcgagaacttatcaaatatgacaatatcctagcaaaaaaaaggaagaaccacttgtaaaagatagagtttgactccttgttagttcgaaatagctcaattatgatcctcatattgcggcggaactgcccgaattattccaacttaagtgtctaagccccgccttagaggctagaccacacttaaatgggaataacccgtcaatccctcggatcttgttcgacacggccactgacaggatcaagcaccaccgtctcactcgatggtgagtcacagagcatatacaatanagcataagaccatgcgggtaagagtgggtaaaatattacatcatcatcatcggag

SEQ ID NO: 36266 - DNA, 403 bp, Zea mays
  unsure (1)..(403): unsure at all n locations
agcttgtaccactactactatctttctgtgcttgataatataagcctcatcctccctctcgtgtgtcatcttgcatcaacccatctgggcagggacacgcagcgtcaaattcactggtcggtcgagggtcctcgcgggtccgaaacgtcgacacctatgttgtaaatattgttagtctaagtagtcgtgttaatcatataacactaaaatttaaattttaaataggactcagtctgttttctttatataaaatgcacatttaatgttgatggcctcctatatagtcggtcgctacgctattcctttttaactgtagcatatagtcgagatgcaaggtctacaatacttttagggctagttttanggtccanaaaacgaagggattggagganntttttttttt

SEQ ID NO: 36267 - DNA, 445 bp, Zea mays
  unsure (1)..(445): unsure at all n locations
tatgcacccgtagctaggctagagtcaattcgtatattacttgcctatgctacttaccatggctntaagctctatcaaatggacgtaaaaagtgccttcctcaatggactaatcaaggaagaggtctatgttgagcaaccgcccggttttgaggatagtgagtaccctaaccatgtntataaactctcaaaggtgctttatgggctcaagcaagccccaagagcatggtattaatgcctgcgagattttcttatcactaatggcttcaaagtcggtaaagccgatcctactctctttactaaaaccattgaaaaagatttgtttgtatcgccaaattatgttgatgatatcatanttgggtctactaacaaatctacttttgaagaagttagtaggatcatggctcacnaatttgagatgtcaatgatgggagagttgaagtatt

SEQ ID NO: 36268 - DNA, 476 bp, Zea mays
  unsure (1)..(476): unsure at all n locations
agcttccttgaggaggagggcatcaagcatgagttctctttctcctactcgccacaacanaatggtgtagtggagaggaagaatcgaactctattggacatggcacgaaccatgcttgatgagtacaagacaccggaccggttgtgggccgaagcggtcaacaccgcctgctacgccatcaaccggttatatcttcaccgaatcctcaagaagacatcatatgaactcttaaccggtaaaaagcccaacatttcatattttagagtttctggtagcaaatgcttcattcttattaaaagaggtataaaatctaaattcgctcctaaaactgtagagggtttattacttggttatgactcacacacaagggcatatagggtctntaacaagtccactggactagttgaagtctcttgtgacgttgtgtttgatgacactaacggctctcaagtagagcangttgatctcgatgagat

SEQ ID NO: 36269 - DNA, 509 bp, Zea mays
  unsure (1)..(509): unsure at all n locations
tgcattgatcgtgcaagctcatntatganatggcaacagtatattagngccagagccacaatctttttcaacacttcacctacaaggagataagcgctatctgacaatctgaaaatgacaaaagggccatccaccatcacattaggtaaaaaagaatacaaggaaacaaaaaacttatgtaagataattcgatacagtataataaatgacaaaagaacagagcattgtcctcatgttttttcccttgaccccgaagaaagtagagtggttttataacagccaaaatgatcatgaaagtagaatgaaccatcaaaaaggggtacaccagatgcagattatgaattagcaggcaagaaaatatttaactgtgttagagatagacacaggtttttggcttttctattatccattttttctatacactaagatatacactatgtgtagatacatntangatgaagtgagtataaggattngctacttatattntatagctttggctacatttc

SEQ ID NO: 36270 - DNA, 485 bp, Zea mays
  unsure (1)..(485): unsure at all n locations
aactaagcttctaagggagaacacgtgataggtctaaccaatggtcaattctaatattatagaccttgggcagcttgtcaagcagggaaacaggtgggaggagcgcatcacagcaagaatgtgatgaccacttcaagacccctggagctgctgcatatggacctcttcggacccgtcgcctatctaagcatagggggaagtaagtatgggttagttattgttgatgatttttcccgcttcacttgggtgttctttntgcaggataagtctgaaacccaagggaccctcaaacgcttcctcaggagagctcanaatgagtttgagctcaaagtgaaaaagataagaagcgacaacgggtccgagttcaagaaccttcaagtggaggagttccttgaagaggaagggatcaagcacgagttctccgctccctacacaccacagcanaatggtgtggtagagaggaagaacaggacgctcatcgacat

SEQ ID NO: 36271 - DNA, 384 bp, Zea mays
  unsure (1)..(384): unsure at all n locations
accgacagctcagcatacaatatcttaaagtgagaaaatgaatttttctgtaatgcaaaatttttccatttgcttatacttaatatcgnattgcttttcagggccgtattcttagcaacgccctctaggcacaaaaaagcgctgaagaccagggatgtaccatggtcttaacaatcttcattctgaagtcatcaaactaaggaacgaacgtcttaagaaagataaaatatcacactcattgctcaataaaataaaagaagacgaagctacttccaaagcccaagctgaagcccagaagtgcgaaatcgaagatcttcagaaacagctggctgatgcgaagttaaagtgtgcaattgccgaagctgaccgagacgcctgtaacta

SEQ ID NO: 36272 - DNA, 251 bp, Zea mays
tcctacacaacaaaacgagccaaccaggtttaccaaaaggcccacgaaccaaaggacatgcaaaaaaatggggcaggacaccttggcagacaaggccccacccattttcaaaacggaagacattcattaccaagcacacataatttacataagggcaccaaacagatgaacatgcagacataggggaagagaccttgcatacatgcaacccccttacaaaaccgaatcatcaatccaagtaacaaatcaca

SEQ ID NO: 36273 - DNA, 320 bp, Zea mays
gcccctgatctaataactaatcccataaataatcgacacataatacatctcatcctttgtacaataattcctttcggcacatacattgctagctctttatctgaaagccgccgaacctataaaaccagtaactcacgggctgaatatttgaagtgggccgtttcatgcttgatgggcagaagtcctttgcataacagaacgcgatggacctcacttacgagctcccattaaaacccaacataccgagtgatgcagctacagactacagcgcctatctctactactccctaaagactaagagcatgcgtgcacaacgcact

SEQ ID NO: 36274 - DNA, 474 bp, Zea mays
  unsure (1)..(474): unsure at all n locations
gcatattttggtccccatcgcttgatgggtccattttagtttttttacaaagatctaggaacccaaatgtcatttgtgttagcactctttctagcacaagttgcaattttgggttgcctagttgcatgagaattaattgacaagctagaagtgggatagttaccaatgggaacaatccttgcatttgatgtccccttctttcagcatatgtagcataggcgatcttcgagtcttgaagatttcttctttccttgtttcttgctcgctacatggntagtgaatatnttcttttctaacactatgcctttttgttttaaatggggacaagacctaattaagtgtcccttctttgagaatttaaaacaacagttatcgtccttgttaatcaagccacttttaatatatggacatgacctaatcgagtgtcccttttcaaagcattcactacactctttacttctcttagtgtgaagt

SEQ ID NO: 36275 - DNA, 488 bp, Zea mays
  unsure (1)..(488): unsure at all n locations
tctaagtcacctgcagctgaagctntctcccatgtcgctgcaagccatgttgttgttttacctccatcaatgatcaaacgacatgaacgctccttaatgacacacttctgttgaaacaacgtatgtcactgaatctgctctgccttctccatttgtgcactaagcacacgctgtacaatgaggctctcataatgctctgcatcatctgcaccaatctgttcttcgggtgtgtccttagtgcctgcatcatcagccgcaagcaaagcaagtgtagcttcatccagatcactagcagaggaatacccaccatcgtcttttaccaccaacacacgctgattaggacaatcacgctgcacgtgtccatagcccttgcatcgataacacagaacatctctngttctacccgtggaggctactgaagaggcactacctgctggtttctgggcagatctggttgctgaatttgtggaagatgcacgtggtttgtc

SEQ ID NO: 36276 - DNA, 505 bp, Zea mays
  unsure (1)..(505): unsure at all n locations
actcagcttaaagatatctctttttcttttttaaaatttcagatgtatgctntgcctaaccccttaagtattgacacaccttcctaatcttagcttgacatctctccatcagattatatcctcatgtctcattgatccatatatcttttgccatatccacaaaaccatccctaagaaaccatcctagttcaaacttaaatggggatattgtttgaacagttacaactcatgtattaaggagcaaggcggtatggtcagataaatttctagagagggcaagcactgaagctctagggtaattntcctcccatttagtggctaccagaatccgatccaatttctcatatatcggattatccctagagttagcccatgtgtaccttcggccagacatattcattntctcagatcaagaccatcaattatggcgttgaataggaacagccatcgatggtcaaatctatcattattcttctcaaatggagatctcanatattaaaatctc

SEQ ID NO: 36277 - DNA, 193 bp, Zea mays
gccagtgacgagatccactctatcagagactaccaagaataggtgaccctgcaacactctcttaaagcgatgaaatcatactgctgctaagacagtgacacctacattagtgtagagacagttgtaacccatttagcataattgagatactgaaagcacaatgttatcttatgaatctacaatacagacattg

SEQ ID NO: 36278 - DNA, 504 bp, Zea mays
  unsure (1)..(504): unsure at all n locations
taagctatttgtaatctaatgctcatatagggcttcttatcacatctggtatntgnncgatcattgaataacttctattaacacttatacttcttagtgcctcatataaaatcaatcaatatctcttgatgtgcactaagttgaaaggagaattcatgttgcctttatacaatttgtgatccatttaatttaatctaacattaacttggaaaaggatcactagttgtagagctctctcttgtgcaaaatatttccatatattgtcttgagtataggtcttaagcaactaagactaaggacaatgcacaatgaatatagcgtctctatgtgaaggtacaaaaggggtaaactacttcatttcattcaaactcgtacctaaatcttccatgtctatactntctttacatatcttgtataaaaggaagagaaagcatggccatgcattnttctctgcttcatacctaagttaatctctcnacatgtcattcctgcatttatgcatct

SEQ ID NO: 36279 - DNA, 448 bp, Zea mays
  unsure (1)..(448): unsure at all n locations
actcagctccggtctctggctttaccactctaggcaatatgttctgtattaacctgngaatcagttctaagaaccgcccttctaatatccattgcctttaacttccgaagacccaaaagcaaagcttcatactcagcaatgttatttgtgcaactgaaatcaagtcttgctgcgtagcaaagtttaactctggagggtgcgaccaacacagcggctgctcctgccccaaaggttccccaagaaccatcgcagaatactgtccaaacttcggcatctttactcgcttcttcttcctgagcccctggcagtcagtcagcaatgaagtctgctaacgcttgagactgaatcgaagatctatgcacataatcaatgcagaactcatngagttccgcatcccattttccaacccttccagtagcctctctatttctcataatatccttcaatg

SEQ ID NO: 36280 - DNA, 417 bp, Zea mays
  unsure (1)..(417): unsure at all n locations
cttaaggaaacaggatagctaccatgtctttcttaaaatagacctgcgcagcttgcaagcagggaaacaggtgggaggagcacatcacagcaagaatgtgatgaccacttcaagacccctggagctgctgcatatggatctcttcggacccgtcgtctatctaagcatacggggaagcaagtatggtctatttattgttgatgacttttcccgcttcacttgggtgttctttttgcaagataagtctgaaacccaagggaccctcaagcgcttcctcaggagggctcaaaatgagtctgagctcaaagtgaaaaagataaagagcgacaacgggtccgagttcaaaaccttaagtggaggagncctntaagaggaatggataagcacgagttctccgctcctacacaccacactaaa

SEQ ID NO: 36281 - DNA, 376 bp, Zea mays
  unsure (1)..(376): unsure at all n locations
ttaagtcacctgcggcatcaagctttgcagnagaagaagagtcttttatgtcttgctatgtaaaaacttcggcagaagaggaagcgaccgtctaagcttcgttgcgtacgaaaagaagggaaggtgtttnttcttcttctgctcagaatactgacttcgtctcacatcaaagcgactcaatcgtagggtaaggatatattacatggtatgtacaaagttccttgagaacagttcaattgtatctacaaaacttgctacaaaagtatcctaagatatttcctataatacatttctactgatcttaattaagcttcagcttccgcgaccagttcggcgacataacttangcattatcttcaacttcgtcattctacat

SEQ ID NO: 36282 - DNA, 394 bp, Zea mays
  unsure (1)..(394): unsure at all n locations
tttcttncgtcgccttgaatgcaacgggttgagcttccgatgggtcgccaagctcgctgatttttctcgagccttctatcatgcactcaaaacttacaaaatgcccgataactttctcggtggtcaatttagtatatctaggattaccacgaatcaattgaacttgagtgggatctataaaaatgagagatcttaaaataacatntaccacttcgtggtcatcccacttcttgctcccgaggttgcgcacttggtttaccaaagtcttgagcccgttggacatgtgttgtggctctcccctttggaagccggaacgaccgagctcccctcgatcgttcccgcttgggatcttgtgagtcatctcctcgtcgcggtttgatacatccaacctctt

SEQ ID NO: 36283 - DNA, 427 bp, Zea mays
  unsure (1)..(427): unsure at all n locations
gcgcgctgataagacattcttcacataaaaccattctgtcatccaatccccgggccatctcttccgaaaggatggtacgggacagcttgccccggaccgagaaacgaagctgtagcagccaaagttgttatggtactgttctttgccccaaggctttgtttcatataataattcatgaacattacaaaagcttcttgcgtcacgcttcagaccttgactcctcgcggcccacacgaagatatttagccttataattgcctcgggagtaagatgatgaagatagacttcgaagattntcaacaccttcactacgaagctgctcaaggggaatcgcagtccaactctcanaaagcttcggtacaccacaacttcatgttcttcaaggtgtggacaaagttttttcccttcgttcaccctcacaatagac

SEQ ID NO: 36284 - DNA, 431 bp, Zea mays
  unsure (1)..(431): unsure at all n locations
tgtgcacacctctgtgaagctccccgagctaagaatctgttagtacttcgccggagaagccagtccacgctcgccggagctctcgcccccgccggagtacgtggaccgggtaaaccactccaccacccttcgattccttgcgcacacagtcgctgcgtgaccccgtgatgctcaccgtgccctcggattgaaccagttcgccgtggtttggccggtatactcgccgccgacgaggacacccgcctgcccgcgtggaccgggcgattccggccatctccgacgtcgatcctaggggaatagtggagtgggggtagatctgcgaatgtggatntagtttacacccaggggcctcggtgtaaactgtttttccagatcacctctattaaatctgtttttatatnggacagaaactttgaaaatgcataacctct

SEQ ID NO: 36285 - DNA, 463 bp, Zea mays
tggaactactacatatggttttatttggacctacaaattatgtcagtgccggtggcaacctctactgtctagtgattggtgatgatttctcaagatacacttgggtgttctttctccatgacaaatctgaagttgcatctatattcaagaagtttgccaagaaagctcaaaatgaatttgattgcaagattaagaagattagaagtgacaatggccaagaatctgacaacaccaacattcatgagtactgtgatgaaattgggatcaagcatgaagtatctgccacatatacacctcaacaaaatggagttgttgaaaggaaaaataggaccttgatcactcttgcaagaacaatgattgatgagtataacacaccggagaggtttgggctgaagctgcaacactgcttgtatgcataaacaggcttttcctaccggctcttgcaagactcttataactgtaa

SEQ ID NO: 36286 - DNA, 336 bp, Zea mays
  unsure (1)..(336): unsure at all n locations
aaattgtatcaacccaaagtattgcggtactgttctttgccccaaggctttgtttcatataataattcgtgcatattacagaagcctctcgcatcaggcttcagaccttggcttctcgcgggccacacgaagatatttagccttataattgcctcaggagtaagttgatgaagataaacttcgaagatttcaacacctncacaacgaagctactcaatggaaatcgtagcccagctatcagaaagctcngtacactacgacttcattttcttcacggtgtggacaagtcttctgcccttcatcggccctcacaatggacaaatcacagaaatacct

SEQ ID NO: 36287 - DNA, 480 bp, Zea mays
  unsure (1)..(480): unsure at all n locations
atcacgattatcttgagaaggttgagcatgacactttcccttcaaaagagttaagctccttctttgccttccaacttcttccttgagctgtttattttcttgtgtgatagaaatatcactagttccttgaaattctagctcaatggacgattggctttcttgatagcaacatttgttagcacatgataatatagtttctacttgagtacatgtgcatatgtgaggttggtatgatttcaaattagttaacacaacctcatgagccatttctaacatgatatgtgaatccataaatntattatgagagcacacaagcatatcatgtttttcttgcaaagctagattttcaatatttagcatttctatcgtgttcttgaaccatagcattttattttctaattgagcaatatattgatgaatgataacaactnntaattgctcaatnganatgtcttcataccttnggaccanatcatcatg

SEQ ID NO: 36288 - DNA, 121 bp, Zea mays
gtcaccgcagctgcagcttgtgtggagtggatagatcgagctctttgttttttagaattgaatgctatagctcctgtaatgtgtataagtgtagacacttggatgccattgaatgtggggt

SEQ ID NO: 36289 - DNA, 442 bp, Zea mays
  unsure (1)..(442): unsure at all n locations
acgtgaagagtgccttcctcaatggaccattctattaatgtnctatgtgaccaacctcccggctctgaagatagtgagtaccctaaccatgtgtataaactctctaaggcgctttatgggctcaagcaagccccaagagcatggtatgaatgccttacagatttccttgtcactaatggattcaatgtccgaaaggccgatcctacactcttcactanaactcttaaaaatgacttgtttgtatgccaaatttatgttgatgatattatatctgggtctactaacgagtctacatgtgaagaatttagtacgatcatgacacaaaaattcgagatgtctatgatggnggagttgacagacttcttgtgatttcaagtaaagcaactccaagagggcaccttcctaagccacacgaagtatactcaagatatcctaagaaagt

SEQ ID NO: 36290 - DNA, 439 bp, Zea mays
  unsure (1)..(439): unsure at all n locations
gcttaccgcatntgaagcatgagcgctcctctggtttggtttgctggctgcccttgcgacttaagcaccgtcttgaatctttagatgatgagagccatctcttcatcattaagtccggccgcctcaatctgtgccaccttgctaggtagcgcctccttgcttcgtgatgccttgagagcaaggggttgcggctcgttgatccgaccattcaaggtgtcgtccacgtacctcgcttccttgatcatcattcgcccgctaacgaattttccaataacttcttcgggcgacatcttggtgtacctgggattntcacgaatattattcaccaaatgaggatcaagaacggtaaatgaccttatcattatgcggacgacgtcgtggtccgttcatcgcgtgctcccgtagcatcttattnntgttgatagggtcttgagctggg

SEQ ID NO: 36291 - DNA, 486 bp, Zea mays
  unsure (1)..(486): unsure at all n locations
aatgtattggaagcctagagcgagcttgatgcatttgagcaagatcttcctgatggatgaaagtcaagcgtgtctccaatcattgccattaacttcattagggctggttcgtttcaacactaatccatgtagatnggatgacattgagtcaagttaaatccataacgagtcaaaatccatcccaatctatntcaataaactccaatctacatggaattagaataaccgaacaagagggacctgccacacgatttatttcaattatgtcctgtgcaggctgagattgcacggcaagaagccaggctgaagatggaaaaggagaatntggagaaggaaaagagcgttctcatgggaaccagcctcagccaagacaaccaagatggaatgtgttacaacaantcaaggttatttatgtctttctattcttggcttgctctcttctatcatcanatggaatgtgttataatgctaatgacaacatatatt

SEQ ID NO: 36292 - DNA, 429 bp, Zea mays
  unsure (1)..(429): unsure at all n locations
agcttcttcaccatgtgatcacgatatctagtattgtttggcaaagcatttcccttctagttgtgcaagctcatctttagcctcacattctcttctttgagcatttgatatgtatcatcttttgttcctgccagttctagctcacaagaagatatgcttgttgactgacaacangtattaacccatgggtatatagtatcaatttgaatacatgtgcatgagtgacgtttgtgggattnttaggttttttatcaccacctcatgagtccaattcgatatgatatgatcatccataagattttcatgagaacattgaagcctatcatatttctcttgaaaagctagatattcacttttaactttttacttggctcttaacaaagggtttctaatactaattgagcatacaacgtaagcgcttcttgctca

SEQ ID NO: 36293 - DNA, 501 bp, Zea mays
  unsure (1)..(501): unsure at all n locations
tctaagggagaagcacatttaggattatcaaatgttcattttgagaaagacaggatttgtagcgctcgccaagcagggaagcaagttggtactcaccatccacacaagaacataatgacgaccgacaggccactggagctcctacacatggatctattcgacccgatcgcttacataagcatcggcgggagtaagtactgtctagttattgtggatgattattctcgcttcacttgggtgttctttntgcaggaaaaatctcatacccaagaaaccttaaagggattcttgagacgagctcaaaatgagttcggcttaaggatcaagaaaattanaagcgacaatgggacggagttcaagaactctcaaatngaaggcttccttgaggaggagggcatcaagcacgagttctcttctccctacaccccacaacanaatggtgtagtggagaggaagaatagaactctattggacatggcaagaaccatgctcgatgagtac

SEQ ID NO: 36294 - DNA, 493 bp, Zea mays
  unsure (1)..(493): unsure at all n locations
agcttctcgtggtgactggggtgatgaagacttttctatgttgatgcaagtgaggtggtggcaattattttgatgtggaggaaggtgaaccaaatgaaaacgagggtgaggaatgtggttgggacctanaagatctgaacttccacctgatacagagactctagaatttgtcggcaatgctcgctctattgtatctgtcactccaacaacagacattcctgtcagccaaacctggactcaaaaatcttctctggctatggagcatgcgaccatagggaactntgacacaacagtgaggttgcttatccggcagttgggcatcaagaactttgttccgctgaagaccttatttgttggtctgtatatggacattcattcatttctgagtgcacttgctactggctcggtcatatcagttgtngtcgagaaaggttgaaatgagtctgcaagtcctaatgtaagaggcccttctacactttatttcagcttctcc

SEQ ID NO: 36295 - DNA, 480 bp, Zea mays
  unsure (1)..(480): unsure at all n locations
accttgaatctcagcttaacattatgagggatcgtcctacttataacatcgcacgcaatgtcttatatgcaatataaacaagtagaacaataagaatggcattcacacaacagttgtgattcggtatggcttgctgtcacatggtgatccccatctccaataatctgtccatcacgatgatatccatctncatgatatatgtatgcccatcctcaggtgatgagtccttcaagacctatctaacgtatgctggtaaacaaattacatatacgctntggatcatcacatgttgacacgcaggtcattacattaaatttggacaatacatgtggctccagccgtattgccctcgtcacgacacgcaggtcatgaataatttattaacatgcatcatatacacaatagccataccgatcacaagatgtcctgcanaaacaggttagacaaacacatttctatacgttcgccacttcatcagat

SEQ ID NO: 36296 - DNA, 453 bp, Zea mays
agcttgtacagagcccgcttgaactaatctttttatatacccgaccccaggggcgcatgacaccagacggtccaacccaaacggcgttggctgaattcagaattattgcagagcacattggcactatggatttggtgcaagaatttctggctttcaaagtatttcccaccatgaaggaatgggctatgccgaagcttataggagagaagaaagagggggagcttatccgactgccctatcattataaattcaagaaatatttcaaggcaccctgccaagaatggctcgaaacaatcgaaataatgagtactgaaattcttggaaattactctaaaaaagaggaccaattgatgacagcagccttctgcacccggccgaaacgaaggctaaacagagtacttgatgctatatgctttgaatattctgactatggtcaactgggcggagatgctg

SEQ ID NO: 36297 - DNA, 504 bp, Zea mays
  unsure (1)..(504): unsure at all n locations
tgtctttggctcatcctctntcttcatccaaattttggtgttatctccgagtaacagtccaataggctcatgagttccgatgaagctgctgcatctacaagggaatctattcttggtaaagggaactcatccttgggacatgccttgttgagatctgtgaaatcaatgcacatcctccattttccattagcttttttcaccataacggtgttagccagccactctggatattttacttctctgataatactggcactgagaagtctctttacttcatttcgtgcacctttagctntatcatcggacattntccgaagcctctgctttcttggtctgaaagatgggtccacattgagtgaatgctcaataacatctgtattaacgccacaaaggtcattggctgtccaagaataaaacatctttgntactaaacaggaatcttaacannagtttttcttgttcatcgaatagctgagatcccaacaatactcttggttctgtatg

SEQ ID NO: 36298 - DNA, 368 bp, Zea mays
  unsure (1)..(368): unsure at all n locations
cgctgacgtagaagactggcttctggatggttcggacccctgccgttgacctcgaatcctcatactcttgacctttcatcaccattctggtggtcagaccaccaccttgtcctaggggaactattttactcccctggggatgttgtgccgtcctttcggcgaccagcaccatgcttaccacctatgtagccgctgcaatgtataagtgcaacggcttccctggctcttgagctaccagtattggtagggacacaaggtgcttgcttaactcttgaaaagctcgctctgcctcctcggtccaagagaatgggtcggacttccgtaataaccttgacgaanggtagtgccctctcggctagtcttgagat

SEQ ID NO: 36299 - DNA, 503 bp, Zea mays
  unsure (1)..(503): unsure at all n locations
tctaagcttttgatgaacttntaacttacgaaatgagaagcgctgttagtcctcatgcanatgcaactacttgatgctctatgaggcactaagttttacacagatctaagtcattgacctctcttaatagtacgactatctagcctaccaatccggtcaggtatcttctctaaactcctcaagaccggcaaaagtaaaacctatattatacctttgccttcatctgatccacaaccaatgcgtatgactcttcaacatttcatttctatgtggtccaaccctgcattcttatttctccaagaatcgttagtccacaagtagttgtcattaattaccaaaacattatcaaaggggcctagatgattcacaatctcccnncttttggtaattgatgacaacaccacatagtatattaaagagaagttagtttctcaaatctctctcataccanaggatatgatagatatggaatgagttcatacgactatcttgatttgaagtct

SEQ ID NO: 36300 - DNA, 470 bp, Zea mays
  unsure (1)..(470): unsure at all n locations
tagcctcatgtgntttgcaagataaaagttcattttcaacaagaagattgccatgatcaaatttaatttgagtatagtcttccttgatcttaactagtctattntgcaactccctattagcttcatttaatttgtcatatttttccttagcatcttttagggagattgtgagctcatttacagttgatgacatagtnttattttcttcttttatttcatcactagcctttataactatgtcatacttggcatttaaagattcattttcattnttcaacctatcacatttagcttttgactntctaatgatttgagtatattctttaagtaagtcagctaactcatcatatgaaggtgaagcaaattcttcatcactatcactatcactatcatcatcaatatcattntgtacctttcgttcacccttagccataaggcacangtgagaagtggatgatggcgatggtggt

SEQ ID NO: 36301 - DNA, 251 bp, Zea mays
  unsure (1)..(251): unsure at all n locations
agcttangatgcatccgagatcgaactgtatcttttgttatcaccaccctgccgaagagcgttggttctccgaagctntaagcggacatcaaacgcaaccgactactacatatcgtcagtagtatatcctattctaatctcaaggaaaagattttcccttggcctttcattgatttaccataaaggtaattgctgatgaacgctattttgcacaaagtatgctattaagtaaagccttgaggatgcaacaa

SEQ ID NO: 36302 - DNA, 486 bp, Zea mays
ttcccttggcaggcggcgcagacctcgccggagctaaggactatgctgggatagtgagggcaagcacggagtgaagtgttgtggcggaaccgaccgaattattctagcttaagtgcccaagtcacgtcttagacgcaacaacacacttaaatcggaataacccgtcagtccctcagatctagtctgatgaagacacgttttctaggatcaaataccactagctcactcgaaggtgagtcacatagagtttttaagtaatcggaaacaagttcataatttaaaatcgtagaggatagtcgataacgtcgaatgatgaggaatatggcaaggcctagcccactactcctgctcctctcctgctagagtagcatcccactcgacagtccaacccggtggcaagagggaagggcaagtcacaacatcaaccatggtctgtagcatacctgcatatatgtgccacaagccaggctgactatactaatactc

SEQ ID NO: 36303 - DNA, 399 bp, Zea mays
  unsure (1)..(399): unsure at all n locations
agcttctcgnttgcctttggaacgaagactgtgttgttcantcacatagggggatgaacctcttcgatgaagccagcatcaagcagcttccggaccttctcactgatgaagttctgccgctcaacggactgtctcttaggcttctgactcaccggtttggcgttagggtggatcttcaaatggtgctcaatcacctttctggggatcctatgcatcggngacggctctcatgcgaaaacgtaacatttgctcggaggaaagcgacgagcaccagttcctatttctcccccatattgcccgcgatgtgggtggtctgggaggggtacgcgccgacctggatggtctttacaggtgcgtcatctgctccgaacggctgcaccttttggaccttggcaggcg

SEQ ID NO: 36304 - DNA, 376 bp, Zea mays
tctcagctaaacctttattgacttttcactatattgaaatacgatatatattcaaatccacaacgcaaaggtcgtcttattcaaaacctcaatcatcccctctctcccacttcacacctcagaacgcactgttcttatagagagaaaggcgcttttccatcttcttaacccgaaatgaaatggctgaagagaagaaagttcctcttggggggtatcccccggaagagatccagtggagaccgcgtgggcctgtagctcagaggattataacacctggctacgaaccacggtgtcgggggttcgaatcccctctcgcccacagcccttccaagggggaaggacctttactttctcctgaaggtaggaaaatcatgat

SEQ ID NO: 36305 - DNA, 385 bp, Zea mays
  unsure (1)..(385): unsure at all n locations
tgtttcagctacctccatcaatgatcagacgacatgaacgcttcttaatgacacactntgtttgaaacaacgaatgtcgctgattctgctctgccatctccatttgagcactaagcacacgttgtacaatgaagctctcataatgctctgaatcatctgcancaatctgttcttcaggtggttccatagagcctgctggtttctgggcagatttggttgctgaacttgtggaagatgcacgtggtttgtctccggaagaatgcagtggtgcttggctactctaccaaggagttggtgctggtgtacagtcaatcatggacgtagacacgcgctgttgccatggtgtagatattcttgcacatacattagaccttgcgctagcacg

SEQ ID NO: 36306 - DNA, 433 bp, Zea mays
ctttcgtatcttcaatagagaacgcagcttccgttgggccagaatcttcacatgttcgcatcctaccttctctaagatagcagcaattcccctggcacctgagaaggcgcagacatctccacggccgctcaaaacttcctcataggcttcggcttcgtcgttaatccattcgattggaccttcgggatcgtctagtacgaagttgtcctcatttgaatatgcgccgatattggcgaaactggtttttatcttttgtacacatgccacagatttttcatagcatctttcttttgaagaacgaagctccacagctcgtttttcccagtgatgtttccagtactcactggtgtcttggtcagcttcggcaattgcacattgtaattgttcttctgccagctgtctccgaagatcttcaatttcgcatttctgggtc

SEQ ID NO: 36307 - DNA, 382 bp, Zea mays
  unsure (1)..(382): unsure at all n locations
agcnntgattataatgcacacataacattgcttagtactaagcattgattctaggtcttcggaagttaaaagcaatgggaatcagaagggccatacttaaaactgattcccaggttgtttcgggtcatattgacaagagttgcaaggctaatgatcccaaactcgaaaaatatctggatatggttctaagagtcgaatcttccttcgaagggttttctgtcaagaatatccctcgaggacaaaatgagcatgctgatctgctaactaagtcagcaacacaggggctgcctttaccttccgatgtatttttcaaacaataaacaccttcggtggacttcttgaaagaccagtcttatatatcntctgttttaacaagaatgga

SEQ ID NO: 36308 - DNA, 326 bp, Zea mays
  unsure (1)..(326): unsure at all n locations
ttgctaaatgtccattatcaagtgatagtgacaggggcgacgaccaaaaggggagaagaaaggagaagaagagatactacagaagaagggcggcgatgcccatgtntgtcgggagtgggattccgacgagagctcaagcgactcctccgacgacgaggacgccgccaacatcgccgtcaccaagggacttctcttccccaacgtcggccacaagtgtctcatggcaaaggacggcaaacgaaagaaggttaaatccaactcctccactaaatatgagtcgtctagtgatgataatgctagtgatgaggaggatnacttgcgtaccc

SEQ ID NO: 36309 - DNA, 493 bp, Zea mays
ggatcctaagcacgcagctgcaactcggaagcttctccatccacacatgtgctatactgtatgccacagccagcccatgctagtcttagctattaatcatgcatatataccggcctcttcttatgcaaaatcaactaaataaagtttgccgtctaatacacccttaaaagctagtgaaccattacttcttctaaagacagacacatctacatttgtaaataggcagttatatcccatatgacataattgactaacagatagcaaagtatatccaagactctctactaaaaatacattagagatagaatgctcattagaaattgcaattttacctaacccttttaccttgccttgattcccatcaccgaatataattgaatcttgggaatccttattcttgacgtaggaggtgaacatcttcttctaccgcgtcatatggcttgtgcatccgctgtcgataatccagcttgaacctccggatgcataaacctgc

SEQ ID NO: 36310 - DNA, 514 bp, Zea mays
  unsure (1)..(514): unsure at all n locations
tgtgaacaatataagtatagaagagagaaggctgcttctgctgatcatccgaagcccatgcttctgtgtgaagacatagcagagcagaaggtattgctgggatcccaattatctgaagagcaggagaaaaccttgataaggtttttattcaacaacaaagatgtttttgcatggtcagccaacgatctctgtggtgtcaacagggacgttatcgagcattcactcaatgttgaaccatccttccgacccaagaaacaaaagctttggaaaatgtctgacgataaagccgaaggtgctcgaaacgaagtaaaaagacttctcagtgctggtgtcatcagagaagtgaaatacccatagtggctagctaacactgtatggtaaanaaggccaatggcaaatggagaatgtgcattgaatntactgatctgaacaaggcttgcccaaaggatgaagttccattaccaagaatagactctctagtggacgcaacagcttcgtcagagctcatgagtct

SEQ ID NO: 36311 - DNA, 276 bp, Zea mays
ggatccttaagcacctgcggctgcagctgtgatatttaacagaaaacctttttgttttcacagcacacagactcggacggttggattgagacatcaacacacatcgtcttacactacacggctagggactgacagaaatgcagtaaaagagcactctgatgtggcttcccatgtaaatcccgcatcagactgaagtgtgattatgttgaagtgaacgatcacgagaaggaggtccatgaaccacttaaagcaggatacatctattagcatctctct

SEQ ID NO: 36312 - DNA, 288 bp, Zea mays
  unsure (1)..(288): unsure at all n locations
aagctatgttgcacctgttatacacacaagaccatcatgaatagcgacagaccactagagctcacacatgtggacctattcggccggatcgcgaacataatcagaccggggagcaagtgccgcctagaaatcgtggatgagcattatcgcttcactagggtgctctntttgcacgacacatctcggacccacgagactcgaaagggattcttgagacgagctcaaaatgagtccgacttagggatcaggagaatctgaagcgagaacgggacggagttaagatctctc

SEQ ID NO: 36313 - DNA, 464 bp, Zea mays
  unsure (1)..(464): unsure at all n locations
agcttctanagggagaacacattgtaggattaacttatgttcattttgagaaagacaggatttgtagcgcatgccaggcagggaagcangttggagcccatcatccacacaagaacatcatgacgaccgacaggccgcttgagctactccacatggatctattcggcccgattgcttacataagcatcggcgggagtaagtatcggcttgtaatagtggatgattattctcgcttcacttgggtattctttntacaggaaaaatctcaaacccaagagaccttaagaggattcttgagacgggctcaaaatgagttcggcttaaggatcaagaaaattagaagcgacaacgggacggagttcaagaactctcatatcgaacgcttccttgaggaggagggcatcaagcatgagttctcctctctctacacgcctcaacaaaatggtgtagtggagaggaagaat

SEQ ID NO: 36314 - DNA, 326 bp, Zea mays
  unsure (1)..(326): unsure at all n locations
atcacgttctatctaaatgacatgacatcatgctactattttgtaatataagacaagttattatccccatatctgcactaantagacgtcacaagatagcagaattagtatccacagagactcaacgtaataacacattaggatatggagtgctcattagaaattgcaattntacctaaaccttttaccttgccttgatcccatcaccgaatataattgaatcttgagaatctctattcttgacgtacgatgtgaacatcttctcctcccccgtcatatggtgtgtgcatccgctgtctataatccagcttgaacccccggatgca

SEQ ID NO: 36315 - DNA, 488 bp, Zea mays
  unsure (1)..(488): unsure at all n locations
agctngcacctatnggcaccatcataccaaatctaatacttgcagaagtggtagttcatgtgcggctgatcattgtcatagttgttgtctccctctcgatccgattcatcaatgtaatctcggtggtgggtctcaaagtcgatgaccttcttctacctctgtctgtcgaacctgcaaatggtagacacatcttttaggaatttattgcaaatttgaaataatagttagactaacaagaggacaaaggcactaacttgtggagttctatcgaagtggagaagggctccaccggaaactcctgttgcaatctctaactgtgtgccactcgatggggcaagtggtactcaacgacatagaagcaaatgaggggaaacctcattangtaaatgttcccgtcttgcacgcacatggagctcaactggatgtgggcgaaagctggctcttgatatggttgctaggtcacctaanaaatatttacaatcacatct

SEQ ID NO: 36316 - DNA, 450 bp, Zea mays
  unsure (1)..(450): unsure at all n locations
tcctctcanaattaaaaatgtctcagagcatctncaacaagaagttctatatttgatttctcaaaattaaaatataagacctaatttaaagtgtttagggccacaaaaatatttgcagctccaacaattcagccctatgtcatattattagaaaataaatcatgttatttaggaaataaaaaatatgaatagtgtaaaaatgaggatatgactctggtataatagggtactatatttagtactcaagaggctgagcccctataatagtttggataatttttgtaaaatagagtctattgggaccatgcttcgtcgccgaaggtcctgcaggaagaaacaacttcggctgaagctgtctgtacgtgttgtcgaaaggtgccgttcatgaagcttcggaattacaaaccgacttaaagatagaatgaccttctagtccataagagtctgagt

SEQ ID NO: 36317 - DNA, 266 bp, Zea mays
cctcctcacttaaagaagagtgatacctatttttcgtccctcaatgaagatataatctgactctatagcgcttctaattactaatgaaattttagctaaaatacttttagacgagggacttgtcgacaccctttaaatgaatataatgatgacggcaacaattacacacgcaagtgaaaataagtatttttgaactaatatcttcatttcgacggtaaaaaagcatcttttatctcaaataatccaatacctaggaagtgttttgt

SEQ ID NO: 36318 - DNA, 491 bp, Zea mays
  unsure (1)..(491): unsure at all n locations
tgatcagcaatctattggcctcatgccttcagatgtagccacaaacgcaacanagntagtggggaatccattcattgtattctcaggaaaggaatggtccaatccagctaatattattggaaagggttattctgcattgattggtgaaaattcaaactcccttttggatgttactgagagtttatcaaagtctctctcaacaaattgtgcttcttttatcatggctctgcagagactcaatgaccttaacagacagattaaggcattttaatttttacttgaagatgatgcttgcaaatagataataaagatataggaaacactcaactattcaaggaatcttgcaacctggaggctactaaattgatgagttttatgatgaattatgtgaagctattatcttcacgagaaaatggcccctcttgaacactcgaaagtcctacccaatctgagtctgcatggtttctaaaaacactgtacttgtcttatat

SEQ ID NO: 36319 - DNA, 401 bp, Zea mays
  unsure (1)..(401): unsure at all n locations
gatcttaagtcacctgcagctgcagctggaccngtcgtccagatggttatctgttctgaggcangtgctccaaccaggcgcgagcggtgtctgagatgaacacggggagggtgcggatgatgaggttgtcntcgtccgttccacccagttggcaggccaggccgtaatccgcgagccacagtttcggtctcatctcccccgagtacttcgtgatagtagtcgggggtcggaaccgggtcgggaacggcgcccgtcctatggctctgctgaatgcctgtggaccgggtggttctggcgagggactccgatcctccccgctgtcatagcagtccccacgcctggggtggtagcctctgcgcaccctctcgtcgaggtgggctcggcggtcacggtgatggtgc

SEQ ID NO: 36320 - DNA, 404 bp, Zea mays
  unsure (1)..(404): unsure at all n locations
attcatgcttaatggctaagacttgcatgggctggctgtggcatcgncgcttatcacatgtggggatgaagaaccttcacaagcttctaaagggagaacacgtgataggtctaaccaatgttcatttcgaaaaagatagaccttgtgcagcttgtcaagcagggaaacaggtgggaggctctcatcacaccaaanatgtgatgacaacatcaagacccctggagctgctacatatggacctctntggactcatcgcctatctgagcataggaggaagtaagtatggtctagttatcgttgatgactnttnccgcttcacttgcgtgggtcttttgcacgataagtctgatacccaagggaccctcaagcgcttcctcangagagctcataatgagtctgagctc

SEQ ID NO: 36321 - DNA, 497 bp, Zea mays
  unsure (1)..(497): unsure at all n locations
ctctaaagggagaacacatcttatgactaacccatgttcattttgagaaagacaggatttgtagcgcatgtcaagcaaggaagcaagttggcactcatcatccacacaagaacataatgacgactgacaggccactggagctcctacacatggatctattctgcccgatcgcttacataagcatcggcgggagtaagtactgtctaagtattggggatgattattctcgcttcacttgggtattctttttacaggaaaaatctcaaacccaagagaccttatagggattcttgagacgagctcaaaatgagttcggcttaaggatcaagaaaataagaagcgacaatggaacggagttcaagaactctcaaattgaaagcttccttgaggaggacggcatcaagcatgagttctcttctctctacacgccacaacanaacggtgtagtggagaggaagaatcgaactctattggacatggcaagaaccatgcttgat

SEQ ID NO: 36322 - DNA, 500 bp, Zea mays
tcccaatgaaggtggttatggaccactgaagtttttggtagaaatatcactgtgatcaaaggtcagatatcatcaagcagtttgcatgaacgggtgggagggaacgaacgagggagaacatacagatttacaagttctgtgagggaatcaaatgtatctggtagttttccatctacatggttatcattcagtgacctggtaaaagagaatcttgactctcgaatcagttaattgatgaaagtagaaaacagtaatctatgacattgtcgtctatgagggaaaagataaggaaaaaaggaattacatggctgttagactatggagtcttgataatgacactggaatgcttccagttagttggttatctgagagaaagctgcagtatcaaggaacaaaatatcccatcatctaaccagaactaaagaaaatttcaagcgtaagcataaccacatacatattctgcagtgcgacaagtagatcttccggcatgcttccaccga

SEQ ID NO: 36323 - DNA, 453 bp, Zea mays
  unsure (1)..(453): unsure at all n locations
accttaagtcacctgcggcatgcaagcttgnngcaagtccacttgaactatccttctttatacccgcccncactgcaacatgacaccagagggtccaactcaaaaagcaatgtatgaattcagaatagttgcagagcatatcagttcaagggacctggttcaggagtttttggctctccaggtgtttcctagtgtaaaagagtgggaaatgccgaagctgataagggagaagaaagaaggtgaacttgtgtgtttaccttactacttcaagtttaagagatactctaaaacaccttgccaagagtggctggatacgattgaagtgatgtgcaatgaaatacttggcaattattctataaaagaagatcagttgatgaccgcaaccttctgcacccgtccgaagctaagactataccgagtgctggacaccctgggtttcgaataccctgatta

SEQ ID NO: 36324 - DNA, 385 bp, Zea mays
gtgcttttattgtttcgaagaagacatccgaaggtaagggcagcccctgtgctgctgacttagctagcaaatcagcatgctcactttgtcctcgagggatatttttgacagaaaatccctcaaaggaagcttcaactcttcgaaccatatccagatacttttcaagcttcggatctttagccttgcaactcttgtcgatatgacccgaaacaacttgggaatcagttttaagaacagcccttctgattcccattgcttttagcttccgaagacccagaagcagggcttcgtacttgatgcggacatcaacaccaacacgagcacatctacaccagcaacaccttcttcagcccatgcgccaccccttccacctgggccagtgact

SEQ ID NO: 36325 - DNA, 226 bp, Zea mays
atgaagaaatctacatgaacaatgaaaaaggtgaaaattctattattcattgtgtttgcactgatcatctctctatgtcatccaagagcacaaaggaaagaggaataacgaggtgcttctagtgcaaagaatttggtcacttcattgcgtcttgtccacaccaagacaacgatgatagaatgaggagatgttttggatgccacaataatgaccatatgatcacttc

SEQ ID NO: 36326 - DNA, 442 bp, Zea mays
tgagtcagtccttttacaacgaataatggatgctcttattgataatgagggtatgaagcacatctgcgagataatagatgccggaaaagccaattgctttataaaagatgatcaaggtattgtatggttcaacaaccgcatagttgtgccaaagaatgaagaaaaccgccaacaaattttggatgaagcacatcttagtcgctattctattcatcccagaagcacgaagatgtatcatgatctaaaacaacattattggtggacaaagatgaaaatcgagattgcgcgttatgtggcaaaatgtgacacctgtaggcatgtcaaagtcatacaaatgaagactgctggtccattaaaatctctaccaataccaacatggaaatgggaagatattagtatgtactttattatgggattgcctagaacaacaaagggatatgat

SEQ ID NO: 36327 - DNA, 441 bp, Zea mays
  unsure (1)..(441): unsure at all n locations
ctgcaagctaatggcgggaaattctttactgacatctgttgaaatggcggccgagagatggcgcacgagataataataaagagtgaataagattctcatgatgcaaaagaagcgacgaaagcagctgagaaagctgcgaaacttgaaaggcggataggtattgcttaattgctttgactttgtgtttatttctgcgacttcgaacttatttatgtcttgtatcgcagttgagctatctcctccctcggagcccttcgagcaaacggtcgacccagaagcaaagagagaggaagaaatcactaaaatggccaaagctatgttggatgaagctatttctcaactattaaacgaacctgcggaagtagttntaatagaagaatagctgctattgtaaaaacatttggaatgtatatttgctggacaaagatgcagtatttttat

SEQ ID NO: 36328 - DNA, 463 bp, Zea mays
  unsure (1)..(463): unsure at all n locations
agcttgatagaaaatataatgcctatgttgttttcttgatcgcatattggttgatcattgaacaacttccattatcacttatgcttctctatgcctcatgtaatgagaatgtgattgcaattgtaattataactgacatctatcttaatatgcactaacgaaataagagaattcatgattcatttatacaacttgngatccatctgatatatgctaacactaacttgaaaaagatcactagttgtaaaactctctattgtgcacagcatttccatatattgtcattgaatataggtcttaagcaactaagactaaagacaaagcacaatgaagagagcgtctctatgagacagcctaaagggagaaccacttctttcattaaacttgacctaaatcttgctctatatacactctctgatatcttgataaatgaagagaagctgaccttgattatcctgttcta

SEQ ID NO: 36329 - DNA, 424 bp, Zea mays
  unsure (1)..(424): unsure at all n locations
tcttatctgagataagcagccncaagtaagtgcaagggattgaagatgnggtgcattgcanaatgttacacccctcatgcagcaattccacttcacatcttattggaatggcacaactcttgtgcaaatttgctacaaggccagaagcttcaccaaaacagtcaagaatgagtttgacacagtttagatcttcctccctgggcttgacaaacagcactacatcatctgcataaagagataatctagacttcacaatggcactgtccagactggccaataattctttttcttcttgccacttgaaaaggctgctgaggacatccatcaccaggacaaagagcattggggagagggggtcccctcgcctcaagcctctacgatgcctgatctgttcctctggaaacccatntaataaaatctgagt

SEQ ID NO: 36330 - DNA, 485 bp, Zea mays
  unsure (1)..(485): unsure at all n locations
agcttaactaatgtcatctaagagtcggctagttttatcttcgactccgcccgctagacagcatacacgtgggcttgcctattattatcacaattcgagacacctcatacactacagcatttttataaacattcatattcacaagtattttcgcacaccgaccaaatcatacgaatcgtaaactactagtctgcaactcacgatcaccatgcatttacttcccaatcatgaacacatacatgtttatcatacgaacagagcatctcaataattatcctataacaattaactccattacacaactcataccacaaacctacttgacttgctggaagtgtctactcgaatccgtgagtacaatcacacattatatgcgaagcataatttaacgaacacaatatacgcatcgactcgattcgacttataaatattcagaaagcgatgactacttcggcatgtcaccacctctctatnatgcaaacaca

SEQ ID NO: 36331 - DNA, 460 bp, Zea mays
  unsure (1)..(460): unsure at all n locations
ctcactntgagttagccgatttatcatctcaatgtgaagaatacctcttttctctaagatcctcattgatactatgtactgcatgcagtcatctatatttgatgacctatccttgcccaatcatgtctatcacttgactaagtctctctacagactcaaacaagcacctcggtattggagtagccgcttcgcaacttacatgtagcctattggtttcaacactgccaaagtagatacctccttatttgttatcatcatggttcanagactacttacctctatttataaatggatgacataaagttgactaccccaccagtttccacgctntagcatgtcatcaatgctcttcgcaaaaaaattcttgagacatggcctcttatcacttttttatgtcttatgactnttgctcaaatgggatcgttgctaatgactacattccaaaatcttgatgccatta

SEQ ID NO: 36332 - DNA, 369 bp, Zea mays
  unsure (1)..(369): unsure at all n locations
ccatcctccacaactctaacgccacatgctacattgccaagtgggcaagtggagcttgctgaattctagctggactttcaacctcgccacgctgccaagagccaggtcctagctgactatatcgtggagtggacccctcccccgagtgctcctaggggtccaaatcccgatgcagaccncacacctgcagagcccagggtctctgtcttcaccgagccccactggacgcttttcttcgacgggtctgcccgccaacaaggtggcggagctggagtggtccttgtcgacccaagcggagatcaagtatagtacatgctgcaccttgagtcaacgccaccaacaacatggcagagtatgaggcactgatct

SEQ ID NO: 36333 - DNA, 520 bp, Zea mays
  unsure (1)..(520): unsure at all n locations
aagcctcctgaaagcaaggcttcngnttcctctggtaagatgtttgtcttattgtctaaaaccttcgaagtttaccttcatcagcttacccctgaagccatcatcaagatggggatttatatttgggcaatgaggagtcaagggctagaaccaaatgctaaatgcttctgcaacatgcatgaattgtcttatgagacgaaggccaccgtataagagcaatatcacaacaactttgattgctacggcttcgtaacgcgctctgaggtgagcaacccagttccaacattttgcaagagatggccgagagcctggatgcaagaatggttctatgtaaagaatgatctgcgtgaaagagaagacatcaaaggtattatccaacgtcctatatggtctcacttcgacattaagagaccatcccttgcccttggaaatgacatacaagcgtgccaagttgcttataacacagtatgcacttacataggcaccatggacttagtccaggagcccattgtctacaaag

SEQ ID NO: 36334 - DNA, 190 bp, Zea mays
  unsure (1)..(190): unsure at all n locations
agcttgatctaaacctgaccacaaaatatngccatataacttgcacagttcagtgctaagctacctcgctacataacccccatccctgcctataagtaccctcatgaggcttcaagacaaggcccatgcctctctcaaacctataagcttatcccatctctgtagctcacatacttataccatcagtcat

SEQ ID NO: 36335 - DNA, 497 bp, Zea mays
  unsure (1)..(497): unsure at all n locations
tatagacactcaagcttatatgggaagaagtgcagaactncttcgtattgcgatcatactggataatataattcctgggcctgaattgattcaagaagcagaagaacaagttcgtataattcgagagaatttgagggtggctcaaactatgcaaaagagttatgctgataatagaaggaggccactggaatttgaagaatgagattatgtgtacctcaaggtgtcaccacttcgtggaatgaggagattcaaagttaagggcaaattgtccccacgctatattggaccattcttgatctttangcgagttggggagatggcataccaacttgagttaccggatagtctatcggatgtgcataatgtgttccacgtttctcaactgaagaagtgtctccgtgtccctgacgaacagttacccatggaagagctcatgtgtcaaggtgatctgacttacacngagtacccgatcaagattnttgatactttgactcgag

SEQ ID NO: 36336 - DNA, 474 bp, Zea mays
  unsure (1)..(474): unsure at all n locations
agcttgtagctaaattagacattaacatattcttggtcctctgagccagaagagccatatgtcttgaccactanactactagttctgataatatgtgatagaaatatgaagatcttgtagagacctgttgtatcctctctactcctgatgatttcttcgtacgagagcagtactatctgttgttgaagatggatcctaggcggataccagtattgtttcgttcttgccaagcagttatcatcatttgcttcatcaaaagctagttatatggtgatttttcccagataaaatgaattcttggccttgtctgttctattccaaagcttctcnttttgctgaacaatgaagagatcgaaataatgctatatagaataattcggtatataatatgacgagaaatgtttgccctgctggcaacaccacaaattaataactattggtataaattctctctcaaattataatacctaaaat

SEQ ID NO: 36337 - DNA, 485 bp, Zea mays
  unsure (1)..(485): unsure at all n locations
tcgcacctctgaactaactcngctgcgtcactattcgctgttggcctttataatcctgacctgaagaccttcccgactagcgtcttggatgctgtgtgtattccacattgcccagcgtggacctcatctagaagtcgcttcccagtagatgacagaatgcacttcatgaggacgcccgatgcaccccttctatataatgtctccccaatgagtgtgtagtgggctgactgtctggtgatgcgctcggctgcgtttttgtcatctggttcctcttcattctttatatatctgatgatcggccttctccagtcatcgagtctgactctggttgatccacgatattacactcttctgcctgatccattgagatgctcggntgtggtatttcttgcacaaagactccaggtgggacctgagttcgactagatcctagctcggacagtatatcggctgctgtggttcgatctctctctacgtgatgaaat

SEQ ID NO: 36338 - DNA, 333 bp, Zea mays
ctggcaacttactgactttcatgaatagcaataggtccttgactctacagaatcatcatgcaaagatatgccggatgaagaatcgcttcaaaagcattgagagtaccacgaccaatgattgcgttgtaagggtactccatgtcaacaatatcaaacacaacttgttcagtccttgtattgttgaaaaatccgaaggctactggcatcgtgatcttgccaagtgctacaatctaccttcctaccaagccacaaagaggatgtgtggcgtgatggatcttatcttcgggctcttgcatctgttgaacgccatacaaatataatatccgctgcact

SEQ ID NO: 36339 - DNA, 461 bp, Zea mays
  unsure (1)..(461): unsure at all n locations
tgagataacatatgtgtcatggttttatacgtttctttctctattaaattgggatgtagtattgtgttgcgtaaatgtccaaaatgtttgtcgtctttttagtggtgtcaatggtgtgcgctcgacgatatgtagttagctaacgctattgtgtgtggttatttgtgatgtctcgctacttagtgtttaatttactagcgtgtacttaaagtatcatgtgctatttcattatattcatatatatgcatcttgcatctcatttangaccgagagatgctgatcgtgcaagtgatgtggtgccacccacaagatgtagtcggtggacgacccaaggaaggatggacataactagtggatgctcgccaagcgagtaccctccagcaaacactatctaagtgttaaaataaaggcaagccccggttttattgcataaccgttatatatagctatttactacactt

SEQ ID NO: 36340 - DNA, 502 bp, Zea mays
  unsure (1)..(502): unsure at all n locations
acctctgagtcacctgcggcatgcaagctngctctatgttatttggtagaccatggcatattgataaggacaccgcgcatcatggtaaaacaaatcaatactcttttatgcataatgagaagaagcttgttttgcaccctatgtcccccgatgctatcttgaaagatgaagttgctagagcatgcaaagagaaaaacaaatatgttcataataaaaatctagatgttacaaaggaattggtacaacctaagagtgataattctaaatctgctcatgtaaggaagaatgaaatacaactgaagagtgcttgtttcattgcttccaaatctgatttacttgaattaaacgatgttgctgcaatctgctatgtgtttatatgcaagggatgcttgttctcacttcacaacataccatctactttgccttctactatcactaatcttttgcacgactatgctgatgtatttccaaaagaagtgacacctaggctaccatcgataag

SEQ ID NO: 36341 - DNA, 472 bp, Zea mays
  unsure (1)..(472): unsure at all n locations
tcgactgcngatacaatgccatcatcggcaggccatgattggcgaaattcatggccattccacactatttgtacttgatattgaagatgccaggaccacaagggatcatcactgtgcgcgccgatttacaaggcgccgcggaatgtttccgagtatccattcaggcggccctcactaccaaaccatcgataacttcttccgcgcaggcaaactcaaagcctgaggaagatttcacgatacttgcgaatgaagctcaagccatgactgtcggtgttttgggtccgaccgcacacccggngttgcccctcaaggtgttnttaggagtaggacggtgtcgacgactgtagcaaaatggttcgtgccgatcgcacgagggacaatggacaagatttgcaggttcgggccgcttagagatgcgtaacaccctacgtnctgatgagtgttcgagtgtggtacaagaggactctctgag

SEQ ID NO: 36342 - DNA, 446 bp, Zea mays
  unsure (1)..(446): unsure at all n locations
agctntaccaaatggacgtgaaaagtgctcttttcaatggaccaatcaagggggaggtctatgttgagcaactgaaagggaattangcttacacctatattcctaattgatattggtgcgtgaattgcccaacacaaataattggactaactagtttgctctagtctataagttatacaggtgccagaggttcacaaaaagccaataataagaccaagaatagggttcaacaaaaagagcaagggacaaccgaagtgtgccctggtcgggcgcaccggactgtccggtgcaccaggggactccaagctaaacttcgcaccttcatgaattctcagaggcgcttcgctataattcaccggactgtncggtgtaccaccggacagtgttggtgccccaagggagagcgactttaactcccagctttgatttctgctccgctaaattat

SEQ ID NO: 36343 - DNA, 489 bp, Zea mays
  unsure (1)..(489): unsure at all n locations
tacggacacttaaatctcaagcttattagtagaatttactaaagagaatgtcgatctagatgcatgtttacttgctaagaccaacatgggttagctttggcattgctgtctagcacatgttgggatgaagaatattcataagcttctaaatggagaacatgtgttaggactaaccgatgtctgttttgagaaagacagaccttgtagcatgccaagaaggtaaacaggtgggaataagtcatccaagcaagaatatgatgacaatatcaagaccctccacaaggatctctttgggtccattgcttatcttagcatcagcggaagtaagtatggtcttgtaattgttgatgactattctcacttcactcgggtatttttttacaggataaaactgaaacccaagataccctcaagcgcttcttangacgggctccaaatgagttngagctaanagtgaagaagataagaagctataatggatctaagttc

SEQ ID NO: 36344 - DNA, 375 bp, Zea mays
gcttatatttagtaagcagagcggactgtcttgttttttggtattgccaacacctctatgcatttaggaagtaaaaacatggtaccaaatttcaagttgtataaaggaagcacattcttatgaaatctaggaaataaagccataaaatcatacttaatcaagttccataaagacttgatagaattctgctggaaaaccggctggacccgaggaagatcacattcctaatctcatcctctgaaaatatggaagtgagaaaagaatcctcatcatttcaaacccgagggatgtcttgtaccaggctctcatccagagtaacctctgatgtttgagctgccccaaacagctccttataatatatgatatgatatgccc

SEQ ID NO: 36345 - DNA, 382 bp, Zea mays
ctggcgaagtactgatcttgttgacctggccgaagccccttgatcatggcctcgatgacaatttcattgggcaccgttggtgcctgtgcccttaaacgcaagaaccttcggacatatgcctgaaggtattcttcgtgatcctgagtgcactggaacagagcctgagcagtgaccggcttcgtctgaaatccttgaaagctggttaacaacaaatccttcagcttctgccatgaagtgatcgttcctggtcgaagggaggaataccaggtttgagcaacacttctgacagccatgacgaaagatttggccatgactgaagcattgtcaccatacgaagacactgttgcttcgtagctcatcaaaaactgcttcgggtctgagt

SEQ ID NO: 36346 - DNA, 380 bp, Zea mays
ttaaaccaccttttctttgtcacgtaaacctcctttagatacgggttataattgtaagtgagggtgacttatcgagagggccacagttttttatgcatgtaattctttttagaaatgtgatagtttacttgaccattatttagtgagaatatgacatatttttcttatacaactatatcgacgttcttttaattgcgtttcttgagtttaagcgtttagctataattattaaagaaatgtatgaaaagtgctttcgcaagctttgtttggttttacaacttctatctaatataataatttgtattaagtgatataagacataccacctcaacttattaatgatgataaaaatgctcattgatgatgatgaaagtgcttta

SEQ ID NO: 36347 - DNA, 430 bp, Zea mays
  unsure (1)..(430): unsure at all n locations
ctacactaagcatatgtccaacacttaacacacatgtcatttctttaattgggttgtcatccaaaccaccaaaacccacaagagagctttcaacaccttgttactcaacgctcctantaaaggttacaagcgggatgagagagggatgagctcccatgtctcttatgcatgggtggacctaaagactaatggactggagttctaagctaagccttgtacattgcgatggctcgcgtcttggctctagcctctagttcttctggtctcgtcaagagtgtgtgtccgtcgtctcgtgtatgcctcttctatgcatctgcgcatccccagttctgtccgacctccccttttataagccaaggtgggggtcggctatcagtagcttcctaaagagtgagctactgcgccatggtcaaatgggacatcttaccct

SEQ ID NO: 36348 - DNA, 468 bp, Zea mays
  unsure (1)..(468): unsure at all n locations
ctgcagctttcctggagttgattagaaacatagacctgtttatggagggcgggaacaacaccttggattggagcatacagccactaccccaaaaaggttctacttangcaacaaccacgtatcatgcttaagaatgctcacattaaaagactttactgttgcataaaagttgaacatattctgattatgatactagagcaattatagaaccgccattcttttgagaagcctgtgaggatntacaactaaagctgggaatactctttacatgtgatgaatggtgagtaacctccttgttaattgaaaatggatggntagtattatgatcatctttttctaatgtcctgaagtatgtctgaactgaagccgagaatgctctcaaacttgagatgaacaggatatgaaggcagccttgttccaaagcagtctttggtgatgtcatggagctttgcatatagtatttatgtg

SEQ ID NO: 36349 - DNA, 406 bp, Zea mays
  unsure (1)..(406): unsure at all n locations
tgtggcgcccttgggcgtcttgccgcagtcgaagtaccaagtcttccacatggaaacctcggggctgaacccctcgggcgtggtagcgtcgcatagactgctgataccgcgccgagtgtagcaaggccacgtcccgagcctcttcgagctggtccagtgagtcttctcggctggtctggtttcttcggtcgtcgtacgcctttgtcctcggagaaccatactctaagtctgtgggcaagatagcctcggccccatagactataaagaatggtgagaaacccgtggctcggcttggcgtcgtcctcagactccagaccaccgagggtagttccttcatccacttcttgccaaatntgttgaggtcgttgtagatcctcggtttaagtccccgcagaagcatacagtt

SEQ ID NO: 36350 - DNA, 303 bp, Zea mays
  unsure (1)..(303): unsure at all n locations
caagcttgggcaatggaagtgctcttgtcttggtgtatccaaaggagcagtcatgacacaagcaccagtggagccaattactgcatatacacgagacgaacaatatgatccaatggggagcggcatggcaatcacattaaactttgaaagaaaatcaaagtcggatggtggaagggggttagatntctcaacaaaaggacaacaagacacatcaaacatgacacgacgtgaaaaaacaagacgatnggaggcaaggtataagcaacgatatcccttgtgatttctgagtagccaataaaacac

SEQ ID NO: 36351 - DNA, 515 bp, Zea mays
  unsure (1)..(515): unsure at all n locations
attacgcgaccatagatactcagcttctaagggagaacacattntaggactaacaaatgttcattttgagaaagacagggtttgtagcgcatgccaagcanggaagcaagttggtacccatcatccacacaagaacatcatgacgaccgacaggccacttgaattactccacatggatctattcggcccgatcgcttacataagcatcggcgggagtaagtactggctagttattgtggatgattattctcgcttcactggggtattctttntacaggaaaaatctcaaacccaagagatcttaaagggattcttgagacgagctcaaaatgagttcgacttaaggatcaagacaataagaagcgacaacgggacggagttcaagaactctcaaattgaaggcttccttgaggaggagggcatcaagcatgagttctcnttctcctacacgccacaacanaatggtgtagtggagaggaagaatcgaactctattggacatggcaagaaccatgc

SEQ ID NO: 36352 - DNA, 451 bp, Zea mays
agcttaaggatactattcaactaaagtaagatgaattgattatatgccaaggtatgaaaacttcctctccttcagttgttttagtattctatccttagtgggatgtaccatagtataggttaatttccttgcaatataaaatattcaatagtgcatataactttgacatcaaccatatgtatgcactaatttaaaggaatttaatctatccttttgggttctaagaatgatgattcatttgccatccgcatataaagatcatcatttgtgaaaccctcacttgtgtttctaatgctctcttttctaagtgtttcaataaggtccttccaagtgttttcaagaatcaaaatctacggatataagagtcttggttgtttcaatcattgagtttcaattgatctcatatcaagtatgatcgaatcaagaaaagatgaaagaagttcaagatcac

SEQ ID NO: 36353 - DNA, 471 bp, Zea mays
agcttaacgacgatgactgtgtctctcgggtggtattgaatgttatgatgcgcgcgatgactgaagcttttaaaaaataccaggactctacggcgacgtcctatgagcagcttgatcgacgagttgctgaacttgttacacgcatggacgtactggaggctcatcccccaccaccaactccagccccagctcactctcctatggacgacgacgatgacgacgatgtttatgcaccgctgcgacaacgcctcgcacgtaatcgacaaggtatgggaggtaatggtagacgtcgtcatcataatcctgaaccagatcatgatccattcgctaagattaagttctctattccaccgttcatgggttcttatgatgctgaagcttacttagactgggagatgacggtagaacaaaaatttaattcccatcttgcacctgagcagcatagggttagacaagtcactagtgatatta

SEQ ID NO: 36354 - DNA, 370 bp, Zea mays
  unsure (1)..(370): unsure at all n locations
acacgctgatttgaataaaaataattagaggttgacacaacagagattctgctcgagaatgcggattcagattaaatagtcggacatagaccgaatatcaagaaatcggattcggaaatagatcggataacataacaactatcgagagtttggataaatgaacttgctatgaggattgtaaggcgagatcgacgttcgaatttgcatttgcttcaagagacaaaagntttaaaaggctctaagattggttgtttctcacgatcgaattactttaaaatctggtgaaacctctacaagtaacttgataaaagaagatagatgcgatcgagaaatataaattcttactgagtatacgagattatgatacatc

SEQ ID NO: 36355 - DNA, 388 bp, Zea mays
agctagaagccatggtaagtagcataggctaataatatactaattgactcaagcctagctatgggtgcataggtttcaccaaaatccaaaccttcgacttgggagtatctcttggccacaagtcgggctttgttccttgtcaccacaccatgctcgtcttgcttgttgcggaatacccacttggttcctacaacattttggttaggacgtggaactaaatgccatacctcattcctcgtgaaattgttgagctcctcttgcatcgccatcacccaatccgaatcttggagtgcttcctctaccctgtgtggctcaatagaggaaacaaaagagtaatgctcacaaaaaatgtgcaacacgagatcgagcagttacccccttatgaatg

SEQ ID NO: 36356 - DNA, 456 bp, Zea mays
  unsure (1)..(456): unsure at all n locations
agcttcaaagccacagtctgaatctgatgtctgttcttcanagcccgccaaggtgaaatccttggaagctgaanaaacaaaaatggcagaacaaattttgagtgaagaaactggcactgctgcccctgaagcatcttccaaaatacgtgattatattgtacgacatgcttcggggaagaaattatctgaagaagagatttttgaagctaatcactatgcccgagaactgaagtatccgaagggggccttagtgttcaacggcacagatgaagatgacttcttatactgcctcccagacaacaaagaattatctgtctgccgggagatggctagaagtatggggttcccgaagcttgaagctaggctctgcgctatgacgaaggacgatcttgcagatagccttgcatataatagtctgaaggtatgagaattgatatttggaaatttgtaattttg

SEQ ID NO: 36357 - DNA, 395 bp, Zea mays
gcttatcctaatgggtgatgtgttagtttgatctctgccaagtgtgatattcatgtttcttgcaatgttgctcatatggactagtgtttccgctgcgatgaattatttggcttctatagtgtaatagatagtcatgtggttaatggtgctttaagattgtcttaaattagtgtcttagtttaaattggtattagtttgaattggtatcttaatgatgaatagtggtaggttgatattcctgtgatatatccactattttgaatggtgtttaactctgattatgtgcatttgtgtattatagcatcatgggttgattcttaacacaatgcatcctaaaaagtgctaaggtgtagaaaatgtttccaatcgcctaagtatgtgcaaattggcgtctg

SEQ ID NO: 36358 - DNA, 390 bp, Zea mays
  unsure (1)..(390): unsure at all n locations
agcnttcggacaaaatntatgccaatgcttatgtttatcatatatcttcttttttatgtccattggcctgagcatagtatggagatgaattaagcaacttaattctatataattcagcaaattcacgtacctcctttgacataaaagaagtcccctaatctgtagtcaaggtctggggaatgccgaatctatgaataatatgctcagttatgaactcaattacctccttgtgtgtcatgttcttcagagcaacggcttcagtccatttggtaaagtagtcagtggccactaacacgaaccgatgcccttttgatgatgaaggatgaatttttccaataaagtctaatccccatcctctgaaaggccaaggcttgatgataggatgcaatt

SEQ ID NO: 36359 - DNA, 454 bp, Zea mays
  unsure (1)..(454): unsure at all n locations
tgcaagcttctaaaggagagcacantttgtgactattatatgtgcattntaatatagacaggatgtgtagcgcatgccaagcagggaagcaagttggtgttcatcatccatataagaacatcttgacgactgacaggccactcgagctcctccacatggacctattcggcctgatcgcttacataagcatcggcgggagtaagtattgtctagttattggggatgactattctcgcttcacttgggtattctttttacaggaaaaatctcaaacccaagacaccttaaagggattcttgagacgggctcaaaatgagttcggcttgaggatcaagaaaatcagaagcgataatgggatggagttcaagaactctcaaatagaaggttttcttgaggaagagggcatcaagcatgagttctcttctctctacacgccacaacanaatggtatagt

SEQ ID NO: 36360 - DNA, 437 bp, Zea mays
  unsure (1)..(437): unsure at all n locations
agctcgacaaagggggtgaaggggttaaaatgtaataggttgtcagcatcctgaataggcaagctgtccggctgataataaaagatgaaaaaatntcgaagaaagcggaaatagctcctgagcccaaggcgacaccttctaaaaaacgaaggctcgatacaacttcctatgctgaggtgaaggtgggtgaaacagatgaagctccttcaacaccttctactgctgaagtagcagaaattttaaaggtaatgactgactccctgcccatcaagctgctaagtcctttggggctggaactaacgtaaattttacagaagaaagaacaaccgtcgacttcaaaggagaaagctgaagggcaaaagaaatgaagaatagtcaacatgatgcaagccattgagcgaacaccaccttcagcctcagcgggaaaaatgataact

SEQ ID NO: 36361 - DNA, 414 bp, Zea mays
tttctagaatcaagttatattgagctcatgcctaagtctggtaaaagattgttcatcaagtggcttggtaaagatatcggctaattgatctttagtattaatgtaagaaatctcgatatcccccttttgttggtgatccctaagaaaatgataccgaatggctatgtgcttagtgcggctatgctcgacgggattgtcggccatcttaattgcactctcattatcacatagcaaagggactttggttaatttgtaaccgtagtcccgcagggtttgcctcatccatagtaattgcgcgcaacactggcctgcggcaatgtactcggcttcggcggtggaaagagcgaccgaattttgcttctttgaagcccaagacaccaaggatcttcccaagaactggcaagtccccgatgt

SEQ ID NO: 36362 - DNA, 283 bp, Zea mays
  unsure (1)..(283): unsure at all n locations
agcttgcaaagaatatataaacactagcattcttangacccgctgaacttaacatcactggaataaataaaaaaaggagaagaagcagggatgacagatatactcaactggagctagactggacaggtttaagaatcagaaaatgaatcaaggttttacatttagtcattgtgcaagcttaataattgggcattgaattaaggctttacgtttgttcattttgcaaaatttcaggtagatcttgattcaacccatgttgaacttggagacggagaggacactc

SEQ ID NO: 36363 - DNA, 471 bp, Zea mays
  unsure (1)..(471): unsure at all n locations
agcntgttaaaaccactactttatcttatntttgttgaggttctgtactatctcccccagccctcataatggatatatcgtgaaaatattttcctttcatcccttcaatatgtccttgtttaacactagactttccaaaaacaacatgactcggtctccatgaccgatcttcggcatcctcattaccactttccacatcaaaactatcactatcgctggaatccccagataacccagcgagcatctcattagtgattttttcaacgttggtcctttctattgcttcataaaaaccagcaggtgtggggtctacagtattcttttcttcagccatttcgatgatgatcacagcaaatgctgaagctcacaaaacgattgcgctcatagaagaagaatgctaaaatgacaatcacaacacacaaatctagatggcacgacaaatattcacaacactggcctctatatatatac

SEQ ID NO: 36364 - DNA, 477 bp, Zea mays
  unsure (1)..(477): unsure at all n locations
catgcaagcttgactganatggaagacgatcatgacgattgatgaaattatcacgaagntatgtgctttggagcttcggcatgacagcagagaggggaaaccgacttaaagatgaaaagccaaatcagccctcgaagaattactatagagttattgataaaagtgaagggcattaatgtaattttatacgggctgcgtcccgtgcctataaatagatgaacagtattcctgtactgttcacgctgacttggcattggcatcacgcttgtacccttactttccttcaagccgaatgtacatttgtaatattgtcatcatttatataagaaaaacgaatagaaataaattaataagtaatgtttaaagtagttatcgttatttccatattatgtacataaatcttttcttaatcttttattgggattatgaaagtatgaccttcataacctttgtccganatccattatacccaagggg

SEQ ID NO: 36365 - DNA, 453 bp, Zea mays
  unsure (1)..(453): unsure at all n locations
agcttctattgtaacaaaactatgtgacatttgatgtatgtatcattgaatngaatatgtaaattattgtaatttatttctttatgatgcatgaaagttacacacatactgtttttgagccttcggcgaaaaaacaccttcccttcttttcatgcttcatgaagaaagagctcccttcttgtaataaagctgatagaactgtatttccccaagcttactttgtgccttagcacattttcattttgacgaagcatgtgccgaagattggctttgtattcgatttttgtgttgttgatgcaatatgatgtatgatgtaatgttatgagaaatgatgtgatgatatgatgcaaaatgatgaagatgccgaagacacacacccacacgcccacactagaacacacaagctctacatcccctcaagaacgactttggagcttcttcaccttttatttc

SEQ ID NO: 36366 - DNA, 461 bp, Zea mays
  unsure (1)..(461): unsure at all n locations
agctntcttcggtggcatgacgaaggtcagtgcttgccgaatgtggtcgaaaagagggttcaccggaggtgggcgccaatgttggggacttgctctcaaatgctataaattgagaacaaggcaacaccaaaacaggttacttgttaatgcccttcgtcccttgaagcattatttccccaaggatataatgatcttcggacgaaggtcatgaagggcatactttcatcatcttaacatacatatatgtataattattaacaacgaatggagcatgtaaagcataagaaataatgtgaacaataacattatcatatatatttctcagtatataagcataaattaatataaagacaatattgaattacatttggtaccttcggcttgacagaaaacagaggtacgagcgtgatgcaaaagcaaatgccaagtccgcgtgaacagtacgggaatactattcatct

SEQ ID NO: 36367 - DNA, 463 bp, Zea mays
  unsure (1)..(463): unsure at all n locations
agcttgagacagacattagcctttaccgatgatatcacatcgtcggtagtttattctattctaatttcaaggtaaaaatntttctttgactttttattgttttgaacaacgaaggtgttttctaacgaaggttgcttgtgcacagagtatgttgttgagtaaagctttgagaatgcaacaagatcttgaagataaaaacatgaagttataattgagggtttagaaagcaaaataaaagatcaagcaactgctcttgaaaagaaggatttcgagcttcagacaacagaaggtttattggcagaagctaaagctaaaattgcaaagttaaatacggagcttctctcanagtcagaaagcttcgaacaggaaaagcagaagttaaatgctaaatntaagactgaggtcgagaaaagttcgaatctgcaaaaatcattgacagagcttcaaaacaaatgtctggagt

SEQ ID NO: 36368 - DNA, 460 bp, Zea mays
agcttatgaagattcttcatcctaacgtgggctattctgcgatgccagattcaacccatgttagtcttagcaattaagcaagtgtcgagttcagctctatcaaaatctaccaagtatagctgaccctctaacactcccttaaatgctactgaatcatcacttcttccaaagacagtaacacctatatccgtaaaaagacagttgtagcccattttacacaattgagaaacagaaagcaaattgtaatctaaagaatctacaagaaaaacattggaaatagagtggtcaggagatatagcaattttaccaagttctttgaccaaaccttgatttccatccccgaatgtgatagctctttggggatctcggttcttctcatatgaggagaacatccttttctcccctgtcatgtggtttgtgcacccgctatcgatgatccaactcaagcccccggatgcat

SEQ ID NO: 36369 - DNA, 425 bp, Zea mays
  unsure (1)..(425): unsure at all n locations
agcttgcaagagaaatatcgcatattttggatgaaatgctaactgacctattaggtgttatatgacttgtactgtctagcaaattatttattttgcctcgtatgctgttcacagcagcagacacagatgttaccagtgtctcgatatccacagtagaatcatctttccatgtttgtgaattgttcatctcaataccaacatcattcattgcgttcacagtcacaggttctgtaatcttgtcacatgtgtcagtttggcatacccctgttgatccacttagattgtctgatacatctaaagcacgttgtccaaagttatcagcttccacagcagatngccctacctgcttagaatcctncctgtcatgatttgtgcttacatctttacccctttctaannaatntgaatcagatctctcttctctt

SEQ ID NO: 36370 - DNA, 471 bp, Zea mays
  unsure (1)..(471): unsure at all n locations
agcttgtgaagattcttcatcccaacatgggctattctgcgtttccagagccaacccatgttagtcttagcaattaagcatgtgttgagttcagctctattaaaatccactaagtatagctgaccctctaacagacccttaaatgctattgaatcatcacttcttctaaagacagtgacacctatatcagtaaaaagacagttgtagcccatttgacataattgggaaacagaaagcaagttgtaatctaatgaatcaacaagaaaaacattggaaatggaatggtcaggtgaaatagcaattttacccaaacctttgaccaacccttgatttccatccccgaatgtgatagctcgttggggatctttgtttttctcatatgaggagaacatccttttctccccggtcatgtggttngtgcacccgctgtcgagtatccaacttgagcccccggatgcataaacctacaaa

SEQ ID NO: 36371 - DNA, 438 bp, Zea mays
  unsure (1)..(438): unsure at all n locations
agcttatcatgtntntcttgcaaagctagattttcaatatttatcttttctaccgngttcttgagcatagcatttttattttctaattgagcaatatatgatgaatgattaatagctttaatttgctcaattgaaatgtcttcatacctttggaccaaatcatcatgagagcactttagcttctcatgctctttggtcaacttctccaagtctttgattttttcgatgaggatatcttcttgcttatgaagcatttccttttgttcttctgctcttttcatgagtttgagcaagctcatccggttcttcttgcttagttgagcgaagaatttttgaagatcatcctcatcttcactatcactttcatgctcctcctcattctcactttcgctttcactgtcactctcattagcaacaaagcacatatgagaagtggat

SEQ ID NO: 36372 - DNA, 461 bp, Zea mays
  unsure (1)..(461): unsure at all n locations
agcttcngcagccgatgcgtgcagcggctgaatgatgtgtttcactctgttggagccagctctgcgaaatttacaccttcagctgaaaatctggccagaacattagaatatattgaaggcgaagttgatgcccttgacgaagttattggtgggcacaccgacttctgcgccctggtagcttctcggggcacagctactgcttttttgaaggctggctgcacgcatggaaacattgtgaacagaccaaacttcagcttgtcagcatcagatctgatagatatcccaagcctagcccgaagcattggaaatagattcatgacccagatctgggtaagtggcgggcgaaaaatggcaggtgacgaagctcgaagccatcttaagccggtaaaaaacttatgtttgttacttttaccttctcctttgaaattngcacctttcttattctgctgtttggtatacac

SEQ ID NO: 36373 - DNA, 328 bp, Zea mays
tgcaagcttggtgccgatggagaagcaaaaatccttgaagtcttggctgtcaaactgcttgccgttgtcgactgttagttcaaacggtactccgaagcggcaaacaatgttttgccaaaagaatttctgtgcagtctttgatgttattgtgaaaacggccctcgcctcgatccatttggtaaagtattcgacagcgacgaaggcgaacttaaggttcccctaagccgtgggcaggggcccgacgatgtccacgccccaacgctggagaggccatgtgtgggcgatcagttttgtgaattgcgaggggctgcctgatcgaggagaaaac

SEQ ID NO: 36374 - DNA, 425 bp, Zea mays
agctatagtagcggcgatgggcattctaccgttctacgcgtcactgcggccactggaccccgaggccttcgccggcgattcacgcgccatcgtggacttcctcgccgagtactaccgtgacgtcgataagtaccctgtgagggcggccgacctcgagcctggcaggctacggaagctgctccccgaggctgcgccagagcacggtgagccgatggaggacatactggaggacgtgcggcgggacatcctgccgggtctgacccactggcagagccccagcttcttcgcctacttccccatgaacggcagcgccgctgggttcgcggtggagatgttgtcggccggcctgaacgtggcgccgttcgtgtgggtggcgtcgcccgccgcaccggagctcgagagcgtggtggtggactggatgggta

SEQ ID NO: 36375 - DNA, 466 bp, Zea mays
  unsure (1)..(466): unsure at all n locations
agcttctccccacctcttccttgtggctngagatcgcctttgcctcctccagttgcttctccagcttggccttctcgcccatcagctgggtaattttgtgctccagttcccacaccctgtccccaagtgtggagacctggtgcgatagggtcctcaccctgtcatctgcgaagagatctgcaacacacgtacggtacattttagagaagagagctggtactacacacaccaccgcgcagataaagaaaaggaaagatgatgacttggcgcacacccgcaaaccaaggcgatgtcggcgaagacatgtctgtcggttgtcgctgttgtcacacactcttctgagaaatggaagacgctntgctgtgcaccagtcccggagcagaggaatatatatacacctgcagacctgctgaagcctgaagctgcctcagctgaggtctgaggataaagtgtccatgactccatg

SEQ ID NO: 36376 - DNA, 459 bp, Zea mays
agcttctaattaaatcatgactgttcctaagctgcgttattctgagagtgaaggtggatgtgctgctacttcccacttcccttgatgagcaacaagcacctgcattgagtaatgcaagagtgagatgaaacatctcagcaagcgaattgttttgacgagatatttaaaccacaaattgaattaatcagcattttaaaagaatcacaattaatatcagaaatacttgtagatatagaactcagtagtcccaatataaccaataccatctcatttcctcaaacaaccacaatagggtgtataacacttccctgcgtcaacaatacctgcaaatatcaattcaatgtatgcatagaaatgcaatgtgtaggtcctctgtcttcatacctctaagggtataaaaccacatcatctgcaaatatcacttcaatgaatgcatatgtcctctgccttcatacctct

SEQ ID NO: 36377 - DNA, 459 bp, Zea mays
  unsure (1)..(459): unsure at all n locations
agcttctccagaatcttgaggtaaactgtgaacctcgatcagacacaattcttcggtactccatgtaaacacacaatctgagccatatataactctgctagttgggaacctttataagtagccttgacaggaatgaagtgagctactttagccaatctatccacaatcacccatatagcatcatattctttctgggtgcgaggcaatccagtaatgaaatccataccaatctcttcccactttcactcaggtatcttcagtggatgcaatagtccagctggcctatggtgttcagccttaactctntgacacacatcgcacatagccacatgtgcagccacatctctcttcaatccataccaccaatatttctgcttcaaatcctgatacatcttggtactaccaggatgaatagaataatccgagtcacgggcctnctttaaaatagtctcacaaagg

SEQ ID NO: 36378 - DNA, 410 bp, Zea mays
agcttatgaagattcttcatcccaacatgagctagtcggcggtgccagagccaacccatgttagtcttagcaattaagcaagtgtcgagttcagctctatcaaaatctaccaagtatagctgaccctctaacactcccttaaatgctattgaatcatcacttcttctaaagacagtaacacctacatcagtaaatagacagttgtagcccatttgacataattgggatacggaaagcaaattgtaatctaaagaatctacaagaaaaacattggaaatagtatggtcaggtgatatagcaattttacccaatcctttgaccaaaccttggtttccatccccgaatgtgatagctcgttggggatcttggtttttctcataagaggagaacatctttttctcccctgtcat

SEQ ID NO: 36379 - DNA, 473 bp, Zea mays
  unsure (1)..(473): unsure at all n locations
agctntactcaacagcatactctatgcacaagcattcttcgttagaaaacaccttcgttgttcaaaataataaaaagtcgnngannnnnnnttaccttgaagttagaatagaataaactaccgacaagatgctgtcgtcggtagcggctcatgtcagtgtcaagcttcgggaaaccaatactctntgacagagtaccgataaccttcgctccgatttgatctcggacgcagcccaatttttcatcgtcaacaccgccgaagagtagtgcccctgtttgatacccgctggatatggcgtatgttttcaactcttctttctcancttccgacaattcttgcccaattaagttttgaaagttaaagttttctttcgaagcttctttagctatttccttctccttcttaggtattggagccatggcttcttcagcgggtgcgacagtttcttctgtggccatatccaaaagtatctt

SEQ ID NO: 36380 - DNA, 482 bp, Zea mays
  unsure (1)..(482): unsure at all n locations
atcctctgtgtcacctgcggcatgcaagctnttaaacacaacaacctcatcatccttcgtctctggaactcacttttcaccagcatagcaaacaagcctgctctcagcttcaccaaagtaacccaatttcttcattatgaccatatcatctgacgtcacggtggatctaccaaagtcaagatgactaggtttttccgggatcaagatggtgtaatcttcttcatcttcatcaccacttctctcttcaactgtgattccttcagcttcggcagccagagtaccttcggcagcaggcccctctggcacaacaagacctgattgcctcatcacctcttaaattggtgttgtttcagttgtgtcgacctcgtctccctcgcgagacactctagcagttgatcgcactctagccatttcaatttcaccttttgacgaagctaaccttaaacgatgaagcatttgcacgagagcacaatgtagaaagc

SEQ ID NO: 36381 - DNA, 458 bp, Zea mays
  unsure (1)..(458): unsure at all n locations
agctggtctagctcagtttagtagagcgtaagactnttaatcttgaggtcttgggttcgagctccatggtggttgtttaatatttttttgtctttcccggacaacgactacaacttcgattagttttagtttaacgatctatacgtgcttttatatatatcaaaaaaaggaatatgtgtcgcatctaactttagatattgtcttctcggtgtcggcaaagtgagttgggccaataccgttggctggctctggtggggtttttttttcatggccaccagcgtttaattctcctcacgccgctttgttcatgttcggatctgggcgtgggaatcctttttttatccctcttcactcttcttcgtgaagcacgctcgggataataatcggcacaagactataacagcaattattcttctagagtttgcttggtaattaacaatgcatgtcctaatgacaaa

SEQ ID NO: 36382 - DNA, 441 bp, Zea mays
  unsure (1)..(441): unsure at all n locations
tatgcatgcaagcttaccgcatntgaagcatgatcgctntctcttggtcttggccttgcttggctgtctctttcgaccttttagcgccgtcttgaatctcttgatgatgagagccatctcttcatcattgagcccggccgcctcaacttgcgccaccttgctaggtagcgactccttgctccttgttgcctttaaagcaatgggttgaggctcgtggagtggaccgttcaacgcgtcgtcgacgtatcttgcctccttgatcatcatccgcccgctcacgaattttccaagtacttcctcgggcgtcatcatcgtgtacctgggattctcacgaatattgttcacgagatgaggatcaagaacggtnaaggacctgagcattaggcggacgacgtcgtgatccgtccatcgcgtgcttccataactccttattttgttgat

SEQ ID NO: 36383 - DNA, 455 bp, Zea mays
  unsure (1)..(455): unsure at all n locations
agcttcnggcatggtgtttggatcctttgaatcttcgcanggatatggacctctgagagcacctagagggggggggtgaatangtgatcctgtaaaaacttgaaacttaatccacaaaacttgattaggagttagcacgaataagccaagtggctagagaggagaacttgcacaacacgataaccacaaagagatcaacacagagatggcacagtggtttatcccatggttcggccaagtccaacacttgcctattccacgttgtggcgtcccaacggatgagggttgcaatcaacccctttcaaggggtccaaagacccacttgaataccacggtgttttgctttcactttactatatctcgttcacgaggaatctccacaacttggagcctctcgcccttacactttgatgttacaaagaaacacggagtaagggaaggatgagtgttggaac

SEQ ID NO: 36384 - DNA, 455 bp, Zea mays
  unsure (1)..(455): unsure at all n locations
agctntaccaaatggacgtgaagagtgcctttctcaatggaccaatcaaggaagaggtctatgttgagcaacctcccggctntgaagacagtgagtaccctaaccatgtctataggctctctaaggcgctttatgggctcaagcaagccccaagagcatggtatgaatgcctaagagatttccttatcgctaatggtttcaaagtcggcaaggccgatcctactttatttactaaaactcttgcaaatgatttgttcgtatgccaaatttatgttgatgatattatatttgggtctactaacgaatctacatgtgaggaatttagtaggatcatgacacagaaattcgagatgtcaatgatgggggagttgaagtatttcttaggatttcaagtgaagcaactccaagagggcaccttcattagccaaacgaagtatactcaagacattctaaac

SEQ ID NO: 36385 - DNA, 425 bp, Zea mays
  unsure (1)..(425): unsure at all n locations
agctttaggttttcttaacttgggttaagttttacccctttaaccactatttagggttaagtccattaaccagggtttcatttgcaaaaacattaaaacaacacaacttgtttgagatttttgcctagtgaatgcactctaggtgtgtcaaacatatgcaatgccaatgcttatgatgtcatgctcaagttttagttatagtaacaccaggggtgttacatccttccccccataaaagaatctcgtcccgagattaaaaatcctagggtaagtaatggtaaaggaaacgcatcacatttttatttccttatttttggtacaagacaggggtgatgtgggggttacttctttattacaacagctatacaggctttacaatntacatgaggctagaaagcctgngaaattcttattcaagaagtctt

SEQ ID NO: 36386 - DNA, 429 bp, Zea mays
  unsure (1)..(429): unsure at all n locations
agctttgacaaaacanagactcacaaaaactctattctactattntcaaaatctctcacaaaaactctattctactattttcaaaatctctcaagtggtagctgatccatttattactttggcctttattttctccccctttggcatcaagcaccaaaacgggattaatcttggccttttaaccccattgcctcaccaaagtcttcaattaagagcaaatggcaataagatttcatgagatgaacttggaattagttaccctctcatcggagtgcagtggaagtctttcatggtccaagtccacctttttccctttcaatcctccttcgagactcaatcaagcaaactcaagcaaatggttagtctcaaagggtcaagttgtaacacatctccccctanacatgtgcatcacttggcaacggacttgtg

SEQ ID NO: 36387 - DNA, 421 bp, Zea mays
agcttgaagccatggtaagtagcataggccaataatatacgaattgactcaagcctagctacgggtgcataggtttcaccgaaatccaaaccttcgacttgggagtatcctttggccatgagtcatgatttgttccttgtcaccacgccatgctcatcttgcttgttgcggaacacccatttggttcctacaacattttggttaggacgtggaactaaatgccatacctcattcctagtgaagttgttgagctcctcttgcatcgccaccacccaatccgaatcttgaagtgcttcctctatcctgtgtggctcaatagaggaaacaaaagagtaatgctcacaaaaatgtgcaacacgagatctagtggttaccccattatgaatgtcgccgaggatggtgtcaacggcgtgaatctcgt

SEQ ID NO: 36388 - DNA, 306 bp, Zea mays
  unsure (1)..(306): unsure at all n locations
agctngaggccctaccgccctaccaaacagtctgatgatatccaggaccagattaatatcaaaagcaacaggccttagaaacataacgacgtcatcagcatacaaagaaatcatgtgctggagagatcgtgacgataggggtcgcagcaacccctccaacgaagctctctgaattttcgagttcagcgcgtccatgacaagaatgaagagcataggtggtaagggatcgccttgcctcaagccccttagatgtctgatgccctcatctagcaacccatttatgagaattttcgtcgacgagattgt

SEQ ID NO: 36389 - DNA, 348 bp, Zea mays
agcttgtaacctctactacgagcaccccggtgcaagataatataagcctcatcctccctctcgtgtttcatcttgcatcaacccatctgggcagggacacgcagcgtcaaattcactggtcggtcgagggtcctcgcgggtccgaaacgtcgacacctatgttgtaaatattgttagtctaagtagtcgtgttaatcatataacactaaaatttaaattttaaataggactcagtctgttttctttatataaaatgcacatttaatgttgatggcctcctatatagtcggtcgctaccgctattccttttaactgtagcatatagtcgagatgcaaggtctacaatac

SEQ ID NO: 36390 - DNA, 472 bp, Zea mays
  unsure (1)..(472): unsure at all n locations
agcttccttgaggaggagggcatcaagcatgagttctcttctttctacacgccacaacaaaatggtgtagtggagaggaagaatcgaactctattggacatggcaagaaccatgcttgatgagtacaagacaccggaccggttttgggccgaagcggtcaacaccgcctgctacgccatcaaccggttatatcttcaccgaatcctcaagaagacatcatatgaactcttaaccggtaaaaagcccaacatttcatattttagagtttttggtagcaaatgcttcattcttattaaaagaggtagaaaatctaaattcgctcctaaaactgtagagggttttttacttggttatgactcanacacaagggcatatagggtctttaacaagtccactggactagttgaagtctcttgtgacgttgtgtttgatgaaactaacggctctcaagtagagcaagtngatcttgatg

SEQ ID NO: 36391 - DNA, 492 bp, Zea mays
  unsure (1)..(492): unsure at all n locations
tccgagtcacctgcngcatgcaagcttcttcaccatgtgatcacgattatcttgatatagttgttcttgcacttcccttttagttgtgtcaagctcatttttagcctctcattttcttctttgagcttttgatatgtatcatcatttgttcctgcaaattctagctcaaaggaagatttgcttgtcgacggacaacaagcattagcacatgataatgtagtttcaatttgaatacatgtgcatgagtgaggttgttgggattttaagttttctatcacaacctcatgagcaatatttaatatgatatgatcatccataagattttcatgagaacataggagcatatcatatttttcttgaaaagctagattntcatcttttagctnttctacttggtccttaagcaaggcattcctatttactaattgagcgatacaatgtaaagcgttatcttgctcaatngaaatagtttcatcccattggaccaaatca

SEQ ID NO: 36392 - DNA, 450 bp, Zea mays
  unsure (1)..(450): unsure at all n locations
catgcaagcttcngattcccgacactagaggacgggctctctgtgctattaaaagatgaatnagtcgacagcttagcatacaatagcttaaaggtgagaaaatgaattctactgaaatgcaaaatttttccatttgcttatacttaatatcgtattccttttcagggccttattcttagcaacgccctcaaggcacaaaaaagcgctgaagacgagggatgtaccatggccttaaacaatcttcattctgaagtaatcaaactaaggaacgaaggtcttaagaaagataaaatattaaactcattgctaaataaaataaaagaagacgaagctacttccaaagcccaggctgaagcccagaagtgcgaaattgaagatcttcagaaacagctggctgaagcgaagttaaagtgtgcaattgccgaagctgaccgagacgccagtaactat

SEQ ID NO: 36393 - DNA, 427 bp, Zea mays
  unsure (1)..(427): unsure at all n locations
agtcacctgcggcatgcaagcttggaagatttncatccaacatgagctattcgactgttccagagccaacccatgttagtcttagcaattaagcaagtgtcgagttcagctctatcaaaatttactaagtatagctgaccctctaacactcccttaaatgctattgaatcatcacttcttctaaagacagtgacacctacatcagtgaatagacagttgtagcccattttgcataattgagaaacagaaagaaaattgtagtctaatgaatctacaagaaaaacattggaaatcgaatggtcaggtgatatagcgaatttactcaatcctttgaccaaaccttgattttcatccccgaatgtgaatagctcgtggggatcttcggttttctcgtaagaggagaacatcttcttnctccctgtcatgt

SEQ ID NO: 36394 - DNA, 467 bp, Zea mays
  unsure (1)..(467): unsure at all n locations
agctnttgatgacgagtgccatttcctcgttgtcgagcttggaggcgtcgatgggtgttctactcggtgtagattcctccttcttctcttccgtcgctttgaatgcgacgggttgagcttcggacgtagaaggaccgtcaagctcgttgatcttccgtgagcccttgatcataaattcaaagctcacaaaattcccgattacttcctcgggagtcattagtgtatatcttggattaccacgaattaattgtacttgagtagggttaaggaatataagtgatcttaaaataacctttaccacctcgtggtcatcccatttcttgctcccgaggttgcgcacttgattcaccaaggttttgagccggttgtacatgtcttgtggctcctccccttggcgaagacggaagcgaccgagctcccnctcgatcttttcccgcttggtgatcttggtgagttcatcaccatcg

SEQ ID NO: 36395 - DNA, 428 bp, Zea mays
agcttctccaccatgtcgctgcaagccaagttgttgcagctacctccatcaatgatcaaacgacatgaacgctccttaatgacacactttgtttgaaacaacgtatgtcactgattctgctctgccttctccatttgtgcactaagcacacgctgtacaatgaggctctcataatgctctgcatcatctgcaccaatctgttcttcgggtggttccttagtgcctgcatcatcagccgcaagcaaagcaagtgtagcttcatccaaatcactagcagaggaatacccaccatcgtcttttaccaccaaaacacgctgattaggacaatcacgctgcacgtgtccatagcccttgcatcgataacacagaacatctcttgttctacccgtggaggctactgaagaggcactacctgctggtttctgggc

SEQ ID NO: 36396 - DNA, 464 bp, Zea mays
  unsure (1)..(464): unsure at all n locations
agcttatgaagattcttcatcccaacatgggctattcggcggtgccagagccaacccatgttagtcttagcaattaagcaagtgtcgagttcagctctatcaaaatctaccaagtatagctgaccctccaacactcccttaaatgctattgaatcatcacttcttctaaagacagtgacacctacatcagtgaaaagacagttgtaacccattttgcataattgagatacagaaagcaaattgtaatctaatgaatctacaagaaagacattggaaatagaatggtcaggagatatagcaattttaacccaatccttgaccaaaccttggtttccatccccgaatgtgattgctcgttggagatcttggttnttctcgtaggaggagaacattntcttctccccagtcatgtggttggtgcacccgctatcgatgatccaactngagcncccggatgcataaac

SEQ ID NO: 36397 - DNA, 451 bp, Zea mays
  unsure (1)..(451): unsure at all n locations
agcttctcctggacaagtgctgctcttactactgagtgcgaagctgccacatacaacagcagaggagcccctggcacgagtggagttagcgtcgttaggtctatcagatactgcttcagctcttcaaaggctttctgctgagctggtccccattgaaagacttcggctgacttcagcacttcgaagaatggtaaattcctctctgctgatctagatatgaatcggttcaaggatgccagccttcctgtcagccgttgggcccccttctttgtgctcgacggttccatccaaagaatagcttcgattttattcggattagcttcgattccctttgtcgaaaccagacaaccaaggaattttcccttctttactccgaagacacatntttcaggattcaacttcaggccagcttgcctgaagttagcaaatgtttcctgcaaatcagcaatgt

SEQ ID NO: 36398 - DNA, 437 bp, Zea mays
  unsure (1)..(437): unsure at all n locations
agcttagacagaanagttaggcaagttgttgctcctcaggcaggtcacttattttttattccttcgtggtattaaaaacaaggcaatacagttaaatcgggcttcattttcatcctttaattcttccttctcgggagagggaacgaagattaaatgaagagatgaaaatgaataaaggaaaagtaaagaatcttaatgataaacaatgcacaatgtaaaggtaaaaagtacacaattaattcccataatatatttgtcggggaccataattaggggtaccctcaagactcctaaatctcagctggtaacccccatcagcacaaagctgcaaaggcctgatgggtgcgactaagtcaaggatcggtccattcgagggatgcgaccacgcctcgcccgagcccagcctcgggcaagggcagccgaccccggaggatcta

SEQ ID NO: 36399 - DNA, 452 bp, Zea mays
  unsure (1)..(452): unsure at all n locations
agcttcngcagaaagaagaagtagtcttttatgtcttgctatgtaaaagcttctgcagaagaggaagcgaccgtttaagcttcgttgtgtacgaaaagaagggaaggtgttttttcgccttcggctcaaaatactgatttcgtccacatcaaagcgactcaatcgaagggtaaggatatattacaaggtatgtacaaagttccttgagaacagttcaattgtatttacaaaacttgttacaaaagtatcctaagttntttcctatagtacatttctactgatcttcattaagcttcagcttcggcgacagtttcggcgacataacttangcattatcttcaccttcgtcattctacataaatcaaggaaccgtgagtaaaaatcaagtgcaaagaanaaggtaagtacgaagtattatctcttactggttcaagatggcttcgtgcttcatc

SEQ ID NO: 36400 - DNA, 303 bp, Zea mays
  unsure (1)..(303): unsure at all n locations
gacgcataattatacctttgatgtcttctcgngctgataagtcattcttcacataaaaccattctgtcatccaatccccgggccatctcttccgaaaggttggtacgggacagcttgccccggaccgagaaacgaagctgtagcagccaaagttgttatggtactgttctttgccccaaggctttgtttcatataataattcatgaacattacaaaagcttcttgcgtcaggcttcagaccttgactcctcgcggnccacacgaagatatttagccttataattgcctcgggagtaagttgat

SEQ ID NO: 36401 - DNA, 445 bp, Zea mays
  unsure (1)..(445): unsure at all n locations
agcttgactcttcgtcgtctgctgattcctctgctacagctgtcacatgttgtcaatgttgtgttgtgtcgttcactcgtttgtgaagatgctcttcgttgatctgtagctctccttcagttattcacgcactccctactgctcatcacaccaggacaattctctagtccaagctacggatgcacctctgtgccctagcactatacacaggagcgtgctatgcaccaagagcaatatctggagagctgacaataggcaacggcattagcacgggtggatggttaggccacgcaaacccttgaccaagcgacgagcgggattagaggtgtcaatgcagaagatnttttcgccgggtttagacaccctgtatccatttctatgatgctctacccatcctgatcctcatacatatacctattataggtgtaaaattcatcacatattc

SEQ ID NO: 36402 - DNA, 423 bp, Zea mays
  unsure (1)..(423): unsure at all n locations
catgcaagctttgccanataggacgcatgagnacacctttgttatcttttttgtagctgaagggcattcttcacataaaaccattctgtcatccaatccccgggccatctcttccgaaaggttggtacaggacagcttgccccggaccgagagacgaaattgtagcagccaaagttattgtggtactgttctttgccccaaggctttgtttcatataataattcgtgcatattacagaagcttctcgcatcaagcttcagaccttggcttctcgcggcccacacgaagatatttagccttataattgcctcatgagtaagttgatgaagataaacttcgaagattttcaacacctccacaacgaagctactcaagggaaatcgtagcccagctctcagatagcttctgtacactacgacttca

SEQ ID NO: 36403 - DNA, 456 bp, Zea mays
  unsure (1)..(456): unsure at all n locations
agcttcttcaccatgtgatcacgggtatcttgagaaggttgggcaatgcatttcccttttagttgtgtcaagctcatctttagcctcacattctcttctttgagcatttgatatgtatcatcttttgttcctgcaagttctagctcaaaagaagatatgcttgttgacggacaacaagtattagcacatggtaatatagtatcaatttgaatacatgtgcatgagtgaggttgttgggattntaagttntctatcacaacctcatgagtcaaattcaatatgatatgatcatccataagattttcatgagaacatagaagcatatcatatttttcttgaaaagctagaatttcaacttttagcttttctacttggtccttaagcaaggtattcctatttactaattgagcaatacaatgtaaagcgttatcttgctcaattgaaatagtttcatac

SEQ ID NO: 36404 - DNA, 460 bp, Zea mays
  unsure (1)..(460): unsure at all n locations
agcttctcgtggngactggggtgatgaagacttggacattgttgatgcaagtgaggtggtggcaattattttgatgtggaggaaggtgaaccaaatgaaaacgagggtgaggaaggtggttgggacctaaaagatctgaacttccacctgatacagagactctaaaatttgtcggcaatgctcgctctattgtatctgtcactccaacaacagacatccctgtcagccaaacctggactcaaaaatcttctctggctatggagcatgcgaccatatggaactttgacacaacagtgaggttgcttatccggcagttgggcatcaagaactttgttccgctgaagccctctatttgtggtctgtatatggacattcattcatttctgagtgcacttgctactgctccggtcatatcagttgttgtcgagaaaaggtgaaatgagtctgcangtcctaatgt

SEQ ID NO: 36405 - DNA, 452 bp, Zea mays
  unsure (1)..(452): unsure at all n locations
agcttgtacagagcccgcttgaactaatctnctgataaacccgaccccagtgtcgcatgacaccagacggtccaacccaaacggcgttggctgaattcagaattattgcagagcacattggcactagggatttggtgcaagaatttctggctttcaaagtatttcccaccatgaaggaatgggctatgccgaagcttaaaggagagaagaaagagggggagcttatccgactgccctatcattataaattcaagaaatatttcaaggcaccctgccaagaatggctcgaaacaatcgaaataatgagtactgaaattcttggaaattactctaaaaaagaggaccaattgatgacagcagccttcggcacccggccgaaacgaaggctaaacagagtacttgatgctataggctntgaatatcctgactatggtcaactgggcggagatgct

SEQ ID NO: 36406 - DNA, 374 bp, Zea mays
  unsure (1)..(374): unsure at all n locations
agctngtgcgtctccaggtacctggcctttgtctcatggaggacttcgctgacgtagtagactggcttctggatggttcggacccctgcggttgacctcgagtcctcaaactcttgaccttccatcaccatcctggtggtcagaccaccaccttgtcctaggggaacttttttactcccctgnggatgttgtgccgtcctttcggcgaccagcaccatgcttaccacctatgtagccgctgcaatgtataagtgcaacggctcccctggctctggagctaccagtattggtagggacacaaggtgctgcttcaactcttgaaaagctcgctctgcctcctcggtccaagagaatgggtcggacttccgtaatag

SEQ ID NO: 36407 - DNA, 432 bp, Zea mays
  unsure (1)..(432): unsure at all n locations
agcttctgggttcaactaggtccactctctntttagttgagttcataattaactctcacgaagaacaggcctgngcagtggtgagaagtctttccacggagccaaaggtcctgtgttcgatgtagcttctaagaaaaaatgcacgggtaatagttgccttggttattccttcattttccatcatgtgggagccatcaacactgggtcttttccataattagtctcacgtgtatacagtggttacccttcagctgttgctttctgcgctgaaaggcacatgttttcattgagtggctgatttacttatttggtaaacatcttccagaacttcgttggcctttccatatctgacggttacattgctactggctctgaaacaaatgaggtatgcattccatggctaagctctcacaaagttgtcgaacatctgac

SEQ ID NO: 36408 - DNA, 372 bp, Zea mays
agcttaggatgcatccgagatcgaactggagcgaatgttatcagtactctgtcgaagagtgttggtttcccgaagctctaagcggacatcagtcgcaaccgacgacagcatatcgtcggtagtttattctattctaatttcaaggtaaattttttcctttggctttttattgttttacgataaaggtaattgctgatgaaggttattttgcacagagtatgctattaagtaaagccttgaggatgcaacaagacctcgaagataagaaaaatgaggttataattgaaggcttggaaagcaaaattaaagatcctgaagctagtcttgagaagaaagattctgttcttcaaacgatggagggttcactgacag

SEQ ID NO: 36409 - DNA, 439 bp, Zea mays
agcttctcgtttgcctttggaacgatgactgtgttggccagccacattgtgtgatgaacctcttcgatgaagccagcatcaagcagcttccggacctcctcacggatgaagtcctgccgctcaacggactgtctcttatgcttctgactcaccggtttggcgttagggtggatcttcagatggtgctcaatcacctccctggggatcctaggcatcggtgacggttcccatgcgaaaacgtcaacatttgctcggaggaaggcgacgagcacgagttcctatttctcccccacattgcccgcgatgtgggtggtctgggaggggtccgcgccgacctggatggtctttacaggtccgtcatctgctccgaacggctgcacctttggcaccttggcaggcgccttggtaccggaggtcgaggagtccttctccccgtcgt

SEQ ID NO: 36410 - DNA, 260 bp, Zea mays
gcttcttcaccatgtcactgctagccaagttgtttcagctacctccatcaatgatcaaacgacatgaacgctccttaatgacacactttgtttgaaacaacgtatgtcgctgattctgctctgccttctccatttgtgcactaagcacacgttgtacaatgaggctctcataatgctctgcatcatctgcaccaatctgttcttcgggtggttccttagtgcctgctggtttctgggcagatatggttgctgaatttgtg

SEQ ID NO: 36411 - DNA, 430 bp, Zea mays
  unsure (1)..(430): unsure at all n locations
agcttgattntaattgcacaaataacattgctgagtacgaagcattgattctaggtcttcggaagttaaaagcaatgggaatcagaagggccatacttaaaactgattcccaggttgtttcgggtcatattgacaagagttgcaaggctaaggatccgaagcttgaaaaatatctggatatggttcgaagagtcgaagcttccttcgaagggttttctgtcaagaatatccctcgaggacaaaatgagcatgctgatctgctagctaagtcagcagcacaggggctgcctttaccttcggatgtatttttcgaaacaataaaagcaccttcggtggaacttcttgaaagagcagttcttaatatatcntcctgttttagcgaagataggagaaccgagatcatctcttaccttcanggtaaatttctttc

SEQ ID NO: 36412 - DNA, 309 bp, Zea mays
  unsure (1)..(309): unsure at all n locations
agcttgtngattatattagaaagaagaagccttattgggtatcacaacacacaaaatcggacggttggattgagacatcaacacacatcgtataacactacacggctagggactgacagaaatgcagtaaaagagcactctgatgtggcttcccatgtaaatcgtgcctcagactcttgggtgatgatgatgaagtgaaacaagactaacaaaggtcacgatgatacatttgaaaggaggattacccaaataagctattcgcatttgattcgagcaaatacagataagctactctacttattagctggt

SEQ ID NO: 36413 - DNA, 444 bp, Zea mays
  unsure (1)..(444): unsure at all n locations
agcttctaaagggagaacacattntaggattatcaaatgttcattttgagaaagacaggatttgtagcgcatgccaggcagggaagcaagttggagcccatcatccacacaagaacatcatgacgaccgacaggccgcttgagctactccacatggatctattcggcccgattgcttacataagcatcggcgggagtaagtattgtcttgtaatagtggatgattattctcgcttcacttgggtattctttttacaggaaaaatctcaaacccaagagaccttaaaaggattcttgagacgggctcaaaatgagttcggcttaaggatcaagaaaattagaagcgacaacgggacggagttcaagaactctcaaatcgaaggctttcttgaggaggagggcatcaagcatgagttctcctctccctacacgcctcaacaaaatg

SEQ ID NO: 36414 - DNA, 450 bp, Zea mays
  unsure (1)..(450): unsure at all n locations
agctngcacctatnggcaccatcataccaaatcaaatacctgcagaagtggtagttcatgtgcggctgatcattgtcatagttgttgtctccctcttgatccgattcatcaatgtaatctcggtggtgggtctcaaagtcgatgaccttcttctacctctgtctgtcgaacctgcaaatggtagacacatcttttaggaatttattgcaaatttgaaataatagttagactaacaagaggacaaaggcactaacttgtggagttctatcgaagtggagaagggctccaccggaaactcctgttgcaatcctaactgttgtgccactcgatggggcaagtggtactcaacgacatagaagcaaatgaggggaaacctcattatgtaaatgtccccgtcttgcacgcacatggagctcaactggatgtgggcgaaagctggctcttgatatg

SEQ ID NO: 36415 - DNA, 327 bp, Zea mays
  unsure (1)..(327): unsure at all n locations
tagctgagagcgagctnctatctttagttgtcatagatcacgttatttctacaacgtcatatggatataagaaattgtacccgcttccaaataaacttgagattgcatcttctcgtcacctccctgcattctaaaagatatgtctttatgaccctgtctcatcggccacattcaaatgaatgataataaatctagacatacatatcagccgcattctcagatttactaatgaatatatatttagtctaaaaaatactattttaggacggagtgagtacttgttacgatcacaccttataaaattagaaatactatattgaatgactg

SEQ ID NO: 36416 - DNA, 376 bp, Zea mays
agcttggaccaggtcgttccatttttatatctgtcccggaggcaggtgctccaaccaggcgcgagcggtgtctgagaggaacagggggaggttgcggatgatgaggttgtcgtcgtccgttccacccagttggcaggccaggcggtaattcgcgagccacagttccggtctcatctcccccgagtacttcgtgatagtagtcgggggtcggaaccgggtcgggaacggcgcccgtcgtatggctcggctgaaggcctgtggaccgggtggttcgggcgagggactccgatcctccccgctgtcatagcgtcccccacgcctggggtggtagcctcggcgcaccctctcgtcgaggtgggctctgcggtcgcggtga

SEQ ID NO: 36417 - DNA, 353 bp, Zea mays
  unsure (1)..(353): unsure at all n locations
actgtgatcctgcttcaacaccttatgaccccagtgtgctattaagaaagaatcggagaatagcacgggatcaactgacatactcccacaatattggctcgctcatgtaccccgcaagtgcaacaaggccagacatctcttatgctgcgagtaagctaagtctgtttgtgtctaaatcacgagatgatcactggcgtgctcttgagagagtggcgcggtacttgacgccattatgacataccgctttcattataccggacctcacaagtgctggaaggctatagcgatgccaactggatatccgatgctgatgagctctattgcaccangccgacttgcgtacctgtctggaa

SEQ ID NO: 36418 - DNA, 418 bp, Zea mays
  unsure (1)..(418): unsure at all n locations
agctnacataggcnctctagtctataattggcttcttggggggagaagtattgattatgggaaatagggggagtttttgaaatctttgatcaatctcttttggaatgactctctttatacttcaacatgtgtgtttgacttagagatagagatttgagtttgatttgcaaaaacaaaccaagtggtggcaaaggatgatccatatatgccaaaattgaataaaaccaatttgagttcttatttaaagtgattttgcacttgttctagtcgctttatgttgtgttggcataaatcaccaaaaagggggagattgaaagggaaatgtgcctttgggccatttctaagtattttggtgatngagtgcaaacacacgtgcttaaatgtgagaatattgccaaggatgatcaaagtgcaaatc

SEQ ID NO: 36419 - DNA, 360 bp, Zea mays
agcttgtgcaaagtccacttgtactaaccttctgagaaacccgcccccactgcaacatgacaccagagggtccaactcaaaaagcaatgtatgaattcagaatagttgcagagcatatcagtacaagggacctggttcaggagtttttggctttccaggtttttcctagtgtaaaagagtgggaaatgccgaagctgaaaggggagaagaaagaaggtgaacttgtgtgtttaccttactacttcaagtttaagaaatactttaaaacaccttgccaagagtggctggatacgattgaagtgatgtgcaatgaaatacttggcaattattctaaaaaagaagatcagttgatgaccgcag

SEQ ID NO: 36420 - DNA, 425 bp, Zea mays
  unsure (1)..(425): unsure at all n locations
agtcttagacgggagaaaccgcagcaagtgttaaactccataagaaagatgttcctaaagtaataaatgaagaaatcaacatgaacaaggaaaaaggtaaaaattcaattagtcatgttgtttgcactgatcatctctctatgtcatccaagagcaaaaaggagagaggaaaaaggaggtgcttcaagtgcaaggaaattggtcacttcattgcgtcttgtccacacaaagacaaggatgaangaatgaggagatngtttggatgcaacgataaggaccatatgatcacttcatgtccgctcatgaagaatcaaagacgtgcaccctccaagatgaccctcactaagaaaaaagacaaacaacaagtgtcatatcaggttgagcgatgcttctgctacatgtgtggtgagcatggtcatctacct

SEQ ID NO: 36421 - DNA, 251 bp, Zea mays
  unsure (1)..(251): unsure at all n locations
agcttagttggcgggaaattcttcactgacatctgggaaaatggcggccgagagatggcgcacgagataataaaaaagagtgaaaaagattctcatgatgcaaaagaagcgacgaaggcagctgagaaagctgcgaaacttgaaaggcggataggtattgcttaattgcttttgactcttgtgtttatttctgtgacttcgaacttatttatgntttgtatcgcagttgagctatctcctccctcggagcc

SEQ ID NO: 36422 - DNA, 421 bp, Zea mays
  unsure (1)..(421): unsure at all n locations
agcttgattgaatatntaatgcctntgctgttttcttgatcgcatattggttgatcattgaacaacttcaattatcacttatgcttcttagtgcctcatgtaatgtgaatctgatttcaattgtaattctaactgacatctatcttaatatgcactaaggaaataggagaattcatgattcatttatacaacttgtgatccatttgatatatgctaacactaactcgaaacagatcactagttgaagaactctctcttgtgcaaagcatttccatatattgtcattgagtataggtcttaagccactaagactatagacaaagcacaatgaagagagcgtctctataagaagtacaaaagggtaaaaccatttcttttatttaacgtgacctaaatttcctctatatacactcttgatatc

SEQ ID NO: 36423 - DNA, 452 bp, Zea mays
agcttaactaaagtcatctaagagtcggctagctagaacaacgacaccgcccgctagacagcatacacgtcggcttgcctattattatcacaattcgagacaccacatacactacaacatttttataaacattcatattcacaagtattttcgcacaccgaccaaatcatacgaatcgtaaactactagtctccaactcacgatcaccatgcatttacttcccaatcatgaacacatacatgtttatcatacgaacagagcatttcaataattatcctaaaacaattaactccattacacaactcataccacaaacctacttgacttgcttgaagtgtctactcgaatccgtgagtacaatcacacattatatgcgaagcataatttaacgaacacaaaatacgcatcgactcgattcgacttataaatattcagaaagcgatgactacttc

SEQ ID NO: 36424 - DNA, 462 bp, Zea mays
  unsure (1)..(462): unsure at all n locations
agcttgtctacgctgtgcttattgcatctaggaagctacnccactattttcaggcacacggngtcgtggtggtgacctccttcctgttaagggccatcctccacaactctaacgccacaggcaacattgccaagtgggcagtggagcttgctgagttctagctggacttccaacctcgccacgctgccaagagccacgtcctagctgacttcatcgtggagtggacccctcccccgagtgctcctaggggtccaaatcccgatgcagaccccacacctgcagagcccagggtctcggtcttcaccgagccccactggacgcttttcttcgacgggtctgcccgccagcaaggtggcggtgctggagtggtccttgtcgacccaagcggagatcaagtaaagtacatgctgcaccttgagttaaggccaccaacaacatggcagagtatgaagcactgatctt

SEQ ID NO: 36425 - DNA, 422 bp, Zea mays
  unsure (1)..(422): unsure at all n locations
agctngatctaaacctgaccacanaatattgccacaaaacttgcacagttcagtgctaatctacctcgctacatagcccccatccctgcctataagtaccctcatgaggcttcaagacaaggcccatgcctctctcaaacctataagcttatcccatctctgtagctcacatacttataccatcagtcatggcgagtttgaggcaaaacgactcctttgtaaatcttcttgacaagaagcttcacaagctctccacatcaaagatgaggatcagcaagagtgctcccgacctcctgaagaaggcagtgacgtccgtgaagagcaagaccgacgctctaagaacaaagatcatcatcgtggcctcgctgcgccgaaggttggcgatgctccatgggatgtctcgccagatccacggactcacg

SEQ ID NO: 36426 - DNA, 466 bp, Zea mays
  unsure (1)..(466): unsure at all n locations
agcttgtagctaaattagacattaacatattcttggtcctctgagccagaagagccatatgtcttgaccactagactactagttctgataatttgtgatagaaatatgaagatcttgtagagacctgttgtatcctctctactcctgatgatttcttcgtacgagagcagtactatctgttgttgaagatggatcctaggcggataccagtattgtttcgttcttgccaagcagttatcatcatttgcttcatcaaaagctagttatatggtgatttttcccagataaaatgaattcttggccttgtctgttctattccaaagcttctcttnttgctgaacaatgaagagatcgaaataatgctatatagaatacattggtatataatatgaggagaaatgtttgccctgctggcaacaccacanattaataactattggtataaattctctctcacaatataata

SEQ ID NO: 36427 - DNA, 464 bp, Zea mays
  unsure (1)..(464): unsure at all n locations
agcttcagatgcatctatgttatgaattgctttttaatcngtccagactccttcggcctttctggcaacttcctgacttccatgaatagcaataggtccttgattcgaaggtatcttcatgcaaagatatgctggatgaagaattgcttcaaaagcattgagagtaccacgaccaatgattgcgttgtaagggtactccatgtcaacaatatcaaacacaacttgtccagtccttgtattgttgaaaaatcctaaggctactggcatcgtgattttgccaagtgctacaatctaccttcctcctaaaccacaaagaggatgtgtggcgtcatggatcatatcttctggctcttgcatctgtttgaaggccttaataaatataatatactgctgcacttgcctgtgttcaaccacaacattgtggaccatatatnctttgataacacaacaaatatacatatcat

SEQ ID NO: 36428 - DNA, 393 bp, Zea mays
ctgcaactgcttatgtattggtaaccaggctattgataggacaccgtgcatcatggtaaacaataatactctttatgataatgagaagaacttctttgaccctatgtccccgatgctatcttgaagatgagttgctaggcatgcaaagagaataacaaattgtcataaaaaaatctgatggacaaaggaattggacaacctaagacgataatttaaatctgctcatgttggaagaagaaatcaactgaaagtgctgttcattgcttcaaattgattacttgaataaacgatgtgctgcatctgcatgtgttatatgcaagagcttgtctactcacacatccattacttgctttactatacaattttgcagacatctgtgtttccaaaaatgca

SEQ ID NO: 36429 - DNA, 396 bp, Zea mays
  unsure (1)..(396): unsure at all n locations
agctntaccaaatggacgtgattagtgcctttctcaatggaccaatcaagggggaggtctatgttgagcaactgaaagggaattangcttacacctattttcctaattgattttggtggttgaattgcccaacacaaataattggactaactagtttgctctagtctataagttatacaggtgccaaaggttcacaaaaagccaataaaaagaccaagaaaagggttcaacaaaaagagcaagggacaaccgaagtgtgccctggtcgggcgcaccggactgtccggtgcaccaggggactccaagctaaacttcgcaccttcaggaattctcagaggcgcttcgctataattcaccggactgtccggtgtaccaccggacagtgtcctgtgcccc

SEQ ID NO: 36430 - DNA, 438 bp, Zea mays
  unsure (1)..(438): unsure at all n locations
gctttgacggtattttaactctaagcaagttgaatttaaaccagtttttctttgtcacgtaaacttcttttagattcggttgtataattgttaagtgagggctgtacttcatcgaggaggggcccaacaagttttttctcatgcatgtaaattcttttttagaatttgttgatagtttttacttgtaccattattaagtgagaatttgacatatttttcttatacaactatatcgacgttcttttaattgggtttcttgagtttaagtgtttagctataattattaagtaaatgtatgaaaagtgcttttgcaagctttgtttggttntacagcttctatanttaatataattttttgtattaagtgattataagactataccgacctcaacgctattaagtgagtgatgaanaatgctctattgaatgaatgatgaa

SEQ ID NO: 36431 - DNA, 191 bp, Zea mays
  unsure (1)..(191): unsure at all n locations
agcttttnctggtattgttatagaaacagagacctgtttatggaggttgggaacaacaccttggattggagcatacagccactaccccaaaaaagtcctacttatgcaacaaccacgtatcatgcttaagaatgctcacattaaaagactctactgttgcataaaagttgaacatattctgattatgatac

SEQ ID NO: 36432 - DNA, 421 bp, Zea mays
  unsure (1)..(421): unsure at all n locations
tcgacccggatctctaatcacctgcggcatcaagcttgggcaatggaagtgccaaaggcggtgggagccaaaagagcagtcatgacacaagcaccagtggagccaattactgcataaacacgagacgaacaatatgatccaatggggagcggcatggcaatcacattaaactttgaaagaaaatcaaagtctgatggtggaagggggttagatttctcaacaaaaggacaacaagacacatcaaacatgacacgacgtgaaaaaacaagacgattggaggcaaggtataagcagcgatatcccttgtgaatttctgagtagccaataaaaacacagagggaagaacgcggagctaggttgtgggcagccgtancggatgaatttgggtagcacttgcacccaaacagatagagatggtcat

SEQ ID NO: 36433 - DNA, 429 bp, Zea mays
  unsure (1)..(429): unsure at all n locations
agctttctcaacctttcttggtgcttaatgaatatacttcaagttttatgattggcccaagccatgattttaaatntttcatacctttttccctattttcttgaattttgctcatggggctcacttagggtttttattagggttgcaacattattacctttttgaaagacccatgtgttttgatcatgatacttttaagtatatgcttggtggattctttactcctaagtcaatttggtgttcatgcttaatttggtccacataaaatgatggttcttggtttggcattttgagagaaaccctaggtgacactggggtgtcacagccttccccccttaaaggaatctcgtcccgagattcgggccagagtcctcccatggtgaagcgaagggtgagatttataggaaatgggtgattatgatcatcttt

SEQ ID NO: 36434 - DNA, 316 bp, Zea mays
actagctacatgctcacggcactgatctctaagatactgactgtgttttcttgtctctattgtatccagacagcacatctttggaaacatttttggactttgatcttggtgaactaccatagtggacatgcgtgtacactgtgaatgtggctcacttatgcttatctggaagtccaaactgacttgatggtctcagcttttttcgcggagagcgaaaatctgacatccgtgagctgccgtctacgtattaactctacaactcactatgcattattgacgatactcactcggcacggtataattctccgacatcaga

SEQ ID NO: 36435 - DNA, 481 bp, Zea mays
ctcgttgcgacattcttaagccacctgcggcatgcaagcttctcctcttcagtcagcttcgtctcgacagcaaccttcttgtcttgagacattttttcttcagaaatggtgaaaacatgtcttttaaaccgaagctcagagagcttgaaaaactaacaagcgctagtaagcaagagctataaaattgataaaataaagcgcatagcacaagcagagtatcaagtgcagtcggtgtaagttcctatttatacgcccagtgcgctccaaattggagggccccgtctgtcattgactgttgctattctagcaaagggaaggtgttttttcggaccttcggcttaaggccttcatccatgttgcagtctgaattcgttatcttaacaaattaatagtgcgaggggctactgttgggggccttcgtcttccgaaggtcctcaaaaacatgattaacaatgtcttccaagtgtgacatatgaacagg

SEQ ID NO: 36436 - DNA, 436 bp, Zea mays
ttatagtcaccgcggctgcagcttaaagcaacaatctgaaactgaagctatgccttcagagcccaccaaggcaaaacccttggaagccgaagaaacaaaaatggcagagccaactttggttgaagaaactgacactgcttcccccgaagcatcctccaaagccctcgattatattgtacgacatgcttcgggaaaaagattatctgaagaagagatttttgaagctaatcactatgcccaagaattgaagtatctaaagggggccttagtattcaatgacacagacgaatatgacttcttatactgcctcccagacaacaaagaattatctgtctaccgggaaatggctaggagtatggggttcccgaagcttgaagctggcctctgcgctatgacaaaggacgatcttgcagatagccttgcatataatagtctg

SEQ ID NO: 36437 - DNA, 441 bp, Zea mays
tgtgtgtttccctcaagaggaccagtgctgacttgaaacacatacaacgatcagcagacatgactggggctacatattcagtttgcaaaataggacataaatatatgtaccaccatattttcaactaaaaagaggataataattacacattcagtttgcatatcatagagaaaatttgaacatattcagtagagtacgacagatcatatattcttgaaacgcaacaaatttccaaaactagaatagtagtatttaggaaacaaatatttgaacaggtctataagcacaagattatttaggaaatcattcagtgaaatttttaccttttagcttatgatttggcttcgatgatggattattgtccatttgtccttaatgggtggaatctactgcaactcatctagggttgtacagatgtcttgtaaagttcttcatatactc

SEQ ID NO: 36438 - DNA, 195 bp, Zea mays
atcgatgagttgtgaacttgtacaccatggcgactggagctgtccctcacaatcacccactacttctgggtacacatatgtatcccgtgacaccctccgatccagatgagatgaactcctatatcacaactaccttgtaataatttatcacgtatgtctatagtactctaacggaaacgaacaaattatcattgt

SEQ ID NO: 36439 - DNA, 413 bp, Zea mays
agcttgaccagggacttgtttgttcctcatcatgcaatattgaaacaatgaaaattggaactcttcagtgttattatcttcttcaaccttctgaaaaaggaccaatgcttctgaaggtataagcaacactccccctgttctattttgacttgtgatgtagtgaatgtcatgtttcaccgattgtagtaatggcctaaaaccatgctggattggattcctaacgctgaataactatctttgctgtaaagcttctactttagatgcttacatttcagaagaatagaaagtattttgtggtctgttattggcttgcactaatgaccggaacaaatcatgctgcagagactcgctgcatctgaagagatattgcctctcccagacatgactcgagattgcagctctaagattaccat

SEQ ID NO: 36440 - DNA, 328 bp, Zea mays
tgatgcttctttacctaaatgaaagaaataatgctagctagattaatgtgcatgtttattcaactaaataaataacttgatcaaatgtgataatactgaaccttactttcgtgactgtctttgcctaatgaagaataagtgtgtttatacaccacttataacacgatgacctactactatacagatatgactgactaaagaaattaattgtgagagctttatgaaccctgataggtgatgcttacagaacagcactatgcgctaaatgtattgaggcagtcatgtagaacaggtctttccttgttcaccaatagatattgagtcttgc

SEQ ID NO: 36441 - DNA, 434 bp, Zea mays
agcttagtaaaagtactacataacttttacaatcaccaagaagtggttccaattttaattaacctaaacagtacagttttcgaaatatgtctggacagtggatagaacacaacaatcatattgtaaaattcataactctgaaactatcaggcgaatggttatgagatttaacacaagcaatataagaaagtaatctacaactttcttatgaccaccaagaactgattgcaatattaacttaaggaaccgttgcaatctctgaaatctgttcagaaattggacacgattcagttacagaacttgtgaaaagcataaattctaaaccattaatttttagcacatgaaattctaggacaagctagatattgaagttaaataaatcttctgtatagagcacatctaaagaaaatacaatttgctttactaaatcatca

SEQ ID NO: 36442 - DNA, 212 bp, Zea mays
ctttcaggacatactaatggcttgaaaagccatatacatcatcacatctctccaggcagaaccccaactgatcccttcttgattatggttcaactagctattgctacctcttttggcctctaagactatctccattgtaattgcttgtccgagcggagtttactttaatcatacttattagccaggctaaacaatttatgatccgtactcct

SEQ ID NO: 36443 - DNA, 406 bp, Zea mays
  unsure (1)..(406): unsure at all n locations
agcttcctaaggccctgttcggtttcaccggaatagaccangatttatttcagctcatcaaaatctatataaattaaagaaataatccggctaggaatcaatccgaggctccaatccctaacaaccgaacacggcctaagtcgttctgaggttcaggacggaaaattaacggacgagcactacgtccatggatggaccggtccgcgtagccaccaccccttgcgctaccaccatagcggtgccagaggtcgcaggttgcaacgtaatacttttccactagcaggccccatttctttccaatttgttagcagccggcagtcaccttgcctattacttagctgtataattaaaaaatcatatagcctgatatgatgggtaattgacaacgtactcgtaaactaaatat

SEQ ID NO: 36444 - DNA, 68 bp, Zea mays
tcaatctcttttggatgactctcctatgcttcacatgtgtgttgactagagatagagattgagttaat

SEQ ID NO: 36445 - DNA, 384 bp, Zea mays
  unsure (1)..(384): unsure at all n locations
agctnggcactntggaccttngaccacatgcattntaggagttaaacacaaagtatatagctaagatgtgctctaaaaaataataagagtgccacacattaacattatcatcatcacccaaatgaccaacatggttcacaactaaaatattaaaatctaaaagggaaagtagaacaagcctccactatcataacctttgctaataaatagtctaaagagagacattactactttattagacttaaaaaccaatttaaaaccatcttgacatagcaaggaacttgtcggcgtttcgagaccggggggtccctaagccgacgagtgagtgtgttgcgtgccctatcccaaatgggtcgagcgcgtgggcgagcgcgaaggggggaa

SEQ ID NO: 36446 - DNA, 406 bp, Zea mays
  unsure (1)..(406): unsure at all n locations
agcttaagtcatagagtgttatccacttacttctcgtgtgntccaggctgtttacgtgcatcttggagattgccggcgagcgcaaccacggatctgaatccattactgatctttggaaataaaggtacacagtttatctttattggttgccttcatctgtatttctatagttcattagaaaaatgatccttgatggtagcagtgtagtaaacgcctagagtatacaaatatggcagaaaattatttgtattaatcaggttttcttttttgtttgccttcatctctatttctatagttcattacaaaaatgatccttgatggtagcagtgtagtagacgcctaaagtatacaaatattgcacaaaattatctgtattaaatcagttatattattttgttaccctcat

SEQ ID NO: 36447 - DNA, 327 bp, Zea mays
ttccctatgcgtggttcctaacgatgttagccatgcttatcatgttgtcactcctgacatgtttgtggtcatgatttacacgaggtatagctgcatgttcatatataataataattggtgtatctggttgaacaatattcataccttaacacttaaataataagaggcaatactgtactctttaatatctaaaatgaacaataaactgaataacttgtgagaatgttcataaggaactaagaactgacgtgctaggtgactaacaaatgaatatataacacacgtactcaatactcttaaatatcttactcactcatttgacacttc

SEQ ID NO: 36448 - DNA, 482 bp, Zea mays
  unsure (1)..(482): unsure at all n locations
ctcgaccgngatccttatgtcacctgctgcatgcaagcttctccaaatttttctaaccgtagccaaatagtacaactatgtttctttctagtggtgagcttttggtcgaaactataattaaatcacaacttgaaagttttctatagtacataggggctttatatttttcttaagtacgttacattatttagagtctgacaaaattggttagaccaaatttggatgaactaaacagaagttatggattattaaaagttctgctcaaatttaaaatcaggtttaataaggtgttctgaaaaagcagtttacaccgacgtccctgggttaaaactaaatcaacccactcaaatctacccccgcgccactattcccctgagtcgctgacagatcaaaaagccccctgactttctcttcctctcacccgcggtccttcccccagtgtaaacagtacccgcgggaaagaaaagggcggcgcggcttac

SEQ ID NO: 36449 - DNA, 421 bp, Zea mays
gctttagccagagaagaggaaaacgccctttctgccccttgcgccgccaccccttccgttttggtgatggctgatcgggtgaccataatctccccgcgcgacccgtggcccttttccacggtgacggcgagcgatttggaggagctggtcggcgagggtttgctttcccctctcaccgatgagctgcggccagaatggattccccccatgggcggagtcgctccatccccaccgccggggtacgtcgtgagcttcgtctccttccacgagcggggattcggtgtgccgacgtgccgctttatgcgggcaatcctgttccactatggggtggagttgcataacctcaccccccaactccatctcgcaggccgctatcttcgtagcggtgtgcgaaaggtatttggggatcgccccccattgg

SEQ ID NO: 36450 - DNA, 390 bp, Zea mays
  unsure (1)..(390): unsure at all n locations
agcttctncaaatttttctaaccctatccaaatagtacaactatgtttatttctagtattgagcttttggtcaaaactataattaaatcagaactttaaagttttctatagtacataggggctttatatttctcttaagtacgttacattatttagagtctgacaaaattggtttgaccaaatttggatgaactaaacagaagttatggatttttaaaatttctgttcaaatttaaaatcaggtttaataaggttctctgaaaaagcagtttacaccgacgtccctgggttaaaactaaatcaacccactcaaatctacccccgcgccactattcccctgagtcgctgacagatcaaaaaaccccctgactttctcttcctcttacccgc

SEQ ID NO: 36451 - DNA, 460 bp, Zea mays
  unsure (1)..(460): unsure at all n locations
acctgccgcatgcaagcttcgtctatggttaaatatttggcagcaaaacagtgcaatagctatgaatgctgtggtaacttcacacctacccgtctgtttatatagcgctgcaggtaagaaggtgaatcgtcaagtcttttacaccggacaaacagtcgctcgcacccactgaacggtgggccacaaaacccgagaaggtgaacctacatggttagaccggttcacgctcggaaattgtatcgtttcccggcaacgagctcacggaaggtgtttntcggaccttcggcttcccgaagcctaagagacttttttcacggatcaagctcgttacgaaaaacgatctatcatcgcgaaggggctactgttgggaccatgcttcatcgccgaaggtccttcaagaagaaacaccttcggcaaaacctgtttatacgtgataccgaagctaccgctcatgaagctt

SEQ ID NO: 36452 - DNA, 361 bp, Zea mays
  unsure (1)..(361): unsure at all n locations
aatctccaatctatggtctaagacccanattngtgtctttacaacacaaataattgctcttgtgaagacttacaaatagcaatagtcatggcacacttaataattatcctgaggatataatgccaatgctactatatatagctgacactaatgcttcgtagttttgttgaattatcaaaacaccacatcgaagaagcacagtgcatatgtganatgnttggagaatatcttgcaacacaaacatactgagactaataaatactctacaatacatgtatgatcctccatctgccatcagtctaatttgtgtcattgacacgctacgacttacaccttataccaagatgatctattctcgctc

SEQ ID NO: 36453 - DNA, 443 bp, Zea mays
  unsure (1)..(443): unsure at all n locations
agctntcctgctcacaccttcggctctgnatctattcttctattactctggtctactgtgatgctgacttgaatccgaagatacctgttcacacattatactccagagatactgttaaatcctgtttttgaagaccttcggatgccgaaggtccccaacagaactaatggtctctttattttttctaggttctctgttacttaagcaaactaggaaaaataattctaatcactgttcatcaatttctaatgcctttctgatttttcctaagttttgggcaaaatagctttaaatgaatatctacatcatatttttcaatgttggggttcctattatttttaaacagtgtctaaatgaggtttgaatacctacaaattttcttaggttcagtatagaagaaaaactaattntccttaattaaactacggttggtaagtttctgt

SEQ ID NO: 36454 - DNA, 393 bp, Zea mays
gagtctatccactggctacgcagccaccagcagcatttacataacatcttaaccgctctcttgaaacaacaataagtgcgctaacacctaagcatgacatctttttaaacaaccattatttgaataacgataccattgacatgctacaatgaatattcaagactactaacacataaaaggtatgaatgcactgcaacttaatgctggcctacaatatgattggatctattgatagaggacttcttcccgaatgtggacgtgctatcactacccgagtactgagaatagtggtagacatcttggcaagtgaattctagcaacacttcctctgctatcaccttctcttcatcagatagtgtatgagctcatttgaaaaatttgctaatttcgttt

SEQ ID NO: 36455 - DNA, 430 bp, Zea mays
  unsure (1)..(430): unsure at all n locations
agcttcacaccatctccttctncagcatagcttgtcaggcatgttttggtacccatctcttgatggatccattatggttagttaacaaagatctatgaacccaaatgtcctttgcgctagcgtttggcaaattcattgcctttctagcgcaagttgcaattttgggttgcctagttatatatgaatcaaatgacaagctatgagtggaggagttaccaatgggacaatcattgcattgatgtcccttttcccggcatgtgtagcataagcgttttccaagttttgaagatttcttctttccttggttggtgcttgctacatggttagtaaaaactttcttttctaaccctatgcccttttgttttaaatggggacaagatttaataaagtgtcccttctttgaacatttaaaacagagtttatcatcctt

SEQ ID NO: 36456 - DNA, 432 bp, Zea mays
  unsure (1)..(432): unsure at all n locations
agctntgaatcaaatcaatggcttgaagttcaagggcaaatgtccgttgtgcaactggtcacctcgttggactttcggttatccaaactctctatgcttgcagtgctctgtactggtgagttctgtactcatgtacctgcggttggacccctgaacgcatcactccctagtaaatccaaccctgtgagcacattcaaagcttggcacatcttccttgagttcacgtatggtgccaggccaaagtcgcctatgctacacgatacaacacttctcgctaccatatcctctgccatctttacctgcaaattcaaacgagtttcaaatgggttggttactgttatagagctgcaatgtttgtgatctttcagtggttgtggcagctgtgagaagcgaattggtcaccttgattcttaacgcttctacatcggattt

SEQ ID NO: 36457 - DNA, 435 bp, Zea mays
  unsure (1)..(435): unsure at all n locations
agcttctaaagggagaacacgtgataggtttgactaacgtgcaattcgaaaaagatagaccttgtgcagcttgtcaagcaggtaaacaagtgggaggagcacatcacagcaagaatgtgatgaccacttcaagacctctggagctgctgcatatggacctcttcggacccgtcgcctatctgagcatagaagggagtaagtatggtctagttattgttgatgactnttcccgcttcacttgggtgttctttttgcaggataagtctgaaacccaagggaccctcaagcgcttcctcaggagagctcaaaatgagtttgagctcaaggtgaagaagataaggagcgacaacaggtccgagttcaagaaccttcaggtagaggagttccttgaggaggaagggatcaagcacgagttctccgctccctatacaccac

SEQ ID NO: 36458 - DNA, 418 bp, Zea mays
  unsure (1)..(418): unsure at all n locations
agcttacctttagtcttatgtaactaagtgttataagactntaaaaaggggagaaataattaacaaacggggaagtcataagaaaaaacataagatgtagaaaattgatgagtgcatactatgccatgagcatcacgtttattttatgacacattgcacctcatgaataatatgatataagttgtctacatactttgacccaaatatgtgcttttggcatttgagtacaaaagtgttattttatgaaatgcacatatttagggggaggaaactatatcataggattcaaaatcttatttatcaaatcttatgtaagctttaaatgtgttatcatcaatcaccaaaaagggggagattgaaagtgcattcatcccttttgtgaagtttggtggattggatgacaacacatttaaaagac

SEQ ID NO: 36459 - DNA, 284 bp, Zea mays
cctagcatgtaatgaactcagccgatgcgaacctgtggctatcaatacggaacagtaatcctttactggtcacacattctagtaattgcaatcggatctttctgaaaccaacctttgtcatggtagaggtactaccgtatgtaatgagtcaatatattatgccaatacaatataacttggctatgatgtcatataccctatttctgtaccctttattttatgatatctgatacaagctatcgataatatattacgaagacatgaactatctacttatattttca

SEQ ID NO: 36460 - DNA, 430 bp, Zea mays
  unsure (1)..(430): unsure at all n locations
agcttgcacatagnctttattgatgttgcctttagatagtccaagtcttctaaagctattacgtttttgtgaaaccgcattgaaaaagtaacacaagcgtgtgatgacaactttgacatgctctgtttcgagggctcttaccgcaattgggaggaacaccgtcatcatcacatggcagtcatgagagttgtagccaaatagagacaagtccttcatcctgactagtctgctgatattggatgagaaacctgtgggcactttgaccccacgcaaacatttgcaaatctttgttctctcctcaactgacaagttgtagctagctggggggaggtaaggcttccctttgccactatccactggatgaagttctggtctgatttgaagatctactagatcatngcgtgatataagtccgtctttttgtcttact

SEQ ID NO: 36461 - DNA, 336 bp, Zea mays
agctgggagtgggtgaaggtttctctgaatgtgtcaaaccattgcactcaccaaccttcccaaagcaagcgacactcccatccttagcagcaaagcctaaccccggtccgccaattcccctcttgaactgactgaccatcatgcccaactggggctcactgcacgacacccaactcaagacagatcaaaggtatgtgttttcttccttgattcttgtcttgtcgggtctacaggactcaagggcggactgcaaaccctcacaaagtgcacactacataggtgcaggggcactcactgagctagccttctcaagcaaagctatcctagtgtctctct

SEQ ID NO: 36462 - DNA, 408 bp, Zea mays
  unsure (1)..(408): unsure at all n locations
agctttaatttttgtttggtacgtggaccactgccattcttatgaccatgtnttctcattaatacctgtttagtnttattgctttgtcataagagagtctagttatttacttgatgtctcttggtagtgtgacatcactcgtaagggaatacaaccatggatgtgattgtccacgtgtcaagttatatgatataagggtatcactagtgagtgtgctacacgatgatggcttttgaccacgaagatctgtgacttcatgatgtagaactcaatgagatgtccaatctactcgacaggagtagcaccatggttgaacattaactgatgctgtatcacacctaatccctgaccactgttggttagctcaaggccatatggtcttctgcccactttgtggcctacacactc

SEQ ID NO: 36463 - DNA, 414 bp, Zea mays
  unsure (1)..(414): unsure at all n locations
agcttgtgaagccaatcacaagtttattgaagaatgacattaagttcaattggtcttctaagtgtaatgaagcctttgagcaactaaagacactattgaccactgctccggtattggctcaaccggacatcactaaaccttttgacgtatattgtgatgcatctggcagtgggctcggctgtgtactgatgcaagagggccgagtgattgcgtatgctntaaggcagttgcgccgacatgaggagcattatccaactcatgatctggagctagctgttgtggttcatgccctaaagatttggcgtcactatctgctgggtaatgtctgtcacatatatacagatcataaaagtttgaagtacatcttcacccagtcagagttaaatatgaggcaaagacgatggcttgagctca

SEQ ID NO: 36464 - DNA, 261 bp, Zea mays
taatactattaaattcaaactttgtaaatcttggatttttttttaatttattaattctagctgcgtaagttcaaaattctaaattgttaacaataaagtacttaagttatgactttaaaatttttaaaactctgatgtttaaatctagatagaaacaatttcttgtgattgtttgttaatagaataacactatgatgtattaattattaacagagagccgcacccctcatccaccttgctttcctcttcatctaacctttt

SEQ ID NO: 36465 - DNA, 418 bp, Zea mays
  unsure (1)..(418): unsure at all n locations
agctttagcagcacttgggttctgatgttcttcaacagatcctcaatatagntacggataaaaggatcatccattattgttcttctattactctgcaaaaagaagttgataacacttgcattagtacatggaaaattaagagataaaatttctgaagaaatagacgctgaccttcaggatcttttcaaactccatgatgtcgttcttctggtacgctgcaatcaggtttgtcattgcaaggatttcactatcgttcttgtacctgcaagcatttgagttttcagggtgggaggtaaatcaagctacaagatttatgcgggatcatcagttgtcttacggcttggcctcttgtccatcaaaggattcacttcagactccatcaacatattggcaaggacaagatatctaatgcacagca

SEQ ID NO: 36466 - DNA, 440 bp, Zea mays
attcacttctagttctagacactcacatgactgtatgtctgtatcgaatttcttctagacaccctcttcggattgtatcatggttggacttgatttgctcgaaatctattttgcgcaatgcaaaaatggtagtaagaaaagcccggcccgttgaaaaaacagagtggattaggcctcgttgggtctgccattttggagaccaacattgaaaaagcccagaatcgtcgcatcttatcttgttgggctatgtggatagtatgaaattccagctatctttctcatatagtactcccttggtccaatttaaataaatcgagctttattaaatttaagtaagtttataaaaaaatactagtatcacagtttgtctctaaatagggtaatctagttatacttgttcattgctacatgtgccccataaagtttgtgattctcgattt

SEQ ID NO: 36467 - DNA, 444 bp, Zea mays
  unsure (1)..(444): unsure at all n locations
agcttgcatctctgccatggtgttggacatctgttgcagcagctgtatttatgcggcgacagcagcattggatctagcaggcggaggattcggaggattcatcttcggttctggattagacactgccctccttcgatgaatgtgtgtaggcaaatcgacatctcctctcttcttggtattgaccatatgggttagagacataggataagatagatntgcagataagacaaatgagtaagcacaaaacacccgacttttaggtcacgatcttttgggtcacaatagctcagtagattagagtgtcaccgacctaacattactacactacacctatgatggcacatgctaggatgcacccactatactaagttttatggtgtatatagccccacaactattncactcaatcaaagaagcaaatcaagcaattatcataagaacaat

SEQ ID NO: 36468 - DNA, 443 bp, Zea mays
  unsure (1)..(443): unsure at all n locations
agcttgttcttagactctaattgtcttccttgtgctcttgatatgcaatatcatctattcctagagattctagctcaaagaaggattttcttacaacgagcattagaacatggcaatatagtttaaatttgaacacatgtgcatgagtgaggttgttgagattttaagttttctatcacaacctcatgagcaatatttaacatgatatgatcatccataagttntttatgagaacatataaacatatcatgtttttcttgaaaagctagattttcaatttttagcctttctatttggtccttaagcaaggtattcctatttactaattgagcgatacataataaggagttgtcttgctcaattgaaatagtttcatacctttggaccaaatcaacatgagagcactttagctcctcatgttctatagtaaactctttcaagct

SEQ ID NO: 36469 - DNA, 413 bp, Zea mays
  unsure (1)..(413): unsure at all n locations
agctntcatgagaacatgagtacaaagntgaattttagtacggcttatcaccctcagactgatggacagactgaaaggactaatcaagtattggaagatatgttgagagcttgtgcccttcagcatggaggaagttgggataaaagtctaccatatgctgagttctcatataacaatagttatcagaccagtctgaagatgtcagcttttgaggctttatatgggaggaagtgcaggactcctctatattgggatcaaactggaaaaagacagttctttgggcctgaactgattcaaaaagcagaagaacaagttcgtataattcgagaaaatttgagagtggctcanaccaggcaaaagagctatgctgataatagaaggagaccactggaatttaagaaggagattatgtg

SEQ ID NO: 36470 - DNA, 377 bp, Zea mays
  unsure (1)..(377): unsure at all n locations
agcttnctccagcattcttgagcccctatgcattcgaagataacaatatgtaccactgggggttatgaaactggtttttggctcatcttccttcttcatccagatttgatgatagcctgaataacaatctagtagactcatgagctctgacgaagctgctgcatctactagagaatctattcttggtaatgggaactcatcctttggacaggccttgttaagatcagtaaaatcaatgcacactctccatttaccattggccttcttcaccataacagtgttggctagccattctgggtattttacttctctgatgactccagcactaagaagtcttttcactttattccgagcaccttcagctttgttatcagaca

SEQ ID NO: 36471 - DNA, 365 bp, Zea mays
agacaggatatgtagcgcatgtcacgcatgaaagcaagttggaacccatcatccacacaagaacatcatgacgaccgacaggccgcttgagctacttcacatggatcttttcggcccggctgcttacataagcatcgacgggagtaagcattgtcttggaatagtggatgataattctcgcttcactcgggtattctttttacaggaaaaatctcaaaccctagagaccttaaaaggattcttgagacgggctcaaaatgagtttggcttaaggatcaagacaataaaaagcgacaacgggacggagttcatgaactctcaaatcgaaggtgttcttgaggaagagggcatcaagcatgagttct

SEQ ID NO: 36472 - DNA, 453 bp, Zea mays
  unsure (1)..(453): unsure at all n locations
ctcgtgccggatcttaagcacctgagctcagctgatcattgatagagaactctcattgtaaacgatttgaggacctttcttttgtttctttttctgagtttcaatttaaaattaatagcgtcttctcttctcttaagacaatattcctgtgtagatgcttaatttaattcaaggctccatatttatcatttagttattttagaaaaaataatttaaaaggtaggaagatctttactaaaggacattntaattcacatcttttgagtaattcttctaaatcccaaaatataattttacggtgttacagtggagcgtcttgccaaggagggaggtcaaggtcaccggcgccaccaccttgcattggttgtcaccaccattatacccctgcaaaagagaaggctcagcccctacacccggtggggtgccatggttatctgacgccatggatgaagc

SEQ ID NO: 36473 - DNA, 442 bp, Zea mays
  unsure (1)..(442): unsure at all n locations
cggaccttaagcacctgggctgcagcttatagcttattttgtttctagactctcgattataatatcgntctttttgtcttcgaggtcttgctgcattctcaatgccttgcttagcaacatactctgtagaaataaaccttcatcagcaaatttgcttcatcacaaaaataaaaagaaaattttgcttcatcacaaaaaatttaccttgaagttggaataaaataaactgccgacgatatgttgtcaccggtagccgctaatatcagcatcgagcttcgggaaaccgacactctttgatagagcgccgattatatttgccctagtgcggtcgcgaatgcatcctaaggccccttcatcgatcccaccaaagagcatggctcctggctggtagccacaggatataccatactcttgtagcttcttcttttcggctccggtattc

SEQ ID NO: 36474 - DNA, 226 bp, Zea mays
actttttttttttgagcaactcgttatacaatactttggtacattgtcctgcccctactgaaatgggtatcaataactgatgcaaattgtactaattaccagactaacgtatcagattgttatggatagatatgtaaaatactttatgagatgatagattaatggaccctgtcagaataatctctaattctgaaatggtaagaaaatactattcaataacttacaa

SEQ ID NO: 36475 - DNA, 404 bp, Zea mays
  unsure (1)..(404): unsure at all n locations
agctgtaaatattatttatgaagccttgggtatatgttggcatgattgaccatgtttggtacctagaacccaaaaatcaccaaacttatgtatgattatatatatagaaaacaaagaagagatagaagttgaagaagccaggactacaccaccaccacctgaagaaccccaggccgggaactgcttttatttngacatctgtgcagcagagcctgactcacctataacacaaggcaagccccggtgcatttgccacctccttgctattttaaattctttctcacttacttgatgcattaggtgataggtgttgtgtgcgaaaccagttgctgcatttccttccttgaggatttgattacttttccttaaatcccctgttatacaaaaagggttttcttatgctt

SEQ ID NO: 36476 - DNA, 424 bp, Zea mays
  unsure (1)..(424): unsure at all n locations
agcttagctgtattngataatcttccaggacttctgacaggctcccttgttgtctgactgtcaggttcagcaggttgacctaagtgtgtcttttttgcttggctagttgcagatactggatggctgactgtttagccaaaagaaacttgcctcatccagctcgctgtctattatgtgatcaggaaaaagaaaacaacaaccatttggtctttcacgccgacaagccatgtagaagctcaaacaaacgggaccaacttaataatggctttatggatgcctattttcacacaatcgaatatgtctacagctaaataaataaacttcacactaatcaggttgctttcaaagagcaagatgtcgtattgcgattgcggatacgcaaagtgcatatctcttgttctttgtttcagggaaagaaaaaaac

SEQ ID NO: 36477 - DNA, 420 bp, Zea mays
  unsure (1)..(420): unsure at all n locations
agcttctgctcatctcccggcagacagaaatcttcttgctgtctgggagacaatacaagaaatcctcttctccgctgccgttgaatactaatacccnctttggatatttcagcttctgggcatagtgttgggcttctcgttcttcttctttagagagcttttttcctgaagcatgacggataatatattcaatattttctttcaaagcttcgggataaggagcggcagctttttcagacaaaatctgttctatagcttctccctccgctgccttttctccaatttccaaggatttctcattggtgggctctgaaggcccagcttcngcatcggcccgactcattgaagcttcgacttcggtcggttttgtctcggtttcaatttgtgttttcgaagccttggcaattttttctggagtag

SEQ ID NO: 36478 - DNA, 188 bp, Zea mays
  unsure (1)..(188): unsure at all n locations
ctacagcgtatgtgcaactataatgagaagaacaataccagcacgataattactgggtagtctattatcctacacgctcaatgnggctctcgcatgatgtgtatttacaaagaaggttttcgacttcgtaagcttttatgccagctgatcgtatctaacaataatactgcaggtactatgggctctct

SEQ ID NO: 36479 - DNA, 418 bp, Zea mays
agcttctgctccatctatgttatggattgctttttagtctgaccaatttcctttcgcccttctggcagcttcctgacttccatgaatagcaatgggcccttggtccgaaggtatcttcatgcaaagatatgctagatgaatgattgcctccaagacattgagagtaccacgaccaatgattgcattggtagggtattccatatcaacaatatcaaatacaacttgttcagtccttgtgttgttaatgaatccgaaggttattggcattgtgatttttccaagtgctacaatttgccttcctccgaagccacaaaggggatgtgtggcatcatgaaatttatcctcgggctcttgcatctgtctgaaggccttaccaaatatgatatcagctgcgctgcctgtatcaacacaaacatta

SEQ ID NO: 36480 - DNA, 184 bp, Zea mays
agcttctgacatgtgggccctcctgggtgtccgtgtgcacaccggacagctactgttccttgtccggtgtgccagtatgggcacgcctgccatctgtgcgcgcagagcgcgcattaaatgcgcggcagagagccgttggcgcggaggtagccgttgctccgtggatgcaccagtattatttata

SEQ ID NO: 36481 - DNA, 130 bp, Zea mays
tactgcggttcacgctggactcacgactgtgtgctctcaataatgtcgaactatttgcaacatcacactcctgctgacaacagatagctctactcgtgtgcttcactcgaacacaaatgtgtagtatcta

SEQ ID NO: 36482 - DNA, 363 bp, Zea mays
atcctcatagtcacctgcggcatgaagcttggcacacctccgtgaggctccccgagcaaggaatcggagtttccttcgccggagaagccagtccacgctcgtcggagctctcacccccgccggagcacgtggaccgggtaagccactccaccatccttcgattccttgtgcacacagtcgttgcgtgaccccgtgatgctaaccgtgccctcggattgcgccagttcgccgtagtttggccggtatactcgccgccgacgaggacacccgcctgcacgcgtggaccgggcgattccggccacctccgacgccgagccgtacctcgacgtgaccgccagagtctccccaagccgaccccaccct

SEQ ID NO: 36483 - DNA, 238 bp, Zea mays
tagtgcagctgacacgctacgagcaaaactacgctcgttcgcgcgcggacacatcaggagtcgcgatcttcctatgttttctgctccggacctctgactattgatgaacattgcggacagcgctctgcgcacacatccgctggccgtgacgacgactcgcatttcacgggtcgacaccgtggacccggactcctacctggattacgacagtgtgcggagcctcgctttctccgcgtct

SEQ ID NO: 36484 - DNA, 435 bp, Zea mays
  unsure (1)..(435): unsure at all n locations
agcttcggtgatggtatatatatttggcaggataacagtgcaaatagcaatgaatgctgtggtaacttcacacctactcgtctgtttatatagtgctgcangtaagaaggcgaagcgccagagtttttacaccaggcgcacacccgcttgcgctcgctgcgcagtggaccgcagggacaaacagtaaactctgcaaggtgggaccgctacgtgctgggaaattaaatcgtttctcggcaacgagctcagggaaggtgttttttggaccttcggctccccgaagcttaagagacttttttcacggatcaagctcgttacgaaaaacgatctagcaccgcgaaaggggctactgttgggtctatgcttcgtcgccgaaggtcttcaagggagaagctcaaaagatacaaaggttgacacaacgccgaagctgtgaac

SEQ ID NO: 36485 - DNA, 307 bp, Zea mays
  unsure (1)..(307): unsure at all n locations
agcttccaaagagagatcacattntaggactatcaaatgnnnnntntgagaanaacaggatgttgcgcgcatgtcaagcatggaatcaagttgtagtttatcattcacactatatcattatggcgaccgacaggtcacttgagctactccacatggatctattcggcctgattgcttatatatagcatcggcgggagtaagtattggcttcgtattgtggattattattctcgctttattatggtattctccttgcctgaaaaatcttcaaacctcacagaccttacagagatttttaatacgggct

SEQ ID NO: 36486 - DNA, 91 bp, Zea mays
caggctagcacttgtatataaatcacaattactgcctctacctccttaagcttgatatactttttaaacatacccattgagaaaacatgta

SEQ ID NO: 36487 - DNA, 429 bp, Zea mays
  unsure (1)..(429): unsure at all n locations
agcttttaanaacttggctctattntttgcatgacaaatattcgaatgaagttttgctttcatattttaccactctcccttagaaaatttctctgaagagttatcctatataccatgccaaaagcttgacataacctatcaaactttgtcttgtttaaactctttgtaaaatgtcggcatttcaatcacaaatatttctgggtaccattttgatatatcattgtaagaaccatttctcttatatatgatattagacttccatatgtttggtccttgcctaaaaactggattttttgccaactaaatagaagatggattgttatataaaatccttacttggtagtctataagctaatgaagattctttaataattggtttgagtcaagtgttaaataatggtagagtanggtgcctcttactacaccata

SEQ ID NO: 36488 - DNA, 427 bp, Zea mays
  unsure (1)..(427): unsure at all n locations
agctntcgatatcgtcagaatcttcagacaaatcagctagcattttgtttgtaatcttttttgtgtttgtcttctccatagcctcataaaaaccagctaatgcaggatcaacaaccttctcctcgtcagccatttgatgggcacttgaacaaatgtcgaagctcacaaaacaagtgaaatctgacagagcaagaaaattaaaacttgaaaaataacacaaacgattgagatggcgcaacaaatgctgtcactgtgggtttctatttatatgcccaagcgcattgcaacttgatgggccatacattgactttcgctattctagcgaaggggaggttttttcggaccttcggctaaaggccttcgntcacgtcgcagtctgaaatttgtaatgcaaaacaaataatactacgagggcctaatgtggggg

SEQ ID NO: 36489 - DNA, 385 bp, Zea mays
tctgttcagatcagtgtttacaagtcgtccaacttaatcgcgattagtgggactggtcgcctgaaagagggcgattaagaagacgacgcgattaaggtttctagtcgtcctagtcgtctgactagtcgtcgacctgggcaattagtcatctagtcgaacactttctggtcgttttttgtcgttgcagttttggtactgggcttcactcttggttttggcccatctacagtagcccgccccttcaaaacccctcccagccgcaaaaaaccatactcctctcctttgtccttgccgacgtctctgctccagccttcaagtgctccagccgtccagcggcgtccagtactccagtgctccggcgtctgtcagctactcaactaatcaa

SEQ ID NO: 36490 - DNA, 244 bp, Zea mays
tcttctttacaagatcctaaaactctatatgggctggcattctatagaattaactcaataccactctgaacactactgaaaagtgtttcttagccaatagtaatgcacactctgactactaactatactgttgcttccaggcattcctaccctgttgtagttcagtatggttgttaggaagactaccctaagtaactatactggttttggcgtcccacctagaccactgtataactcacctgta

SEQ ID NO: 36491 - DNA, 415 bp, Zea mays
  unsure (1)..(415): unsure at all n locations
agcttgtggaggttcttcatccncacatgtgctaagcggcgatgccacaactagcccatgcaagtcttagccattaagcatgcatctagaccggcctcttcttttgcaaaatcaaccaaataaagtttgccgtctagtacacccttaaaagctagtgaaccatcacaccttctaaagacagacacatctacatttgtgaatagacaattatatcccatattgcataattgactaatagataacaaattatatccaagcgactcaactaaaaacacattagaaatagagtgctcggatgaaatagcaattttacctaaccttttaccttgccttggttcccatcaccgaatattattgaatcttggggatccttgttcttgacgtaggaagacaacatccttttttcccccgtcat

SEQ ID NO: 36492 - DNA, 444 bp, Zea mays
  unsure (1)..(444): unsure at all n locations
agcttcagctccatcgatgttatggattgcttttgagtcagtccaattaccttcggcctttcttgcagcttcctgacttacatggatagcgatgggtccctgatccgaaggtatcttcatgcaaagataggcaggatgaaggattgcttcgaaggcattgagagtaccacgaccaataattgcattgtaagggtattccatgtcgacaatgtcaaacacaacttgctcagttctagtgttgttgatgaacccaaaggtcactgacatggtgatcttgcccaatgctacaatctgtcttcctccgaagccacagagaggatgtgtagcatcatgaatcttatcttctggctcttgcatttgtctgaaggctntagcaaatatgatgtcagctgcactgcctgtgtcaaccaagacattgtggaccagaaatcctttgataacaca

SEQ ID NO: 36493 - DNA, 415 bp, Zea mays
  unsure (1)..(415): unsure at all n locations
tcataaaatgaccccattatataacttgaatcacttttataccctggaataccagaaaccctaataggaaccctggaaaaccctaaaaccaaaccctatgggcttatgtgcaaaattagtccacttttgggctaaagtgcaaaaaccaagccaaataagtattttaagtcaattggttcacaaatatgtggacttaagagccaaaccctaagttttggacttaaatgcaaaatggacctcatttgagttctatatcaagtctgaaattcagtgataaaggctccactntggggctttgtaactttcaaagcatagggtgtttgccctacgtcaccatatcaaaattgtagcccaattataggagcataactttgcttaagagtgtcagcagagttgttaagataatattggagat

SEQ ID NO: 36494 - DNA, 438 bp, Zea mays
  unsure (1)..(438): unsure at all n locations
agctngagacattattacttaatggtcatgtgttgtccgaaggacacactngaggtcattatatanatgcatcaaagaaccatataaagtattcaatgtccatacaatctctgtaatgaaccacactcgttcctttgaaacaattcaaagaacttaaccaaatcagatcagattttaagataagaggaacttaaaatctcatttccgatgatactcatcaagtatccatcttatgggaaaaacatgaccaatagaactgttcataacttttcatttcatcccaacaatgggatgaccaattcaatcttaccctcatggtaagtaacatcacatgaaaagtttaacaaatgcaacacattgtacgagaggatgtatgtagaatacaatccataagaaatagtttcgagaaacacatgcaatatccatcactatcacctt

SEQ ID NO: 36495 - DNA, 400 bp, Zea mays
  unsure (1)..(400): unsure at all n locations
agctntacctattagaatttactaaagaaaatattgatctagatgcatgtttacttgctaagactaacatgggatggctttaacaccaccgtctggcacatgttggaatgaagaatcttcataagcttctaaagggagaacatgtgttaggactaaccgatgcctgttttgagaaagacagaccttgtgcagcatgtcaagcaggtaaacaggtgggaacaagtcatccaagcaagaatgtgatgatgacatcaagaccactaaagcttctccttatggatctctttgggacaatttcttatcttaccttcgacaaaagtaagaatggcctgtgaatggtggaggactataactggggtattctttttatagggtaaatttgaaacccaagaagctttga

SEQ ID NO: 36496 - DNA, 416 bp, Zea mays
cgctgcatgcaagctccgccagtatccatggagctgcgtctttttactcctcagctttttgtctcggcttcgcatcctgtacgtattaaagtattgtaagcaaaattcaatttcgaacgaagaggtaagtacaaggtatgattttgttatcggcttaagatgactccgagcctcatcaccagctttgcttcgtccaccctttgtccataccaattgtataaatctatattctatgcttccggcaaggatgggaatgttatccaaatctactggtgataagctgaaattgggtctattgataaccttgtcgtgttcgcagccagacttcaagaaggccacagttgtgccccgagaagctaccagggcacagaagtcaccatgtccagctataacttcattaagggcgtaatttcacc

SEQ ID NO: 36497 - DNA, 96 bp, Zea mays
ctgcacgtcagccaccacagctggatatgtgtctagcaaatgtcgcacgtcttacatccttgttcgtgcctctgatagccaggttaataaccaaag

SEQ ID NO: 36498 - DNA, 430 bp, Zea mays
  unsure (1)..(430): unsure at all n locations
catcaagctgtggtaatgggttgcgcatcgccgtctagctangggttcggcgcctcgacgctcggagcgactcgcagcttgtcattgaccaagtcatgaagaactcccactaccacgatcaaaaaatggaggcctactgcgatgaagttcggcgcttggaagacaagttctatgggctagagctcaaccatgttgctcgacggtacaacgagactgcagatgagctggcgagaatagcctcggggcgaacgacagttcccccggacgtcttctctatagacatatatcaaccatccgtcaaaatcaacgatacgcccgatcccgagggagagcggaatggggttgcgccaaaccaagactggcagaccccgtacctggaatatctcctccgaggagagctgcccctcgacaaggccgaagctcggcgact

SEQ ID NO: 36499 - DNA, 437 bp, Zea mays
agcttctaatgttagcatttcacatcgtcagcttgatacggaaagccagatcagaagatggaaagaaaaactgaatccttcttggggttgacactaccctaacacaggctataaatacaaccgacattttaatattcatcggcattgcacaagatataaaatgtagatcgaacaatatgcatatattacattccataataggtcctgcagccttcagaaactcctaacacttcacaattcgtccaacaggtgatccaaccacctaaaaatgtataggaaaattgaaattatttttctgaaaaacttgcaaaaaggaaaaaactaagacacaacatgcttgccatacccacctcagctgacctcaatgatacagagccactcaatagctctgaagtacttttcccattaaccacaatcccctgcataggcactaaaac

SEQ ID NO: 36500 - DNA, 473 bp, Zea mays
  unsure (1)..(473): unsure at all n locations
ctcagctgcacctctgctgtctcttagttatagtgagagtgaggaaaggacagtcgttgtccnactgagtcccaggcatcgcgtacagtatcatganatctctcaattaggccaaaagcctcaaatgaaacgtgactcctaattatatctcaagaccagaataatggcaatgtcagagcttggaagcaactctgcacacacatcaggaaagaactccagcactgactagattgccattgacaacgcccttgtgttgacaataacgccacatgaaggaattttaggtcaacactgataacgctaaccttcatctacttgtgaatgtgtgtctgcaagcttggatagtgagcccacacaccaggcatgagctcttactttactctgcaaaacttatatcctgngactaccagacacagactcttgtatgagatgaacggtatattgtcactgattatattcgcacatctctgtca

SEQ ID NO: 36501 - DNA, 422 bp, Zea mays
  unsure (1)..(422): unsure at all n locations
agcttcacggcctcctatggaagctacctatggcttggattgagcggaggagggcgggaaatggttcngccatgggtggtgtcttcggctgctctggcgggtcgcggagaggttcccaaagctatgggcgacctccgaggagttgggcgcgggacaggggatgcaacggggaagatggctaggcactggggagggctttatagccgtggcgtgggcgtggtcacgggcggccatggacgcgcggtggttcgcgcacgggcgtgctctgagtgcgcccccgattgtcatcccgcgtcgaacacgtgtgtgtttgcttctgccatggttcaacggccgattggagcaccttagcgtgcagatcttggcaaaaccactgtgtacggtctcttccctgcactatantcctacctttttatgtgagt

SEQ ID NO: 36502 - DNA, 340 bp, Zea mays
tagggagctgagtgctagttattcaatgctagcttctcttgtgctagtacgaatcaacctcctggagatctggcacatagcttgtctgtcccacctgtcgctgctgtgaaaacccactggtctacacatttatagactggaccaagctcctgtctaggagtgtgactcttgctgcccaccatcaattgaggttcttactggggtcataagacaaaagatgtcaaatggcccaactatgtaccctttatgcgcagatggcacgggtaccttgatgtgtgactctgggacgctgtttatctctgctgattgattcctgacatggattgaggcatattacttc

SEQ ID NO: 36503 - DNA, 427 bp, Zea mays
agcttgaccgttgtaagcattgtgaagcttctagatatgtcgaggtgacaaatgatgagggtgaattggtagttacgaaggtcgcagctaagcaacttcgtcggttgcctattattcctcggctttcaaggctgttcctcaacaaggaaatagctctgcatatgacgtggccaaagaatggtgtacgtctcgtcactgatccagacataatggtccatccgtcggacggtgatgcgtggaaggcatttgacgagtttgatcccgaatttgcaaacgaccctatgagtgtacggcttggtctatcgacggacggattcacacctttcaataccagtgcaagcccttactcgtgttggcctgtcttcattgtgccatataatcttcctcctgagttggtcaataaagaagagttcatgttccttgcact

SEQ ID NO: 36504 - DNA, 355 bp, Zea mays
agcttaactaacagatgactagataacattgcccaggcagattccattcccttttgttttttcctttttaaaggctatagtcctacagaaatggacaagttgtgaggtaagggtttctagtggctcacacagctgtgcaacccagtaccacgctgccaacaacaaaacaaaagttggaccagcaggatttcctcccctaaatcgaccataaaccacagagaaagagagaaacctgccatctatccacagagaaagaaaaggcagggatgagaatggcgtgtttgccctttttagtggctctgaacaacaagatacaattccttttttatcctctggtctgcatttttttcaacat

SEQ ID NO: 36505 - DNA, 121 bp, Zea mays
  unsure (1)..(121): unsure at all n locations
agctntgtgtggaattgggagaggatntgatcatcnttggtgtgtcttgtattgaatgcctagctcttgtaagtagttggaaggtgaaaaacttggatgacttgaatgtgggtggttgggg

SEQ ID NO: 36506 - DNA, 391 bp, Zea mays
actcactgagtgctatcgtccgcacacttatcgagtattttttattacgaaatttcctactttatgttacataaggatttataagtgttgtcaagatctctaataacctgagatcacagactaaataaaagagttatgagctgaagaaacaaactgacgttgaaaaattgtttaacatgaggtatggcaagtaaccaatacaataacgaactcttacaaactacaaaaactttcactgatgacaaatcattcaaactaaactagcatgcaatcgacatctcacgtgacagctcactatgacatctaaatgactcgtaactgagcctcactatagcagtatcctgcaattatgccaacttgctgtacttcgcactggtttaatgtgcctgaa

SEQ ID NO: 36507 - DNA, 417 bp, Zea mays
  unsure (1)..(417): unsure at all n locations
agcttatgggccaagaataaggaaagcatgttctgtgggaggtttgaaagactgctattaatcaaagtcactctccccccaatgctcagaaatctacttttccacattcctaattntttgttcattntttcctccataaaagcccatttcatattgcttagcttcttacagtcaatgggaattcccaaatatttcattggaaggaaattaacaggacaagtaaaaatatctgagtaaagttctttgacccgtaaagcactaccaaagcagaatatttcacttttgtgaaaattgatttttaatcctgacatctgttcaaaaagaatgagaatggacttcaaatttttggccatttttaaatcatcctgcagcanaaaaattgtgtcatctgcgtattgcagacagatcaccccattt

SEQ ID NO: 36508 - DNA, 446 bp, Zea mays
  unsure (1)..(446): unsure at all n locations
agctttagctagctaaagtatagttcanaatattagctagcagtgatatgtttagttcttagatagtggactagttaatacaaaaaggcacgagtatctttttgatttgacgtgactcaagattagttcatgtctcatgggatatttaaattcataatattaaatatagtctaagtataaaactaattacatatataaagactaaacgacgagtcaaaattattaagcctaattaatctatgattagcaaattattatagatcaattaagcttaagacttgtcttgccgtatagttcttatacatataattagttttatagttagactatatttaatagttctaactagtattcaaacaactgatgtgatagaactaaaatttatagctaaaatntatagctaaaacaactgatgtgtaaagaacctatgaattttcttgtgatat

SEQ ID NO: 36509 - DNA, 383 bp, Zea mays
  unsure (1)..(383): unsure at all n locations
tgcaagcttgcacacatagctcttttgaataccgtttatcatatctcttttatatgctatgactaatgtgttntcaagtttatttcaaaccaagtcataggtatattgaaagggaattggagtcttcggcgaagataaaggcttccactccgtaactcatacttcgccaccactccgagcaactctctcttctttgggggagaaatgagcatcaaggaaaaggacttcatccttgggggagagagtaaaagctcaaacgcaaaaggacttcgtctttggtataatcttaactcacttatttatgaccaaagaggaagattgcacttcgagggctctattgattccgtttttggcgattcatgccaaanagggggagaaatgag

SEQ ID NO: 36510 - DNA, 410 bp, Zea mays
  unsure (1)..(410): unsure at all n locations
agcttaatgtccctaagagattgtctaactttgttaagggcaaaactcccatggttcatgacaatgaaggctacattntatatcctgctaattatcctgagcacaaaattaggagaatttattctaggaaatcacattctgtttcacatcatgcttttatgtataagaatgaggcttcgagctctaggcaatcaactcatgttaaattgcctaaaaagaaaactcctactgcatcaaatgagcctaacatttcattcaagacttttgatgcatcatatgttttaactaacaaatcaagcaaagtagttgccaaatatgttgggggcaaacacaaggggtcaaagacttgtgtttgggtacccaaggtgcttgtttctaacgtgaaaggacccaagactgtttgggtacct

SEQ ID NO: 36511 - DNA, 437 bp, Zea mays
  unsure (1)..(437): unsure at all n locations
agcttctaaagggagagcacattntaggattaaccaatgttcattttgaaaaagacagggtttgtagcgcatgccaagcaggaaagcaggttggaacccatcatccacacaagaacatcatgacgaccgacaggccgcttgagctactccacatggatctattcggcccgattgcttacataagcatcggcgggagtaagtattgtcttgtaatagtggatgattattctcgcttcacttgggtgttctttttgcaggaaaaatctcatacccaagaaaccttaaagggattcttgagacgagctcaaaatgagttcggcttaaggatcaagaaaattagaagcgacaacggaacggagttcaagaactcacaaatagaaggctttcttgaggaggagggcatcaagcatgagttctcttcttcctacaccccacaa

SEQ ID NO: 36512 - DNA, 402 bp, Zea mays
  unsure (1)..(402): unsure at all n locations
agcttcatcatctgaaagacaattacgctggatgtaggatatgatttcagntctccaatcttcactatgtattggagaaataacaagcactgctctctccatgagttcaaccgaaggagcctttattgtttcaaaaaatacttccgaaggtagagggagcccctgagccgctgatttggctagcagatctgcatgctcattttcacctcttggaatattcctgacagaaaaacctttcgaagaagcctccaaccttcgaactgtatccagatatttttcaagcttcgggtctcttgtcttgctacttttgtctatatggccagaaatgacttgagaatcagttttcaggatggcccttcttattcccattggccttaactttcgaagcccccacaggagtgc

SEQ ID NO: 36513 - DNA, 320 bp, Zea mays
  unsure (1)..(320): unsure at all n locations
tgtggcgcaaccgtgcgtactgatgcgggatgaattcgtccactactcgggaacccctcgatccacgctcgttatacgattcgggccgagcgagcattgcggccgcgcccacgcggactgcacacgtaaggacgagtcgggctcactgcggccacgtcatacacgcgttcatagagaacgacgcaagcggtgcgacgcggccatcaaagcaaaactcaatgttacgtcactctggttaaagacctgctggaaccacactaacattaatccctacttgctctgctctnatactctcaaactaaacttactattgcgggtcc

SEQ ID NO: 36514 - DNA, 365 bp, Zea mays
  unsure (1)..(365): unsure at all n locations
aacagngggaagggagaacggaagatataaccatagttctgatattaacagcatatccccaaggattactgaaaaaataatatggtagagtacagagcaaccccatgttcaagactcacctcaatgcgcccaggcattatgggctttccatacaggagctctgcaagaatgcatccagcacttcacaaatcaacacctacactatactcagtggcaccaagtaacaattctggtggacggtaccatagcgtgaccactcggctcgtcattggtcgcttatgtcgggatcatagaatgttgccaccccataatccgcaatcttaagaatcccattattatccaacaacaagtttgaccccttgata

SEQ ID NO: 36515 - DNA, 386 bp, Zea mays
  unsure (1)..(386): unsure at all n locations
agcttgcattggatgctgtatcatgttcacttttccattgncgncggatccaaagaagaacctagctagggacaaacaaaacaaccgtacgtacgtaataaatcattgttacagctgtttccggtagtgtgtaacagagaagatataaccaataacaacaactgtggactcatgtttacaactctatgtactacatgctagctgtgtgtgcctaaccgtagaccgtacgtagtaccctatacgcgatctaaccacgcatgctcgacagagaacgatcaccgaacaaacaagcagtagtgcatacgctaatacaatgatacctgtgtcccggtaccgtgtacgtaccggcggccggcgggaggcaaagacaggatggttcatgcatg

SEQ ID NO: 36516 - DNA, 292 bp, Zea mays
agtattgaaatgttttcctgcccagaacagtggcctctcccaactagcacgcgcgtgcttcctgtattgcacgtactacatgggagaatgctgaaggggaattctctggtttttcgaatcacaaactaggttgacggtaagatgttgtaaataacaccgcggtaactcatagtctgcgagaaactgattttctcccaacaatggatgagaaatatttgctgcagctctgtagtcaatcgacgttggcagcacaatgctgtcctacgttttccaatctaaactttactcacga

SEQ ID NO: 36517 - DNA, 429 bp, Zea mays
agcttaaatgttcaaaatcaagaacttcaagtgcaacttgaaaattgcaagaacatcaatgcctcatctttagtgattgaatctaagtctagctccttaaatgataatttttgcaaacattgtgccaaatatcatgcttcttgttgtctaacgaaccatgcaaggaagaatagcccataggtgaaggtcaaaggaatattgaaaagatgctctagcaatgatgggttaaagaaagttgaacccaagtacaagtccctaaagcccaacaatggaaggagggggcttgggttcaactcatccaaggaaaaccctatcacagtgcataaggggtggagatcccccaagttcatagagggaaccaccctatatgatgccttggggaggattcactcctcaaatgacaagtcacctcaagtaaaggttaacttg

SEQ ID NO: 36518 - DNA, 282 bp, Zea mays
tgcaaccaccgtcgaatgcttgctgatgaggcacctacgcaactactacggccgtcggagaatccatccttcaatttggttgtcgattagtttggggttatggtttgctccaatcctgatgctcacagggccttgacagaagtagagaaaacatcggggccggtgaacactgttgccttgacagactgaccgggttggcttgacaaccgctagcatgcggattttatctttggaacaattactttttactttctgactagatctccaagcgaatggttattg

SEQ ID NO: 36519 - DNA, 428 bp, Zea mays
gccgcatcttaagtcactgcagctgcaacttgaatcttgaatttaacaagctctttttgtacctactttgtcaaagaaaaaacctccgaagaataaagcttttcattttccaaattcagaaatatatggccagagtacgttctactggtatggttgagcatgaggggggcgaatctgaatgttcggaaacttgttctcatcttcaaacgatgcaaagatccagactggtaatcttggaaaagattctccgtgatgatgctgatcatccgaacacttcattgtcgaagcaaaataacaatatattgaggaaactgatcccgaagatgaatatcgcattgccatgccaagcaagcctcgccacttggattttgaaagtctaatgtttgaaggctgatccttccagatggtaagtccgtctttcttatgaa

SEQ ID NO: 36520 - DNA, 110 bp, Zea mays
ttgtacacctatggtcactgcaggtagctctaagatgatggcctttaaacgcaaaatgaatggctgagtacttagttccattcagaaactcatgtcaagtgtctctcatt

SEQ ID NO: 36521 - DNA, 428 bp, Zea mays
  unsure (1)..(428): unsure at all n locations
agcttctaaagggtgaacacattntaggactaaccaatgttcattttgagaaagacaggatttgtagcgcatgtcaggcaggaaagcaagttggagcccatcatccacacaagaacatcatgacgaccgacaggccgcttgagctactccacatggatctattcggcccgattgcttacataagtatcggcgggagtaagtattgtcttgttattgtggatgattattctcgcttcacttgggtattctttttacaggaaaaatctcaaacccaagagactttaaaaggattcttgagacgggctcaaaatgagttcggcttaaggatcaagaaaataagaagcgacaatgggacggagttcaagaactctcatactgaaagcttccttgaggaggagggcatcaagcatgagttctcttctccctac

SEQ ID NO: 36522 - DNA, 408 bp, Zea mays
  unsure (1)..(408): unsure at all n locations
gctntgttcagacaagtgtagtctacacacattcgccatttccctcctttctttctcacaagcacagggttggcaagccattcgggatggaatacctctttgatgaaccctgctgccatcagcttgtggatctcctcgcctatggctctacgcttttcttcgtcgaatcggcgcagaggctgcttcatgggtcgggctccagctcggatatccagtgagtgctcggcgacctccctcggtatgccaggcatgtctgagggactccacgcaaagacttcggcgtttgcgcggagaaagtcgacgagcatcgcttcctatttggggtcgagctcggagccgatccggatctgcttggaggcgtcgttgctgggtcaagagggacagacttaaccgtctctgctggctcga

SEQ ID NO: 36523 - DNA, 99 bp, Zea mays
agcttgagaatggcttcttgtctcctgaagtgctccgagacttgacggccaccgttgacaaccgtgtgtcatcgtgtttctctctcaacttatatatat

SEQ ID NO: 36524 - DNA, 448 bp, Zea mays
  unsure (1)..(448): unsure at all n locations
tgcaagctttaagctcttngacgatagaaccactttatctagttntagcaaagatgcaataatgcatgagtgaaattttaagaggttaaactaggtatgaagcagggataaatgcaaaggacatgctttctcttccttttacacaagatatataaagagagtgtagaaaaggaagatttaagtacaagcttaaatgaaaaggagacagttttacctttntgtacctatacatagggacgctctcttcattgtgctttgtccttagtcttagatgcttaagacctattcttaatgacaatatatgaaaatattttgcacaagggagagttctacaactagtgatcttttcaagttattgttggcatatatcaaatggatcacaagttgcataaatgtatcatgaattctccttttaacttagtgcatatcaagagagatatcgattgat

SEQ ID NO: 36525 - DNA, 301 bp, Zea mays
  unsure (1)..(301): unsure at all n locations
catctcactatacggtaggctgaaccatgaacagtatatttgaattctcccgatacaaaaaagctctgtgtcaagccttcaaaacagagggccgtttctatgataaaactattacttgctgatgcagctaccacactggaacaaatatgcnatacaggtttacttaaattataaatgagttaactgataatgcaatgtatccatattgatatattcagaacatcaagttctactagtatctgattctttgactagctgtacatatgatattttctcgggacattgttactctctatcgcta

SEQ ID NO: 36526 - DNA, 443 bp, Zea mays
agcttccaagagagttgagcgtgagtacatcattgtgttctaaatgtctcaactctatccagcccaataccccaggggtgcaaaagctaagctagctgcgaggagtccgactatccaacttcttagcctatcctgaacacctagtgagcgaacgaagcaacactcgactcgggggaaagtggtcttcccgagccagcagtgtccacactggaggcaagctcatcttctccctcaatgtcgacgtccttcgtggccttctggtcctggatcttctggtgatgcatgtccaggtgctcgttaacctcagcgagctgctgctgagtggtaatgagctgatcctctaaaatcttgatggtgttctacttggtgcccacacagctctccaatatctgaatatcagaggatagcttgtccacctggaagtacttctccaccatttattg

SEQ ID NO: 36527 - DNA, 433 bp, Zea mays
  unsure (1)..(433): unsure at all n locations
agctnggacgcgctgttcttgccgagagcttcttttggacatgctcacatgcatgcgtggtctacctaccacacaacatgcaatgcaagatactggcgcttctttactcgggatagaagtaaaggttcgtgtacgatcagtctagtcaactattacgatcgagcgacgacgacatgcgtgcgagggcccaagcaagcaaggagagtgtgcatctgcatggcatatattgtacgcgggcaccggaacaacaaacacacgacgacacacgacatctatggcgaccaacattgcccggtgctggtaatcaaaacgggatgtccccatgtgcgtatatatacacgctcgtgcagcagcactatgggcgcataagataagttttttactcgtgtcggccaaattaagacatgcgctacacgcctacacgtacgtacac

SEQ ID NO: 36528 - DNA, 367 bp, Zea mays
acccctgctgctgtgtgaagatatagcataaccaaaggtgctattgggctcgcaattatctgaagatcacgagaaaaccttgattaggtttctattctacaataaagatgtttttgcatggtcagccaatgatctatgtggagtgaatcgggatgatattgaacattcgctcaatattgacccatccttcagaccccgcaagcagaggcttcggaaaatgtctgatgacaaggcctaaggggctcgcaacgaagtaaaaacactcctaagtgctggagttatcacagaagtgaagcattcacaatggctagctaacactgttattgtgaagaacgccaatggaaagaggagaatgtgtattgatttc

SEQ ID NO: 36529 - DNA, 436 bp, Zea mays
tgcaagcttatgctctcatcagattgctatattgttgtctgtgattccgtatgcaggatcttatgtgttgctacctttacgatgcacgcgggtttttggtcgcagttatttactaagtaagacaccttgcggtgaccattaaagagtaaccaatcaccctgggtaggtcaatttttatctgcaagaactgatgaggccgcttggtatgagtaaatctcttttcctgggaacgattgttggttagcgccgctactgtatgtatattgagataccttaacgattggtcttttggctgccatttggatacatgtatttgtatttggaggcataaatattcggtaatttgtggtatgactagtgtattgactattgaattatgagaagagctgctttagttgtaagatcacttgacccatcccaaaatttccacaaaaat

SEQ ID NO: 36530 - DNA, 373 bp, Zea mays
  unsure (1)..(373): unsure at all n locations
gctatctgggagacagtacaaaaaatgttcttctctgctgccgtgtaacactaatgcccccttcagatatttaagcttctgggcatagagttgagcttctcgctcttcttctatagaagagtcttttcccgaagcatgacggatgatatattcaatactttcttttaagctncgggagcaggagcagcaactttttcaggcaaagtctgtgctatagcctctttctctgctccctctcttaaatttccgaggggtttttctcagcaggctctgaaggcccagcttcggcactagcctggctcacagcagnttcaactttggcccggtttggttcagcttcaatttgcattttcgaagcctccgcaatttccct

SEQ ID NO: 36531 - DNA, 154 bp, Zea mays
actagttgtagcgcctccaaggccccatgggtgttttgtttttctgcctctgcaagtggcgggtttggttcgtggtaccgctgctaaatcgggcatgctttaggtatgtcttgctgatggatccctggttatgatcatgcgtctttgctaaact

SEQ ID NO: 36532 - DNA, 328 bp, Zea mays
actggtttcagtgtgacacaagaaaaaataaaaaacaaaattaaaacataagaatcttggaagttatggtgtcgaatagaaacaatacaagacgactgctctggactctggaggccatttttgataatacacaaatatatactaaaaggaagatgctttcaagtgctaacagattttatttatcatcgtaaggaaggaagaaagaaagaaagaatgatactccactccagtggattacagtgacgaatggcaggcaccctgcagtgctggctgcaaacaataattgttactgctgcgccatcggcctgtggcaaacttgcagtggaag

SEQ ID NO: 36533 - DNA, 426 bp, Zea mays
agcttcttcaccacgtgttcgtatatatcttgtagaagcagagcaaggcatcttctccttaattgactttgtttgttgtacccaaacaatttactttttgatcctgtaacttgtttctaaaacaaagattggcctttcttagggcggtggaggtcaccacatgataatgttctgaccaattgattactactgcaagaatgaggttcatatgagtttaaactatgaattactaccgtctgagctatatcgagcatgctgtgatcatccactactctactatgagagtatgacaacgtatcatacttttcactaagagcaagattttctaaattcattgtgtctactggacttataagcatagaattctcagctttaagttgagcgacattagatagaacgtcatcattattactttgctcaattaac

SEQ ID NO: 36534 - DNA, 366 bp, Zea mays
  unsure (1)..(366): unsure at all n locations
agctgtttctgcgcatagatgcgtgatcattttattcttcngcatgatcgccttccgacctactcaagcttcgtcttgaccatattcttgtatactcgtgacccgaatccgaagatacctgttcacatatttcacttggagaacattgtcaaatcatgtttttgaggaccttccgaagccgaaggcccccaacaatgtacttgatgaacagtgtgttcatggactacctcgacaagtctgaagtagtgttcattgatgacattcttatatatccctagaatgagcaagagcatgaggagcattngaggaaggtacttcataggctacgagaatgtcatctgttgccaatcttacaagtgcgagtct

SEQ ID NO: 36535 - DNA, 187 bp, Zea mays
acccgccgaagcgagagttgctttttaatcagcacagagaacaattagtaccaggctccctgcggatcaagactcgccagaactttttgtgagcagcaaaacacaactctcgcgataagctatgtatgatgtagcaatcgcaggaaatcaacctaacggcgcagacgaacgcggcctactaggcaac

SEQ ID NO: 36536 - DNA, 391 bp, Zea mays
  unsure (1)..(391): unsure at all n locations
agctttaaaactaaaagctcagtagnattttgtgcgcaagagataaaattgagtaagcaggggcagatggcaagtgcacgtaccaaaatgagtttgcggtatggccgtatatatacgctcggtgcgttgaaagctgaaagaccccacctgtcattgaatgttgctattctagcaaagggaaggtgttttttcggaccttcggcgaaaagccttcgtccatatcgcaatctaaatttattacttcgaacaaattaatattgtgaggggctactgttggggaccttcggcgtccgaaggtcctcaaaaacaggatttaacagtattcctgcagtacaatgtgtaaacaggtaccctcggactaaagtcggcattgcagtggaccggaataata

SEQ ID NO: 36537 - DNA, 315 bp, Zea mays
  unsure (1)..(315): unsure at all n locations
agcttctaaagggagaacacattntangattatactatgttcattntgagaaagacaggatttgtagcgcatgccaagcagggaagcaagttggctctcatcatccgcataagaacataatgacgaccgacaggccactggaactcctacacatggacctattctgcccgatcgcttacataagcatcggcgggagtaagtactgtctagttattgtggatgattattctcgcttcacttgggtattctttttacaggaaaaatccccaacccaagagacctttaagggattcttgagacgggcttcaaatgagt

SEQ ID NO: 36538 - DNA, 225 bp, Zea mays
  unsure (1)..(225): unsure at all n locations
atgcacgggcatctttcttcttgaacttcggattcttcgcacaaaacttcttttaatatgctcactgcttgacatngcngnaacctcttgatcatttctggagtcatctcttcttcttgngcgggcttatacatacctacattgacaatctcccanagactangatgtacaccgattaaatgtgacgtcatcttatctcgccactcgtcatagttcaactcacta

SEQ ID NO: 36539 - DNA, 347 bp, Zea mays
  unsure (1)..(347): unsure at all n locations
agcttacccatgacgaggcatgtgaccagntaaagggtcctcggtcagcaagcctacatcgagatggtccttaaacgacttagatagagacactacaccgagactctcttctcgtgcaagtcacccgcccggtctcagcttaatcatttcaaacccaaagtttggtacctagcagaggtacatcttttctgatgttgaacccatcatggccctgatggatccaccatcaagttttatttttgaaaacatccctcccactttgcagcatcatcttttgtgaaaacaaaacaatttgtttttctagagaaaatctaagcataaagaataccttttgttaacacgaattt

SEQ ID NO: 36540 - DNA, 412 bp, Zea mays
agcttgcatgaagtattgtatataatgaatatataatatcaatgtaataagcaaattttattttgtaggatgagcataacaccatgactggatgtgaacatgtgttaacattaataacaattggtaaccaggtacatattaaaaaatattgttcaattgtctaaaatgaaaatatatatttatgctgcatggaaatgttgatgtaattgggttgggctatataggaggacaacatgagaattcacatgaggttggtgatacaagttctccgtgtcccgtagcacatgaaccaatggaacatattgctgtctccttagaacctaataaggtgagctattgataatgatattactcgatggtttaaaattaatttatgcaaataatgcgttcttaactaaatcataacttctat

SEQ ID NO: 36541 - DNA, 175 bp, Zea mays
actctccatagtctaacaaagatctatgtgagacaagtctcccacttatcttgtttctctttgaccacttggacaaagcaacaaattgtcgttctacctaaacaacaaggtaacctgaatgatctacagttacatagaaattcaggtgtgaaaagacagaagttacaaatacttc

SEQ ID NO: 36542 - DNA, 255 bp, Zea mays
agctttatcaaatggacgtgagaagcgccttcttaatggaccaattatagaagaggtctatgttgagcaacctcccggctttgaagatagtgagtaccctcatcatatctataaactatcaaaggcgctttatgggctcaagcaagtcccctagagcatggtatgaatgcctaagagatgtttttattacataatggtattaaaggcagcaaagtcgatcctactctcttttctcaacctattgcaaatgatatt

SEQ ID NO: 36543 - DNA, 210 bp, Zea mays
aaagaagaaaatcaacacctctttcaaaagcctcaaccacgcctccacaaaaggtaacatccaaggtaatgatcaagccacacttcacattaagaggtgtagtgaatgctttgaagaagggcacttgattaagtcatgtcccttcattaaaaatggcttgattattaaccaggatgaatagacttgttttaaatgctccaagaaaggaca

SEQ ID NO: 36544 - DNA, 409 bp, Zea mays
agcttgactatataagtgtgaacccgtccttctggtcataatataaaatctcaaataataatttaaatatcatattctaaattaatacggtaattttatacagtaatctatgttaacataaattgtctatttagtactaatacaacatgctaattaagatattacgtaataaattattattggatgaacccacgaaccgactcatgagtcacaacgaacgaacgacaaaccgaggtttttttcgagtcacaaaatcagactcagctcaagcccattctaaaagttgagctgcttcgttttttctgcaggcctagtgatgagtcatcatgtggcgggaaacggcaagggtttaacatatcgggcccgactttgtatctaatctttatagtgggcgttaacaaatgtgggc

SEQ ID NO: 36545 - DNA, 242 bp, Zea mays
ccccctttgcatctccataggtatggcatgctggatccttccacttgcgctgttttcatttttactaaatgcttcacgcaactctcatatatgagtgcgtgacatgaactgtgcaattgccaatcgtggctgtcacgtcactgcgcatgtgtggtcacttttttataatcactattttcactgcgacaattctgatatacactctgtttgtgatacaatgtctatttgcagagagatcgtac

SEQ ID NO: 36546 - DNA, 412 bp, Zea mays
  unsure (1)..(412): unsure at all n locations
agcttcgacattattntcaagcatatcatatagttgttccttcatcacaacctctgaaggacataatgaggaatagagaagctactggaaggatcggaaaatgggttgccgagctcaatgaattcactgttgattatgtacatagatcctcaattcagtcccaggcattagcggatttcattactgattggatgccaggggctcagggagaagaagtaacaaaggacgccgaagcctggacagtcttatgtgatggttcttggggaaccttcagcgaaggagcggctgctgttctagtagcgccctctaaagtcaagacatgctacgcagcaaggttggacttcagttgtacaaataatattgctgaatatgaagctcttctgttggggctttggaagctaaaggcaatggg

SEQ ID NO: 36547 - DNA, 382 bp, Zea mays
  unsure (1)..(382): unsure at all n locations
agctggtctaanagaactataaataataaagatatatataaaatatgtntttgcgcattatgctgaagttctatatgtgtatccaaattaagtgtttgaactttaaacttgtgttgatttgaaatttaaatggaaaggaaaatagaaaataagaaataaaagaagggaagaactaagaaaaatactacataaaatagaataaaaatcagaataaacacccttcacacttatataaataaattatacctttcaaactgaggacaagatattcacaaagtttaaactcaaacttgaattcaaattggatttgaaattagagaaaagaaaattctaaattaaaagaaaaagaataaaaaccctaactgggccggctacctagaat

SEQ ID NO: 36548 - DNA, 207 bp, Zea mays
  unsure (1)..(207): unsure at all n locations
taactagctatggttgcgctgncacctgttgcgaatgtggttgtgctcggccacttgcggcgataactcgcgactcaggatggtggcgtaggtatcggcaagggcccctggagttatagccgccggccggcgtctgtcgcagtgcccacgtcctggaagccggccaacggctaacgaggtaccgcgcacactgtccgtgcttgcctg

SEQ ID NO: 36549 - DNA, 289 bp, Zea mays
  unsure (1)..(289): unsure at all n locations
agcttgccgcggacttctagcatcgctaaatcaagccctcatcgattcaatcacactcgaccacaggttctttgctaaatacctatcaccaacccttctacacatgtctgcctcagaatctgcacgctntcaattcactcaaattgtgcatttggccatttgcctaagggacactttgagtgtattctcaacttattagtttgtgctgatcagaatngaactgagactgagaggtccagctttagtaaaccttcctgtttgcgccccanacaaaattaaattttgatgc

SEQ ID NO: 36550 - DNA, 314 bp, Zea mays
agcttatgagcaacatgatcaatccccagcattatctaacacgaaaaaaatgggcaaagttcagacctcagcgccaccaacaacatttagccttccaacatcacctccacattttgttacacgatcaaccctacacatcaaaattaagttaaaggagcaaagagattgccatgagaaaggggaaatgatgtgcttcacgagaaaagaatcttactcctctttacttgcatcaaatcgatgatcagaggataaatggtaattgaaccttcagcttgtagtacacaaccggaattcccaactgatgccacaatgat

SEQ ID NO: 36551 - DNA, 217 bp, Zea mays
cagaaccagggcaatgtaggcatccttctgactcaacagagtggaccccttgagcatcttacccgggctgttatggaggcccccatgttacactgaacattttaacccagtgtaagaaacgcgacagtagtatgcctccaatcggaggttctctccattcaaggtccacccctcttgctaaataaaggtaggtatagtctagaagtactcaatataa

SEQ ID NO: 36552 - DNA, 375 bp, Zea mays
tttccgcatacctctcggctgagcactttctctcggtccattttcctccacccgcggcagacagttgtgcaagacacgacatgcttgcggatctgccaggcgctttcgatggccttcagcctccggaccacgtctcggaggaactctggagggaggctggcccatcggctctcgtcctggtggaccacaacacgcgtgttccggagcttgtgcaccgcgctctgagacctccccctgctatgttgcgccgcggtgtcttcggaaaggcccccggctgcggctgtaacattcacctcaaaattgcccttaacagctgccgatgctgcttcgaccgctggacatgcttcgaacacatttttttctccactacttaac

SEQ ID NO: 36553 - DNA, 386 bp, Zea mays
acgaagtcttcatgttccatattttagttggagaaaaattgtcacaaaccgaaatataagagcttaaagagtatgccaaatcttgcggatataagccaagagcactcctctttggaggtattgatgatgaaaaattggactgtatctggaaccaaactggaactaaggttatctgtactctgtcaaagagtatcggttttccgaagctagaaacggacattatccgctaccgacgacaacatatctgtgatagtttattctattccaatttcaaggtgaactatttttcccctgactcttattgttttggataaagaagacatgtctaacgaagggtgtctttcggccgagtatgctgttaagcaaagctttgatactgcagccag

SEQ ID NO: 36554 - DNA, 408 bp, Zea mays
  unsure (1)..(408): unsure at all n locations
agctttgcctcgggcagactaataccagaattagataacacgcaatgggagtggagatatggcgagagtagcgtgtaccctccgtggcaagaggctggacggtggtgtatcantgctctcagttggcgtgaacctgatctggtcttaagaaccctggtggcgagttgacatatgcaagggttaagtgctacatatgtcgtgtgattggagatccccagctgggtattaatcgattcagatcgccgttacttctcggacatgaagacttggtcactgccctacacgtagcattccagtaaacaagaaaggttgataagaaaatggctagtataggccaagtgcttgaactagggtagaaagaactctaaaattcacgtaatgacttaacttgctaataaaactggattt

SEQ ID NO: 36555 - DNA, 79 bp, Zea mays
gatgagcttcgcaaacaagttcctcgactatgttgcatatcacactttttctggaaatacatcaacaaaagactttctg

SEQ ID NO: 36556 - DNA, 440 bp, Zea mays
  unsure (1)..(440): unsure at all n locations
ctcagctttccttgtcgcatcaactttgacatagaaccactcatatttccagcctgctgcccatttgctacggtgactaattacaggaaacttagtagttntccgataggcgaagttataacaaccaaaattgtcgtgcagtccatctcttctagccttcgtttgataatgcaactcgtgaacccggcaaaagctgtccgcaaatggttccactgcttggcttcggagtgcccagatataaacaataagcctaacgatagcattaggggtcagctgatgaaaatagatgccgaaccttttcaacacctctgcaataatcccatgtagagggaaccttaatccagcctttagaaagcttttgaaaataacaatttcatctttctccggttttggggtagtctcttcttccccgaagcgcaaaagcttcttctgatttcagt

SEQ ID NO: 36557 - DNA, 177 bp, Zea mays
gctcagctggtgaccgtggcgctgatactcactagcaagcgacctgttttgtgtctaccacctcctcacttgaagtctactgtgcatgaaacaaatctgaatctgctgcaactctgcgtgcactgtactcgccgtctcgaacgcaacatgtttgcaaagattctggcagcttatgtt

SEQ ID NO: 36558 - DNA, 453 bp, Zea mays
taagcttagcatcaactgttttcggtgttacaagaatagccttctgcactccgaagcgacaaacaatgttttgccagaaaaatttctggacggtgatcgaagttattgtggctaaaggcttcgcctcaatccacttggaaaagtactgtaccgccaccacaacatattttagatttccttgtgctggtggaagtgggcctagcaaatcgaggccccacctttgcaacggccaggtgggctgtattaactgagtgagagatgaaggttgcttctggtctcttgcacatttttgacagccttcacatttttggactaattctgctgcatccgaagctgccttcggccagtaaaatccttgtcgaaaaacttttcccaacaagggcctagattcaatgtgggatccacacagacctgcatgtatctctttcattaattccataccttcagttcttg

SEQ ID NO: 36559 - DNA, 217 bp, Zea mays
cgctcttttctctacgacctgtgatctaccctaaagatgatgggatcttgatctgggatcgactcttgagacctatacaggggtacatgctctttctgtgtgttgaagctcgaagagatgccatgtgattggaacctctctattttctcctattccttttttacttactacctgctttcttctttctctccctgagatcttccaatatacttctcct

SEQ ID NO: 36560 - DNA, 425 bp, Zea mays
tcatgagtggtagcttcggcatcacgtataagcagcttttgtcgaagctgtttcttcctgcaggaccttcggcgatgaagcatggtcccaacaaccgggtcaaccggtttcaaaaccggttcaaccggtttgcacgagctcaactaaagaatgagatataaaactgaattgatctcgaaatccacccagttaactttggaaatgagatgttctaaatgatccacagggttcaaggtagtagatctaagaagggcacttctcaaaatccacacaccaaaaagatataaaccaatcttccacgcaatggtgagagaacgaagaacacaaacaaacacaatgagcaagaacacaatagacacaagatttatcccgaggttcggtcacaccaccaaggtgccctacttcctcgttgagatgcccacaaa

SEQ ID NO: 36561 - DNA, 366 bp, Zea mays
  unsure (1)..(366): unsure at all n locations
tcgagaaactccgagataatgtcaaggtatataagacaaaagggaaatcttattcgacgaaaaggacaaactgcaaagaactatagacaacctatggggcaaacttgaatgatngtttgatgttgcatcccaatgttgcaaatggctaagagacatctttatgtctatcgctacaccctcgaccgaagctaactttatgcatggggatacaaccagtatgctagaatggattgatgaagaagngaggctttaacaaagtttaaccacctaggagatattgtgcatgattgatcatgaacacaacctaattcttgaaaaacaggtcacacatatcaaggatgttgaaccaactttcaaggtcgaaat

SEQ ID NO: 36562 - DNA, 427 bp, Zea mays
  unsure (1)..(427): unsure at all n locations
atgcgttgtttcttcaatcatagaatctgaacaattgtccttctnctctgcttgattcctcagcctccgaaggctctatgtatttggcttcatccgaagctcgtatacgacggtcgtccgaagcattcttccctgaacacctgcacgttctatccaaaggcaaccttcggcattaaccttgcagtgtacagataacaaaatagaacggttaatgagcgtcntgaggaccttcaggagaaggagacccccaacatatacatacaagaaggatccagatacaacttcagtacttgactccatagtacgaataactcctttatcatggtagtcgtctgctgagaacttgttaaaagagaatggcttaagcttccaagcaattcttataagggtatgatcttgagatgagttctcttctcgtaatagaaat

SEQ ID NO: 36563 - DNA, 324 bp, Zea mays
tgcttgtgttttaaactccttcaaactccgcatgttacacacaatatatcaatatgtaacaacagcacaataatgagccagatagtaaatatacaacttaatacaataagcttgattgacacatcagcagattacactactgtagaacacataataatgttcaattcaccatttatataatttttaagttataacaaccatttcaagttagctctgcatttactccaaaatatttcctgagtaatggtatattaattatggagccagattagacctgctgcggtcctaattagcacttaaaaaagtaatggtatattaattatg

SEQ ID NO: 36564 - DNA, 407 bp, Zea mays
agaggttaacattttaaacaggttagtaggtaaatatataacttctccaaattttcctaaccctagtcaaatagcctaaccatttttcttactattatttagcttttggccaaaactaacattaaatcagaacttttaagttttccacagcaccaagaggttttatatttttctgaaataggttacattaattggagtctgacaaaattggtttgaccaaatttggatgatttaaacagaagttatgcattttcaaagttgctgtccaatttaaaacagatttaattaaggttttctggaaaaacagtttacaccgaggtccctgcgtgtaaacaaaatccaccttcacaaatctacccccacgccattattcccctgtgtctctgacatctcacaaaaccccctga

SEQ ID NO: 36565 - DNA, 310 bp, Zea mays
gactttacaactcgcctgtctgtacctcttcattgaaagtagttggtccaggtgagctatccgcgcatatgctcacatacttggctattctgacgatgatttatctggagacaagaacaagattcatgatttccggcagcccacataagatgaaaccagcgatcttcatctgtctgactctggaaagtttcgggagtcgaccaacattcattagatttatccgtgtatcaactccctctgcatgatgaccctcattccaaaagggggaaaataaatgaacatccttgggagagcaagccttctctcttta

SEQ ID NO: 36566 - DNA, 398 bp, Zea mays
ttctgggacataccttacagagggtgccgaccatgttctcgatgtaacatgcacccgagggaccccgcggtatgatacatgctgattggcggctatgcacggatccagtgtccgtagctgacttgggcaatacagtactgtcatagttttgaagaccctcaaaagaccaatgctccccacatgcttccggttcctaacatacactgcacaatgactaatgcataggtgcacagggaccatcgccactcagccggaagatctgtctagcacctgctctctgctataatatcatcatataatgactagcggggccctccagcttagagcgtagagagcgttatacacgtctcaccacctctgcaatagtaacactgaatatgccctctgcctaatgatct

SEQ ID NO: 36567 - DNA, 351 bp, Zea mays
  unsure (1)..(351): unsure at all n locations
atagaccttgtgcagctcgtcaagcagggtaacaagtgggaggagcgcatcacagcaagaatgtgatgaccacttcaagacccctggagctgctgcatatggacctcttccgacctgtcgcttatctgaacatangagggagtaagtatgggctagttattgttgatgactgttcccgcttcacttgggtgttctttttgcaggataaatctgaaacccaatggaccctcaagcgcttcctcaagagagctcaagatgagtttgagctcaaggtgaagaagataaggagcgacaacgggtccgagttcaagaaccattcagtggaggagttccttgaggaggaagggatca

SEQ ID NO: 36568 - DNA, 246 bp, Zea mays
actgcccgcgaatatacaacacctttttatcccgctaccccgaaaaaacttcggaagaagaaaatattaatgtcccaccctctaataaaagggccatggctttcaccgccacggttcagcgtgaggggggcgaaactgaagctttggagactggtcccaatctccaagccatgcaacgaaccgggctggtgacttcggaaaagataccctgtgatgatgtcaaacctgcacaacaagccattggtg

SEQ ID NO: 36569 - DNA, 442 bp, Zea mays
  unsure (1)..(442): unsure at all n locations
tatagaaagagcacgaaaggagcaacttccggaccttatgacttattatcaaggagccctctggttcaaggatcgcctgtgcgtgccagtgggagaaacacgagagaccctgctcgatgaagcccacaactcancttactctatccacccagggaccaccaagatgtacttagaccttaagaccagatattggtggagagggatgaaaagggagatagcatagtatgtggcccgatgtgacacctgccagcgaacaaaggccgaacatcagaagcctgcaggcctgcttcaacccctcccaatacccgaatggaagtgggaagaaataagcatggatttcgtcaccggactgcccagatcacaaagaggaaatgactccatatgggtaatcatcgaccggctcaccaaggtggcccatttcatttcagtanataccactttt

SEQ ID NO: 36570 - DNA, 462 bp, Zea mays
ttaaaactcaagctgccaaagagtatgcagaccggcgacgacaacccttatgctttctcgtaggagattatgtctacttgaaagtttcaccaatgaaaggcgtatcgcgtttcgggattaaagggaagcttgcacccatgtacattgtgccattccctatacttgagcaatgtggaccattggcatatcgactccaactccccgagacattgtctgctatgcataatgtgctccacgtgtcacaattgaaaaagtgtcttccgattcccgaacgaaccgctgaggtaacagatgttgtccttgaaccaaacttgacatattccgaacatcccattcgagtcttggaccaaaaggacaggcgtacccgaagaaaaactatcaagttctataagatacagtggaaccaacattcccaagatgaagctacatgggaaactctagacattttagataagaattccc

SEQ ID NO: 36571 - DNA, 215 bp, Zea mays
tacgtctgttctcacagcactctacttctggtcatacacactcacatgcctgccaacatacacaccaaggactcgctacacactacttggacattgactcacataatcttctatcagctttctgaaaccatgttgcaagaactcattgttatttattttgttatatcctaaaacagcagagtactactgtgaaaattgcctatatggaatagtta

SEQ ID NO: 36572 - DNA, 410 bp, Zea mays
  unsure (1)..(410): unsure at all n locations
ccacccatattagtcttagcaattaagcaagtatcgagttcagctctattaaaatcaactatgtatagctgaccctttaatactcccttaaatgctactgaatcgtcactttttctaaagacagtaacacctatgtccgtaaaaagacagttgtaacccaatttgcgtaactgagaaacagatagcaaattgtaatcttaagaatctacaagaaaaacattggaaatagaatggtcaggtgatatagcaattttaccaagtcctttcaccaaaccttgatttccatccccgaatgtgatagctctttggggatcatcgttnttctcgtatgaggagaacatccttttctcccctattatgtggtttgtgcaaacgctatcaatgatccaacttgagcccccggatgcata

SEQ ID NO: 36573 - DNA, 221 bp, Zea mays
acgggcataggtaacagccactcggacctttgttttgtcaaacccagggacctttgctacttggagccgaaacactcacatgctcaaagaacataccgcctgactatgccaaatatcaccactttttcctcacccactaggtccagtaatataattacaagaggtttgactcctagctttactcacgatgtctaacaataacgaggttggggctcttcaga

SEQ ID NO: 36574 - DNA, 420 bp, Zea mays
  unsure (1)..(420): unsure at all n locations
tcgtgttcagntctgttattttagcttcagcctccgccaatataccttcagttgcttgcagctcaaagttcttcttctcaacagcagctgtttgctcctttattttgctttctaaattttcaattataacttcgtgtttcttgtcttcaaaatcttgctgcattttcaaggctttgctcaacagcatgctctgtacgaaaacaaccttcgttagacatgttttcattatcaaaaacaataaaagttaagggaaaagaagttcactttaaaattagaataaaataaactaccaatgatatgttgtcgtcggtagcggctgatgtctgtttctagcttcggaaaaccgatactctntgacagagtaccgataactttggctccagtttgatctcgaatacaatctaatttttcatcatcaat

SEQ ID NO: 36575 - DNA, 224 bp, Zea mays
atcttctgtacctttgagatttgcaacatgctgcaccacttgcagcaagtaacttcaactaaatatagaataagatctactcgactctattatgcatcgtattatacacatacaaaccactcgacgatatgccctcgcaatcatatccagatatgctgtgaatgataattaattattgctgttgattaattaaaagccacatatctccgccaactcctctaaaa

SEQ ID NO: 36576 - DNA, 365 bp, Zea mays
agcgaagaaaacggccagcgccgggacggaatcgaagacctacgcacacaagcaatgcagaactcatcgaggtccgcatcccacattccaagcccgctagtggcggcgcgggatctcagaataacccccaaaggccgtgatgaaggaacacacatacggtatgctcgaaagcaatggcgaagacccctggaggccattgaaacagcatacaacacctgctccaaatctggatagaggttcttcggaaaaccgagaacatcggaaacaaagaatagaggagactgcgttgacaaatgccctcgaagcttcccctgaacaagcaccgcacctactgcagagtgcgaagctgcacacacagcagcaga

SEQ ID NO: 36577 - DNA, 453 bp, Zea mays
taatgcccctataacactgtctaacatctgtattggctttgctcccacggctcatgataacaagggttacattttataccctgccggctatcccgaacacaaaactatgagaattcactctaggaagtcttactctggctctcatcatgcttttatgtataagagtgaggcatctagttctaggcaatccactcatgttaaattgcctaagaagaaaacttctactgcatcaaatgaacctaatatttcatttaagacttttgatgcttcatatgttttaactaacaaatcacgcaaagtaattgctaaatatgttggggccaaacacataggctcaaagacttgtgtttgtgtacccaaagtgcttagttctaatgtcataggacccaataccgtttgggtacctaagaacaaggcctatacttgatttgtatgttatgcattcgagggctc

SEQ ID NO: 36578 - DNA, 389 bp, Zea mays
  unsure (1)..(389): unsure at all n locations
ngtgaaaccaatcacaagactattgaagaatgatacttaatccaattgggcttcacagtgtaatgaagcctctgaacaattgaaggtattattaaccactgctccggtgttggctcaaccggatattgaaaaaccctttgatgtgtattgtgacgcatcaggcagtggtctcggctgtgttttaatgcaagaaggccgagtgatagcttatgcttcaaggcagttgcgccggcatgaggaacattatccaactcatgatctggagctagctgcagtggttcatgccctaaaaatttggcatcattatctgctgggtaatatctgtcacacttatacagatcattaaagcttgaagtatatcttcacccagtcagagttgaacatgagac

SEQ ID NO: 36579 - DNA, 386 bp, Zea mays
cttcacccttctgtcaggttattgacttccatagacggcaatgggcccttgttccaagcatcttcatgcataaggatgatggatgaagtattgcttctaaagcacttaaaggttcttgaccaatgattgccttgcacaagtattccatgtcaacaatgtcataaacaacttgctcagctcttgtgttgtggacataaccgaatgtcactaacattgtgaatttgccaagggccacaatctgccgtacttccaagactcaaaaagggggtgtatcatcataaatcttgtgctctggtcttgcacctgcctgaaagacttgcaaatataatgtccctgcactgtctgtgtcaaccaaacattatgaccaaaaatcccttgatgacaca

SEQ ID NO: 36580 - DNA, 218 bp, Zea mays
tgcgctgcactgcgtatacctaagtggacatctcttaacaccttcttttatgtatttctatgctgtgctacgagcattacaaatactaacacatgaaaaggctttaatgattctacttactgctgtcatccatatattgatctttgcggagacatttccccatgtgctcgataatcatacccgtctacgagaatagtggtagccacttgggctcagag

SEQ ID NO: 36581 - DNA, 449 bp, Zea mays
  unsure (1)..(449): unsure at all n locations
tctaaagggagaancacatttaggattaacaaatgttcattttgagaaagacaggatttgtagcgcatgtcaagccgggaagcaagttggaacccaacatccacacaagaacatcatgacgaccgacaggccgcttgagctactccacatggatctatttggcccgattgcttacataagcatcggcgggagtaagtattgtcttgtaatagtggatgattattctcgcttcacttgggtgttctttttgcaggaaaaatctcaaacccaagagaccttaaagggattcttaagacgggctcaaaatgagttcggcttaaggatcaagaaaattagaagcgacaacgggacggagttcaagaactctcanattgaaggcttccttgaggaggagggcatcaagcatgagttctcttctccctacactccacaacaaaatggtgtattgg

SEQ ID NO: 36582 - DNA, 425 bp, Zea mays
agagcacatattatggctcaccaatgttcatttttagaaagacagggtttgtagcgcatgccaagcacgaaagcatatggtgcccatcatccacactagaacatcatgacgaccgacaggccgcttgagctactccacatggatctattcagcccgattgcttacataagcatcggcgggagtaagtattgtcttgtaatagtggatgattattctcgcttcacttgggtattctttttgcaggaaaaatctcaaacccaagagaccttaaagggattcttgagacgtgctcaaaatgagtttggcttaaggatcaagaaaattagaagcgacaacgggacggagttcaagaactcacatattgaaggcttctctgatgaggagggcatcaagcatgagttctcttctctctacacgccacaaca

SEQ ID NO: 36583 - DNA, 374 bp, Zea mays
gcgctgcactgatgtgtaatctgatgctaggtgctacctataaaccgctatgtatgaaactactggcaactgcagctagttagcttacactaatctacttatcatatgtctgaaatctgagactgactagggagataaataatatatatacctatcaccaatcaattatttacatttttaaatataccatgcaaattaaaattgaggcaccttcacaggtattgggtaattggatgtgtggactaaaaataaaacattcttttgctacgatcggtgcgactgtcatgcggccgaccccaaacttcttccgcggtacgaatctccgcgggcgagacgatgcgcccatttaaagctccacacaaattcaccttttt

SEQ ID NO: 36584 - DNA, 331 bp, Zea mays
tacgtgaagccctgccgcgagctatgtgttggacgacgcaaactctgtgcttggcccagcgtagaactccaccgccgtcgatggtataatggtgctatttttatgtcaggacctacgtgacatcatctgacgtgggttcacgcctccaaaagaattccaacaagatatagagaagcaagcctttgatctatgttctaggggtcagcgaaagggcagaacagcattatcaccggctaaacggagttctactaatatgaaaagatcccaataattgtggatggaaaaagagtgaagcttcgtgctatactcatcatctggtcgagcgaatact

SEQ ID NO: 36585 - DNA, 348 bp, Zea mays
acctatgctactataaagagcagtacgacgagagtcctgttgctatcactaggggaagatgcagcagtaagaggtgcgcttttgcccggcagagggaaaacaccccactgccgggatatgccctgggcgatgtcgcgcgggaggatcgcctcggggcaggcacactgacgtatgaaatgactggcgggaatatctgtcggcaaagaaacggccttaaagcggagacagcaccgtcgtggtgtccggagagagcccccatgtcgccaggggataaccccaagaaatgcattcacaggtattattatttttgacaattgggttatttcccacttaatacacttttagaac

SEQ ID NO: 36586 - DNA, 457 bp, Zea mays
  unsure (1)..(457): unsure at all n locations
ntgtaggagaaagagatggtatgaacctttggggcgcttgatggagttaaatcaattcttatcaactcaagctatcaatcttcaaatgatctacatattcaagattgacccaaggttacttcaatttattgtattcaaaactcatatcatctcgggaagatattaatgttgtaggaaataaagaatcatcatgtgcggaatatcaaagcctacaacatggaggaaaatcaaaggatggtaacatttatattcttaagtgcaattatcttaaattgatgtgtgtcttgtgtagtcacatagaaatagaaagcacttaagcatgttgtaaaattatgtcatcattctttgaagaaattcctctcgtatggtagattgtgttttgatcaattctatattatgacaatctacatgctttaaattattgcaagttctcatggcatgtntttacattagttat

SEQ ID NO: 36587 - DNA, 372 bp, Zea mays
ctatgccaaaagtcactatgatgagcaccatctttatctttattccaagtgggcgactgggcatggctgcgactgcttcacaatcaagcacgcacactggtaggcaacaagaaaagcaaactgggaccacgatatgcaggtccattccagatcctcgaacgtgtgggtaatgtggattatcgcctgcaacttccagcagatgcttgcatccatgatgtcttccatgtagggctactcaagcccttcaaaggcgatacatcaacagctactgcatcactgtcagatatggacaaagggcggctgctgcccacactagagcgcattctgtgtgaacgtatatgtcaccaagaatggcatgtactggtgcaatgt

SEQ ID NO: 36588 - DNA, 266 bp, Zea mays
atcaaaaattttttgtcacgtttttgggacctaccagaggaacctagactgactgtgctgcttcgcctcctttactaagagagatgtatatgtgaattccctatgggcttgcgaagtgaccagactacctctaaagtaatattactaggaaatagcaccgtcatcaactcatggatctaggagacaccattcctctccccgaatgggaaagaacgatatattgagcactgaataaccacgttgcgacgaacgtgcccacagtctct

SEQ ID NO: 36589 - DNA, 442 bp, Zea mays
  unsure (1)..(442): unsure at all n locations
ntagtaggatgtgtattaccaacttgcttcccatctttacatgcactacaaggcttgtccttttcaaataccacatcctttaatcctctagccatgtccttctttaataccttcttgagtgtgctcatcccaacatgtgcaagcctcctatgccaaagccattcaagtgaagctttggtgaagaggcaagttcttaagtttgcatcaccattgattcatcatccatctttgatacaataacctctgttggagtgaataaacattgaagtccaagatcacagagttgacctactgataataaattgaagctcaaaggtgcaaccaagagaacatctganattgataatcatttgaaattgccaccttgccaaatccttgcactttcccttttgaattgtctccaaatgtgaatttgtcttgtccatcaacaatctcatcaagt

SEQ ID NO: 36590 - DNA, 404 bp, Zea mays
  unsure (1)..(404): unsure at all n locations
tgagactggaacaaccgaggcatgcactagaacccttgtataatatgcgaaggacttgaagattgtcaagatgaatgaacaanaaatgaaaattcatgcctcctacaaaaacctcaaccatgccttcacaaaaggtgacatccacggtaataatcaagccacacttcacactaagagaagtaagaagtgtagtgaatgctctgaaaaaggacactcgattaagtcatgtccctatattaaaatgacttgattactaacaaggatgataaaacttgttttaaatgctcaaagaagggacacttaattaaatcttgtccctatttgaaacaaaaaggcatatggttagaaaagataatactaactaaccatgttgcaagcaagaaacaaggaaagaagaaatcttc

SEQ ID NO: 36591 - DNA, 362 bp, Zea mays
  unsure (1)..(362): unsure at all n locations
tctaaagggagaacacatcttgggactaaccaatgttctttntgagaaagacagggattgtaacgcatgccaagcaggaaagcaagttggtgttcatcattcacacaagaacatcatgacgactgacaggccactggagctactccacatggaattattctgcccgatagcttacataaacatcgacgggagtgagtactgtctacgtatttgggatgattattctcgcttcacttgggtattctttttgcaagaaaaatctcaaacccaagagacttttaaaggattctaagacaggctcaaatgagttcggattgggatcaaaaagatagaaccacatggggcggagttaaaactctcaa

SEQ ID NO: 36592 - DNA, 248 bp, Zea mays
  unsure (1)..(248): unsure at all n locations
gctgcactttaagcagtcttttgtattctggattactgacaggatgtgtttgtgcaaatctgtggcctttatgtagtaccttgcctaaatgtggttgtctaatatgagactgctggtaactaagagaatgtggcttgttattgtcttcttaggatgtaataaagtccagtttgtcctgtcttgtaactggttggagtttggtaccttagactacanagcggcaacttaactactattaggtagactat

SEQ ID NO: 36593 - DNA, 359 bp, Zea mays
  unsure (1)..(359): unsure at all n locations
tctaaagggagagcacattntaggactatctaatgttcattttgagaaagacagggttngtagcgcatgtcaagcatggaagcaagttggtgcccaccatccacacaagaacatcatgacgaccgacaggccgcttgagctactccacatggatctatttggcccgatcgcttacataagcatcgacgggagtaagtattgtcttgtaattgtggatgattattctcgcttcacttgggtgttctttttgcaggaaaaatcacaaacccaagagaccttaaagggattcttgagacaggctcaaaatgagttcggattatgaatcacaaagataagaagcgacaataggacggagttca

SEQ ID NO: 36594 - DNA, 427 bp, Zea mays
  unsure (1)..(427): unsure at all n locations
tatcttgagggttcctcctatccctcttctggttaattctcggnttcctcctcaagggcggggtcgcctcttccaaggagcgaaagtgtcatggcctcatgccctatccgccctcctcaccggccctttcagggcgaacaacggataaccttctaagggatttgggcacagcttgcacaactttggaggcggctaacactaatgtccgacatcttcgaatatgtctaacggtccttaatgatcctaaggaaggtagtcaaatgaattataaattgggacggagagaatattatttaaagagtgaagtttaaaataacagatgtaatcagagatagaatatataaattgttggagagtctttatagttacgtacgcatcgtccttgtaaggaaaattgaaccctgtgccatttggctcaataggtttt

SEQ ID NO: 36595 - DNA, 196 bp, Zea mays
ggccttaatactcgctcgcaaaaaaagagttctagttcgtattgaatcttcggccgactagagaactacttcttaatgtattgtacacacaagcttccgcagaaaggagaagtactctcttatgctctgtcatgtacaaaaaagctaagcttctgcataaagacgaagcgaccttttacgcttccttgtgtccgaa

SEQ ID NO: 36596 - DNA, 151 bp, Zea mays
gcactgactgagactgtatttcatgctagcaccggctgttcatcactatggacctgccatactgtctgaccctgtttgtgggaaccctgtctccttgtgaggacatgtcttctcgatggatctgatctccatgttgagtcttcgggtaaag

SEQ ID NO: 36597 - DNA, 467 bp, Zea mays
ctatagatactcagctttattggctcttattgtctcattatcaaaagttggcttcttgtggtgagaagtgttgattatgggaaaaaaggggagtttctgaaatcccgggccaattcttttgaaatgactctctttatgcttcaatatgtgggtttgacttatagatagagatttgagtttgatctgcaaaaacaaaccacgtggtggcaaacgatgatccatatatgccaaaattgaatcaaaaccaatttgagtttttatctgaagtgattttgcacttgttccacttgctatatgttgcgttggcataaatcacccaaaagggggagattgaaacggaaatgtgcccttgggcccattctaagtattttggtgattgagtgcaaacaccagggcctatatagtgaaaaatgctcatggatgaacaaagtcgacatcacaaataacggtgtgttcctaaaccttag

SEQ ID NO: 36598 - DNA, 182 bp, Zea mays
tttgtccctgatgtgtggctgggcatcaatgctcagatcttctatatctctcggaagctaacttacttggaaaatcttccttgaatctggcccagctaataattgcatcatgtgtcacgatgctgccacccagttatatatactgtttccaatctcgccatgcggaacagtcaacttttctt

SEQ ID NO: 36599 - DNA, 242 bp, Zea mays
agaacgattattttcaacttttctatgggacttgccagttcaactttgccttgcgtgtcgtgcctagttataatacctaacaattcggactacatcaaactactctatcaaactttctcctttacagtttgaactctgatgcatgcagtactcgtccatgtctatattccgaacgaactctatgctgtagcataaaatattccatgatgcacagactggtctaactgcttgtatcgatgtct

SEQ ID NO: 36600 - DNA, 404 bp, Zea mays
  unsure (1)..(404): unsure at all n locations
ataacacttgaacacanacgtgtgttgcttggtatgacgaagacgaagggcatcacctatgggccagaggagcttcaaaatccgtcctcgctatgcgtccaccccaaaatacacagcttgtcccacacgatggcaacagactcaccagcgtcctgttcaggagacacctcatgctacgcctcaaactctgggaccttgttaggctaccccactggcaccccgaggagacctactggctagaaaaccgctactagcactacctgctttaagtgttgtgagactgggcactatgccaacgtttgtgctaagaggaaccccaacactccattctacgctataattaaggcgagcagactctgaattcactcacaaccgtgatatagatttgcaaggtaatctatcag

SEQ ID NO: 36601 - DNA, 377 bp, Zea mays
ctccacaaggaggaggaacagttatgttgtaagcaagccaatttgccatggagcctagagcctagagcctatatgcaatggagcaaacaacagggaaacatttggaaataaaaatagaaatcctctctctggtacttaatacttaccatgaatgatcgcttcaacaatattcttatgaaaagcggtaagggtcaccggttgatcataaaaaggatatctaacctgcatcaaaagtatagggacatagaaacacctccgaaaatatatttaagactaatttgacatatggaaaaaaagagtcattacataagacactgcttgacatctaggggcacattcttaccgaggaacagctagatattcattaaactttggaa

SEQ ID NO: 36602 - DNA, 352 bp, Zea mays
  unsure (1)..(352): unsure at all n locations
tccactgcanaactacaagaattcatatgactcacattcctgccattggacgtcaaaaggctcgccattgattttcaaattggtatctctgaaactacatttaatatcaattacatgtcttctccaatatttgaccagactatacttcatatcttatacttcccgtggtgctaaaatgcatatattgtcgactcatattatgtcacctattcataacggaagttagtctattccaatcatgtctctgcacctctatttgtcacatgctttattctaagtaaaagatctctgtcacggggagcttctcttcgtctctaatgggggagaaaattcttccttaaaagacaacact

SEQ ID NO: 36603 - DNA, 464 bp, Zea mays
  unsure (1)..(464): unsure at all n locations
gaccttaaaactcagctgagcaaatgaatagcttcggttgacgatgcagtaatcaagcttcggctatggtcaaatttttggcagcaaaacagtgcaatagcaatgaatgttgtggtaacttcacacctactcgtctatttatatagtgtcgcaggtgggaaggtaaatcgccaagtcttccgcaccggacaaacagccgcccgcacccactaaacggtgggccacagagcccaagaaggtgaatcgccaggacgcgcgtaactgctgcatggcagggccacctcgcgcttagattatattaatcgtttctcggcaacgagctcacggaaggtgtttntctgatcttcngcatcccgaagcctaagagactntttcacggatcaagctcgttacaaaaaacgatctatcaccgcgaaagggctactctgtggggtatgcttcgtagccgaagatcctaaagaaag

SEQ ID NO: 36604 - DNA, 358 bp, Zea mays
  unsure (1)..(358): unsure at all n locations
ctngatacacggattgaacatcgccatatcgctgggctttatcagatcgacggtatacggagattctctgatagtcatcagccagataaacaaggaatgggactgttcaagtgattcaatgggaaaatactgcgctgccgtccgaaagttggaagatatattcgagggtctggaatttcatcatgtagaaagagatcggaacacagcagccgatgtactgtccaagctcggatccagtcgaactcaggtcccacccggagtcttcgtgcaagaaattctgcagccgagtatctcaatggatcaaacagaagagtgccacatcataaatcaacccgagtcagactctgatgactggaga

SEQ ID NO: 36605 - DNA, 371 bp, Zea mays
  unsure (1)..(371): unsure at all n locations
tctggtccgagggcggcggaatcattggtttcttaccgagacattttctggctttnttggccatggtgctgcgtcaccctattttgggccaatgggtcgtgtatcaagttgggtccattaaggacgcatcctanggttgcagcacgacccccatacccttgtggtcgtcctcccatgtttataaaccccttagccgccaccaaaaacagcgggttttgtttaaaatcaagtttagctctcgctacttgctttgtagcgcgcgtgctggttcaaccgcccgtcttcttgtctttggaaccccaccatattggaggttgattttgaaacctacaatttacatcgggttatacaagacttggtctacctggtct

SEQ ID NO: 36606 - DNA, 441 bp, Zea mays
tgtgaaggttcttcatccccacatgtgctaagcggctatgccacagcctgcccatgctagtcttagctattaagcatgcatctagaccggcctcttcttttgcaaaatcaactaaataaagtttgccgtctaatacacccttaaaagctagtgaaccatcacttcttctaaagacagacacatctacatttgtaaacagacagttatatcccatattgcacaattgactaacagatagtaaattatatcctagtgactctactaaaaacacattagagatcgagtgctcattagaaattgcaattttacctaaccctattaccttgccttgattcccatcaccgaatatgattgaatcttgtgaatccttatgcttgacgtatgaggtgaacatcttcttctcccccgtcatatggtttgtgcatccgctatcaataatcc

SEQ ID NO: 36607 - DNA, 459 bp, Zea mays
tcggaatttacaaaccgacatataagtagaaggacctttttattccatatatgttcgagtcaccgctgtaatcccttatgatgggcataattgtaattcctcacaggctacgccctgtgcctataaataggtgaacagtacctctgtactgttcacgcaatcttgtaatcattggcacattacgcttggattattgctttctgctaagacgaaggtacaaatatacctaaatattatgttttaatatttaggttcatataataaaatatatataaaaatattgttattcattttcggtatatctttcaataatgttttgtgttctggattttacttcatattgtttttcaagtctaaccacgaaggtatgatcttcgtgatatttcgcttatagccttcgtccggagctcattatatccttgtggaaataatgctttcgcggacgaagggcattaatat

SEQ ID NO: 36608 - DNA, 469 bp, Zea mays
  unsure (1)..(469): unsure at all n locations
gacctataatactcaactgagaggattttcacggttcaagctcgttacgaatttctatctatctccgngaaaggagctactgttgggcccatgcttcgttgcgccgaaagtcttgcgtgaaaaagcagcttcggctgaaatcgtcctcaggaaatggccgaaggttcctttttatagagcttctgcgttgcaaaccgacataaagatagaatgacctttttatccatagaggtctaacataatgttgtaaacttttgtaaagggcataattgtaattcgtcacaggctgcgtcctgtgtctataaatagatgaacagtacccccgtactgttcacgctgacttggcatttgcttttgcgtcacgcttgtactttctaccctctctcatgaccgaaggtacatttgtaatttgaaatcatttctatttttccatggtaataaaatagaaatgattctacgatgatgctta

SEQ ID NO: 36609 - DNA, 221 bp, Zea mays
tctgtctgcaacgactctcaggttcatcgaatcttagaatttgacccgtcacaccagcacggccaggtgcatcctcgagttttaacataaccctcgtgctctgaaagaggtcattttctgttacgaatgaactgacatgttttcgcattcttcaacaactattaaatacgagaccgcttgatatagggaggcactggcgtcctctcagtatcactgagtag

SEQ ID NO: 36610 - DNA, 342 bp, Zea mays
caccttaggctatctctttgttgcgagttccaaaggaatataagccctatgtcaaaagatatgtggacgccaaaactggcttgtcttcctgcccgctgcgcgacaaaagtgatgcctagacatgttaaatgtcaagggctcggtctcaactttttccaaggggtgccttaagtggtatgccacatttttggtataaaacttaggtgggtttggtgccttctttcaagtgaacacagtggatctttacattaggtgtacattttgactcaaagagaattagagagctctagctctttctctacttaaagaatggattctgggttccttataggggctttttgc

SEQ ID NO: 36611 - DNA, 432 bp, Zea mays
ctagtgactagagagagtgattcggagtgatcattcgttctctcgcgctcggatcgcttcctttgtttcgcattttatcttgagatcatactcactcgtcatcgaggcatgagacaccaattgtgtggtgggccttgcgggacgtttgattcctcaatgatttgaaaagagaatctcactctgtccgagggacctggttgagagagggatagggttgaaagagacccgggctttgtgaccacctcaaccgggagtaggtttgcgagaaccctacctcggtaaaacatatactcgagtcacactccttatatagcttgtgagttggttgcaccctctctcgccgacttgttttatatttacgctaaccccgcttgaggcgtgatatatctgtaaatacaattcgccctatgaccccctcttgcgactatcaca

SEQ ID NO: 36612 - DNA, 222 bp, Zea mays
ggactaaaattataaatctgccacgaaatttttgtgtaaatgaactaatagaaactatccttgggacaaagacatgatgttggttctagtgcgcttatgctttcacagactgatgacaccagtgcttacatgccaagcggagctgtaggaacacatttttacaacagttcaatgagcgggtctgtgcccaagcaacaataggacagcaccatgtcattaatt

SEQ ID NO: 36613 - DNA, 359 bp, Zea mays
gaccaaatccagctggaagatctcattcacgtggcactttttggctataccaacccacgctagtcttaacaattaagcaagaatcgaggtcagctctattaaaagcaactaagtatagctggccctctaatactccattaaatgctactgaatcatcacttcttctaaagacaataacacctatatgcgtaaaaagacagttgtaaccatgttgcataattgagaaacagaaagcaaatcgtaatctaaagaatctacaagaaaaacactggaaatcgaatgatcaggtgatatagcaaatgtaccaagtcctttgaccgaaccttgagttccatccccgaatgtgatagctctatggg

SEQ ID NO: 36614 - DNA, 376 bp, Zea mays
tataatataagaatagatgcaagagctcgaccgtttatcattatagaaagggagtcatacaagcacggagtttgtgcaccgctgctcaagagcttgtctaaagccgaaggtatataggtgatgaaggagatacatggcagtctttgcggaacccacaaaagatccaggccagtacttggaaaagtagtccgtcagggatttattggccgaaggcaacttctgatgcagctgagttagttaaaaagtgcaacgttgtcataaatgtgcagaaaacaaaaacaaccttgggcttgaaacagctatacaacccacctggccatgaagagggggcttcaatttgtaggccaatacacccggttaaggcaactgaatatgt

SEQ ID NO: 36615 - DNA, 309 bp, Zea mays
taagcttgcattccgatctaaacccgtctctagagaaaagcaccttgcgccaaaagattccgggaagcttacccttgaggcctggaacaagcgtcgaaagaaaccgggccagccgcgtacggctataagaccgaccgggagaaataaagccactgcccctgtgtcgaaggtaacgggaatagacgacaaaaggagttttttctctacagagaggcaaagatgcttggtgccttagaccactaactctagggtgattgggcgccccagtcacccgtgccccctgaatggtggccaccttcagggcactag

SEQ ID NO: 36616 - DNA, 264 bp, Zea mays
ttattacaccttttgtggagaggtgttgtaataaaactatatatggctataattcctgacctatccaaatttgagaaggtaatctatgtataactaagtctatcttatggggtatttaatcatcatactggaaagcatctgttgatggacttaaatatattcatgctttttaatattgtccatgtttctagtccgcaaaaaataaatgctatattcacttcttaatatctttaccatgctagagcgaatattctgcatatgcta

SEQ ID NO: 36617 - DNA, 446 bp, Zea mays
  unsure (1)..(446): unsure at all n locations
cgcgatggcagaagggggaaccgacttaagattttagacttcggggtcctcaatagatttccataaaccgttaacaaatgtaatgggcatggatgtaattttacgtgggctgcgtcccgcgtctataaatagatgaacagtactcccgtactgttcacgctgacttggcatttgtttttggcgtcacgcttgtattcactaccttctctcaggaccgaaggtacatttgtaatttaaaatcatttctatttttccatgttaataaaatagaaatgattctgcgataatactcatattatatttcatgttgtatataaagtccttcgncattatctgctatgtttgcgaaggtatntctctaaagaccttcgtcccagactcattatttcccgaaggggacataatgcttcgaaggacgaaagactttaactcttaacactttttat

SEQ ID NO: 36618 - DNA, 374 bp, Zea mays
aagaaaccaaagatgaaattccacaccttcttcaaaaatcttaaccacgcctccacaataggtaacatccaaggtaatgatcaagccacacttcacattaagaggtgtagtgaatgctttgaaaaagggcacttgattaagtcatgtccctacattaaaaatggcttgattattaacaaggatgatagactctgttttaaatgctccaagaagggacacttgcttagatcttgttcccatttaaaacaaaaaggcatagggttagaaaagaaagtctttactaaccaaatagcgagcaacaaacaaggatagaagaaagcttcacaacttgaaaaacgcctttgctacacatgccgtaagaagggacatcaatg

SEQ ID NO: 36619 - DNA, 341 bp, Zea mays
  unsure (1)..(341): unsure at all n locations
catcatgacgaccgacaggccactggagctttctacacatggatctattcggcccgattgcttacataagcatcggcgggagtaagtactgtctagttattgtggatgattatactcgcttcacttgggtgttctttttgcaggaaaaatctcaaacccaagagaccttaaagggattcttgagacgggctcaaaatgagttcggattaaggatcaagaaaattaaaagcgacaacgggacggagttcaagaactctcaaattgaaggcttncttgaggaggagggcatcaagcatgagttctcttctccctacacgccacaacataatggtgttgtggac

SEQ ID NO: 36620 - DNA, 107 bp, Zea mays
ttgtgacagtcttttcgcgttctgctaatagtattgctgacttagttccctgtttgtaatggttacttgctccttataagctaaaaaatctctgctaagagctatgt

SEQ ID NO: 36621 - DNA, 436 bp, Zea mays
ctcaagctagcatacagctgataatcgtataacctctgaaggacttttctctcatgctccaagagctctggctcattgtgggaatatatgaaaatgccatcaatgaacaccactacgaacttatcgaggcagtccatgaacacactattgatcaagtacatgaagtaagctggcgcatccttcaaaccgaatgacatgaccgtgaactcatacaatccatacttggtggtgaacgccttcttcggtatatcccaaagtctgattcgaaactgatggctacctgacctcagatctatcatcgagaacacactgactccttctaactgatcgaataaatcttgcattctaggcaagagtacttgttcttgaagtaacttccttcaagctcatagtaaatgacatcctcttagtgcatacttcttcttccaaacaacac

SEQ ID NO: 36622 - DNA, 425 bp, Zea mays
tatgaagatacttcatcccaacatgggctaagcggagatgtcttatcctatccatataagtcttagcaactaagcatgtgtcgagctcaactctatcaaaaactactaagtatagcggaccctctaacacacccttaaatgccattgaatcatcactttgttctaagacagtgacccctatatcattaaaaagacagttgactcccatttgacataaatgggaaacaaaaagcaagttggagtctaatggaataacaacaaaaacatcggaaatggaatggggaggagaaatagcaatgttatccaaacctttgaccaaccctcgatggccattcccgaatgggatagcatggtggggagtcttgagattctcataagaagaaacatccttttctcctcggcatgtggattgggcacccctgtcg

SEQ ID NO: 36623 - DNA, 226 bp, Zea mays
agtgcgtaaccctaagaggacatctcttagaaaacttcgtggataacgttccctagactatgctcgatgaattttcaactttctaaatcttgaaagatgtttgaaccgattctaccttactgctgatctacgacattattggatttattgcgagaggacactcttccgcatgtggctcgtgaatcctgacccggctactgagaatagtggtagccactgtgctcag

SEQ ID NO: 36624 - DNA, 353 bp, Zea mays
  unsure (1)..(353): unsure at all n locations
ccacaagcttgattgaaagaattagatgctgaaatgatggaatcatatgcatacgactgatcgagttataatgatgatgatgataaacacaaaagagtagagttgagtatgtatagtttggacctcacctcacagatgccgtggagctggtgggtggagtacttgtagaggaagaggggcacgccgggcctgatggccctcacagaatccctgtacctgnacggcagccctgcaggaatatgtatctagagagacgaaataaattacaacttggggagtcgtcttggatccgattcgttaatcctatgctggaatatgacgtacggtcgacaaataatgaatgacaggaaatg

SEQ ID NO: 36625 - DNA, 359 bp, Zea mays
tttgcacaaagttgacggaagaaatagctcatctctgaaagcgcttgccaatcatgctgaaggacatagactcctaaccatctgaggaagaatccgttcaatccatatgtggaaggcatgactcttcattcctaagactccatatgagataagtcacccgcctactcaagtttgatgcatacccatcatggaacatcaacatcttgatccactgaagtacttccttcctcttgggcccagcttaagacgaaatcacccttaagccttcttcacgtttttccgccacttggcggctttattcctatattggtctatcacataacgctgcgcgatccactcttgccttcacattatccttt

SEQ ID NO: 36626 - DNA, 66 bp, Zea mays
tttccataattttttaaaaaacaataggtatctcacttccacatatcctaaaaattttttctcatg

SEQ ID NO: 36627 - DNA, 342 bp, Zea mays
ccacttatcttaatcctactacctatcgtctaaaatatttgttgtccgcgagtttatttttaaattaaccacgacaaattaaaaaaattatttttcaactaaaccgcgacaaataaaaaaacaaaagcaatacttattttgttgtccgctagtgaacaaactttaggtctcgtttggaagctaggtaacagcccaccctggtcagccaccaccggtggggcattacctgcagtgtctatcacccatgtgctgctgcccgacggcggcatttaccctgtgcccgtttgggtaccgtgtagcgaaacgaactgtaacctgccctccttgtaacaattttggagt

SEQ ID NO: 36628 - DNA, 372 bp, Zea mays
tcgtctatctgtctctgaagagcagcaagacgaacctgttttttcttgcgctgcacactgtagctgaaggatctccaggagtgggatctcttgatccaagtcatcctccggaggtgttggactaacagccatcctcttctagctgcaggcctctctaagagaaaggacgtcctgaatgggatccaacggctggaaactaccacccccctgtggtgaaactcccgaccatcaagactggacatgggatcttgcaaccgactatcgatgatactttagccggatccacacaaaatcctcctttggagatgaaatgcccgacgaaaagtacttcatccaaccagaactcccacctgggcaaattggcataaagct

SEQ ID NO: 36629 - DNA, 168 bp, Zea mays
ctatgctggggcagtgtatgataggctgttgcaactacgtaacgctatacatactataatttcctctttctcatcgctacatgacatcattgccaccgaagcactaacaatcatactgagcttatgcttcatagaagtgacatcgagtctggaacatactatatctta

SEQ ID NO: 36630 - DNA, 427 bp, Zea mays
tgtgaagattatacatcccaaataagtggagtcttcttctttgatcaccgaaaggtaaagacaagctaccactatcctgctaacactaaatagagaagctttaacaattctttaacaactttcagtatttggatcataaatacaattaatagacaatatatatggagagttgtatagagacggctcactaagaacttatcttttatatatatgttaaataatctctagagactccttaagagatgctatattaaataagattatgcataccttaatactgcacgatttaaagtggttcttgccacgataagcaacgtgagcctgtgcgactatgctggcagacagccacgcatcagtgtggaagtgatgtcattgccatggatgtgtggcagaagtgagcggattccatcttaccgataagccactt

SEQ ID NO: 36631 - DNA, 394 bp, Zea mays
ctaaaactgtcacgggctgttgtgtgcaatccaccagtagtttacaaccaccaggtcgtctcagcctttcaaacccgccaagtaaattgacactctaaactcccttgaagcgatgagcaccactacttctaaagacagaaaacccgcattcgtaaatagacagtggtgcccattttacaaaaatgggagtcgggaagccaattgtagtcgaatgaaactccgataaagacattggaaatagattggcacgtgataaacagtttaaccaatccttgaacaaaaatgatttcattcccgatgtgaaactcttggggatcaggctgtttcatataagaaaaaaatcttctccctgaatgggggttggcaccccctgcgaataacccacttagccccc

SEQ ID NO: 36632 - DNA, 440 bp, Zea mays
  unsure (1)..(440): unsure at all n locations
tcgggaaccncatactactagccatctcccggcagactgtatattctttgttgtctgggaggcagtataagaagtcatcttcatctgtgccgttgaacactaaggcccccttcggatacttcagttctcgggcatagtgattagcttcaaaaatctcttcttcagataatctcttccccgaagcatgtcgtacaatataatcacgtattttggaagatgcttcagggggcagcagtgccagtttcttcactcaaaatttgttctgccatttctgttttttcagtttccaaggatttcatcttggcgggctctgaaagcccggcttcagtttcagactgtggctttgaagcttcggcgtcaaaggtttcagtgtgcacttcggaagttttagcaattttctttggagttgtgctgaagattaattgctctatacatctaca

SEQ ID NO: 36633 - DNA, 413 bp, Zea mays
tgatacaagagactcttttgatgaactaacttctggaatggctgagcgatagataatgctgggcaaaaatatattaaacagcctgttcaaatatccattctgaaatccacagatgtttccagaattttccatgtaggagatgattccctcataaactaacattggaatctgagaatatgtaaggcagatattaataccgtgttcatgaacaggaagaaatatacacaggaggttgtacaagtgcggtcaaataaagacaagggctaaggtaacagaaattatacctcaaagattatgggatttctcttgcctgcatagtgtacatcttgcaattccccacatggcggagaaagaaatgagttcgtgatttcaccaaatttgaagtaagagcttccctcattccgctcaaacac

SEQ ID NO: 36634 - DNA, 465 bp, Zea mays
ttccatatctactatccttttcgacagacaagtctcagcagcaaccgtcttgtcttgtgacaattctccttcagaaatgacgactatgcgcctttataaccgatactcagaaagcttgaaaaactataaagcgttagtgagctataactatgaaattgatgaagtaaagcaaatggcacatgcaagcgtatcaaatatagcctgacgtgagttcttatttatacgctcatcacgctccaaggtgggggggggcccgtccgtcattgactgttgctattctatcaaatgaaagggtgttttttcagaacttcggcttaatgccttctgccatgtcacagtctgaatttgtgtatttaaacaaattaatactgtgatgggctactgttgggggccttcatcctctaaaggtctcacaaaccgtagttacaatatcttcccagtgtgacatatgaacaagtaccttcc

SEQ ID NO: 36635 - DNA, 308 bp, Zea mays
cgctttatgggctcaaggcagccccaaaagcatgggatgaaatgccttaagatcttcttatcactaatgggatccaagtcggaaaaaccgaacctactctattcactaaaactcttgaaaatgacttgtttgtatgccacatatatgttgatgatattatatttgggtccactaatgagacatactgtgaagaattattatgatcatgacacataaattcgacatgtccatgatggtggaggtgaagtatttcttacgattccagtgaagcacttcaagaggcaccttctaagccaaccaagttactt

SEQ ID NO: 36636 - DNA, 177 bp, Zea mays
aacaaacaggacaaaaactgaattaggcatccattggctccagggccctgggacagcctaccggaccacgagggccccccggtgagagaacacactcccccacctccgcgggactggaccatacctgggcgctaacacccaattctgccctaactgactaatctcccaaaaagcaga

SEQ ID NO: 36637 - DNA, 294 bp, Zea mays
gaaacaggcgggaggagcacatcaccgcatgaccgtgatgaccactcctagacccctggagctgctgcatatggacctcttcggacccgtcggccatctaagcaaagggggaagtaagcatggactacttatcggagatgacatttaccgatcaccgtgggaggtcttttcgcaggataaatcagaagcccaatggacccccaagcgctatctcatgagggctcaagaggacgtagacctcaaagagaagaatataaagagcgaacaacgggcgcgaattcaagaacccttcaa

SEQ ID NO: 36638 - DNA, 334 bp, Zea mays
aagcacgagctgcactactattattaccgtctccgggtgacactcaatcatgaatttatatgttgcgctatattcaagcaatactggcgtctaatataaaaaatcctgatattatcgccataaaaaactaagtatcacttttatatccggaggttaatagttttcacggtaacttatattactgagcataaaactttgtaattcactgaatgctacttttgtggatcgtcccagaaatcatcttctgtggggaattgatctgaaaacaagagagcggcactgaggacatcatcaaaattatgtaatcagactttctattgcacttataaaaaca

SEQ ID NO: 36639 - DNA, 443 bp, Zea mays
actcagcttcttggcggatgacgaagtatgctcgccgaagatttctaaactcaaataagtggaagtgagttcaccggaggtgggcgccaatgttggggacttgctctcaaatgctaagagttaagaacaaggcaacatgaaaagtgttaaatgttaaagtccttcgtccttcgagacattatttcccttcggatataatgaattctggacgaagattgtaaaggaaaaaccttcgtaagcacaataaatgatgaggaagaattcatatacgaaatacgaaaaataatataaacattatcatcagcttatttatatttgcattaccatatccacaataacaaattatagatgtaccttcggtttgaaggaaagcaagggtacaagcgtgatgcaaatagtgaatgccaagtcagcgtgtacaagtacgggagtactgttcatct

SEQ ID NO: 36640 - DNA, 403 bp, Zea mays
  unsure (1)..(403): unsure at all n locations
gggagtggagagatggaaaagtagcgtgtaccctccgtggcaagaggctggacgatggtgtatctgtgctctaggttagcgagaacccgatctggtcttaagaaccccggtggcgagttgacatatgcgagggttaagtgctacatatgtcgtgtgattggagatccccagctgtgtattaatcgattcggatcgccgctacttctcggacatgaagacttggtaactgacctacacgtagcattatagtgaacttaaagggatgataaaagatggctagtataggccaagcacttgaactatggtagaaagaactctagtgacatgtaatgacttaacttgctaataaaaccggatttntaaagatccactattaatagcatttttgcaacagagtcttgat

SEQ ID NO: 36641 - DNA, 250 bp, Zea mays
ctgcacttatactttcagcttatgctctttcggtgtctattttagtaggacacagaactttaaacacacacattatattatttacatggtttaagtggttggtattggtcaaaatagaagacggaatatggagtacgggagcttagtcatatatacatgtgggacatcatgctcttacaagaaatgctattaattaaaactgatattgttgttgtggtgctcacaccaaagggaatgatgaatgcccggc

SEQ ID NO: 36642 - DNA, 428 bp, Zea mays
  unsure (1)..(428): unsure at all n locations
tctanagggagagcacagtttaggactaacaaatgttcatnttgagaaagacaaggtttgtagcgcatgtcaagcaagaaagcaagatggctcccatcatccacataagaacataatgacatcggacaggccactggagttactccacatggatctattttgcccgatagcttacataagcatcgaccggagtaagtactgtctactaatcgtggatgatttttctcgcttcacttgggtattctatttgcaggaaaaatcacaaacccaagagactctgaagggattcttaatacgcgctcaaaacgagtttggattgagaatcaaaaagatatgaaacttaactggacggagtcacaaactcccaatataaagatttcttgaggatgatggaacaagcatgagttctttttcctaccacgtaacaa

SEQ ID NO: 36643 - DNA, 401 bp, Zea mays
tacttgcatggcacgtacgtgtctcactgaatttctgtgacctccgtatctgccggcagctgccgggagagtctctcccgcactacactcggcgattttcgaagcagcgcaccgagctgcccgacatcaccgactcggatgtcatcggcgcgttccttgccggcaccacctgccgcgacgtggtgagttagttgggtcgcaagacccccaccagggcgagcgagctgatggacatcggcaccaagttcccctctggccacgaggcagtctaggctatcttccgaaaggacaagcagccccaaggctgcccatcagaagatgctcccgaggcgtctgctccgcgtggcgcccagaaaaaagctagaagatttcgcatgcgaaacgcgacgccgccgacgcgg

SEQ ID NO: 36644 - DNA, 454 bp, Zea mays
tactcagctttaactctcgtgagacgtatccccgcctctttctaaccatggtgaattcattatcgcatgtgatattctatgcatatttactttatttgttctcctgtatggtgtactgtttgtttcctaatttgaatggatggatgtatgtatgcttgcaattgcataaagaacgatccggttgaagagcccgaggaactctcacgagaagcccctgagcagtattctgttggtggaggcaagtgtcacttgacctatctctgtcctacttattctttaagtcacctcccgtattacacatttatgcctaacgatttactagctttgtgtatcatatacttggtgacctatctgggtcggattattagtgcttagccttatgctatttgttcaacttctatcactgaacattatgagaacatctatgataccctgcttcacctcctcttatttt

SEQ ID NO: 36645 - DNA, 106 bp, Zea mays
atacttttatgcttctgaaggccactctacaagcttgctttggacatgcaacttactaacatctgttgtatgcacgattgaccagcattatactatactagatgcc

SEQ ID NO: 36646 - DNA, 342 bp, Zea mays
tctggccagcatgttggaacaccacttatgttgtatggcactcaagatcactatgttgtacctgcattgaccctataaccatgtggacacacacaaggtgtgccattaaaaataagcgagttcaaaatgcctacatcgactaccaatagcgtcatgtaaaagaggattgggccctggtacccgttaacatagcttaatatacgtacccttatggctaatatggcggtcatcttacaactaaacattgttggtgaaggaaggaatacgctccctaatccacatctaatgtgatggatgacctcacaacattgccttcaccctattaagagctaacgagataag

SEQ ID NO: 36647 - DNA, 433 bp, Zea mays
actcgcacttattgcttttcttgcagagcccctgtcttttattcagcgatgaagtctgctaacgcctgcgactgaattgaagatctatgcacacaatcaatggtgaattcgattaatgcgcagcccactttcaatacttccaggagcttctttgttcctcatgatattggggacttgagctcaaatgctatgagttaagaacaaggcaacacaaaatattaaatgttaatggcctctatccttctaagcattattacccttaagatataacgatcccccgacgaaagtcatgacgtacgtaccttcatcatcacgggatacgataatgaaagacaaacacttgaaacacgaacgaaacatgaaaatcataaacatctccacaaacatcattaataacctggaaattaacgacatattaatacattatacctcg

SEQ ID NO: 36648 - DNA, 395 bp, Zea mays
tccgcataatgacatgtctcaagatgaatgattgattctacttaaagacgagacgaccaatatatccatgaaagtttgcgtcatgattgtaatcggccgtaaagggcataaatgtaatttcacacatgctgcgctctgtgcctataaatagatgaacagtaccccgtactgttcacattatcttgtaatcgctagcacgcgacacttggattattgccctctatcaagtcgtagggaataaatgtgatcaacaagtaatgtttcaatatcttaagtttggataatgaaatacatgaataaacttaagcgctttaatatataatccttcaaggtctaaatgtgctaacattcactatatcataaccctgggcatgaaggtacacccttcatgacct

SEQ ID NO: 36649 - DNA, 334 bp, Zea mays
tctccaagcctcactgtgtgctggagaaataataagcactgctctctccatgagctcaactgaaggggcctttattgtttccaaaaatacttccgatggtacggggagaccctgaaccgctgatttggctagcaaaactgcatgctcattttcacctcttggaatattatttacggaataacctctcaaggaagcttccaaccttcgaactgcatccagatatatttcaagcttcagatctcgtgccttgctgccttttatccacatggccagcaataacttgagaatcactccttaagatggcccttcttattcccattgccctttatttctg

SEQ ID NO: 36650 - DNA, 298 bp, Zea mays
gagcttcataactaagacatcctgggagacaaaacccatcatttttatgttcttatcagatcactcggggaagagcatgcgctgaagtcacagaaaatgctgggaatatctccccttctgtcacaatatggcacatatgtttgatgcataattcagaatgtgggtttcacgagtccccactttaatatacgcttcatccacaaacaattgcagttatcttttcaaaaaaaacctgaacgagcgtattttttaaacagcaactctttcaaaacccacgtgtaccttggccattaatatc

SEQ ID NO: 36651 - DNA, 363 bp, Zea mays
gcagggaaacaagcgggaggaacacatcacagcatgaatatgatgaccacctcaagaccactggagctgctgcatatggacctcttcggacccgtcgcctatctgagcataggaggaagtaagtatggcctagttattggtgatgacttttcccgcttcacttgggtgttctttttgcaggataagtctgaaactcaagggaccctcaagcgcttcctcacgagagctcacaatgagtttgagctcaaagtaaagaagataaggagcgacaacgggtccgagttcaagaaccttcaagtagaggagttccttgaaaggaagggacaagcacgagttcgttgctcctacacaccacagcaaacg

SEQ ID NO: 36652 - DNA, 445 bp, Zea mays
  unsure (1)..(445): unsure at all n locations
tttcactgaacgacgtaatgtgcttatcaattctgtgttgcctgctacttcttcgggtgcattaacctcagatatttggtctggtaatgctaaggaggactacattagtgttgcctgtcattatgttaatgctgattgggaattacagaaaaaggtcattggtcttaagcttacattactctggtgtttattatccaactagtccactatttcttcaccatattctggaaattgcatctcatttgaaagcatgtgaaagagatataaatcttagaactattgtgtttccaatgcaacttaaattccttatatactggagtgacatacctttgctatattcatatgcattcattctggaccctagagcttatatgagaagttnttttaatgtcgtgcatctacttggagagtgcactgggtgtgagtacagaacatattatgctga

SEQ ID NO: 36653 - DNA, 313 bp, Zea mays
tgtggccgccgagcgaaagtgatgttagtcaacgcatatctgactagatattagttatacaggtagaaataatggtccttggagaaaatacacgtattattgttcggtagctttgatgaattaagcagatggtaatgctcatccaaaacatagacatgtcaacaataaaatgcttggtgtgttacacaaaaataatgactgcacacgtggaatgatgcaaagaattggcccagaaattgcacaacaatacaagctcagatgatgtagtgatatgccaggtattggaagtttataattcctaatatcgcaaaca

SEQ ID NO: 36654 - DNA, 251 bp, Zea mays
tactgcgtgtacgacaggggacctcacaaggtacctaactgatgtttgcattacgcctttactagaagaatgtattgatattcctatggtttggataaccgacactcagatcaatatagaaaagcctgcataactatagtctaggagaaccattctctccccaagggtagaaagcttttgagcattgaaaaccaccttggactaacgtccctacggtttcccctaaattacttcgcacctttttttttgga

SEQ ID NO: 36655 - DNA, 414 bp, Zea mays
  unsure (1)..(414): unsure at all n locations
acctatgggcttggatcttctattgatggcacgaaatggttcggtcatggtggttgtcctcaggcggccctaacgggtcgtggaggggtcgccggagctatgggcgagctccggtgagttcgacgcgggacagaggatgcaacggggaagatagtctggcactggggcgggctttatagccgtggcgcgggcgtggtcacatgcggccgctggcgcgcggnggttcgcgcacgggcgtgctctgagcgcacccccgagtgtcaacccgcgtcgaacacgtgtgtgtttgcttctacaatggttcaacggccgattggagcaccttaacgtgcagatcttaacaaaaccactgtgtacggtctcttccctgcaccatatctttaccttttgatgtgagttccaagccacgatatg

SEQ ID NO: 36656 - DNA, 438 bp, Zea mays
cagctatgaaatcttatcccacatgggctattttgttgtgccagagccaacccatgttagggcttagcaattaaacaagtgtcgagttcagctctatcaaaatctaccaagtttagctgaccctctaacactcccttaaatgctattgaatcatcacttcttctaaagacagggacacctatatcactaataagacagttgtagcccatttgacataattgagataccgaaagcaaattgtaatctaaagaatctacaaaaaaaacattggaaatataatggtcaggggatataacaatttttaccaatccttggaccaaaccttgatttcattcccgaatgtgatagctcgttggggatcttgtgttttctatatgaggaaacatcttttttccctgtcatgtggatgggccccgctgtcaataatcacttgacccc

SEQ ID NO: 36657 - DNA, 465 bp, Zea mays
  unsure (1)..(465): unsure at all n locations
ttatgaagaggaaccttccgccatcttatacaaacagcattattctaagaccgctttttcctataagaccttcggcgacgaagcatggactcaacagtatgaacatattcaatacacaattcattgagctctgcagcccattttccaatccttctagtagcttctcggttcctcataatatccttcaaaggttgtgaagaaggaacaattatgttgtaagcttgaaaatagtgccgaagctttctggaggccatcaagacagcatacagtatcttctccaactctgtataatttttctttgataaactaaggacctcggataccaaatatattgnggcctgcctcttgacttgaccatcaagcttctcctgaacaagcgctgcacttaccgctgagtgcgaagctgccacatataataacaaaggagcccctggcgtcngtggagataatgttgttagatctatc

SEQ ID NO: 36658 - DNA, 429 bp, Zea mays
tctaactggagaggtatatatatcatcggcttcttttttttttttatctaagtggccttgccatcattcttcttgttataaaatatctttatcttcttgccactttcatctttgcccttcttcttcttgcttggacaattcatggcaatgtgaccgggttccccacactcaaaacattttctatcattgaaagcatatcttctagatgtttgacctcttctaggttgacctctcttcatcttcatgaatttattgaatttccttacaaataaagccatgttaccatcactctcgctttcattttcttcatcattgctatcttcctattcaattgcccttgaggccttggctatgagagcaatagattcatttttcaccttctctgcccaacataaagcatcggcttgtgacttcttaaatatatcttga

SEQ ID NO: 36659 - DNA, 347 bp, Zea mays
  unsure (1)..(347): unsure at all n locations
ccccgccggcgcacgtggaaccgggaaatcactgagccattntccgattcaatgcacagatagcctttacatcaccccacggagctcaccgtgccgttggattggaataagtccccgtggtttggccggcacactcgccgccgacgagaacacccgcctgcgcacgaggaccgagcgaatcccgccatccccgccgtcgaaccgtacatcgctgtgaccggcagagcctcctcgagccaaccctgcccttcgccggacctatcttcgcggccgtaagccccgccacccttttctttcccgcgggactgttaacattggggaaggactcgcggtgagaagaaaaaaag

SEQ ID NO: 36660 - DNA, 428 bp, Zea mays
agatgcgctgcaaagcgaaacggatatttctataaagctgtgatgcagttctggtccttcgaggcaagaaaccaactccatagctgtacagtccaagttacacctataacaatggtcttatctctgttacgtgaacaatccgtggcggcaacatgagataatattcctgatgctaaactggccagaacaaggtatagtgccaaattccccaaactaagtgtaacaagttttgttgctggtgaccattttctgttcttccatgatgatttctttcatcttgaaagggatgatttacgtgtgccacacacataagtatgatactttgatcgattgaataatgagaatcgctaataaccaactacacaaggaaaactgattcacaatgacactactgatcatgatacccatgagatattagatctcaaaga

SEQ ID NO: 36661 - DNA, 385 bp, Zea mays
  unsure (1)..(385): unsure at all n locations
catgcacgctcgcatngcataattaaatgacttatattgcttctatggcttgtctaacctagttgagatgaccgtcaacaaagctagtgaaaaagcttaactcggatcaaacttgacaagtcttagttttaagcttatagcacttaaattcttactttttatgcaattgttggttcttgaaatatgcatgaggtactgcacttagggggagtattcaaaactcaaatcactcatgaaaacccctagtgaaggccaaaatgcaaatgtcaccatttgcctattttctctacaaaattatctagcctatggcaaaatattttgaaaattatgagaaaatatatgacggtgccaataccttgcccaacaagtgttattttgtgtgtta

SEQ ID NO: 36662 - DNA, 460 bp, Zea mays
cacgtacacggccacatccataccacattcagtggatctatgactcacgcaagggtaagggaacacacatggtacgagtgcattcttccattggaatgtattctgagcatgcggactgagatgtaatacctatggaagcttgtcctcttttgttgggtacaccttgggaatatgatactgatgcacgtcaccatggtaggagtaatacatacacttttacgcgtatagataaaaacattactttgctacctttgactcttgctgaaattgcacaagctgatatagatagagctgcaagtacccataaggaaccaactaatgagacacaaattcagcaacaaattatattgaaagctcctatcatgcttgctactaaatatgatcttcttgaaactcatgctactgatgctagttgctatgccatggtttgcatagatgctttctcttctattgatgatat

SEQ ID NO: 36663 - DNA, 162 bp, Zea mays
tctctgcgcatacacaattaaggaaaaagaaagatatggggaagttaattcgcttaaaaagcgtaaactactccctttattaaaatgcaacctataacttccttagaacgcatgtatttagagcactctataaagtatgtggatcacaaatatttcatgata

SEQ ID NO: 36664 - DNA, 347 bp, Zea mays
  unsure (1)..(347): unsure at all n locations
ttgacattgcngtacctatgtgtctgcactattaaatatagagataccaattttaagttctcgggtacaagttttcaactagcttgtgtgcagattctcaggaagctgttttgggttatttacatgtcaacgatccgcaaagcaagtcgagctactgtcactgcatcagtgctctgaaagataatataagggttcacttgtagattcacattacagactttaacctaacaaagctaaattaggctacaattacaaagtcaacttatggccattctttcaggaagcggatgttaagatatgtctaaaataattactctttgatacctttacttttactaaacaaggaa

SEQ ID NO: 36665 - DNA, 433 bp, Zea mays
  unsure (1)..(433): unsure at all n locations
ctggaaacgacgagcagcaagaggcaactattcttttgtatctatatntgcatcacctattgttttattgaagatcattttgttcccccactttgttttatggaattaaccgtaaccgtcttcggaagatgcacgcaaggaatctgtccatagccgacggcccagcccaggtagcgtcaaacacgaattgcgtgatatagaatgatcacgtgttcacaccagatacagggtgtacatgatccggccataccagtacaccaccagatagagtgagctgtgaagccacactctagtgatggattgtaatcgaacacgatcctgttctgccctgcaccattgcgaaactggaagctatagaagtccgctgtttttcggcaaccggcacgatccgacgcttctttcggtgacaaatagcagtgcgctttttgtatct

SEQ ID NO: 36666 - DNA, 477 bp, Zea mays
  unsure (1)..(477): unsure at all n locations
actaagctgccttgatcccataccgaatcaattgaactttgaatctttattcttgacgtaggaggtgaacatcttcttctcccccgtcatatggtttgtgcatccgctgtcgataatccagcttgaacccccggatgcataaacctgcaaggcaaatttaggcttgggtcttaggtacccaactcttgttgggtcctacaaggttagtcacaatttccttagggacccaaatgcaagtattatcacctttgcattatgcccctaacttcctagcaattacttttctatcctttctacaaattgcaaatgaagtatttaaagcacaataaattgtagaaggttcattcactactttcctangagcatgaataacattccttctaggcacatgatgaatagcatttctttatgaacaactattctcctagtaacatttctatcatacacataagaggaactaggagcatacattgcatg

SEQ ID NO: 36667 - DNA, 382 bp, Zea mays
  unsure (1)..(382): unsure at all n locations
tgcagctttgatggaaacactcgcttctatggaatagtattctgaggcagngctacctgctgagctcaagtttggggcaccaagattgatcttcacaaacatagctgaagctgaagctactagactggaggatgttgatatactagaagaagaacatgtgaatacagtgattcagtcagcaagataccaacagactctgaggcgctatcatgacaaggccatacggcatcgatccttcgcagtgggagatcttgtcctccgccgaattctaacggngaagggacggcacaaattgtcgccactatgggaagggccattcataatagcagaagtcactcggcctggatcatatcgtcttactcacatggatggcaccggaata

SEQ ID NO: 36668 - DNA, 304 bp, Zea mays
caaaaaccagctggagataaaggagccacaggggcgatacttatcttctattcttcgctgcattgaatgcaacaggatggacacacggtgtggaggtggtgccttgctcacaaaagacaatgtgaatggagtacttgatcataagttcaaagctcacaaacttgtcaatcacttcctcgggagacatctatatatatctaggaactccacggattagatgcacctgaatgggggtatgaaaaacaagagatcttagaataaccttgaccatttcatgtgcataccacttggtgctcctgaggat

SEQ ID NO: 36669 - DNA, 411 bp, Zea mays
  unsure (1)..(411): unsure at all n locations
actcaagcttgtggcgccctacggcgttctgccgcagccgaagtacctttcttccacctggaagtctcggggccgaactcctctggcgtggtagcgtcgcaaagactgttgataccgcgcaaagtgtagtaaggccgtgttccgagcctcttccagctggtccagtgagtcttctccgctggtctggttgctttggtcgacgtacgcccttgtctttggggaaccgtattctaactctgtgggcaagatagccttcgccccatagactataaagaacgacaagaaactcgtggcccggcttggcgtcgtcctcagactccagaccaccganggtagtttcttcatccatcgcctgccgaactttgtgaggtcgttgtagatcctcggtttaagtcattgcaaaatcatgcc

SEQ ID NO: 36670 - DNA, 457 bp, Zea mays
  unsure (1)..(457): unsure at all n locations
tcagctccatctatattgtggatggctattgagtctgctcaatttccctcagccttcctggcagcttcctgacttccatgaattgcaatatgcccttgttccgaaggtatcttcatgcataggtatgctggatgaagaattgcttctaaagcattaagtgtcccatgaccaatgattgcattgtanggctattccatgtcaacaatatcgaaaacaacctgttcagttcttgtgttgtggacaaatcctaatgtcactggcattgtgatcttgccaagtgctacaatctgccttcctccgaagcttacaaaagggtgtgtagcatcatgaatcttgtcctctggctcttgcatctgtttgaaggcttagccaatatgatattcgctacactgcctgtatcaaccagaacattcgtgaccagaaatcccttgatgacacaagatataaccatatcatc

SEQ ID NO: 36671 - DNA, 434 bp, Zea mays
  unsure (1)..(434): unsure at all n locations
ctcctctcaggttgagatcaccattaattctctaattcttcctccttgacatcaaacaccaaaaaccatactcaagcaagaacatatgatgatgtcaagggacagcaaggtgttaaggaggaaaaaatgactatcaaaactcccccttacttattgaccatatgcactatctacatttaggtaagatagatatatgtaaaaagattaatacttcctcttgtacctataccatgttgtagtgtacttcccatcttgaaagtatataatctctcgagagcttctccacacttgtgcctgattctatatcctaaccttttcttgtngctaagacaccaaacttagaacaagttatagtattgtgcacaagaagaaacttctattntaattgatatcacaagatgtcaatttaagcaaactatcacagctaccaattg

SEQ ID NO: 36672 - DNA, 382 bp, Zea mays
gcttattcatgattattcaataagaatataaatagtctaatgatttaagatgattattctatatatataactcatgtttccgctttccattacatattgagatgatgaaggtatgcccttaatgaccttcgtttgaagatcattatatcctgaggaagataatgcttcggaggacgaaggtctttaaccattaacatttgtgttgccttgttcttaattcatagcatttgagaacaagtccgcaacattggcgctcacctccagtgaactcattcgaccaccttcggcaagttgtgaccttcgtcatgccaacgaagaaatcttcagcactgggggctgcattgcagccactggacgtcaaccaagaaacactacgcgaatc

SEQ ID NO: 36673 - DNA, 377 bp, Zea mays
tcctatcaaccagctgatctggaagacatagccatataacaatgtattacctaccaccgggatatgttcaccgaatccaacctttgactgggagatcctttgccacaaatcgggctttggtccttgtcaccacaccatgctcatcttgcatgttgcggaacacccatttggttcctacaacattttggttatgacgtgtaactaaatgtcataccatctttctagcggaatcgttgaggtactcttgcattgccaccacacacaccgaatcttggaatgcttcctttaccctgtggggctaaataaggaaaacaaatagtaatgctcaccaaagtgtgaacacgaagactaatattacctccttataatgtcccgag

SEQ ID NO: 36674 - DNA, 378 bp, Zea mays
cgcatgcaagcttctaagggagagcacatgtgagaactaactattgttcattttgagaaagacagggtttgtagcgcatgtccaacaagaaaaccaacatcgtagcccatcatccacaccatgaacatcatgacgaccgacaggccgcttgagcatctccacatggacctattccgacccataacttacataaacatcggcgggagtaactattgccttgtaaatgtggatgaatattcgcgcttcacttgggaattcttctcgaaaaaacaattacaaactcagaaaccttaaaggattctcagaccgctaaaatgacttctgataagatcaaaaaatagatacaaaatggacggagtcagaactctaaaataaact

SEQ ID NO: 36675 - DNA, 214 bp, Zea mays
cggggccaagaggagggacgacttttgcttgtccacggccagagcagcggaaaccggcggccgcagaaaaagaaacgccaagcgaaccctgcggacgccgggccgcgacaaacacatgaagacaggtaagaccaagtcagcccccaccgctaaaacactaagcagcgcaccccaagcggaagggcccaaaaacgcaaaaaaaatacgccccgca

SEQ ID NO: 36676 - DNA, 449 bp, Zea mays
  unsure (1)..(449): unsure at all n locations
ctaagcttctaagggagagcacattttatgactaacaaatgttcatttttganaaacaggatatgtagcgcatgttaagcaggaaagcaatttaggaatcaccatccacacaagaacaaaatgacaacgaacaggccactggaactactccacatggatctatttgacccaattgcttacataagcatcggcggaagtaagtactgtctagtaattgtggatgattattctcgctttacttgggtattctttttacaggaaaaatctcaaacccaagagactttgaagggatntttaagacgggctcaaaatgagttcggattgagaatcataaagataagaagcgacaatgggacggagttcaaggactctcanatngaacgctntcttgaggaggaaggcatcaagcatgtgttctcttcttcctatatccctcaacaaaatgatgt

SEQ ID NO: 36677 - DNA, 184 bp, Zea mays
gagcagagtatcaacagttttttttttttggaaccgacaccgacaggagagtactaaattctaaattccttacggaactagtggcactcctggatcggatgaaatctacacacagctacgctaacatgaatccggtctactatccataagtaagcaaggaacaatcaagaccggttgcttttga

SEQ ID NO: 36678 - DNA, 405 bp, Zea mays
acatgtgctgagcggtgatttcacactcagaccatgctaacctatgcaatttagcatgcatctagaccggcctcctcttttgcaaaatcaactataaaaatgtatgccgtctaaaacacccttaacagcatatgaaccgtcacttcttctaaagacagacacatctacatttgtaaacaaacagttatattccatattgcataattgactaacagatagcaaattatattcaagagactctactgaaaacacattagagatagagcgctcatttgagattgcatattacctaaccttttacctcgcctgattccatcaccaatatattgaacttgggatcctaatctgacgaagagtgaaatctctactcccacaatggatggcatcgcgtaatatcagctgacc

SEQ ID NO: 36679 - DNA, 347 bp, Zea mays
tttggtgatccaccctacgaacaatttattgcttatatctgttggtgaagacaagaggccatactatcaaggatgttccatgtcaccattcacaaacagaaggaaatagtagaagctgcagctcaacataaccagtcgaagcaggtcatgcacactacttcgcatcactcaccctacataccatggtaaccatcctgcagcttctcgttgcttggctagccaaccacaagcatcttggcaacagacttcatctccaccaccactacaacccgcatatttccgaagccagcatctataatggagccagcatactcaccagcagcgagacttcatggaggagtccgaac

SEQ ID NO: 36680 - DNA, 398 bp, Zea mays
tatgtgctaactgattgcccactaggaacaagcgagaaataaggattggaaaaaattcagtaggcactcatggaaggaaagcctgcaagatcggtcgatttggctgagcatgagaaagaagctataaaacatctttatctgctaactatgaaacctatcatatctgttgctaatgtaacaaaatctgatcttgctgaacctgatatgaatcctcgtgtcaaagaggtggctaaagcagcatcagatttgcagtatggtatggttacaataccagctcatgtttgttgtatacatcgaagtacaagaatctttgagaaatttctgcttaataattttatattttttatgttgcctactcatatgtgttcacccatgctaaccaaatcatggaatgtata

SEQ ID NO: 36681 - DNA, 430 bp, Zea mays
  unsure (1)..(430): unsure at all n locations
gcttaaaagccatttgcttagcaagcatttattttgaacttctatgttctgaattcctaaccctccttgatccttagggtggcataagatgttccatttggcaagtctgtacttcttcttatgattccctccttgccaaaagaacctagaccgaaagcagtctattctctcgagaacccctctgggtatctcgaagaaagatatcataaacataactaagctggtaagcactaaatttattagtattaatctgcctccaacagacataagcttccctttccatccactgagcttcttttcgaatattgcctctactattttccaatcactattngttaacttccgataatgcattggtatccctacatatttaaacggatagtccccatttctgcaaccgaacaacagttgatattgattcttaacatct

SEQ ID NO: 36682 - DNA, 470 bp, Zea mays
  unsure (1)..(470): unsure at all n locations
ccttgtacaggatagctaccttgtcctattgttgatggtccttaagactctttgaaacccttaaaggaaaatgcttataaatgtttgcaacatgctttcataagtgcataaactgtcttgagcatcactcatatactatgacacaatgcacttcactntctctatgatatagacttgctctcaataacctaattatgtgcccttggcatttaaggccaaaatatgtattcctcttaacgcacatgtttatggggagaaatctatattgtatagaactatgatcatgcttaattgacatatctcttgatcatatctctttcattttggtacaaatgcatatatcctattattcccgtaccgtgactacgactaatatgtttccaagtatattaccatgctaaagtcgtacattgaaagggaaatggagttatacgcgaaaacaaanggcttcacatccgatatcatacttc

SEQ ID NO: 36683 - DNA, 344 bp, Zea mays
tgaaggtgaactccaacgaattcaagttgtaccctatcaacgtcagtcctgctaagatggctatccttgcaggaactcttaactgtcagatacgttcaatgccctatacctatctgggcgtaccgctgggtccttcaaatcctagaatatgccactttttaccactcattctgaggattcataagagactttcatgcacttctgccctcctcttccatgctggctggctagagcttgttaactccggtcttttagctctaccgacattgtagatagtgactcatgaaaattctgtgaccacgcgtaataagattgatcctatccggaacactgtctctggaggg

SEQ ID NO: 36684 - DNA, 447 bp, Zea mays
  unsure (1)..(447): unsure at all n locations
agcttgcatgacanagacatgaatgccatttatctgactcatcagaaaaattaacagacattaccactttattacacacatcatgcagtgataagcggaacaaaccttcgcagtcatatcctttaccaacaaaaataccatgtgtcgacacaacacatttatttgactcaagaacaactttgtatccatctcgacatagcatagaagcgcaaacgagattcttcttgatagagggaacacgttgcacgctccttaatgccactgccttttccaaagtaaacttcagaatgatcgctccaacaccacgaacatgagcacgcgacccatttnccactaacaagggcgcagacctcccgacctggtaggaagagaacatagagacatcaccacagacgtgaatggttgcaccactatccatccaccactcaagtgacttacaactgagag

SEQ ID NO: 36685 - DNA, 442 bp, Zea mays
  unsure (1)..(442): unsure at all n locations
aaaactcagcttctaagggagaacacgtgataggtctaaccaatgtaacttttctaaaagatagaccttgtgcagcttgtcaagcaggtaaacaggtgggaagctctcatcatgccaaaaatgtgatgacaacatcaagacccctggagttacttcatatggatctcttctgacccgtcgtctatctaagcacaggaggaaataagtatggtctatgtatagttgatgatatttcccacttcacttgtgtattcttattgcaggataaatctgaaacccacaggaccctctagcgcttactaaggagagctcatnacgagtttgagctcaaagtgaagaagataacgagcgacaatgggttcgagttcaagaaccttcatgtggaggagtatcttgaggatgaaagaataagcacgagttctccgctcctacacaccacaac

SEQ ID NO: 36686 - DNA, 376 bp, Zea mays
  unsure (1)..(376): unsure at all n locations
ataaaatactctctaaaattccagaagttggatttggctatttaaatgccccaaaattccctattngaactaaaaatcaggaaacgtattttattaaatactataagaaattaggagcctagcaaaattgggctagtgttttagcatttttctacaattttctgggaactctcaaagtccagaagaaaaataaaaaggaaaacatgctacaggattgggctgaaactggcctgtgtcggcccatctacatgcagaagcgcgcacgcccgcgttcgcggtgctgactttgcgaaaagacgctcgcccgtttgaataacctgaagcggggttgctcgactattccccgagtcactgacagttacaaaaacactcttct

SEQ ID NO: 36687 - DNA, 427 bp, Zea mays
  unsure (1)..(427): unsure at all n locations
tgacaatgaggagatggcgctcgtcatctagtatctttctncanatcctcaaacaaaggagggggaaagactacaagtcccgctccaagaaggtctgctacacatgtggtaagcccggtcattatattgctaaatgtcctatatctagtgacagtgaccgaggcgacgacaagaatgggagaagaaaggagaagaagaggtactactagaagaagggcggcgatgcccatgtttgtcgcgagtgggactccgacgaaagctcaagcgactcctccgacgactaggacgccgccaacatcgccgtcaccaagggactctcttttcccaacatcagccacaagtgccttatggctaaggacggcaaatagaacggtaaatctaaatcctccactatatatgaatcctctagtgatgacaatgctagtga

SEQ ID NO: 36688 - DNA, 391 bp, Zea mays
gcatgcaagcttgggctaccaccatgcaaccattattgtgttggagaaccctgcgtgaacattcattggaagttacaagatggaagacgctcgctctacacaacccttcggggtgctgtggtcatatggttgccgctactccacttgtagctggaacatctcccggctataaccctcgggggcgtgggtaaagtgtcaaacaccatcctgtgagggccacagttctctgcgggtacccgcctcttaagcttaaggtcccttggttacttccatgggagcaagacaatcaagttagtttcctgacccttaagaccgcgctctaaagtcgatgaggcgcgggactctgccctggatgaccccaacctcgcgtctaacacattagcacaaacat

SEQ ID NO: 36689 - DNA, 356 bp, Zea mays
aacaattaacaaaagcggagataaaagagctcttagaatacgccaaatactgcggatacaagcctggagcgctcctcttctgaggcgttgatgatgaaaaattgggctgtattcgagatcaaactgtggccaaagttatcagtactctgtccaagaatatctgatattcgaagctagaaacggacatcagtcgctaccgacgacaacatgtcgttggcagcttatattatttcaacttcaaggagaactgctgtattcccttaacctttattgtttctaagaacaaaaacatgtctgacaaaaggttgtttcttgcaaagtatgcttctgagcacagcctttgcaatgcaacaaga

SEQ ID NO: 36690 - DNA, 462 bp, Zea mays
  unsure (1)..(462): unsure at all n locations
agctngtcaagcattatttggtacccatcgcttgatgggtccatcaagggtagtcaacaaagatctaggaacccaagagtcctttgtgttagcatttggtaaactccttacctttctagcacaagttgcaattttgggttcctagttacatgtgaaatgattgacaagctagaggtggggttgttaccaatgggacaatccttgcattgatgtcccttctttcggcatatgtagcaaaggcgatcttcaagtcttgaagatttcttctttccttgtttcttgcttgctacatgattagtcaatattttgttttctagcactatgcctttttgtttcaaatatggacaagtcttaattaagtgtcccttctttgagcatttaaaacaaagtttatcattcttgttaataatcaatcccattttaatatanggacatcacctaatagagtgtcccttttcaaag

SEQ ID NO: 36691 - DNA, 466 bp, Zea mays
  unsure (1)..(466): unsure at all n locations
aagattcttcatccccacatgtgctaagcggcgatgccacagccaacccatgctagtcttagcaattaagcatgcatctagaccggcctcttcttttgcaaaatcaactaagtagagcttgccgtctaatacacccttaaaggctagtgaaccatcacttcttctaaagacagacacatctacatttgtaaaaagacaattataacccatattgcataattgactaacagatagcaaattatatccaagagactctactaaaaacacattagatatagagtgctcanttgagattgcaattttacctaacccttttaccttgccttgattcccatcaccgaatattattgaatcttgggaatccttattcttgacgtaggaggtgaacatcttcttctnccccatcatatggttggtgcatccgctgtcgataatccagcttgaacccncggatgcataaacctgc

SEQ ID NO: 36692 - DNA, 434 bp, Zea mays
  unsure (1)..(434): unsure at all n locations
agctnnggcgatgccagttgtggccgcatgctcttctgtgtacnngcagctctggcgcagccgccgcttggacgtggtccagagcggatgcaccgcgctgtccatcgtcaaacaggagacctcatggtcgtcgccaacgccgctgactctcgtgttgttctgggcactgtatctgacgacagcgccatcacgccgtctagctcatcatctacctgaagcccaacctgccacgtatgtcgctactcaccggccatgaattcttgtgcgttgagacgacggccgttgctgactttgtgtgagtgtcctcgaacaagatgtatgcataggagtagcacatccgatgatgcaacgaccaggtgtactacctcgttgatgaacccgggatgcacttcgtntggtagcccagccaagagtcatcggtactcgccatgtca

SEQ ID NO: 36693 - DNA, 439 bp, Zea mays
  unsure (1)..(439): unsure at all n locations
tctaaagggagaacacgtgataggtttgactaacgtgctattcttaaaagatagaccttgtgcagctggtcaagcaggtaaacaagtgggaggagcacatcacagcaagaatgtgatgaccacctcaagacctctggagctgctgcatatggacctcttcggacccgtcgcttatctaagcatagggggaagtaagtatggtttagtcattgtggatgatttttcccgcttcacttgggtattctttttacaggataagtctgagacccaaggaaccctcaagcgcttcctaaggagagctcanaacgagtttgagctcaaggtgaaaaagataaggagcgacaatgggtccgaattcaagaaccttcaagtggaggagtttcttgagaaagaanggnataagcacgagttctccgcttcctacacaccacaacaaaat

SEQ ID NO: 36694 - DNA, 169 bp, Zea mays
acgcatcacaacaagaatgtgatgaccacttcaagacccctggagctgctgcatatggaactcttcagacccgtcgcctatctgagcatagggggaagtaagtatggtctaattattggtgatgacttttcccgcttcacttgggtgttctttttgcaggataagtctg

SEQ ID NO: 36695 - DNA, 407 bp, Zea mays
agaaagccgcttctgtttatcatccgaagcccatgctcttatgtgaggatatagcatagcagaatgtgctgttgggctctcagttatccgaagaacaagagaaaaccttgataaggtttttgttcaacaacaaagatgtttttgcatggtcagccaatgatctctgtggagttaatagggatgttattgagcattcgctcaatgtcgatccatccttcagacccagaaagcaaaggcttcggaaaatgtcagatgataaggccgaatgtgctcgcaacgaagtcaaaagactcctcagtgcaggagttatcatagaagtaaagtacccacaatggttagctaatactgttatggtaaaaaaggccaatggcaagtggcgaatgtgtatcgattttacagaccttaac

SEQ ID NO: 36696 - DNA, 457 bp, Zea mays
  unsure (1)..(457): unsure at all n locations
gcttataagncctctacacctgtggtattaccatctttactagattagacattttggaaggtcaatcagtgcttaacggtaattttggacagatttggacaaaatccataactggagtctcaagcatccaaatcaagttattctatatttttagaaagctagtagaattgtctacaatttatttataaacatatcaggttaattcaatgcatatcaaggccaaaagacatgaaaaaggccatgttgtccaaatttggacagattcagagatcgcactttaaacagctataacttagcctctagaccaccaaaaagagtgattccagactttttggaaagcttaagaaaagtattaccaactttttgttatttataagaactgattccacaattaactggggcaaacaaggtcattctcgaaatctgtatanaatgtggatagattctgatactggat

SEQ ID NO: 36697 - DNA, 479 bp, Zea mays
tcggatctcttgccatggaactcttgtcaacatgaccagaaattacttgggagtcggttttaaggacaacccttcttatccccattgcctttaacttccaaagccccaaaagtaaagcttcgtattcaacaatattatttgtacagttgaaatcaagctttactgcatagcatgttctgactttggaagctgcaactaagacagcagccgcacctaccccgaaggttccccaggaaccgtcgcagaacactgtccaagcttcggcatctttatttgcttcttcttcctgagcccctggcgtccaatcagcgatgaagtctgctaacgcctgtgactgaattgaggatctatgcacataatcaatgctgaattcattgagttccgcggcccactttccaatccttccagtggcttctctgtttctcatgatatccttcagaggctgtgacgaaggaacaattatatggaatgcttgaaag

SEQ ID NO: 36698 - DNA, 340 bp, Zea mays
cgacattgatgcttccgacgacgaagacacgacgtatgactactccactatattgggaacctaggtggaggcggcacccatcttggatcgagtggtacatatttaaactttttttactcaattttaaaacttgacatgtatgttatctatatatgatgcacattgtgttgtacagctattgactgtgggcaacaacatctatgacacattgagacgctcggtcaggatattgatgccaactttgattgggacgaaacaacatgcgtagcttttagaggtaagctttaagagtcttgttgtcaatatttcgatatgtattagtacatgttctgcgtcatcg

SEQ ID NO: 36699 - DNA, 392 bp, Zea mays
  unsure (1)..(392): unsure at all n locations
acctgggctgcagcttcactcttttgtatccaatccattctttacatatagcaagntgggtcttagagtgcgaccctctgctgaagaggtccgttccttaattgcttcgctcggggagatacctgatgatgaacggcagatttattttgaagtgcccctgaaccctagtgatgcagacataaatgacatgctcgatctgctagccgaggattcatctgatactgctcctgatggtacattggcagtggtgccccttccagaggttgatgcgaccttggacgtctcgaaacctgtcagtactcgcccgaggcgccctatccgaaccattcagcccgagccttctgcagatgagcagaagaagaaaagaagacgccttcgcgagtgtccagctt

SEQ ID NO: 36700 - DNA, 407 bp, Zea mays
ctcaagctttaagggagaacacgtgataggtttaactaatgttctattctaaaaagatagaccttgcgcagcttgtcaagcaggtaaacaagtgggaggagcgcatcacagcaagaatgtgatgaccacatcaagacccctggagctgctacatatggacctcttcggacccgtcgcctatctaagcataggaggaagtaagaatggtttaattatggttgatgacatttcccgcttcacttgggtgttctttttgcaggataagtctgaaacccaagggaccctcaagcgcttcctaaggagagcttcaaatgagtctgaactcaaagtgatgaagataagaagcgacaactggttcgaattcaaaacctttattggaggagtttctgaggaggatggatcaacac

SEQ ID NO: 36701 - DNA, 426 bp, Zea mays
  unsure (1)..(426): unsure at all n locations
agcttaccacattngaagcatgagcgttttttctttgtcttggtcttgcttggctgccccttgcgaccttttagcgtcgtcttgaatctcttgatgatgagagccatctcttcatcattaagtccggccgcctcaatttgtgccaccttgctaggtagcgtctccttgcttcttgttgccttgagagcaagaggttgaggctcattgattggaccattcaatgcgtccgccacgtattttgcttccttgatcatcattcgcccactcacgaactttccaagtttctcctcgggtgtcatcttggtgtacctaggattctcacgaatattgtttacaagatgaggatcaaggatagtgaaagaccttagcattaggcggacgacgtcgtggtccgtctatcgcgtgctttcatagcttcttatcttg

SEQ ID NO: 36702 - DNA, 403 bp, Zea mays
  unsure (1)..(403): unsure at all n locations
tcctcaagcanaggagggggaaggacttcatttcctgttccaagaaagtatgctacaaatgtggtaagcccggtcattntatttcaaaatgtccactatctagtgacagtgacaggggcgactacaataaggggagaagaaaggataagaagaggtactacaataagaagggcggcgatgcccttgtttgtcgcaagtgggactccgacgaaagctctatcgacttcttcgacgacgaggacgccgccaacatcgtcgtcaccaagggacttctcttcctcaacatcggccacaagtgcctcatggcaaaggaccgcaaaaagaagaaggttaaatccanatccctcactagatatgagtcttctagtgatgataatgctagtgatgatgaagacaacttacg

SEQ ID NO: 36703 - DNA, 303 bp, Zea mays
  unsure (1)..(303): unsure at all n locations
ggagtcccgtccaaggcttcacctgaanaaagaagcttttctcatgataggactttaggggaagcaagcatatatttctgggcataacggatctatattagataggtcgaaagaggcttatatgattaagtcaagatacctacattgaccaagtttgaaacggttcaacatggaacagtccaagaaaggtttcatacctatgtcacatggtaaacaccttagccagatgcaatgtcctgcgactgcttatgagcgggagcgcatgagttaagtaccatacgcctctaccatagatcaattatg

SEQ ID NO: 36704 - DNA, 408 bp, Zea mays
gcttttgaaataaatgttagtttatgtgagtcgcttttctttttctttatccccgacgctctgtgatgtctgcaagacgggtgagacgttcctggtgaggctaggaaagataccgaacttgtcaagtagttcaagggcacctacagggttgtctgaagtccgttggacaaggacaactgtaggtgggcctaattacttgggaggttccgtcacagcctatccggctgctctgacgatggccacagcctctgcgacgagggttgcgacccgagtctcgagtggtttcacatcgatcagggggatcacggctaggacaaccacctcggcatgccgcaagatgacaacgcctccgtgcctgtgtctcgcgttgacatcctgctggagctagctgtggtcacagtccctact

SEQ ID NO: 36705 - DNA, 388 bp, Zea mays
  unsure (1)..(388): unsure at all n locations
aaaaattcagaaacagcacggacacacgagaaagtccattctgtctatttgtatgggatctcgtttctttccgggttaaacccgtattattctgtatttgagaaatctgggatcgacccaatacacattagtgcattagctaaagcctcatatccttaggtaataaattatagcacaagaggttattctagccatagactctcctcaatgacaagtggcctataggctcatacaacatcgaccatagctatatattcaccactagctatctaacaacaataaagtgtcatccatctgtatctacttgtattatgttgntgccctgctcatcaatcattagtaaaccatcaatattatatgtggttgtattaatatgactttctacttg

SEQ ID NO: 36706 - DNA, 447 bp, Zea mays
  unsure (1)..(447): unsure at all n locations
aaatgaanttatatctcgggtttactcccggttgatctgaaanatatcgccgacatgattgaaaanaatttcgcacagacaggcagcatcctccagtaagccccaaacgtcggtcggctcctagtgtgagcatccatagagaatgtctcgtgcgagctcatccaacagattgcaaggttttcccagcttcgaccatgtccctctcgtccagtgtcctgattgcacccggtcagagccattggttacgctcacgacgaaaaaatcagaatacggcaactacggcagagaattcgtaaagtgcgaatgcaaatcacaaccccgcaaggatcatgatcatatcccttgtatgttacgtagattatcatccatcctatatgtcatgtgactttagaataattctgtgcgtattgtgttgtatattagatcctaagaagtgcacatttttat

SEQ ID NO: 36707 - DNA, 457 bp, Zea mays
gcttatgaagattcttcatcccaacatgagcttttctgtggtgccagagccaacccatgttagtcttagcaagtaagcaagtgtcgagttcagctctatcaaaatctaccaagtatagctgaccctctaacactcccttaaatgctattgaatcatcacttcttctaaagacagtgacacctacatcagtgaatagacagttgtagcccattcgacataattgagatacggaaagcaaattgtaatctaaagaatcaacaagaaaaacatttgaaatggaatggtcatgagatatagcaattttacccaaacctttgaccaaaccttgatttccatccccgaatgtgatcgctctttggggatcttggtttttctcgtaggaggagaacattttcttctcccctgtcatgtggtttgtgcacccgctgtccatgatccaacttgagcccccggatgc

SEQ ID NO: 36708 - DNA, 239 bp, Zea mays
actaagcttaacggtagaatcaacggcagtgatgacgtggctgtgtcacctgacatgtacggtgtgcaccggactgtacggtgcgccatcgaacagacaggctcccaacggccacttttggtggttaatacattatctttactacatatactaatttatctatataattctatccattaaatatcaatatttatatactttcatattaataccattataactattacttttattatatt

SEQ ID NO: 36709 - DNA, 285 bp, Zea mays
ctgcagcttagaaatagtgattttttgctttttctcattttctacatattctaaagctctgctgtaaaagaaaaaggaaaatgattaaacagaactgggccggatgcaacccagcggcccaagtccacgcggaatcgcgcgcgcgtccgcgcccgcggggcgagtttgcgcagaggccctcggcgttttggctaactggagatgggttcggttacttgttttctgagtcactgacgattcacaaaaagaccctccggtttctatctattcacaatttgaagtcct

SEQ ID NO: 36710 - DNA, 367 bp, Zea mays
aagggaaacaagagggagaaagaagatacattacaagaaggcgaagggcgatgcgcatctatgcaaggagtgcgactcggaatgctcctcttccgactccgacaatgagagactcgtcgtcaccgccttcaacaaatcaaccctctttctcaatgagcgtcacacatgccttatggtaagggagaagaatgtatgtactcgcaacactacctatgcttcttcaagtgaggacgaatctaatgatgacgatgaagtacattattcatgtttgttcacgggctttgatagatctaatatagacaaaattaatgaattaattgatgccttgaatgaaaagaatatactttttgacaagcatgaggatttg

SEQ ID NO: 36711 - DNA, 435 bp, Zea mays
ttgtgacaatataggtctattttattaatgttatgtggcggttatcgcctcggcccaataagaatccattcattatattccgcttacatagacctaaccatattaatgagagttctattctttcttttaacaataccattttggtccggggtatatttggaagagaattcttgttaaataccctgtcatcacaatattcatcaattcttgcatttttgaattccgacccattatcacttctaactgtcttgaatatcaaaacaaattgattttgagccaatatagcacatgacttgaatggttcgaacacattagatttatctcgaagaaaattaacccagtgaatctagaatataattcccaatctcaaaacaatatgaatttacccctatactcacaaactaagttgggcccaaataatccatgtgaagtatt

SEQ ID NO: 36712 - DNA, 462 bp, Zea mays
tgcagctttactacccaccaaaaatccaaattgtgacacataaaaattaagcaaagaaacagaaggggtgacttaaatatgaaaaaaaacgtaagcaaactatcaagagaggaggaccatctgcacaagatcgtaagcagaaatccagaatttccaagacgagctcacagcacagatcataaatcactgcatcatttaacagtctctggtgttgtccacgcaagttggattactggacacatccaatgttcaaaccaacaaaaccttcatataattctcacaaataaaacactttggtcctcacatgatgacacaagtgccacaccagctgagctctgtagctctattgagccgattgggcagcagctcagtatcaaacccaaacattccaaagctagcatctatacctctctcgacaccccacttccccacaccaaacaaatactttttctaatttcttta

SEQ ID NO: 36713 - DNA, 285 bp, Zea mays
ttcatctaactattttcacacatattcttatgcagtcaggctttatttcatattacttcgacaaaaagaagagggatttctttcttcgtgaagcgtgaaaagacaggatggtgtttttttgccagcggctcaaaaatggtacgttcgaaggtttcacgcatcacaaagaaatatattgcatcaatacatatgaaaatatttgataatcgtttcttacaaaaacaaaaactacgtacaaagactgtctgtgtttggagcccgaccgcacacctagggttaccctcc

SEQ ID NO: 36714 - DNA, 367 bp, Zea mays
  unsure (1)..(367): unsure at all n locations
ctaagcttctattaaatatgactgcgcctaatcaggggtatnattatattgaaggtgtatgtgcngcaacttcccactatccttgatgagcaacaagcacctgcattgagtaatgcaagagtgagaatgaacatcttaacaagcgaataattctgacgagatctttaaaccacatattgaatttatcaacattctaaaagagtcacaattcaaatcagaaatactcgtagatatggaactcagtagtcccactataaccaataccatctcattttcttaacaaacccaataggttctataacactttcgtgcgtcaaaatacctgcaaaatcacttcaatgatgcaatgaatgctagtgtatgtgct

SEQ ID NO: 36715 - DNA, 291 bp, Zea mays
tttgtgtgcgccctgccctttcagcggaaactgttgccactgcttaatgaatcgcaaccaacccttggggcgcgggccgcaccattttatgttgcagatatatcaatttgcgtcatcgttttatatattaggctacaccagcgttaaggcccttactgcttaaaaataccccgcctgccctctgcgactgtgtattattacatttgcgcatgaaccatacaacgctgttaactgatgccacggttagacctgcgctgcgttaattgcctgggaacggggcaaaatttcatt

SEQ ID NO: 36716 - DNA, 439 bp, Zea mays
ctgcagcttctaagggagaacacgtgataggtctaaccatatgttctattctaaaaagatagaccttgtgcagcttgtcaagcagggaaacaggtgggaggagcgcatcacagcaagaatgtgatgaccacttcaagacccctggagctgctgcatatggacctcttcggacccgtcgcctatctaagcatagggggaagtaagtatggtttagttattgttgatgatttttcccgcttcacttgggtgttctttttgcaggataagtctgaaacccaagggaccctcaaacgcttcctcaggagagctcaaaatgagtttgagctcaaagtgaataagaataaaagcgacaacgggtccgagttcaaaaaccttcaagtggaggagttctttgaagaggaagggatcaagcacgagttctcctgctcctacacaccac

SEQ ID NO: 36717 - DNA, 406 bp, Zea mays
acacaaaacaccaatttcccatgacagtgagaaactttttttcttattgatcaaagacaatgaccatctacagattgtgaggttgccactggcagcgaggcattgacatgccatagcagactatgggggtgtttgaatgcactaaaactaatagttagttggctaaaaattattagtggaattagctagctaacaaataactacctaactattaactaatttactaaaaatagctaatagatgaactattagctaggggtgtttggatgtctcaactaattttagtggctaattgatgatgttatatatgtagtatcacgaaatgaggaaaaaggacgtcataaatcagaacatcaatttgtgcatcatgtgttgataattcagtgatactttgtaaagctctctt

SEQ ID NO: 36718 - DNA, 451 bp, Zea mays
  unsure (1)..(451): unsure at all n locations
gatcttaagcaccgcagctgcagcttngaaggcttacggcccctcgatgtttctatccgagggctcanatcgagcggaggtaagcgggattggtttggtcacggtggtcgccctcgggcagctctggcgggtcgcggagaggtcgcctgagctgcgggctggctcaagaaggctangcacggtgcggagggggcgacaggaaggtggccgtgcatgagggtgggctttatagccactcgcgggcacgacacgggcgtgggcacgggggcggccgatggcgctcgtgcggacgtgctctgggcgtgttcccgagtgcctgcccacgtcgaacacgtggtggttaacttctgctggtgttcaaaggcctcgttggtcgccttagcgtgtagatctcacccaanattccatgtacggtctcttctctgcaccatatcctatcttttccatgtga

SEQ ID NO: 36719 - DNA, 468 bp, Zea mays
  unsure (1)..(468): unsure at all n locations
gtaanaaagcaagccccaatatactttgtattctaagttattagtttatcaaagaaaaattatacaaaattggagaaggtgttgtatacttgtttgatggcctccacaaagcttcggcactactttcaagcatacaatatagttgttccttcttcacaaccattgaaggatattatgagaaatatagaagctactggaagggttggaaaatgggctgcggagctcaatgaatattgtattgattatgtgcatagatcttcgattcagtcccaagcgttggcagacttcattgctgactggacgccaggggctcatgaagaagaaacgagtaaagatgctgaagtttggacagaattttgtgatggatcttgttgaacctacggagcaggagcagctgctgtgttggtcgcacctttcaaagttaaaacttgttacgcaacaagacttgatttcagttgacaaataaca

SEQ ID NO: 36720 - DNA, 461 bp, Zea mays
  unsure (1)..(461): unsure at all n locations
ctgagctgcaagctggaaggtcttatcccacatgttcttatcggctatgccacagccagcccatgctagtcttagctattaagcatgcatctagaccggcctctgttgaaacttgctctcagcagcaaggaggccaacaaggatgaacagtggtgacaacagggatacgtgctcgggggcaaatagctctgttaatgtctagcctctcacgggcactgtgtgggggtatttataggtatctgagtgcccagcgccttgtgttaaggacgcatgtgttctcggacacctagtttatccccagaatattcccataaagcagggttacaagctgtacttacaagaatgcctttacaaactaggctcgtaacacaacggcggtcacgcggggcccgttacaatgggccagatcacacgtgtgcctcaaagcaggacgaggccgtgctgcngggagacgtcgtcgc

SEQ ID NO: 36721 - DNA, 478 bp, Zea mays
tttgaacgtactaagcacatgtcgggaaatatggttctctgtaatctattacttgagtgaagccgggcgcggactttatccctcacgcgacctgagactgggtctcccatgctagctatggtgggtacaagtgcggtcactgcacggcggcagccggggtcagtagagcattgtatgccaaggcggtgaggcctggacgcgaatggggaatcgatggggacggttgacatgtatggtgacggagtgccctaacatgtcgtgtgtttaggtttacccttgcaggataaaaactcgattcgaatcgtctgcttctcgcagctaatgagactgcttgacctcttgtactacatcgagtaagaagtgaaatgatgttacatgagacaatatgttgatcgaacataatgcttgtcaccatgtatgcttataaggagcacacgtagctaagatataatactagaattcgaaaagctaagaattg

SEQ ID NO: 36722 - DNA, 373 bp, Zea mays
tctcaattaatcacaggtcatgtcgacaaaagcaacaaggcaaaatatcctaagttggaaaaatatcttgatacagcccgaaggatggaggcctctttcgagggattctcggtaaaccatattctaagaggggataatgagcaagtagacctgttagccaaatcagcggcacatgggcttccactcccatagaggtcttcttcgaaaccctcaaagcaccttcggttgagcttatggaaagggttatatgaaagggaattaggcttacacctagtttctaaataaatttggtggttgaattgcccaacacaaataattggactaactagtttgctctagtggacacattatacaggtgcccaaggttcacact

SEQ ID NO: 36723 - DNA, 404 bp, Zea mays
  unsure (1)..(404): unsure at all n locations
agtcataaatgaccccaataataaagttgaatcacacttatacccctgtgataccagaaaccctaattggaaccctggaaaatcctaagaccaaaccctaggggcttatgtgcaaaagtgttgaacttttgggctaaagtgcaaaaaccaagctaaataagtattttaagtcatctggttcacaaatatgtggacttgaaagccaaacctttaagtttggacttaaatgcaaaatggacctcatttgagttctatactaagtctgaaattcagtgttgaaggctccactatggagctttgtaactctcanagcatagggtatttgccctaggtcaccacattatagctgaagaccaatcataggagaacaactttgtttatgggttcagccatgatcctatgag

SEQ ID NO: 36724 - DNA, 337 bp, Zea mays
  unsure (1)..(337): unsure at all n locations
cctcnttctctacacaaactaacctttcagcagctcatgccctctattgagaaaattgcagatcttctcccaagctggaaggcanaagttgtgaacaaagctggcagaataattctagtgcagcatgtcctaactagtatgacaatctatactgcaatggctattgatatttctaagtgggctttggatgcaattgataaaattataaggggattcttatggagaggcaaaaaggatgctaaatgaggtcactgtttggtagcctgggaaaaggtttgtaggcctctacatatgggaggcctcgggatttctaacctgactaagctttgttgggctc

SEQ ID NO: 36725 - DNA, 458 bp, Zea mays
ctaagctttaagcgtcattggttgctacatgggtagacttcttcttcttcttctctgtcgccttaaaagccaccggttgtgcttctgatgtggagggatcatcaagctcgttgatcttctttgagcccttgatcatacattcaaagctcacaaaattcccgatgacttcctcgggagtcattagtgtgtatctaggattaccacgaactaattgaacttgagtgcggttaagaaagatgagtgatctaagaataaccttaaccacctcgtggtcatcccatttcttgctcccgaggttgcgcacatggttcaccaacgtcttgagccggatgacatatcttgtggctcctccccttggcgaagacggaagcgactgagctccccctcgatcgtttcccgtatggtgatcatggtgagatcatcaccctcgtgcgcggtcttgagtagaatccaaatct

SEQ ID NO: 36726 - DNA, 445 bp, Zea mays
  unsure (1)..(445): unsure at all n locations
acctgaagagtaaatcagacaaactattcttcacacattaatattgaatagggtaggtatgctacaatccagttatgcaggcatattaattcagtattccctagacaaatataacaagcttgacttcaacttaacttgtttaatatttataaatgaagtgtcacatcctgatagtactaattntcaaggggggcagaaacaaatgagatgcagcccgacagaatattcccgagttccaacttctgacagaagttaggtgcagtaggtgtttggttggtcattgcgagaagtatgaataagcaattgagaaaaaaattaaactatgtaaaatggcatgaggaactctccttcaggtattagtcgaaatatcgctgcagtgtcaatgttatgtgacatggttatagcatatcacaagaagcacttcaacactaaaattatatcaatc

SEQ ID NO: 36727 - DNA, 323 bp, Zea mays
  unsure (1)..(323): unsure at all n locations
aagtgtcgagttcagctctatcaaaatctactaagtatagctgaccctctaacactcccttaaatgctattgaatcatcacttcttcttaagacagtgacacctacatcagtgaatagacaagtgtagcccatttgacataattgtgaaacggaaagaaaattgtatctaaagaatctacaagaaaaacattggaaatagaatggtcaggagatatagcaattntaccaagacctttgaccaaaccttgatttcatccccnaatgtgatagctcgttgggaatcttggttttctcgtaggagggagacattcttttcttccct

SEQ ID NO: 36728 - DNA, 410 bp, Zea mays
  unsure (1)..(410): unsure at all n locations
agctggcagaccatatactcagacccaatgtttatcaatanaggggagtgaagaaagggttattaaattgggaaaanaaggtacaaagataatgaccaggaaatgtcagaagtgtggaattgctgatggtcacaacagtatgacatgtttgtcaatggaagaaaatagacaaaggttggctagccttgcttgacgtaagagaggaccaccttcaggatctatgaacaagggtggcagaaagctcctgattggaatgagacaaccacatcaaaaaaacacccctatgatctccatagtagtgagtcagacagtgattagaatggtgtatgagataccattaatttgtgttttacaataaaccttgcttgtttggcaactgatttatatagaggtggatattgaaatctaat

SEQ ID NO: 36729 - DNA, 443 bp, Zea mays
tactcaagcttctcctggaccagcgctgcacttaccgctgagtgcgattctgttatatataataacaaaggagcccctggcattggtggagtcaatgttgttagatctattagatactggtttagctcttcaaaggccttctgttggattggtccccattgaaagacttcggctgacttcagtacttcgaagaatggtaagtttctctctgctgatctggatatgaatctattgagagatgccaatcttcctgtcaatctttgagccccttctttgtagatggtggctccatccgaagtatagcttcaatttacttggatagcttcatcccctttgttgaaaccagcatccaagagatttcccttctcactccgaaacgcattttctggattaactttagccaccttgctgaactgcgaagtctctgcgatcacaatatgatc

SEQ ID NO: 36730 - DNA, 401 bp, Zea mays
  unsure (1)..(401): unsure at all n locations
taatgcgacatgagctatattgttatttctatccagcccatgctagtcttagcaattgagcatgcatctagaccgacctcctcttttacaaaatcaactaaatagagtttgccgactaatacactcttaaaagctaatgaaccatcacttcttctaaagacagacacatctacatttgtgaataagcagttatatcccatattacaaagctgactcacagacaacaagttatatccaaacgactcaactaaaaacacattggaaatggagtggctcggatgaaatagctattttcctaaccctttcaccttgccttgattcccgtcaccgaatatgattgagtcttgggaatctttgttcttgacgtaggaggtgaacatcttcttctcccncgtcatgtg

SEQ ID NO: 36731 - DNA, 412 bp, Zea mays
  unsure (1)..(412): unsure at all n locations
tctctggtgtactcatatcactggttctccaataccttcatcttttctcttatacccttgtatgttatcgccttcgaccctagcgatatttatgtcttctacctaaatgcttaccttgaacttatcctttaaaagcctccctttctttcaacctagtttgagagctatgggttacctatctctcccttgatttcttttcacttcttgtcgccttacaagttttgtgttaattccatccgttgctgtttttttatttactatcaccttcaccttgtcgtccatcgaccttgccttgatactcatctttattcctactctntaaaaaaatcccctctcttccacctcaatntgagagtgacnagttacctatcgggcccttggacgtatcctcttcttttcacttgcagatctt

SEQ ID NO: 36732 - DNA, 386 bp, Zea mays
cctaaacaccaaaaccctaatcttctagtgatgcgtgccctaagatcttcagttctgacttcaaaaaccttatgttcctggagccccgtgaaggaaaattgtattcaagaccttttataatatacttttattatctttgcattttcataagcattacatgagcattcatggttatatatgtgactgttgggcgaaggcgaagacgccacccttcgctcgatgccttcgccgacctcgctgcaccaacggagacaagacgacgggcagactcacccttcgttccacacgtcggcggacgaagacttgtgacgaggtcgtctcatcttgtgacctcgtccaacatggaggcccacgtgtgatccggcccattgtaacaagctctacgt

SEQ ID NO: 36733 - DNA, 467 bp, Zea mays
gacagcgaacgttcttcattctcagataggcttgtatgtactaacatatgttgatgacatcattgctaaaagcacgaagcatgataaccacattactgatttacaggagaccttcgctaatttatacaggctggcttaaagctgaatccagaaaaatgtgtcttcggagtaaagaaggggaaatatcttggttgcctaatttcaacaaagggaattgaggctaatccaagtaaaatcgaagctatacttcgaatggaaccaccaagtacaaaaaagggggctcaaagattgacgggaagactggcatctcttaacagattcatatccagatcagcagagagaaacttaccattcttcgaagtgctcaagtcagccaaagtctttcaatggggacctatccagccagaaagccttctaagaggtgaagcaataattgatagatctaacaacattaactccaccaacgc

SEQ ID NO: 36734 - DNA, 448 bp, Zea mays
agctatatatggtagtaagagcagaacccttctgtatagtgatcagactggtgaaagacagtgctttggacctgaaactattcaagacgcacaagaacaagttcaaatgattagggagaacttgataatagcagagagagagcgggtgtgcatgggtaacggttcggcgcactgacgaggcgggctccgcgaggcacacgggaagaggggcgcgagggcataggatactggtgccgacagcccgatcccactatgcagagagagggagagagagcgcgcggtgaagggaaccaccgctgacaagtggaaccacctgttaagcggcgcgggcgcgcggcctaactgggccggctgggctgctttggctttttctttctccctggaatatctaactgttattccatttctgtttctctaggggtgtcaattcaaactcaaaccaagtgtc

SEQ ID NO: 36735 - DNA, 398 bp, Zea mays
tacgaagattcatatactgcagggtgaataaaagataattaagccgaactccctgagtcactggtgtcttctgtgtgataactccatggcgttgcttcataaggatcacaaacatctttgcctcacctttcgaagcatacacaaatcaagccttgtgacttgaaccatttcaccatatatgagttcaaatcatggcttcaagtcaccttactgatgcatcaacacaatataactcttcatagctgattcgttcatcgatttattgcaagtactctcttcttcaccttagcaatggtacctcggttcacaagttgtcgcttgtcttcacctatgttaatacctccaagcattttcattgctatcttcaccctatcaagtcattctatgaacacattata

SEQ ID NO: 36736 - DNA, 415 bp, Zea mays
  unsure (1)..(415): unsure at all n locations
agcttctnctgaacaagtgctgcacttaccgttgtttgctaagctgccacatataataacaaaggagcccctggcgttggtggagttaatgttgttagatctatcaaatattgcttcagcttttcgaaagctctgtgctggattggtccccattgaaagacttctgctgacttcagcacttcgaagaatggtaagtttctctccgctgatctggatatgaatctgttgagagatgccagccttcctgtcaatctatgagcccccttttttgtacttggtggttccattcgaagtatagcttcgatttgcttgggttagcctcacttccctttgttgagactaggcaaccaagaaatttccccttctgtactccgaagacacacttttctggattcagctttagaccagcctgtct

SEQ ID NO: 36737 - DNA, 310 bp, Zea mays
  unsure (1)..(310): unsure at all n locations
tgtgcttgccttgtcctcctctttcatataaatcttttgtgttcctgacaagcaatcgaggagggacatgacttcaatgcctgctgcgctatcgactattttgtcgatccgtggaaggggaaattatccttgggataagccttattgaggcttgtgaagtctatgcacatgcgccacttgccactcttcttttgcaccatgaccacgttggcgagccatgtaagataagcaattggctcgatgaatcttgcttctaatatgcggtgcacctcggccttggctgcttttagtnttctcatcggacattttg

SEQ ID NO: 36738 - DNA, 445 bp, Zea mays
  unsure (1)..(445): unsure at all n locations
aagattctgcatgccagcatggttttgtctttggtgccatagccaacccatgtgagtcttagcaatgaagcaagtgtcgagttcagctctatcanaatctactaagtatagctgaccctctaacactcccttaaatgctattgaatcatcacttcttctaaagacagtgacacctacatcagtaaatagacagttgtagcccatttgacataattgtgaaacggaaagcaaattgtaatctaaagaatctacaagaacaacattggaaatggaatggtcaggtgatatagcaattttacccaatcctttgaccaaaccttggttcccatccacgaatgtgataattcggtggggatcttggctattctcatatgaggagaacactctcttcttccctgacatgtggtttgtgcacccgcttgttatgatccaacttgagcccccg

SEQ ID NO: 36739 - DNA, 379 bp, Zea mays
  unsure (1)..(379): unsure at all n locations
ctataataatcaccattatgctaaaagctaatggttattcatcgtttttagaccttcggaagaggaagacccccaacaactggttatgtgcgtaataccaaacatatctctaagggtccctattttatataataaattttaacatttataatgaatactaaggaaatgtttggaactgctctaaatccaaaaaaaatatcttagttggtaaaacaactcattaggtgttctaaaaatcacgttggagttgaaaacctttagaaacatttagataagtcattttatttattatttaaatntaaaaaaatatttttaaagctatttaaatctaaattataaactagaattctcgttggagctgaaacctgtccaaacacct

SEQ ID NO: 36740 - DNA, 409 bp, Zea mays
  unsure (1)..(409): unsure at all n locations
taagcttgtatcccctactgcaagcaccccggggcaagataatataagcctcatttcttctctngngtttcatcttgcactaatccatctgggcagggacacgcggcacaaaattcacttgtcggttcggttgagggtcccccgggtccgagacaccgacagttggcgcgccacgtaggggctcgctgcgtgttaacaacactctcccgtgaggttctagatggacaatcttcagtaacctcttcagcctaggacggcgctccgctttgggagtctcgagttatgtccnccgcnatagctgttgggggccttcgtcctccgaaggtcctcaaaaacatgatttgacaatgttttccaagtggattatgtgaacaggtaccttcngactcagaatactaacatgaagtgc

SEQ ID NO: 36741 - DNA, 439 bp, Zea mays
  unsure (1)..(439): unsure at all n locations
tgcaagctttgataccaatagaaagtctcctatatgtgttaataggngaaatctaaaaattataaactttgaacacgaacttcacccggcggttatgattataaatgagtaataacaaaatcggagtgcggaagagagttcttcttatgagttgctcaatcaatgcggataactttgggagctaactcaaaaaattgtaagcaagagaactttatagagaggggagaggaagaatcaaatcgtaaggtaatgatcaacacaaatgaacataatgatttgtttcccgaggttcggntccaaagaacctactccccattgaggaggccacatangtcgggtctattataaccctttctctctctaaaacggtcacttagaccggttgagtgcttcttcttaatctcgacggtcacttagaccccacaggatcaccacacaa

SEQ ID NO: 36742 - DNA, 388 bp, Zea mays
tctatagggggaaacacattctacgacttatttatgtttatattgagaaagacagaatttgtattgcatgtcaagcacagaaacatgttggagttcatcatccacacaagaacatcattgtcggcgtttccaccccggcgggtccctggactgacgagtaaatttgtattgcatgttccatcccaaattggtcagcgcgagacggaacacaacgtgggaaaaacagtaacgggaaatatcgaccttgtgttgtcctgcacccaaggcggatgcgcttgcagtatggggttacaaaccttctccagggagagagaaaaagaaaaaaactgtcctcaacccgtctctcctcgcaacctttttgtgaaaccctgacctcctttataattaa

SEQ ID NO: 36743 - DNA, 394 bp, Zea mays
  unsure (1)..(394): unsure at all n locations
ggcatttatactagaataactacattttatttatacttactgcctattcagtgtgcacttatttgaagtctatgctggactcctgaggtcaatccatgatactatgcaatggtcataagtagactaacttgtaatagcataaacccgagctcatatatgtcaacattttcaaattgaagaatggtggatctgattattttggcaagggtgttcttaaggttagttaaccaaccaatgtttatatttcagtctgagggtattatactaactntatttgccatgcactcgtattcaccatagtcattcatgcatccaatattccaatggttatggttaactctatataataaaaccaacctttctattcttcacctataatgtgcatataatatat

SEQ ID NO: 36744 - DNA, 470 bp, Zea mays
ctggatctcttgccttacaactcttgtttatattaccagtaaataactgggagtcagttttaaggctcgcccttcttatacccattgcttttaacttccgaagccccaaaagtaaagcttcgtattcatcaatattgtttgtacaactgaaatcaaaccttattgcatagcatgttctgactttagaaggtgcaactaagacaacagccgcacctgccccgaaggttccctagataccgtcaaagaatattgtccaagcttcggcatctttattcgcttcttcttcctgagcccctggcgtccaatcagcgatgaagtctgctaaagcctgcgactggattgaggatctatgcacataatcaatgctgaattcattgagttccgcagcccatattccaatccttacagtaacttctctgttcctcatgatatccttcaaaggctgcgatgaaggaacaattatattgaat

SEQ ID NO: 36745 - DNA, 422 bp, Zea mays
gagaacacgtgataggtctaaccaatgttcaattcgaaaaagatagaccttgtgcagcttgtcaagcaaggaaacaggtgggaagagcgcatcacagcaagaatgtgatgaccacttcaagacccctggagctgctgcatatggacctcttcggacccgtcgcctatctaagcatagggggaagtaagtatggtttaattattgttgatgacttttcccgcttcacttgggtgttctttttgcaggataagtctgaaacccaagggaccctcaagcgctttctcaggagggctcaaaatgagtttgagctcaaagtgaagaagataaggagcgacaacgggtccgaattcaagaaccttcaagtggaagagttccttgaagaagaagggatcaagcacgagttctccgctcctacacaccac

SEQ ID NO: 36746 - DNA, 359 bp, Zea mays
tcctgagaagtgtgtcttctgggtgccccgaggcattctctttgggttcatcgtctccgagcggggcatcgaagccaacccggagaagatcgcagccatcaccagcatggggcccatcaaggacttaaaaggcgtacagagggtcatgggatgtctcgcggctctgagccgcttcatctcacgcctcggcgaaagaggtctacctctgtaccacctcttaaggaaggccgagtgcttcacttggacccccgaggccgaggaagctctcgggaacctgaaggcgctcctcacaaaggcgcctatcttggtgcctccagctgccggagaagccctcttggtctacgtcgccgcgaccactc

SEQ ID NO: 36747 - DNA, 316 bp, Zea mays
aaacggggcaaactatgatggcattgtcttgacaaaaactactatgttgccaagcatttgcaaaataatatgaaagctcaagtcaaagtgagaaatcgcctgattaaaaacaaacaaactcttgtatcaaccaagaaagaacctgttttttcaatccttaggggagaattctatggacaagctcaattttaaaatttctatcttaaaaaaaaacttggccgacgagggaaagaccgctcttccggtattatattaagaagagaccgaaacaatggtccccgccgagaaaatccccgaacccttggcccccatcact

SEQ ID NO: 36748 - DNA, 434 bp, Zea mays
  unsure (1)..(434): unsure at all n locations
tctaaagggagaacacattntgggactaacaaatgttaatttttataaagacagggtatgtagtgtatgtcaagcaggaaagcaagttggtgtccaccatccacacaaaaacatcatgacgacatacatgccactagacttactccacatggatctattcagctcgatagcttacataagcatcggcgggagtaagtactgtcttgtaattgtggatgaatattctcgctacacttgggtattctttttacagaaaaaatctcagacccaagagacattaaagggattcttgagatgagctcaaaatgagtttggattaaagatcaagaaaataagaagcgacaacggaacggagttcaagaactcacaaatagaaggctttcttgaggatgagggcatcaagcatgagttctcttctccctacacacctcaac

SEQ ID NO: 36749 - DNA, 345 bp, Zea mays
acagcttcggctgaagctgcttgatcatgatgtcgaatacaccggtcaagaagcttccgaacttcagcatatcctgagacgaagggtcgaaccgacttaaagatagaataaccttttagcccataaaggtctgagtcattggtgtaaactcttatgaagggccataatgtaatttctcatgagctgtgccctgcgcctttaaatagtgaacagtattcctttactgttcacgcattcctgtaattgctaacgcatcactcgggattattgtttgtcaaatgcaaaggtataaatgtaccttaacattggtttcaaatattataaatccatttaataagatatgtg

SEQ ID NO: 36750 - DNA, 464 bp, Zea mays
  unsure (1)..(464): unsure at all n locations
tatgaagattcttcatcccaacatgggctagtgggcggtgtcttagccaacccatgttagtcttagcaattaagcaagtgtcgagttcagctctatcaaaatctactaagtatagctaaccctctaacactcccttaaatgctactgaatcatcacttcttctaaatacagtaacacctatatccgtaaaaagatagttgtagcccattttgcataattgagaaacagaaagaaaattgtaatctaaagaatctacaaggaaaacattggaaatagaatggtcaggtgatatagacaatttacccaatctcttgaccaaaccttgatttccatccctgaatgtgataactctttgnggatcatgatttttctcgtaggaggagaacgtcttcttctcccctgtcatgtggtttgtgcacccgctatcgatgatccaacttgagcccccggatgcataaacctac

SEQ ID NO: 36751 - DNA, 397 bp, Zea mays
  unsure (1)..(397): unsure at all n locations
aaatgccaaagagccttcggcgttgtctgctctcttatagggaccagggacttagtacaagagcatatcgccttcacggtgtggccgcttgcggagaaatgggaaatgccacaagataccataaaagaggcccacgaaggtggacttatcatgtttaagtacactttcaaatttggagataaatttattgagccaaatgatgagtggttgaaaagcattgacaatttaagtgatgagctgcttgggacctattcgaaagccgaagacactgcantgtcagcagccttcggaggccgaaaaaagaagaagctgaatcgggtatttgatgcaatcggggttggctaccctgactattgctatcccatccgaagcaaaagagaaaaacacacctctgtga

SEQ ID NO: 36752 - DNA, 435 bp, Zea mays
  unsure (1)..(435): unsure at all n locations
tagaagcactttcgtttcttagtcccgccgacatgatctttcctcacgcggttaagcgttagaacgaggattaggctctgataccaattgaaagttgcctagaggggggtgaataggcaggtggaaactttttcaacaaaaactataaacgaactgggtaaaaccggttcaaccagtttgcacgagctcaactaaagaatgagatataaaactgaattgatctcaaaatccacccagttaactttggaaatgagatgttctagttgatccacagtgttcaaagtagtagatctgagaagggcacttctcaaaatccacacaccacaaagatatantcaaatcttccacgaaatggtgagagaacgaagaacacaaacacacaatgagcatgaacacaagagacacatgaattataccgaggttcggtcacaccac

SEQ ID NO: 36753 - DNA, 127 bp, Zea mays
catacaacctgcgaaggagttagtatggcctgttattatattccggtactgctgaagtactggggggggagctctgattctggaggagaaagtggttatctaaagaataaactctatggagaacatg

SEQ ID NO: 36754 - DNA, 292 bp, Zea mays
tgaagtatagtgagtacacctaaccatgtttataatcatcttaaggcgctttatgggctcaacaagcctcacgatcatggtatgaatgcctcagggatttccttatcactaatggattcaaagtcggataggccgatcctactttattcactaaaactctctgaaatgacttgtttgtttgccaaatctatgtcgatgatattatattcgggtctctaacaaatctacatgtgaagaatttagtatgaccttacacaaaaaaccgaatgtctattatgggggagttgaatat

SEQ ID NO: 36755 - DNA, 411 bp, Zea mays
cttggaaggtcttatcccacatgtgcatgctgttatgccacagccagcccatgctagtcttagcaattaagcatgcatctagactggcctcctcttttgcaaaatcaactaaataaagtttgtcgtctaatacacccttaaaagctagtgaaccatcacttcttctaaagacagacacatttacatttgtaaatagacaattatatcccatattgcataattgactaacagataacaaattatatccaagagactcacctaagaacacattatagatagagtgctcattagatattgcaattttacctaacccttttactttgccttgattcccatcaccggatattattgaatcttgagaatccttattcttgacgtacgaggtgaacaatcttcttctccctgtcatat

SEQ ID NO: 36756 - DNA, 440 bp, Zea mays
catatgatgttcccaacaatgatcttttttcatatttatacccccgagataccgaaaaccccatttgaaccctggaaaaccctaagtccaaaccctaggggcctatgtgcaaaaattgtgcacatcttaactatagtgtaaaattacaataataaagcatattaagtcctttggttcacaaatatgtgaattggcaagttaaaccctaagttttgggtctatttgcaaaaatcacctcttaagtcctatatagcctaaggctgaatttcatagtttttgctcaactttgagccttgtactatcaactctaggtctttgtcctattcaccacatcaaagttgtaaccaatctatgaaacaactttgctaaaatgtgacttcattgttagatatattgaaatgattaacccagagtgggctgcagactacttaaagctgaat

SEQ ID NO: 36757 - DNA, 409 bp, Zea mays
agctttggctaattgttgatgactgtaattatttcttctaccggaggatatgaatatcagtggaggtgatattaatctaatgatgaagttcaatgaggcaattagttacctagatctgggtgaaattccccttcatggtctttccttcacctgctcgtataggcagagggcaccccttcttcaaaggctcgattggatcttcatttcgcacgaatggtcagtggtctatcctgatactcgcgtaagaacgttgccacgtgatacttcagaccatgtgtcgtgtcttgtttcgtttaagttgagggtcccaaaacccaagatttttaggttcgaaaactatcgtctggaatatgatggctttatgaacattttccaatattctcggcttacacaaccgaatctgcctgat

SEQ ID NO: 36758 - DNA, 403 bp, Zea mays
  unsure (1)..(403): unsure at all n locations
atcatcatcatcataacatacagacacaggcagatgcattggctataaaaataacgcttcggcataaaagataaagaagcagtttcatgcttcgttgtgtacgaaaagaatggaaggtgtatttcgccttcgactcaaataatactatgttcgtccactggcaagcagttcatacatggacaaataggtaaaaatatattacaaaatatgcacaaatttacagaattagtatttgattcttaaattacaagtattcttacaacgatactataagattttctctagaagtttttcagcatggtcttcagctatgacatcattgagcttcngatcatctgagctttggattaactatcaagcttcggctaattgttcctcagcatcatcatcctgtacatatcaa

SEQ ID NO: 36759 - DNA, 181 bp, Zea mays
ttttattcaaaagatgaccgggcgtttgtagcagtaacaatggaggactatcatataagaatgtatgaccctcataccctggactgtaaatggattattcgagcacggctattacatagagaagaagatggctaatattgtgagactttccccttactggggtctttgcagatatttgaac

SEQ ID NO: 36760 - DNA, 438 bp, Zea mays
tgaggctgtgcataaattaccgcccactgaatgctgtgtttatcaataacaagtatccttcgccttgtattgatgttcttctcaatcaattggtcggagccaaagtgtcttcaagatagaccttcgctccggctatcatcagatcaagatacgagcatgtgatattccgaagattgccttctcaaccagatatgggatgtatgaatatctggtaatgtcatttgagttgactaatgcaccagcatacttcatgtatctgatgaactctgtcttcatgcctgaattggacaagatcgtagtggctttcatcgatgatatcttggtgtactcgaagaacatagaagagcatgttggtcatttgcatgtaatgctacaacgtctgcgagagcaccatctttatgccatattgcaaaagtgattttggctaaggaaatcaaa

SEQ ID NO: 36761 - DNA, 234 bp, Zea mays
gctggcaaaccggctgccgctgtctactggttattcagaccggacttccaaacggtcaatgatattctgccaaaagaatatttgggcacgttttgacgttattgtggaaacagcccttgcctcgatccattggggaagtattccacagcgacgaagggcaacttaatgtttccctgagcgggggcaggggcccgcaatgtccatgccccagcgctggagaagccatctgtgggc

SEQ ID NO: 36762 - DNA, 430 bp, Zea mays
  unsure (1)..(430): unsure at all n locations
gtgtggaatttggagacgatttggtctctattgtgttctanaatgaagcctactcttgtagtggttgagaagtggaaaactttgataccatgaatggtgggtggttgttccatctcttactccctctaccttactactctattacattcttatcttattaacctttcctttcttctttctatataacctctccatctcattctatctttaaatctccactaatacattcctatctccactcctcttcactcctccttacaatctctctcctttatctccttactttcattctcctcttcctatttcatactttctcctcatctccactatagctcccatcactacacttcatctttcttcatactctcccactactaatctcttcactttatctttcattacccactctccactctacttctatctattc

SEQ ID NO: 36763 - DNA, 383 bp, Zea mays
acccatattagtcttagcaattaagcaagtatcgagttcagctctattaaaatcaactaagtatagctgaccctctatactcccttaaatgctactaaatcatcacttcttctaaagacaataacacctatattcgtaaaaagacagttgtagctcattttacatagttgagaaacagaaagtatattgtaatctaaagaatctacaagaaaaacattggaaatagattggtcaggtgatatagcaattttaccaagtcctatgaccagaccttgatttcatcctcgaatgtgataagctcttggggatcttcgtttctctcataggaggagaacatcatattctcccctgcatgtggattatgatacgctatcaatattcaa

SEQ ID NO: 36764 - DNA, 361 bp, Zea mays
attgactcaagcctagctacgggtgcataggtttcaccgaaatccaaaccttcgacttgggagtatcctttggccacaagtcgagctttggtccttgtcaccacaccatgctcatcttgcttgttgcggaagacccatttggttcctaccacattttgattaagacgtggaactaaatgccatacctcattcctagtgaaagtgttgagctcctcttgcattgccaccacccaatccgaatcttgtagtgcctcctctaccctgtgtggctcaatagaggacacaaaagagtaatgctcacaaaaatgtgcaattcgagaactaatggttaccccttatgaatgccgcagaagatggtgtc

SEQ ID NO: 36765 - DNA, 445 bp, Zea mays
  unsure (1)..(445): unsure at all n locations
actcagctcagagcctttgcgagaactgaaaacatccggatagagctattctatcttataaaatttcggttcagagctatccggatagcttcagagctcacacaacataagcttcacatgatgctttgcagtacctctgtccagtacaaaatttctactggggaatacggctccttttgggttgcacatgctgctgctgatgctgttgcangtaacagtggttctgcaaaatacagcatctaaaaccggcttagactggtggaacctgcttactttagtcagccttctcacatgacttgagcatacaaaccaagtactagcaaacatattaagctctagataccattntcattgttcatcagcgcgtagccagaacaggcattgtggtccttgcggaggcgcgcccaccatcctagctgaagataaccagtaacaacttctcggc

SEQ ID NO: 36766 - DNA, 450 bp, Zea mays
actaagcttgccagcttgaccgcgacccacccgcggaatattcttttttgctctccagagataaaacctcgccggtgcacgtggaccgggtaagtctctgcgccattttccgattcaatgcacagatagcctctacatcaccccgtggagctcctcgtgcactttaattgaactataccgtcatggtttggccaaaacaggagccgccgacgacccccgccgcctgtgctcgtggccagggtagctccgaccacctccgacgccgacccgcacaccgacgtgaccatcgtgacctccccgacgtcactgaccaccccgccggagctctactgccgccggtaagcctcgctgacgtattctatgtcgctggtactgtctagctagccagtgagcgcgggttagatatcagctatgatcaagggaatttgtgcaatggtagtgacccatgcc

SEQ ID NO: 36767 - DNA, 385 bp, Zea mays
tacataaaaccattctgtcatccagccgctatgccacctcttccgaaaagttggcacgggacagcttgactcaaaccgagaaacaaaactgtaccagcccaagttgttgtgatactgttctttaccccaagggattgtctcgtatgatcattcgtgcatattgcagaaactttttgcatcacgctttagaccttggcttcgcactgcccacacgaagatgttcagccttatgataacctcgggggtaagttggggaagatagacttcataaatcttcaacactttcacgacgaagcttgtcaatggcaatcgctagccaaccttcaaaaagcttccgaatactacgacttctttttctcaagtggattaccataactgaaggctt

SEQ ID NO: 36768 - DNA, 435 bp, Zea mays
  unsure (1)..(435): unsure at all n locations
tgccttcgcttcagtctatcatccgcagtccaacggtgtcttttagcgtgccaatgggaaaatcttcacagctgtcaaaaagatgctcctcgatgaaaaanaaggcagatggaccgatttattaccggaggcagtctgggcgctaaacacaactgagtgcagggcgaccaggttcactcctttccgccttctatacggatcggaggcaatgaccccgcaagaaataaagcatgggtccccgcgtacagttccgtcagccgtccccgacgtggacgagccaacttcaaaagatctcattgacggagaccgggtcttcgccctacaggccctanacaaataccaagcccagaccaaagcatggcgcgaccacgcagtcattccgagggagttcagcgagggggacctcgtactcgtccgaacagctcggacggagtc

SEQ ID NO: 36769 - DNA, 356 bp, Zea mays
  unsure (1)..(356): unsure at all n locations
acggagggaaagacccacggcgaactggtactacgctcttcctttataattgaagcatgtatattacacatgtgtctggagtcctgacagatgtgtgccatgaagtgaggagtttctagtaccaacttggtgcagcttctggacagaaacctggacaaactcttacagcttctgttgagaaatcctgtcaaatgtcatatcattttttagatggaattagaaagagttaaaacgttcctaccacggtgcctaanatccgctggggttgtaaatgtactgagggctactttgataacctcatattcccttcgggattggaggggaatgaggtggaaatgaacaaattttctcttgag

SEQ ID NO: 36770 - DNA, 231 bp, Zea mays
gaagctagttggtgttcattatccacacaagaacatcatgacgactgacaggccactcgagctactccacatggacctaatcggcccgatcgcttacattagcatcgtcagtgaatagacatggttagttattgtggatgattattctcgcttcacttgggtattctttttacaagataaatctcaaaccctagaaactttgaaagggttcttgagaccggctcaaaatga

SEQ ID NO: 36771 - DNA, 361 bp, Zea mays
  unsure (1)..(361): unsure at all n locations
ntatatatgtattacaatgatagaagcccgagcattctgttattgttcatgaangaaccanaaggcttctaaaggttttgcctactcaatgggatacgaaggttctatatctagtccgcacatgcctttcttgtctgaaatatccttctccattctcaggtaaccattctcaccccatgtcgtgccccatgagttcttcatgagccaatacttggttccatcactggtctttccataaccaatggctgcaatcccgtggtccaagtcattaccacatgatccagtcatcacaccaccagagtataactgaaatgtcatgtcttcaccgtacactgtcaccgacacgggctgaattgccacg

SEQ ID NO: 36772 - DNA, 401 bp, Zea mays
  unsure (1)..(401): unsure at all n locations
ggcgagaagtctgtttactcatgtactttaaacganggcaagaaagagcgccttaaaaagatagtctactacgaagtagattcttctacatcgccgtctccttcgagcgaacaggaaacctctttcagatgtcatgaaaataaatcggttaaatctaaattcaatcgtattccttttaattattctcgcatttctagaaatttgattgccgaaactactttctattcctctaagcaagcctcctcactttgatggggaggattattcttggtggaggcataaaatgtgtagtcatcatttttctctccactctataatttggcgtttagtagaaaatggaatgcacatatcggatagtgatgatgatcatttcgatgctcttaaagtagaagaaattattc

SEQ ID NO: 36773 - DNA, 452 bp, Zea mays
gccgaagcatctgccttctctgtatttttgtatatgacgatcctaaatatgtctaaatgaatggttatgaatgcaaacgtcatgatgtaatgtatcgtgcaaatgaatgtccaaatacatattcgaagctataaccaaaaccttcattcccttgggaatgactcatatcttctttgccgcttatttttcggcttcaccgtttattattcggtgtatcaacgctgacttttctctgtaagcctccctggggagcttcttcgccttctattacggcggaatcatcgattattattcgctgtaagcctaccttaggagcttcttcgccttctatttctgcggaatcagcgttatttttcactgtagctctgcatcccttatgacgacttttgactagttcctgttttctatttttttgtatgcctcgaggtgcatcccacttatacttacatctt

SEQ ID NO: 36774 - DNA, 363 bp, Zea mays
  unsure (1)..(363): unsure at all n locations
gcttaagccttngaactgtgtccaggtatttcttttgcttccgatctcttgccttgcaactgttgttaacatgaccagaaataacttgagagtcagttttaaggaccgccctttttatccccattgcctttaactttttgagacccaaaagtaaaacttcgtattcagcaatattatttgtacagctgaaatcaagccttgttgcatagcatgttctgactttggaagtgcaactaggacatcagccgcacctacaccgaaggatccctcggaaccgccgcagaacactgtccaagcctcggcatctttatttgtttcttctttctgagcccctggcgtgcagttaacaatgaagtctgctaa

SEQ ID NO: 36775 - DNA, 396 bp, Zea mays
  unsure (1)..(396): unsure at all n locations
tgaaaanatatttcgtcctagatggctcaatccgatgtttatctacttgtccatctaccatacgaagctaaggtaggtggtcttgtccagtatagatgaatgtatcacattgaaaggacactaaagaagttgtgtgtaatggttggtaataagagacgagttgaagggtgctttgctgagaaattcaaatacaaagagataacatcattcacgggcttgtactttgaagaggaacacaacatcaacgcacctacgtcgtggtaccatgtcaatgaagataccccttgcagtgatcttggaatttttcagtggagaggcaaaactttgggacccaacacagcatacagtttcaacaatgacgaatggaagactgctntgctctacatgtattacaaa

SEQ ID NO: 36776 - DNA, 387 bp, Zea mays
  unsure (1)..(387): unsure at all n locations
ccatagccaacccatgtgagtcttagcaatgaagcaagtgtccacgttagcttctatctaaatgtcctaagtatagntgagcctctaacacttccttaaatggtattgaatcatcacttcttctaaagacagtgacacctcaccttagtaaatagacagtcgaccccatttgacatattgtgaaacggaaatgcaatttaatctaaagaatcttcaagaaaaacattggaaatggaatggtcacgtgatatagcaattttaccctatcctttgaccaaaccttggtcccaatcccgaatgtgatagtcgtggggacttggttttctatatgggagaacatttttctccctgcatgtggttgtgcacccgtgtaatgattcacttgag

SEQ ID NO: 36777 - DNA, 334 bp, Zea mays
cctgcttcgactgggcttgttgagatgcaccttcggctagttccttttgcttctggattgatacatggcacgtcctattggtgtggcccttgccctctccacagaataggcaaaacagtctccttggctgatctccgaatcttccgccgaagcccctggcgcctctgcctcttggagctggtggccgaaagaaagtttgttgttgccccgaagcctgtgaggagcactgcggcctgtttcgatgactccccttatcatcattctgagtgttgcggatggaacggacatgcctcgggtagatcttcctccgaacccctgttatctcagaaacctg

SEQ ID NO: 36778 - DNA, 410 bp, Zea mays
  unsure (1)..(410): unsure at all n locations
tatccctgtcatttgatcttatgatcactgaccttttgcattattgatgtgtttattatcatcttttagaatggcacactaccctcctattgagatggaaacggttaggattacagaataacacatgtacaattagctcaatattactaaggtgttgctgctccatcgggcccatgtttaaatagaagagaaactactatatcatttgtatggcaagatgaagtgaaattaatatgtagaggcaagaaaactaatgaagaacattattactgaaactattttcatctatnctgagtactactgtagtttgaacacggtaactctgtgttttatgctatttatgatacaatcttttatacattacttgtatgaataaaaatgttatcacatgtgtgtctcactctacaaat

SEQ ID NO: 36779 - DNA, 314 bp, Zea mays
ttaaattggttctttgttgtggtgtgaggagaattactatcgagaagaattaaatcggtgcttcttatctaaggagtggtcgaagtaacgttgtggaaagtacgtcttgtgtatgtgtttctagtgtcttgtcgaaggatagtatgtggcgggtttcgtctaattgtatggagtcgaagccctgctgtgatattcatgatgcttaatgcttgttaatttgatttaatgcttgggttaagtgtttcatccctttagtgagattatctatcttatactcttatactcatgctcatacatgtgcatcggcatccatg

SEQ ID NO: 36780 - DNA, 129 bp, Zea mays
aagagcaataccataacaattttggcttttacagcttcggcgcccgttcgggtcagctgtcctgccacttttcgagagatgcctgggactggatgaagatggtctatgtgaagaacacttgaagccgag

SEQ ID NO: 36781 - DNA, 440 bp, Zea mays
  unsure (1)..(440): unsure at all n locations
gcaagcttataaatttcagattcgccctattcacctttctctaggcgaacttcaattggtatcagagcccggtgctntcattagagcattaaccgctcgaagtgatgtccggagatcacgccaaaaagatggggatcggcggtgagaactccgcttccagccaccggaaggcttcattcagagagtccgccaacaaagtgaaaggatcctcttcacataacaagttgggttcgagcggtgacaagataaataagatgacgaaggtggtctactacgagaccgactcttcgtcgtcatccacctccggcttcgacgcgccggtcgtaacttctaagcaccatgaccgcaagaaagttagtaagaatcccctacgctatcctcacatttctaaagctacaccattacttttcgtccccattaggcagaccactcacatttga

SEQ ID NO: 36782 - DNA, 290 bp, Zea mays
tacgccatgactccgatttgtgtgggatacgatccttcttgtcgttcgagaaaaaatcccaaacaagttggggtacgctagagttaaaaacccaatagaagccacaagtatgtccaggcacccctacacgttcgaaaaaaaaatccaagcacgttgggataggctagagtttagaacccaatagaagccacatgtcaagggtcacgcactagggtagctgttttccatgcacttactaatagctaccaaaaatttttctgcttgctccaataacttctatttctggagtt

SEQ ID NO: 36783 - DNA, 363 bp, Zea mays
atttctgtgatcaagatggtacgaatatccattttgcatcagtcagacatccggagtcaaatggactcgttgaaagaaccaatggcattataatgaccggaataatgaagttaatcttctatcaaccccagggaaagtggcccgatcaattaacccaagtggtatggagccacaatacaacaacattaaggtctacaggctctactccatttcagttattattcggtgacgaagaaataactccggaggaggcttaaaccggatcaataagagtaatagcttctgcagaatcaggttccgaagctgcttattctgtggaaaaagatctttagaacggatcaggctgctagccgtggagaacat

SEQ ID NO: 36784 - DNA, 474 bp, Zea mays
actaagcttgcctcggcagactatactagaaagccaactcgcttgtttttggatagatggcgagagtagcgtgtaccctccgtggcaagagtctggacggtggtgtatctatgctctcggctggcgtgaactcaatctggtcttaagaaccccagtggcgagttgacatatgcagggttaggtgctacatatgtcgtgtgattagagatcctcagcggagtattaattcattcacatcgccgttacttctctgacatgaagacttggtcactgacaaacacgtagctattcagtgaacaaaaatgtgtgataaaagactgctagtgctggtcaagtgcttgaactatggtagaaggaactctttattcggccatgacttgctataaaactggattttaaggttcactcttattagcatttttgcaacagagtctttttacttgttcagctaccttactcctaagctacatatct

SEQ ID NO: 36785 - DNA, 166 bp, Zea mays
actagctaccgcttgaagcagacgcttccctggctaggtattgttgtgtgacccttgcgacctttaagcaccgtccttgatcttttgatgatgatagccatctcttcatcatatagtacgggcgcctacaaaatgtgcaccttgctaggtagacactccttgcttc

SEQ ID NO: 36786 - DNA, 446 bp, Zea mays
tctacacaacgaaggagcatagatggcgtcataccttcatgcaattcacaacgatctaatggttatcgttttatgggtcaatagaatctgatcgaagtttgtgaagttggctagtgaaagtcgtctagaggggggtgaataggccaatctgaaatttataaagtttaagcacaactacaagccggggtttgcgttagaaatataatccagtccgaaagagagggtgaaaaacaaatcacaagcatatagcgagagtgacacgatgatttgttttaccgaggttcggttcttgcaaacctactacccgttgaggtggacacaaagaccgggtctctttcaaccctttccctctctcaaacggtcacttagaccgagtgagcttctcttctcaatcaaatgggacacttagtccccaccatgaccaccacacattggtgtctcttgct

SEQ ID NO: 36787 - DNA, 456 bp, Zea mays
  unsure (1)..(456): unsure at all n locations
cgtctctgacagtgaaatgcaactcgtagtcaatgtttgaaatgatgctcattgatttctggaaagcactggggtccagaaccctttctttnttctagcgaggatttcatgatattattgccagaagattgacaccagttccttggtttcaaatttgattgctactgtcgatggaatccctgcaaatgctgatgtgggttgtggaaatagctgatagatttgtatggtcttctcttcaccgggcaatagcttgcctatcatgttgccttctgttggattggatcccagcagaactaggcatctgtgaacaacatggctacagaagaggacctggaaactatataattcttcagcatcatgtgtcagaaagaatacaaaactgatcctacgaagtcaacgattcgcttctccacgccgaagtaattagagctcgtactccaatggatcctcttacct

SEQ ID NO: 36788 - DNA, 415 bp, Zea mays
  unsure (1)..(415): unsure at all n locations
acaagaggatagaagcaagagctcgttcatatgttatgatagaaggggagttgtataaacatggagtttgtgctccgctgctcaaatgcttatccagaaccgaaggtatagagttaatgaaagaaatacatgcaggcctgtgtggatctcacatcggatctaggccgttactcggaaaaattttccgtcaagggttttattggccgaaggcagcttccgatgcagcagaattggttcaaaagtgcgaaggttgtcagaaatgtgcaagagatcaaaaacaaccttcgttcttaacacagctcatacaacccacttggccattgcaaaggtggggccttgacttgntaggtccgttaccaccggcccaagggaacttgagatatgttgtggtagctgtaaaatatctttctaaatg

SEQ ID NO: 36789 - DNA, 481 bp, Zea mays
tcacacttataggagctggttgcctcactaggtgttattttgttaaaagagcgcatctggcctaccaaccttgtcacaagggaaagaagaacaatgagcactcgtgtgtgaagaaatcgacgctaactatgtttggagagtgcctttgagttgccaaacttggagagtaagtgggatggatagcaagtaactaaatttagcaagtctatttatagaactattggagaagaattttctgttcacttctaaaatttaagatttacggagttgtttagagaactattaaagttgtgctaataagagagtaagcggcgagagaaactataaacaaaattgtatctgaacaacctatcctctgaacctttctcccctattcttcttattccccgcctctctttccatcgcaaatggatcagatacttgcagatctggcttccaattcttgcacatctactttacactattggattgatctccacta

SEQ ID NO: 36790 - DNA, 347 bp, Zea mays
cattacccggctcaatcttcgtttctgccgggtaccgaaggctgcagtcatcagctgatcattccttttggtataaataccaagtatctcattgcacatggtctcaatcatgtctatccattctttgcaaggcttcttgaattgtttatcaaacttaaaacggtaagcaagtcaaacaagttcatgcttgttcgcacttcttttctctttaacattccccagccacttgacgtatgatatgttctgtttgccaaagtttcttgcgcccaagccttatactgatctgttaacatccactctaaatctacttccggcactgacatgtgaccccattgcatatgacaaga

SEQ ID NO: 36791 - DNA, 416 bp, Zea mays
  unsure (1)..(416): unsure at all n locations
tgtgaaggttcttcatcctcacatgtgctaagtattttatgtcacagccagcccatgctagtcttagctattaagcatgcatctagaccggcctcttcttttgcaaaatcaactaaataaagtttgccgtctaatacacccttaaaagctagtgaaccatcacttcttctaaagacagacacatctacatttgtaaatagacagttataccccatgttgcataattgactaactgatagcaaattatattccaaagactcaactaataacacattagaaattgagtgctcattagaaattgcaattntacctaacccttttaccttgcctttgattccatcaccgaatataattgaatcttgggaaatcttattcttgacgtaggatgtgaacatcatcttctcccacgcatatgg

SEQ ID NO: 36792 - DNA, 430 bp, Zea mays
tcaaagggagaacatgtgttaggtctaacaaatgtaactttctaaaaagatagaccttgtgcagcttgtcaagcaggtaaacaggtgggaagctctcatcatagcaaaaatgtgatgaccacatcaagacctttggagctacttcacatggacctcttcggccccgtcacctaccttagcatcgggggaagtaagtatggtcttgttattgttgatgatttttcccgcttcacttgggtattctctttgcaggataaaacagaaacccaagggacccttaagcgcttcctaaggagagctcaaaacgaatttgagcttaacgtgaaaaagataagaagcgacaacgggtccgagttcaagaaccttcaagtggaggagtaccttgaggaggaaggaatcaagcacgagttctccgctccctacacaccac

SEQ ID NO: 36793 - DNA, 361 bp, Zea mays
atcagccgaagcctatgctcttgtgtgaagacatatcacaccaaaaggtttgctgggatctcagctatctggtgaacaggaaaagactctgctaagattcttgttcaacaagaaagatgtcttcgcttggacatctaatgatctctgtggtgtcaataaagacgtcattgagcattcacttcatgtggacccatccctcaaactaaaaaagcagaggctttggaaaatgtctgatgataaagccgaaggtgcaccaaatgatgtgccgatgttatcagaaaagtaacatatccagagtggctggctaatacagttatggtgaaaaaagctaatgggaaatggagaatgtgcattgttttac

SEQ ID NO: 36794 - DNA, 456 bp, Zea mays
  unsure (1)..(456): unsure at all n locations
actcagctactcctccctngaagggtcgttcatcatcgccatgattatgatttcttgaacatacaagctggccaacgatcaaggcgaggtctacggcaatgcttggaacatccgacagctatgtcgcttttacccttaagatgttttcaagttgttcatatgcctcgttttctttacatacacaaatagagtctaaccgtcaaggaagggtcagccttgcctcggcgaagcccgaccctccctcgggggctagaaggggggaacccctctgcgtcaaaattttcctcggaaaaaagtctttctgccagaatgtctttcgcgcattttcgactgcttcgatagagggatcctaaaaacaacgagagtactcgtaagcagcaagggccgaccgagccgagggactcctacgcctccgggatacggatacctcactcatcaccttccgcgataagtaac

SEQ ID NO: 36795 - DNA, 426 bp, Zea mays
  unsure (1)..(426): unsure at all n locations
gcttggaagggtcttatccgcacatgtgctatatctttgatgccacagccagcccatgctagtcatagcgattaagcatgcatctagaccggcctcctctntttgcaaaacaactaagtaaagtttgtcgtctagtacacccttaaaggctagtgaaccatcacatcttctaaagacagacacatctacatttgtaaataaacagttatatcccactatacataattgactaacagatagtaaattatatccaagactcttcactaaaaacacattagcgatagaatgctcatttgatattgcaatcttgcctaaacctctcaccttgccttggttcccatcaccgaatatgattgaatcttgggaattcttattcttgacgtatgaggtgaacatcttcttctcccccgtcatatggtttgtgca

SEQ ID NO: 36796 - DNA, 389 bp, Zea mays
  unsure (1)..(389): unsure at all n locations
tggtaccgcctatagtcactgatgttgtgcaacttaatgntgtttgcacattctccgtagccaaatcccactcttcaataaatgccacatgatgctgacgaaagtcagttatcttcttttgcttccgccagtcaaatctatacaccaaccatatcatttaaggaacacaaaaattttacaaatgattgatgttacaaagtcaactggaaatccatataagacaaatccatgctaatctcccactaatcctctcatcctcccactaatcctctcatccctccccctaatccccccaccatggctataaatagaggggcaagggcctcctctcataccaccccaagccatttcatggcatattccttcctcccccacataactacacgccc

SEQ ID NO: 36797 - DNA, 383 bp, Zea mays
ttcacagctcggctcgcgggtgtgtaagcccatctctcttaacgcacgttgagagaggaagctcgcttccttctctggcaaggccaatttggatgcagtgttgtcaccaagcacaaagcaactccagatgaagttgaaatccagctggatgcgaggtcttctctttacgcatatcccttcctgtctgttacattagtgagtctggcttaaacacgtagattaatgaagtgctatagaagaaaaatgatccccatgtgtagtaaagacagcatcgtataccagattcgatttgccgcagagcatacgtataataaaactgttatacagagatttcttaagccatctatacaaaacattgataattcaaaatgagctctaactat

SEQ ID NO: 36798 - DNA, 429 bp, Zea mays
  unsure (1)..(429): unsure at all n locations
acgttgccctcgtacctaggacgacgacttctatatgttctcgacgtgactatgtcgctcctcgtcgaccaaaaggtactgactgattcccatcctacgtcatttcgactcggcctcaacctgcctagcgaccacgctttggcgggcgctctcgttgaggcgagtgcaacccctctggggtttcgtatgcagtcgccttgggaccgattgacggacgtctcgacctacaggccctctgggtccgaggaagatgatgatcccagcatctgctaggatttctctggatttggcaaccccagtgccatgcgggactttatggccgcatgtgactactgcctctacgactgttccgacggtagccgcagccttgacgacaaggactgtggcccangccgcgaatgtttcacgtcgagctaggggatcacctcg

SEQ ID NO: 36799 - DNA, 186 bp, Zea mays
  unsure (1)..(186): unsure at all n locations
ttggaaaaccccggnaagaggagaaaagaatactattttttccaacgaagaaggggggaaaaaaaaaaccccccacaccgaagagagagagaaccaagaagaagaggaggaagccaagagagggcgaaaggagaagaaagaggagagaaaaaagaggacggacagagcagagagagaaggaggaaa

SEQ ID NO: 36800 - DNA, 231 bp, Zea mays
cacacagaagccccaagcatggaacacctatcggccaaaaaggctctataatgaacaaacaaacgatccggaacgcacacgctgacgcggttgaggtcaaaacaacctgtggaagattccacagactgacggaggatttgaactctgcgaagaactccagtggagagcttcctctgctgttcaccgtcgctttctccagctggccgatcttctgtcgccggacattattct

SEQ ID NO: 36801 - DNA, 433 bp, Zea mays
tatgttgggttaccacacactctccaggtataaccttgcaatctaagcatgcatgcctgtcctctgttctcaagaggatgaaatcaatctggctagtgtgttggccactactgaaggtcaccaggtgggatttcctcttcctaaagaaagtgtttgctataagcatgtcataggctagggcaaagttcaggatttcctccccttcttgattcctagtcccaaaggcgaagcctccatgcacaccctcgaaactggtgctaaatgtacccacatggccattgagatctcctcctatgaagagcttctcgccaactggcacactactacctccaggccttcccagaactccctctttgagttctcattaaggcctacttgaggagcatatgcgctgataacattgagaaccaagtccccaatgaccagtttgact

SEQ ID NO: 36802 - DNA, 426 bp, Zea mays
  unsure (1)..(426): unsure at all n locations
tactaagcttatgaggaggaaccttcngtcatctcatacgggcagcttcagcctttttctgtttctttctgcaggaccttcggcgacgaagcatggtcccaacagttgccttcggagggatcccctagctcgacgtggaaacattcgcggcttgggccgcagtcctcgtcgtcaaggctgcggctaccgtcggaacagtcggagaggcagtagtcacatgcagtcataaagtcccgcatggcactggggttgccaaatccggagaaatcccaacagatgctgggatcgtcgtcttcctcggacccagagggcccgtaggtcgagacgtccgtcaaccggtcccaaggcgaccgcatacgaaaccccagaggggttgcactcgcctcaacgagagcgcccgccaaagcaaggtcgctaggcgggttg

SEQ ID NO: 36803 - DNA, 419 bp, Zea mays
  unsure (1)..(419): unsure at all n locations
actgaagcttaaaaaaagtttatgtttcctgtctattgaagctacacttcttcttagtttatcttgtgccttagcacgatattctctttctgaaaacattctccaaagatcaattctgtatcctcttcttgttccacatgcaatatgctatatgatgcttatgttatgcaaaattatgtgatgatgttatgttatgcaaaatgatatttgtgccgagaatacacacatccctgcaataaagcacacaatctttttatatcagcgatgacttttcgctgtaagcctcccttaggagcttattcgccttttactttcagcggaatcagcgtttatttttcgctgtaagcctcccttangagcttcttcgccttttactttcagcggaatcagccgttatttttcgctgtaagctcccttag

SEQ ID NO: 36804 - DNA, 412 bp, Zea mays
  unsure (1)..(412): unsure at all n locations
atcctcacagtcacctgcggctgcagctattaacattgtaagggcaaggctcccattgttcattatttggaacgctatattntatatcctaagaactatcatgagcataaaattagaacaattcatgctacgaaatctcattctgtttctcatcatgctcttatgtatagtaatgaggcttctagctctaggcatgcaactcatatcaaaatgcctaanaaattgctaatgcatcaaatgatcgaacatagcatttctttcaagactttngatgcatcatttgtgcttaccaacaaatcagacaagatagttgtcaaatatgttgtgggcaaacacaaggtctaaaattcgtttgtatgtttatgcatacggtgggactcngtgttgggtagccaacgtgcttcgttctaat

SEQ ID NO: 36805 - DNA, 436 bp, Zea mays
tcttgcgtcaggcttcagaccttgactcctcgcggcccacacgattatatttagccttataattgcctcgggagtaagttgatgaagatagacttcgaagattttcaacacctccacgacgaagctgctcaaggggaatcgcaatccagctttcaaaaagcttcggtacaccacaacttcattttcttcagggtgtggacaagttttttccccttcgtccgccctcacaatggacagatcccggaaataccttcctctcatattaacaagatgattctctttgatagttgatttaccataaactgaatggcttggtcgccaggggcgatcttcggagtcttcgccaccgctgtccatatcataactttcactgtcaccagtatcttcagacagcccctccagaatttccttggtaatcttttctgtgttggacttc

SEQ ID NO: 36806 - DNA, 293 bp, Zea mays
gctgacccttgcgacctttaagcgccgtcttgaatcttttgatgatgagggccatctctttatcattaattccggccgcctcaatttgtgccaccttactaggtagcgcctccttgcttcttgttgcctagagagcaagggggtgcggctcgttgatcggaccatccaagggcgctttcacgtacctagccttcatgatcatctatccgccgctaacgaattttcaaggacttcttcggcgacatttagggtacctatgattctcacgaatattcttactcaactgacgatca

SEQ ID NO: 36807 - DNA, 425 bp, Zea mays
taaatcatgaaacctatgcttgtcgttaaactcctaacattatagcgctcttcataacattagagtacatgataactggtatttttgaatatcctgccttctaatcgttgctagctgctgcatggttgctaaatattaatgttttctctattactttgaacagacgtttgaacttgatttgtgttgctgagtggtgcttgctggacattactggatttttaggtaaccactgaaacatcagcgccttctttctctaataaaactctaatgctcaccatatattgcattttgaattactatggaatcctagcattggttatagatgcttgattcaataagatatctctcttttcgttatagctctatggcatgcatgatatatcaatgtgatgtttgatggtagaaacactgtcatcgctagagta

SEQ ID NO: 36808 - DNA, 430 bp, Zea mays
  unsure (1)..(430): unsure at all n locations
ctagctntgagagatattagttcacttttcactttcttattctaactcatagccttagcttgagacttcttgaatatatcttgagtaagaatttctcccaatacttcatttggagaagtagtggtcaaatcaattcttactaacatggtcacaatagtgtaatatttctttggaagagatctaagaaacttatgagtgaaatccacatccggtacattaaaaccgagtctcttgagttcatttactatgtcatttaactggttaaacatgtcggacacactttcatcttctttcatgagaaattgctcaaattttcccttgcatacatataactttgcacccttcacaattgtagttccttcatgaattcccattagcttagttcaaatctcatgagcagttgtgagattcttgatacgattgaactcat

SEQ ID NO: 36809 - DNA, 252 bp, Zea mays
  unsure (1)..(252): unsure at all n locations
atccttaagtcacctgcggcatgcaagctaactcntatttatttgctcaggtatagtatgttatgggcttatatntcactcacacgtgtgcgcttatggcgactcatgccaaagggggagacagtattatcccacagtagaatgaccgctccaccactaattataaataattagttctgcaaattgtatttaaagtagctgtcttcacattgattactttattgtttatataatttcaacattggtgtaccc

SEQ ID NO: 36810 - DNA, 424 bp, Zea mays
tgctagagacagctaagtgtgtggtggtccttgcagggtcttattgacccgtttgattaaggagaaggctcactcggtctaagtgaccgtttcggagagggaaagggttgaaatagactcgacctttgtggcctcctcaaaatagattaggttctttggaatcgaacctcggtaaaacaaatcaccatgtccactcgtgttgatttccatttgatttgtttaccctctttcctctctctaaagtttccttgccaatattgatttgagtttgctcccaaaagtcatatgcatcatttgagcaactcgtggcaaaagaaacaagcttccacctcgaatttagttctaacgctaaccctggccttagtgtgtgtttaagtttataaatttcaggtttcgcctattcacccccctgtaacaccccaag

SEQ ID NO: 36811 - DNA, 336 bp, Zea mays
  unsure (1)..(336): unsure at all n locations
agctatctancaacaacctgcgcctccactatcgttgcatcaaggccagcagccaaaagggagccaatatgctccacaccaaagggacttcagagaacagtccgaagctcgcacagtcaacagcactgtgccagagtcaaagcacatctattgacaaatatcctaccttaatagcaatctttttcattcagttttattttttgcgtaataaagtacattgtttaggtttcatgtaaatagtttcgttgattcccacaacgaacatatattttcttcacaggcttaagttgtcgaagtttacagatttgtgataacaaagaggaccttcgacatatc

SEQ ID NO: 36812 - DNA, 431 bp, Zea mays
tataattgataatgtggcggagctgcttccttcatcttgtttctaatggggccatgaggttcctttattgagtagtatcttgtttgacactgcatgtagttgcttgaaaataaatatgtgaagttcttgttaattgttgttggccttgttaaatatctttatttagtctccaaaggaatctgttggcttaactgtggtgcatattatctgtaggtgaaatactccgtttgaatccgggatataagacacctgagaactacaaaccagtacttatggagacaaaaatccctgttccggtatgtaaggtcactacctcatcatgcttattgtttgttttgatctttcaccattaattaattgttttacttgtatgcaaagatttcgttgacctttttgttcttttgccgctatatttctcatactccaagagt

SEQ ID NO: 36813 - DNA, 390 bp, Zea mays
cgagaaggggacaaccgtagcatgcacacaaccccttctttataataccaagctttccaagagaggcatgagcaaaatccatggtgagaaaattaatgctcatatgatttgctctaacaatgtacctatgtgcttcaacaaagaaagatcaaagagaagcgatcggagatgctatggatgctaggagaagggccatgaaattgattcatgcccccacatgaagaatctagatcttgcacgatcaagaaagatgaccatcaaaaaggatgaaagcaaaaggcaaaagcattgcaaggacaagcatcgcatttgctacaattgccgtgaaaaaggtcatctatttaaggtttgtccaaagggtaaaactcctaagcctaacttgtcaataca

SEQ ID NO: 36814 - DNA, 325 bp, Zea mays
  unsure (1)..(325): unsure at all n locations
agctnggaanattcttatcccaacatgatctagtcggcgatgccagagccaacccatgttagtcttagcaattaagcaagtgtcgagttcatctctatcaaaatctaccaaatatagctgaccctctaacacatccttaaatgctattgaatcactcacttcttctaaagacagtgacacctacatcagtgaatagacagttgtagcccatctgacataattgagatactgtaagcatgttgtaatttaaagaatcaacagacaaacatgggaatggaatgtcacgaaaataacaattttccccaaccttgagcaaccttgattc

SEQ ID NO: 36815 - DNA, 302 bp, Zea mays
  unsure (1)..(302): unsure at all n locations
acaattttttttaatggagtgcctggttacttttattgaaaggcaatttttcttgcaagtcaaggatgaggacattatcactcaatttcaaagcttgaaggatcggaaggttgtcttgtaatatgtaagtttccctatactatntaatgttctattatatgctatgactatctatacgtgaatcaattntatatatgtataaaagtctattaggatagtgtccgcgaccataattatgggtaccctcaagacgctaaatctcagctggtaacccccatcagcatanagctgcaaggcctgat

SEQ ID NO: 36816 - DNA, 352 bp, Zea mays
  unsure (1)..(352): unsure at all n locations
atccttaagtcactgcggctgcagcttgcttcnctcattaccaccgcatcttcggttttgtggaacgcgcaaatggcaaaatgaaagggaattaggcttacatctatttcctaattgattttggtggttgaattgcccaacacaactaattggactaactagtttgctctagtctataagttctacaggtgccaaaggttcacaataagccaataaaaagaccaagaaaagggttcaaacaaagagagcaagggacaaccgaagtgtgccctggtctggcacaccggactgtccggtgtgccaccggacagtgtccggtgcaccangggacttcaagctgaactcctcacct

SEQ ID NO: 36817 - DNA, 433 bp, Zea mays
  unsure (1)..(433): unsure at all n locations
ntgcctcgggcagactaataccagaataagataacacgcaatgggagtggagagatggcgagagtagcgtgtaccctccatggtaagaggctggacggtggtgtatctgtgctctcggttggcgtgaacctgatctggtcttaagaaccccgatggcgagttgacatatgcaagggttaagtgctacatatgtcgtgtgattggagatcctcagctgagtataatcgatttggatcgccgtaacttcgcggacatgaagacttggtcactgccctacacgtagcaatccagtaaactgatgggatgataaaaagatggctagtataggacaagtgtttgaactatggtagaaagaattctagatgcaggtaactttacttaacctgacaagtaaaattggattttaaggatccactcatagtaagcttttctg

SEQ ID NO: 36818 - DNA, 311 bp, Zea mays
  unsure (1)..(311): unsure at all n locations
agcttctaantggagagcacattttgcgactaacttatgttctatttgagaaagacatgatttgtagtgcatgccaagcatggaagcacgttggtgttcatcatccacacaagaacattatgacgaccgacaggacacttgagctactccacatggacctattcggcccgatagcttacataagcatccgcacgagtaagtattgtctacatattggggatgattattcttgcttcacttggtgttctttctgcacgataatctcatacaccaaagaccttaaacggatcatgatacgggcttcaaatgag

SEQ ID NO: 36819 - DNA, 434 bp, Zea mays
tgcatgacaaaaacgtgaatgccataaatctgactcatcagttaattgaacagaattcaccagtttattacacacatcatgcagtgataagcggaacaagcctccgcagtcatatcctttaccaacaaaagtaccatgtttcgacacaacacatttattagactcaagaacaactttgtatccatctcgacatagcatagaagcgctaacgagattcttcttgatagagggcacatgttgcacgctcttcaatggcaccgtcttccccgaagtaaacttcagaatgaccgtaccgacaccaagaacatgagcacgcgacccatttcccatcaacaaggcgccagacctcccgacctgataggaagtgaacatagaggcatcagcacacacatgaatgtttgcaccactatccatccaccactcaggtgagttac

SEQ ID NO: 36820 - DNA, 377 bp, Zea mays
  unsure (1)..(377): unsure at all n locations
agctaacacctntggactaactcggctgcatcattcttcttcgtcggccaataaaatcctgacctcgaaacctttccgactagtgttctggatgctgcatgtattccacattgccctgcatggacctcctccacaagttgtttcctagtggacgggagaacgcacttcatgaggatgccggacgcgccccttctgtacaattcttccccaatgagtgtatagtgagccgactgcctggcaatgcgctctgccgagttcttgccatctggctcttcttcattctatatatacttaataatcggccgtcttcagtcatcagaagttgactcgggttgatctatgatgttgcactcttctgtttgatccattgagatact

SEQ ID NO: 36821 - DNA, 434 bp, Zea mays
ggactaagacaattctgtctcctttccttctcacatccggctcaccgttcttgaggctctaatgaatcaaagctccatttctatttgtagttgtttctgtgtaccaaagtttgaagctggtattgtccacctccttcgccttatgacccttctatttagtctcttgggcttataaaatgttcacacaccacttagtcactatctcaactaaccaccttaacttacctatcatcgaccctacattccaactacttaaatggatcctagttggtttgactagcttctttacccttcgcacccatcgatgatgtaaagacccttaacattttcactacacgctgacgccgatgtagcgtgctactaatgaagtagcgacctggcccttgctcacttgacactgtgcccagatcatgacacgacacatcaccaagggg

SEQ ID NO: 36822 - DNA, 364 bp, Zea mays
  unsure (1)..(364): unsure at all n locations
atccttgagtcacctgccgcatgcaagctattcatgtagggactcattgcgaattctgaattttatatttctgaaantcaaaccttgagccacagatcagggatgttcaccttgatccctaactcgaatcctaatggccccattgacaaaattgtgtctaactaacccctctgtcgtgtgccataagatggcattgggacgcgagcgctagacacgacaaaacctgtggattgcctcgggtttgggcagggagacagaccagatttcctggcttcatatctctgcaaccagtacgcaaaatcctatgacccccacacaagaatggtatcttgtatggaggagacgaggttctgtgcactgacca

SEQ ID NO: 36823 - DNA, 457 bp, Zea mays
acggacctataaaactaagcttctaagggagaacacgtgataggtttaactaacgtgcaattcttttaagatagaccttgtgcagcatgtcaagcaggtaaacaggtgggaggagcacatcacagcaagaatgtgatgaccacatcaaggcccctggagctgctacatatggaccttttcggacccgtcgcctatctaagcataggaggaagtaagtatggtttagttattattgatgatttttcccgcttcacttgggtgttctttttgcaggataagtctgaaacccaagggaccctcaagcgcttcctcaggagagctcaaaatgagtttgagctcaaggtgaagaagataaggagcgacaacgggtccgagttcaagaaccttcaagtggaggagttccttgaggaggaagggatcaagcacgagttctccgctccctacacaccacagcaaa

SEQ ID NO: 36824 - DNA, 386 bp, Zea mays
  unsure (1)..(386): unsure at all n locations
aagcacctgaggctgcaagctgacatcataaagaagctgacgactgtttgtttatatgactatcataaaaatcagtcgcgaaaaggtttatcagtgttacgcgccaatcaaaaactgattgacggtgtctataatgccatcttaatatatataaataaattgatgcatagggccactgatgaaggttgttagaacatataacattccagcgttgactgtgaagggaaatgcacccaacttgaaagatggaaggatctcgttagcaagctttttgggtgtagagaggcgatntacagtctcataaatgctcagttaaaacaggacagtactaacgatatgcccaaatgaccaactgttattgtttgggctatcattcccatataaca

SEQ ID NO: 36825 - DNA, 435 bp, Zea mays
  unsure (1)..(435): unsure at all n locations
tcatactcggctgcattgttagaggccaggaatagcaactgtagagcgtacttgaggtgctcgcctccaggtgcagtgaagagaatccctgctcctgctccctatagcttcagcgagccatcgaaatacattcgccatacttctgcagtttctggattgtctggtacttgctgctctgtccactctgatacgaagtcaaccagtgcttgagttttgatggcagtgcgaggtcggaactcgatatcgtgggatcccaactcgcaagcccacttggctattcggccaatggcttccttgttgcgaagaatgttccctattggaaaaccagtgactactatgactntgtggtcgtcaaagtagtgacgcagcttgcgggcagttagaagtactgcatatactagcttctgaacctgaggatactttttcttcgagggg

SEQ ID NO: 36826 - DNA, 426 bp, Zea mays
  unsure (1)..(426): unsure at all n locations
ngcatttccttcactatgtaggggcttctacaccatttgtttactcacctatntgtatattggcccatggatcatatgtgattcatgatataacatcgacatcatagtttaaattatcgtgatatatgtttccgttgcaacgcacgggcactcacctaattaatatttataatgcataatagtatgatgtgatgaatctaaattttaatgatctattatagactntatatgtttaacactacaggactcgtggctcatcgtaaatatatagcacattgtcagttatcccgagaaaatttacataggggtaattctaaaacaatatatcttgcatgtgagctatatggatcgaaacgagcgacacataagttcattgaactataaatattttacgtgcctttagaactaaatcatttataatacata

SEQ ID NO: 36827 - DNA, 357 bp, Zea mays
  unsure (1)..(357): unsure at all n locations
ngcttccaagnncgggtttaaccctctgtaagcttcttcacacgcattaagcggntatcttatcgaggttgttcttgtagcttgttgcaatccaaaatagattaagtacatgggttcactatgctcatgaacaaactcatatgctaccactagtttcaatcaacaaaaataaccaatagtggtagaacatgaatttacatctttcatttaatatgcatgatactattaagtatgtactatgtgcactaaccacatactagtaggggatgatatgatcatgcacatcacaatgatacctttgctatgttggagtagaggatagtcaagattcttttgatttagctctccactagcaat

SEQ ID NO: 36828 - DNA, 422 bp, Zea mays
tctgtgccaaaaatcacacgaagctaagggatggttatttatttgtgattctccaaagcttaatgccaaaaaggcactttctactgccttgtcatttgaaaaatgtcaaacagcagatttcatatttttcctaagttctcaataacaaaacattaactatcccaagggttggggtaatttcaccttggggttatttttgtagggtttttctaagttttccttgttttcttaaaataaaaggtatcctatttattttatactaaaccagagtataatagatttttctagtgaactacactggataagtatcctaacaaaaataagagtgccccctggttcatcattctaatcaccttttctatttctcttaaccttaagcatgttgtaaaataaatggcaaaagctaccttaatggggtagac

SEQ ID NO: 36829 - DNA, 429 bp, Zea mays
tgaatatgttcttcaacaaagaatattttatgctcatattgtctataacggcatgaagcatattcaagagaaaatggaagcaggtaaagccacttgttttaggaaggatgaccaaggagtgttatggttcaaaggtcgtatagtggtgcctaaggatgctgagctctgccaacagatcttggatgaagctcatctcagtcggtattctatccatcctagaagtaccaagatagcgtcaaaatggaagaagactgaagaagcctcttcgaaaaatagaagcttcgacttacagcacctgggaggccaacaactttacaaataggatatattcgaattgaaagaatttgatgtgtttggaggttaccagcctggatccgttctcttcggtggcgtagacgaagaaatctgatgcattcctaaccgcgccag

SEQ ID NO: 36830 - DNA, 236 bp, Zea mays
agctagccaagcccaaggacccggccggactttatttaaaccccagatcgacctcaccggacttcggtctttcaccgccgcgcgtggacagagctcactggtgagtctccgaccaattccttgcacccatatcatctctggcatcctgtgaacctctctgaccagatcgattgaactatcccaccgggagcagatccgacacctctcctgccactagcaaccacgcctgcgcgcgt

SEQ ID NO: 36831 - DNA, 430 bp, Zea mays
  unsure (1)..(430): unsure at all n locations
ntatatggacgacggtgtcggactccgctaaattggtctgtacctgtggaaaggtatttctttaggcctgatatggtaaaagaaaccgaagaaaaggttcagaaaatagttcataatatgaagaaagcccaagctcgtcagaaaagttatgcagacaaacggcgaatgcccttatacttcttagaaggagaatatgtttatctaaaggtttcaccaataaagggcgtatcgcgttttggggttaaaggaaaacttgcacccaggtacattggtccatttcctattcttcaacgatatgggccagtggcatatcaacttcaacttcccgaaacattgtctgccgtgcataacgtgttccacgtgtcacaattgaagaagtgtctacgggttcccgatcgaaccgttgaagtgactgatgttgtcctggaac

SEQ ID NO: 36832 - DNA, 424 bp, Zea mays
  unsure (1)..(424): unsure at all n locations
ngacattgtctcccttgtggaagtgtgagcacctatatgggtgtgggtgaataagtgatccctgtaaacttaaacttatagccacaaaaacttgttaagtgttatcacaataaatgccaagtggctagaaaggagtctcaacaaaccacaataccacaagagatcaatcacagagataacacagtggtttatcccgtggttcggccaaaaccaacgcttgcctactccacgttgtggtgtcccaacggacgagggttgcaatcaacccctctcaagcggtcaaaagacccacttgaataccacggtgttttgcttgctatttctcaatcccgtttgcgaggaatctccacaacttggagcctctcgcccttacaattgaagttcacaaagaaacacagagcaaggggggaatgagcaacgcaca

SEQ ID NO: 36833 - DNA, 100 bp, Zea mays
  unsure (1)..(100): unsure at all n locations
gccggacttaagcaccgagcatgcacnncagagacagggggtttgttttttgccgagagtcaacaggctcgcaagatgcttcggccccccaaatgataaa

SEQ ID NO: 36834 - DNA, 420 bp, Zea mays
  unsure (1)..(420): unsure at all n locations
tgctntgnttgagnctattctacctgcagcgcagccacatgggcccagcaatagcagcgtcacatggtggtggccatcgtcacgtcgagctagagatgtcaatgggtaattccccatcgggttatagcatgccagacccatccccatcatgtttgatacatccccatacccatacccatacccatcatgggtacaaaactcatcccatacccatcttcattcgggtttcgggtccccaatgggtccccatccccaattaaggaataactaggtactaacatctagcacaaactatccagatttcatacatcaccacatcggcaagcactcattcacgaactattgtccattcatccattcatagaagagaaatcagtacttgggaccaatatagaaatggagtctgccgggtttgatggc

SEQ ID NO: 36835 - DNA, 271 bp, Zea mays
agcttgagcccctcctaaggatggtgagatatatgtattctcataagcagagggaggcagcgttggatgacctgtatgcaatcatgtcaaagagtggtgtgccaacacaagcagcaatgaatgtaatgtcagaattatttggaggccgtcaaaactggtcgttcacagagaaagatgtccataacaagtatgtcataaaaaaacactgacatcatatctttgtgcgatatattgagaccagcagaattacttcgtttttcttttatggtac

SEQ ID NO: 36836 - DNA, 420 bp, Zea mays
tctgctctcgatattcatcagcgccgaggagagagagctctgtcacggagccgacgaggcgctggcgatgctagcgctggagagcgagacgggttgcgcggcaatactcaagcgagccgacgtgctccagctcgtctcggcgttgctggacggtgacgacgcccgccgactgcacgcggcgagggtgctgtggagcctgtgcgcgtgctcgggcccggaatacagggaacgattgcgcgtggtgaccaagttgttgccggtggtgctgggtatcacccagtgtttaaaatagcgggctaacccatttatccccggccttctccagcggctacaaaaggatatatcaggatatatctgcagctaaatgttttagcggttttcactagacagtagacacttaggcagatcctcccatgatcc

SEQ ID NO: 36837 - DNA, 506 bp, Zea mays
  unsure (1)..(506): unsure at all n locations
cgtcncggatccttgagtcacctgcggcatgcaagctactgaatgccagtgtagcactcgtggtgagtctttgtcataaggtcgcgggatattgttgaatacttcacagccttctgtgcgtacgactaggcttcactagtgctttcatcaaacgccttcaagatgttcagcgcatctgacttcctactccttccaactaaatcagtaatactctgaccaaaagaagatctaaagctaggctactggtaaaagactgggggttgcataaaaaggaagcatgaccgatgggatcatgggatgtgccaagcacatcagcagatgtcccagtaggtgctgctgtngctactgggacagatgctgctgctactgggttaggtgctgctggtgggatanggactgctactggggcaggtgctggtactggagcatgtaaatatcctagagcaccaatggggacgtcgancacgtgtcatgatcttctaactgaagtaaaaaacaatgataat

SEQ ID NO: 36838 - DNA, 434 bp, Zea mays
  unsure (1)..(434): unsure at all n locations
ntgactntcatatatatgaaaggagatgagcacgccatangaggaaattgaatttagtcaatcgaaccgtgttgatttgatgtatgaggatcaacaccatggtggtaaaagcagggacatctgacatcggaggagaaagaggaggaagaaggatgtgtggtgggaaatcaggagaattttcttggctctggtatcatgctgaatccgtgcaacatgagaccctttttagggttgtaatcgtgtatgtgtgtgtatatagatagatagataatatattacgagccctgngcttccaataactagaggaagcctaggtcagacggtgcaatccggtcgagtcgggccaggtccggacgtctataaaacaagacccggagtgctagggttcagtttttcacgccccatccggattcattagcgacggcgcgtgcgat

SEQ ID NO: 36839 - DNA, 293 bp, Zea mays
taacaacagtggtaagttcaaggtaacaaaaacagcaacggtgcatctttttattggctcttaccatgactttgctgatatcgatgcggtgagtatggatccttgctctcttttatcgcgacgtccttgggagttagatactgatgctattcaccatggtagatctaataaatatactctcatgcataaaggaaagacaactgtattgctctctatgacttccactgaaatggttcactttgaacatgagaaaaagactactgctcagcaaataacgtgttttgaactcttaa

SEQ ID NO: 36840 - DNA, 431 bp, Zea mays
  unsure (1)..(431): unsure at all n locations
ntagctntgagagcgattgattcattcttcactttctttgcttaacttatagcatcggtttgagatatcttgaatatatcttgagtaagaatttcccccaatactttggttggagaagttgtagatatatcacttcttactaacatggtcacaatggtctcatacttctccggaagagatctaaggaacttatgagtgaaatccacatccggtacattaaaaccaagtcccttaagttcattcattatctcatttaaccggttgaacatatcggatacactttcatcttctttcataatgaattgctcaaattttcctttgcacacatatagcttggcactcttcacaattggagttccttcatgaatttccattagcttaatccaaatctcatgagcggttgtgagattcttgatacggttgaactcatt

SEQ ID NO: 36841 - DNA, 263 bp, Zea mays
  unsure (1)..(263): unsure at all n locations
tctacagggagagcacatcttangatcaacaaatgttcattctgttaatgacaggatttgtagcgcatgccaagcagggaagcaagttggtgctcatcattcacaccagaacatcatgacgactgacaggccaatggagctcctacacatggacctatatcggcccgatagcttacataagcatccgcgggagtaagtactatctagttattgtggatgattattttcacttcacttgggtgttctttctgcaagaaaaatct

SEQ ID NO: 36842 - DNA, 330 bp, Zea mays
  unsure (1)..(330): unsure at all n locations
agctnggatattattcatcagaacactatggatattgttgtgataaataaaaattcttcttcgcgaagcatgaaaagaagggaagggtgtttttcgtcaaagactcaaaaacggtacgtatgtaaaatttcatgcatcgtaaagaattgaacaataaaaacaggtatattatatttagggctacaagatgttacacatgttacatttcagaagttttacaatagtacttaatcttctctcagaacaacttccgcagcttcgttcagaagccgatcaacaactttattcatgatagcttcagccatctttttagattcgtcatctcctttc

SEQ ID NO: 36843 - DNA, 436 bp, Zea mays
  unsure (1)..(436): unsure at all n locations
taacgccacatatagctagtccagtttagccaaacgggacatntgctgagtacattgatgtgtactcacccttgcttttaaaaaacacccaaccctaggttgtccccattgcaatcagtgctcaggagaagatgaaggcaacatggaggactttcaggagttttagtacttcaatgagttatagtcgtgtttagtggcaaaactccagtcagctgcctgtgaaggccttatcattctatgtttcgtatgtgcactttgattatgttaatgactatgttaagttaatgactctgtggatgtctaggacatcttgatgtaataaaatgctatttctgctattattttgagcaatgtgtgatgatgtccaactatgtaatcgctgtgtacatgagtctctgatcctggtacgtacatggctcgcattccgtttgccttt

SEQ ID NO: 36844 - DNA, 357 bp, Zea mays
  unsure (1)..(357): unsure at all n locations
gatcctcacagtcacctgcggcatgcaagcttgtgagaacagaattaatcaagactaaccggtcatctaccgacataagttttcccttccagctgctcaatttcttttcaaactttatctctatggttctccaatctctattacttaactttctataatgcattgcgatccccaagtatctgaaaggaaagccgcctttntagcatctattagctactcttagttggagacattcaaacatccctagctaatagtctaactatctattagctacaccctcaactacctatttatccagctaaaagtagctaatagttagccaactatgttgttgtcaactaattccattagcaacat

SEQ ID NO: 36845 - DNA, 434 bp, Zea mays
tatgaagattcttcatcccaacatgggctagtcggcggtgtcagatccaacccatattagtcttagcaattaagcaagtatcgagttcagctctattgaaatcaactaagtatagctgaccctctaatactcccttaaatgctattgaatcatcacttcttataaagacagtaacacctacatcagtaaatagacagttgtagcccattttgcataattgagaaacagaaagcaaattgtaatctaaagaatctacaagaaaaacattggaaatagagtggtctggtgatatagcaattttacccaatcctttgaccaaaccttgattttcatccccggatgtgatagctctttggggatcttcgtttttctcgtaggaggagaacatccttttctcccctgtcatgtggtttgtgcacccgctatcaatgatc

SEQ ID NO: 36846 - DNA, 296 bp, Zea mays
agctactcaccatgtcgctgatgagcaattttgttttatctacctccatcaatgatcaaacgacatgaacgctccttaatgacacactctgtctgaaacaatgtatgtcgctgattctgctctgccttctgcattagtgcactaagcacacgctgtacaatgaggctctcataatgctctgcatcatctgcaccaatctgtgcttctggtggttccttagtgcctgcatacatagccgcaagcagagcacgtgtatcttcatccaaatcactatcatacgaatacccaccatcgtc

SEQ ID NO: 36847 - DNA, 420 bp, Zea mays
tgtcccatcactcctcatgctcctcctctgccgaggtatggtcccactagactgaccaaccccgtggcgagatggacggctaaatcactccagcaaccatgtcctccagagaacctgtaaaattatgccgcaagcaaggctgagtatactaatactcagctagacttacccgatgtgaggagtctactgctctacctctggacatgcaactgtttggctgaggggtttggtttgccaaaagcactatctgagtgtacaatcaaatttcagctgatcaagttttagcgtgactctgttaagactaaatgtgtacctagctaatgatacatggtatcagacatttagcaatcaacatcttttgacaagtcaacacatttacacttgttactgaatgtagcagcatggatcaagcagtctcat

SEQ ID NO: 36848 - DNA, 380 bp, Zea mays
  unsure (1)..(380): unsure at all n locations
cttttgacttggccatatcgcttctctggtacaagcatcgcactgactgcagagtgagaggctgctacatatatgagtaattgaacccctggcgaaggtggagttagagttgtcaagtctatcaagtattgctataactcttcgaaagcctnttgctgagccggaccccattggaaaacttctgctgactntagtatttcaaataatggcagattcctttctgctgatcttgatatatgtgacaccccagtgtcacctatggtntcttccttgagctaacccatactattatctcatgttaacctaatgaacggatgacatccaagattaagacaaagattataatgagtttctcaactcttcttatcttgcatgacctt

SEQ ID NO: 36849 - DNA, 281 bp, Zea mays
  unsure (1)..(281): unsure at all n locations
agctattaanggagaacacgtgataggtctatctttatgttacttcgaaaaagatagaccttgtgcagcttgtcaagcaggtaaacaagtgggaggagcgcatcacagcaataatgtgatgaccacatcaagacctctggagctactacatatggacctcttcggacccgtcacctacctaagcataggaggaagtaagtatggtctagttattggtgatgacttttcccgcttcacttgggtgttctttttgcaggataagtctgagacccaagggaccc

SEQ ID NO: 36850 - DNA, 419 bp, Zea mays
tgaagccatggtaagtagcataggcaagtaatatacgaattgactcaagcctagctacgggtgcataagtttctccaaaatccaaaccttcgacttgtgaataacccttggccacaagtcgtgctttgttccttatgaccacatcgtgctcatcttgcttgttgcggaagacccacttggttcctacaacattttggttaggacatggaactaaatgccatacctcattcctcgtgaagttgttgagctcctcttgcatcgccagcacccaatccaaatcttgaagtgcttcctctaccctgtgtggctcaatagaggaaacaaaagagtaatgttcacaaaaatgagcaacacgagatcgagtggttacccccttatgaatgtcgccgaggatggtgttcacggggtgatctcgttgg

SEQ ID NO: 36851 - DNA, 362 bp, Zea mays
  unsure (1)..(362): unsure at all n locations
atccttaagtgactgcggctgcagcttttggaacagcctccgactgcatctacgttgcaactaggccagcagccagaagggagccagtatgcttcacaccagagggacttcacagagcattccgaagctcgtacagtcaatagcactgtgccagagtcaaagcacatctattgacaaatatcctaccttaatagcaatctttntcattcagttttaatttcttgaataaaggacatcgtttacgtttcatgtaattagattcgttgattcctacaaggaaaatatattttcttcacaggcttatattgagtaaagttcaaagacttgtgaaacctagacgaccttcgaactatctaaaattc

SEQ ID NO: 36852 - DNA, 417 bp, Zea mays
tgagaccaaacctgtgtcacccaggttaagtgctaaaacatgatttcacaagctacctagcatagtggacatgttggccttctccatcgtatattgaggagctttgagcccagttgaaatcatgtatattaaagctaccgatatttcacaagtcagaaagtatagcctaggcatgtcaacttctaaatttcaggaagaactacctaagaaatcccctgtgatcttctaacactcacaatgattcatcgtcctagtccacaaatcttgtctaataaataagctagtagcaaaaatatgggacgctagattccttataccacaaataatgtgctagccaaaagaacacatgacgattgacgaataccacataaactatttctgcaaagatacataatcacaccttcagaagaacaatta

SEQ ID NO: 36853 - DNA, 259 bp, Zea mays
  unsure (1)..(259): unsure at all n locations
agcttatnncaggggtgtagctaacaattatttgttcaattaattgantattctaaacctatcaactaattntagctactcgctatctggtttagaggtctataacacggctttatcctatccaaaacatcgatttttctatacttaacaataaataatcattatgtataaaaagatgtacaaaaataatgggggcatgacccactttgcccctggatccgcccctaatcaataccactatataacttacccaaccaaa

SEQ ID NO: 36854 - DNA, 373 bp, Zea mays
gatttgtagcgcatgccacgcccggaagcaagggggcacccatcattctcacaagaacatcttgaggaccgaccggccgcttgagctacttcacatggatatattcaggccgattgatacataagcatcggcgggagtaaggattgactagtgatagtggatgatcattctcgctgcacttgggcgctctttttacatgagaaaacactaaccctacagaccttatagggattcttgcaactggctccaaatgagttcggctttaggatcacaaaaatatgaagcgactacgggacggaggtcatgaactctcaaattgaaggctttcttgaggaagatggcatcaagcatgaggtctcttctgcctacaccc

SEQ ID NO: 36855 - DNA, 139 bp, Zea mays
gagataggaggtctggtatcaacgcaccttagaagaataatttgtgcacccaaacttatagttaccacacgatcccgagcctattgtgccatcggacaactcaaagaccatagacacataatgcctccgattaagtcta

SEQ ID NO: 36856 - DNA, 413 bp, Zea mays
ggggacctgcgccctgccactagctcacgttctctgtacatctgccatgggtgcgctcgccccggcgctatccatcatcgccgccagccgagcccttgggtcccgaatactcgactcgtccacaacgactgcccaagccaagggccttgttgagcttcctaagttcgcccccgaccacagacgcacgccaacctcgcccttggtcatggagcagcaacaactatgaaacccccttcgtgtcgcgccctcgatgtgctcgatgaaataccgcagcgagctccacctcgatctatgccgacccgatcaccacttcgtcgaaccccggtgagaactcagtggtttcttgtgttattcctcctagcacatgtctccgcggagataagtaaaggctcacctgtgttgtttggtatgct

SEQ ID NO: 36857 - DNA, 288 bp, Zea mays
  unsure (1)..(288): unsure at all n locations
gctagngaagattcttcatacctatgtttgctattctgcggagccagagccaacccatgttagtcttagcaattaagcaagcatcgagctcagctctattagaatcaactaagtatagctgaccctcgagtactccattaaatgctactgaatcatcacttcttctatagacagcaacacctatatccgtagaaagacagttcgtacccatcttacataattgagaaattgaaagccagttataatctaaagaatctacaagaaaaacattggaaataaaatggtcaa

SEQ ID NO: 36858 - DNA, 427 bp, Zea mays
tggtcattttattgctaactgtcccgacaatgatagtgatcaggatcaagggaacaagagggagaagaagaactataagaaggcaaagggcgaggcgcatctaggtaaggagtgggattcggattgctcctcttccaactccgacaatgaaggactcgccgccaccgccttcaacaagtcatccctcttcctcaacgagcgtcacacatgccttatggcaagggagaagaaggtatgtactcaaaactctacttatgcttcttcaagtgaggacgaatctagtgatgaggatgaaatagattattcatgtttatttaagggcctagatagaaccaaggtagataaaattaatgaattgattgatgccttgaatgataagaataggcttttagaaaagcaagaggatttgttgtatgaagaacatgac

SEQ ID NO: 36859 - DNA, 337 bp, Zea mays
  unsure (1)..(337): unsure at all n locations
agcttgaatgttanaaatcaagaacttcaagtgcatctttatatatgcaagaacatcaatgcctcatctttagtaattgaatctaaatctaggccctcaaatgataattcttgcaaacattgtgccaaatatcatgcttcttgttgtctaactaaccatgcaaggaagaatagcccacaggtgaaggtcaaaggaattttgaaaagatgctctagcaatgatgggttaaagaaagttgaacccaagtacaagtccctatagctcaacaatggaagaagggggcttgcgttcaactcatccaacgaanaccctagcacagtgcataatgggtggagat

SEQ ID NO: 36860 - DNA, 438 bp, Zea mays
  unsure (1)..(438): unsure at all n locations
ctattacggacactatgaatactaagcttgcaaatntaaagactcngttttgcagaanagcttactattagtggatccttatgcaaaatttttacttcacaaattaagtacttttcctgaatctagatttgtctggtctagagcattcacttgtcctacactagcttcattttatcaactttaatttcacttgttatctacgctgaaggtcgaagatccagtcttcatatccgagaagttcggcgatccgaatcgattaatacccagctggggatctccaaccacacgacatatgtagcacttaacccttgcatatgtcaactcgcccacggttttctcaagaccagaacgggtccccgccaaccgagagctcagtaccccaccatccagcctcttgccaggtggatacacgatactctcgtcatctctccactccca

SEQ ID NO: 36861 - DNA, 433 bp, Zea mays
tcttggaacagcctgcgcctccaccaccgctgcaacaagtgtcgctatcctagaaggggccaatatgctcaacaccaaagggacttcagagaacagtccgaagctcgcacagtcaatagcactgtgccagagtcgaagcacatctattgacaaatatcctaccttgatagtagtcttttccattcagttttattttctgtgtaataaaggacattttttaaatttcatgtaatagtttccgtgtttgccacaaggaaaatatattttctccacaggcttaagttgttgaagcttaaagatttgcgataacaaggaggaccttcgaattatcaaaaattcttcgaagcaacaaaaagtcgttctaaggaacacagagtaagttttctgaagttacaaaaagccgttccaaagggagcgcagtgtaagttttctg

SEQ ID NO: 36862 - DNA, 364 bp, Zea mays
  unsure (1)..(364): unsure at all n locations
agcttctaaaggagaacacattntaggactaaatgttctatttgagaaagacaggatntgtaacgcttgtcaagctgggaagcaagttggagttcatcatccacacaagaacatcatgacgaccgacatgccgcttgagctactccacatggacctattcggttcgatcgcttatataagcatcagtgggagtaagtattgtcttgtaattggggatgattattcttgcttcacttgggtattctttttacaggaaaaatctcaaacccaagagaccttaaagagattcttaagatgggctcaaaatgagttcggattgagaatcaagaagaatagaagtgacaatggaacggagttcaagaac

SEQ ID NO: 36863 - DNA, 437 bp, Zea mays
  unsure (1)..(437): unsure at all n locations
tatgctctactacttnttgaagaaaaaacaactgatgcacatgtttcacgtgtcttattctcaccatgtcaattccagcaccaacaccagcctcaattgagtaagagtagttggcgtgaggaggagtagtgatccgatcaatgccctcccagtcggaaatcacaaaaccctgtttgcaaaagaaactcaaataacttgaatatgcgactgacacaagtatataaaccaaaaaaaatcttgagcctttgtaatgaccaactgaccctaaacttgagcttgttcttgagaaaatccgtgaccaggaaatggttcgcgtgcatcttcactccgttccagctggagtaggagaccatgaccgtggagacacctcggatgatagagttgtagtaaggaggcatatggatgctcagcagcccgtgtgtgtcgatgatcgtgtt

SEQ ID NO: 36864 - DNA, 281 bp, Zea mays
  unsure (1)..(281): unsure at all n locations
agcttggaggcgtcnataggaagcctacttgacgtatactcttctttcttttcttccgncgcttngaatgcgacgggttgcacctcaggcatggaggatccgccttgctcgacgatttgtttgaagcctttgatcatcaactcaaagctcacaaactttcctatcacttcctcgggagacattagcttatatctaggatcaccacgtattaattgaacttgagtaggattgcgaaatacgagtgatctaagaataaccttgaccatttcatggtcatccca

SEQ ID NO: 36865 - DNA, 445 bp, Zea mays
tactaagctgggagatggatcgcactctaatcgcatcgcgaaatgaagactttttgttcaagcaagcaaacacatatatgcataagaacattacaccatacagatactaacataattaaacatgcagaacgaaatagagcgcgttactacggtcacacgaggaaaaagaaacgcgactgtcgaggctacggtcgagaagttatcgcgtctatactaaccgagtattaatcatagcatttagtttgatctaattatagtaatcaatatttatttaaaatgaaactagagctatcgcacaaatttaattagctgaccacactagcgattcttagttaaataagtaatttacataacgtcaacgactctaagcgggaacgaattattggagcgagacgaaatacgccacgcgtgaaacagcacgatagcgtgcaaacgacgcgcggac

SEQ ID NO: 36866 - DNA, 320 bp, Zea mays
  unsure (1)..(320): unsure at all n locations
agcttgtaagctctgctgaagtagaaaagcttcctgtttattctgtttatgataagaacatggtggagccagatgtagtaaagacaccagcactgcacgaggcaacaactgaggagccttccccttccgtctgttctgaagttagaaaagaaagtttaggtgttcatcanaatagggacgctgaaatgactgatgctcagctgctaagcaaaactgaagatgcagctccttgctcacaacctgataaagtggtttcttgtcagaactcgggactagaaggttgtaaagatgtcccagttaacaagatcactgatgaacat

SEQ ID NO: 36867 - DNA, 433 bp, Zea mays
ttgtagtgtgctcagcaattggagcttctcttacccgtgcctttcttctagcaatttcagtagactattgaacaaaccagaagggtcagggccaatggaaataacaataattggaatttgctcacttgcaacaaaggattaaaccgctagtacatacgaggatctcagcttcatgtctcatcctgctatagcgctgtgcaagaccaccaacatcttccaggggaccacctatagccattgctctcaatgggtctatagtctgaaatctcaacaaatgaaagaaactcaaaacgtatctaaatgggatccaaatacctcacacataagtgtgttcttatttctatcagaacagcatatataatatatttcagaaagcttggacttaaacttgcacttatttcagaaagccccgactcaaacttgctctaaaaaa

SEQ ID NO: 36868 - DNA, 175 bp, Zea mays
  unsure (1)..(175): unsure at all n locations
agcttaaggaaacgtacttacattggttatcggccttctgtttagctatggtgcatcgtggttattttcgtttatgccgctgacttgaccntccaaaactatttcttatcatcgatttgcgcctgcattttgcgactcgattcggttactacacactcgcaaagtagatactgat

SEQ ID NO: 36869 - DNA, 427 bp, Zea mays
  unsure (1)..(427): unsure at all n locations
nggaagttaggagcaccatactgctattacacagtatttattcatatacagataacgaagagatgtgttggagcctccatattggatggatgaacgcaaaccaccaaggaagtccagtatcacttagtagtattgctgaaaccaagcaacaattgaaaattgtttatcacattcagaaatactcctttattgaaagtaaaagtaactgttgtaaacataagcgaccaaagttgaacaaaatggtgctacaaaaatcacctctgttgtggtaagctttcagtcccaagaaacgagaaaagtttctttgcaatgaagaaacaaatacactgggacttataagttcaacgactgtatgagtgaccgtaaaggtatgtagaaaatcagcatgttcanggcctcaatactatatcacactgacatgcaaaaa

SEQ ID NO: 36870 - DNA, 337 bp, Zea mays
  unsure (1)..(337): unsure at all n locations
cggatctctaatcacctgccgctgcagctatgaagnaacattgatacatcatgtcgttatgcttccggaaagacacttacttcggaagagcaaacgagaagcccaacattatgcccaaaggctgaaatacccgaaaggggcactggtgtttaatggcagcggagaagaagattntttatactgtctcccagataataaagagatatccgtcagccgtgagatacgaagaagcttcngatttttgaaactataagacgacctctccgtattatcaaaggatgaattagctgacagtttagcatacaatagtataaaggtatgaaaatcaattcttgta

SEQ ID NO: 36871 - DNA, 431 bp, Zea mays
  unsure (1)..(431): unsure at all n locations
ntaccaaatggacgtgaagagtgccttcctcaactgtacctatcaaggaagaggtctatgttgagcaacctcctggctttgaagatagtgagtatcctaaccatgtttacaaactctctaaggcgctttatgggctcaagcaagccccaagagcatggtatgaatgcctaagagattttttttatcactaatggcttcaaagtcggaaaggccgatcctactttattcactaaaactattgagaatgatttgtttgtatgccaaatctatgtagatgatatcatatttgggtctactaacaaatctatttgtgaagagtttagtaggatcatgattcaaaaattcgagatgtctatgatgggggagttgaagtattttctaggctttcaagtgaagcaactccaagagggcaccttcatcagccaaacaaa

SEQ ID NO: 36872 - DNA, 377 bp, Zea mays
  unsure (1)..(377): unsure at all n locations
agctatctatgctatacttggcgcgtccattattttgcgccactatcttcaggcacacagagttgtggtggtgaccttcttcccgttaaaggccattctccacaactctaacgccacaggcaacatcgccaagtgggcagcggaacttgttgagttccaactggacttccagcctcgccacgctattaagagccaggtcctggctgacttcatcgtggaatggaccccttccccgagcgctcctgggggtccagatcctgattcngaccccacacctgcgaagcctatggcttcngtcttcaccgagccccactggacgctcttcttcgacggatctgcctgccacagggtggcgccactggagtggtcctcatcaa

SEQ ID NO: 36873 - DNA, 433 bp, Zea mays
  unsure (1)..(433): unsure at all n locations
ngacaatgaggagatggctcttatcaataagaactttctgtttatcctcaagcaaagganagaggagtacaaaccctgctccaagagggtttgctaccagtgtggtaagtccgatcattatattgcttaatgtccatatgcaagtgatagtgacagggacgacgacaagaaagtgaagaagaagatggagaagaagaagtactacaacaagaagaatggtggtaaggcgcacatgggaagggattgggactctgatgacagctccatcgactccttcgacaaggacgtagccaacattgccatcaacaagggtctcctcttccccaacatcggccacaagtgtctcatggccaacgagggcaaaaattagaaggtatactctagagacaccccacatatactactntcgatgatgaaggtacctctagtgaaa

SEQ ID NO: 36874 - DNA, 410 bp, Zea mays
  unsure (1)..(410): unsure at all n locations
agcttanaagatgagaaaagttgggaagaagaatatttctcgttgcgttgctntctctccatggcttgctgcagctgcctgggatttgggcttaataccattatgtagcttgctgatttgggaggtggtggaagagaggatggacaaaggagtggtaatggtgcttggtttggagaagaaagtactgctggtggtaaatctgcatgtgtagtgcgggtgctgtgagatcgatgtacaaggaaaagctgctggcttgcaatgtcagagaacaagaggtcaaatattttcatatcacccaaataatgtgaccacatgtgtactacaagtcaggcaaccaaataccagctcatatcatacatactacaagtcgggcgaccaaataccagctcatagcatacatttatgacgtg

SEQ ID NO: 36875 - DNA, 267 bp, Zea mays
gacctcgtatgccctctaactgtggcgtaacaggtactctatttgacgatcagactggtgcaccgcctttgttgtctagcaagaaagaactgtgttacccacatgggttctgctctccatctgcccttggcctgcagtgtgggaatatgtgagggacaatgtcttcactctcttagttgaggaccttaggggctgtgactacctggccgacacagcacagcttctgcaaaacaggtgtgaccttcagacattctccttgattttaat

SEQ ID NO: 36876 - DNA, 328 bp, Zea mays
  unsure (1)..(328): unsure at all n locations
catctcgaccggatccttgagtcacctgcggcatgcaagcttgcncttcaagcgaccggtaaggcatctgatgagtcctcccggataaggatcttcacatccacatccgaaaataaacaattataactcattccacanagttgtgaaacggacaacaaattatagcttaaagaatctaccaataaaacatttgaaagtgattggtggtcagagatagggaatntaccaataccaatcaccttactcttgccactatctcaaaaaacaatttcttgtgcttcttgagttagttgcaatgtatgaaacatgtctnntctcccggtcatgt

SEQ ID NO: 36877 - DNA, 423 bp, Zea mays
  unsure (1)..(423): unsure at all n locations
ntggctggattggttacggggagagacaaaagaatctcttcttgattataactcaacctgacggttctgagttcagtgttgagaattgccttgtgttgggttaaccaattcatacccaaaattacatctatatcctggcctttcagaacaatcatgttagcaggaaagttccgtccggccattgttactggcacttcataggccacttctctagtaaaaatgtgtcccccaggtgaatgaattttaaatccctcttttgattcatggcatgcaatgtgatgttgctccacaaatttcttgctaatgaacgtatgcgaagcaccagaatcaaaaagaataattgcagggtgactggccacgggaaacgtacccatcatcaccggctcttcttccggtgtagtggccacttgggtgtagtataca

SEQ ID NO: 36878 - DNA, 259 bp, Zea mays
  unsure (1)..(259): unsure at all n locations
ttaagtcacctgcggcatgcaagcttaaagggtgccatcttaatgctttcttgatatctattattatatgagaactncgctaatgtttaacaagccttccattnntgtgggaattccacaacacatgctcgcaacatatcttcaagtatttgggttaccctctcaatttgaccacttggttgaggatgataggcccaactgtggagcaatttattacccaacgactttgtgaagtctttccagaatttggacaccaatt

SEQ ID NO: 36879 - DNA, 414 bp, Zea mays
  unsure (1)..(414): unsure at all n locations
ntacctcgattcctaataaaccagcatacccttgagagtcttttctttagtcgggtaagtcttgctgagtaattgcgtactcagggttttattccctgttgtttttcacgttataattttgttctgttgcggatgctgctaagtgccggtgggctcggccttcttatataggtgtatcccatctttagcttctttattgaggattgtcacttaaactagcatgtattttaaaacttataaatgttttatacattcaaattgtaatctttttgaatcaatttcttttgtaaccaactccgatgatatatattgtaatcttgctataacttgtaaatgttgtaacttataaccattttgtaataaataatntatatncgctgcaaatattggcgtgtgattagagtttacttaatc

SEQ ID NO: 36880 - DNA, 474 bp, Zea mays
  unsure (1)..(474): unsure at all n locations
agctngngaagattcttcatcccaacatgggctattcggcggggccagagccaacccatgttggtcttagcaattaagcatgtgtcgagttcagctctatcaaaatctactaagtatagctaaccctctaacacacccttaaatgctattgaatcatcacttcttctaaagacagtgacacctacatcagtaaagagacagttgtagcccatttgacataattgggaaacagaaagcaagttgtagtctaaagaatcaacaagaaaaacattggaaatagaatgggtaggagatatagcaatnttaccaagtcctctgaccaaaccttgattttcatccccgaatgtgatagctcgttggggatcttggttnttctcctatgaggagaacatncttttctcccggtcatgtggnttgtgacccgctgcgagtatcaacttgagccccggatgataacctacaaacaatttagtc

SEQ ID NO: 36881 - DNA, 426 bp, Zea mays
tgcacttacgaccaaactgcatccgcatccatatcttattttatggcttaacaatagtggtaaggtcaaggtaaccaagctggtacgaattagttttgctattggttcatattgtaacacccgaggtgttacttaaggttttcactcaagactacacaagccaagcccatcatcacatgtggcttaactggagcaaagtacaccaaacttggaactcaagaccctaagtaagtgcaacccatcttagatgtaatgccttaacttatcatgcacatataatggggagaattgcccaaaccctaattcaaacccctttggacaagtggagcactagaaagtagcatgaacaaaagggtatgaaaaccacatgatcatgacttgggccaattataaaagatgtagtacacttaataccctacaaatgat

SEQ ID NO: 36882 - DNA, 388 bp, Zea mays
  unsure (1)..(388): unsure at all n locations
agctatatcgagtgttagacgagagacactcggcttagatatttaaaaaccctaaaacagaccttngccgagtgtctgtcagttggcactcggcaaagacgtctttgccgagtgccaggtatagggcactcgacaaagaatatttttaaattaaaaaaaaatctttgtcgagtgccagattgcgggcactcggcaaagaagtgaaatataccggccgacaagtcttctccttctccttcttcctctcctctcactctctctcactcactcccgcggctcacccgccgccgccttcctctccctcaccctctccctcacccgcccactgtcgacctctacttcgcccatcaccgacgagctgaccggccccagccccgacttcgcacat

SEQ ID NO: 36883 - DNA, 432 bp, Zea mays
tctatatattactcaagcaactactacataagacaaaactattaatgctaagataaatgtggtagtgatcaaaaccaacgagcaagagaattagtacaataacttcttcataaggttcgattgtttgtcaataacatacatcctaattgtggtgagtcctagctatacgatttatgtactaattggcatcacacacaacctacaattaggcatcataagaaccacactagcaagacatttcaactagccacgactccattatagttgctcttcacggatccctcatggggaatgaacataagagcccctcacaatcaatgattagagccgacaacgatatccaatagccgctcaatgatcccacaaactctatgctatctagatgatgataatcaccgagattaacaagagaataaccaacccaatacactc

SEQ ID NO: 36884 - DNA, 425 bp, Zea mays
  unsure (1)..(425): unsure at all n locations
agcttatctgcgcatagcttcattatgatcttattcttcttatattcgcctttcgncccactcaagcttcgtcttgaccatacccgattccgaagatgcctgttcacacatttcacttggaaaacattgtcaaatcatgtttttgaggaccttcggaagccgaaggcccccaacaccaacccaaaccaaacttgaaggctcaacgcagacatggtttttggttcttcaagcataaagaaagcgtgcagatgacanagatgatgatgatgatgatgatgtgcaagtcgtccatgagttggccgtagatatccaagatggtggtgcagacgcagacatcgatgacgaagatggngctgcggctactggtatgagaacatcacttctagatgaagttaatattattgatgttccgagtgtaaaaaatg

SEQ ID NO: 36885 - DNA, 433 bp, Zea mays
  unsure (1)..(433): unsure at all n locations
tgcatcaccaacgaaacataccanatatcacacaacagtttttagtatgttgacaagcgtcaaatccgcaacatagcctggtttcagaatccgccacatggcatcgccataatcagttatatctgaacatgtaatgtaaaatacacaattcagttaattcacatggtggattgagactggacgaccagcacagtcatttaaaatctggttcagactagatctctagttacaactatgacaacagaagcaagtcaagcacgaaggatgatggtagtcgattcgacgagcgaacgggggctcaagcaaatcatcgagaaatcgaaagatatgcgaatgcaggagtaatctgagagtgttctcaccttttttgcttcttgcttaagcttttgccttgattgtcgagctagttagttgccatgggtggcttggtccc

SEQ ID NO: 36886 - DNA, 433 bp, Zea mays
  unsure (1)..(433): unsure at all n locations
gatccttaagtcacctgcngcatgcaagctgncatacaactggcaatcttgtaacctctgtattttcttttctcaaatgttcctcatgctcttgctcattctgggaatatataagaatgtcatcaatgaacactactacgaacttgtcgaggtagtccatgaacacactgntcatgaggtacatgaagtaagttggcgcgttcatcaatccgaatgacataaccatgaactcatatatcccatacttggtgatgaatgcagtcttcggcatatctgaaggttggattctgaactgatggaaacctgacctcacatctattcttgagaacacactggctcctctcaactgatcaaataagtatttaattctaggcaggggtacttattcttgatagcgacttcattcaagctctatatcaatcacattctttcg

SEQ ID NO: 36887 - DNA, 251 bp, Zea mays
ttcacatccacatccagaaatgaacaattattacccattccacaaagttgtggaacaaacgacaaattgtggcttaaagaatgtacccctaaaaaatttggaagggaatggtggtcaaagggtagaattttacctataccaatcaccttactcttgccactatctccaaacacaatatcttgtgctttttgaagtaattgcaatgaatgaaacatgtctttccccccgggcatgtgatttgtacattcact

SEQ ID NO: 36888 - DNA, 187 bp, Zea mays
  unsure (1)..(187): unsure at all n locations
atccttaagtcacctgcggcatgcagctatggacaanttgngagattacgaataggtctttgtgtcgcgacacatatgctctgttgtgacggactacccattttcgtcatagatgtgtatccattctgtgacgaaatacgcgttgtcatgaaagtgaattcaatctatgaccatcatgtttggtcat

SEQ ID NO: 36889 - DNA, 437 bp, Zea mays
  unsure (1)..(437): unsure at all n locations
tggactgaccgcgctaatangggatgcatcatatccctatttctattctgcttaggctacaaggaacaagaccagtgtcccatccggcttaccccggcgatgggtaatgatggcgccccgcgtgcaccatgatgccggtggctctcagccccctacggaagcaaggagacatcagcaaagtcccggctgccccgacagctgtgcttctacaggactcaggcgctcctccgacggccaccccatcacatgtacagggcccaagctctcccccaacggccacgttggcatgtacacagggcttatgcactccactaccggacacgttagcgtatagctacgccccccgttgtacgtctggactctctccttgcctctataaaagggaggtccagggccaccctgatgggggttcgcgtgaaggaagcgacagacggact

SEQ ID NO: 36890 - DNA, 431 bp, Zea mays
  unsure (1)..(431): unsure at all n locations
agctnnggggggggggcatatcggacctgttnnaattgatttgngctcttaggttgcgctggctctggctgcaaaaaactgatcctgaccggccttgggattcctttaatataaaagctcacccttcagtgaaggcctttttctcggcagcggtttcctcggtggtgggcaacggtaaaaacactttgttttggactgataaatggattgatggttagagtctctgttcagtggcccctcacctggtcaagacggtcttctttagggctaaaaagaggagtggtcacaatgctctcacaacaaggggatgggtgcangacattcgacgtgctatcacccttaatgttcttgctgaatacttcaaagtgtgggatctcaccgctcactgcngagtacaacangatcatgacgataagcacatatggctgctc

SEQ ID NO: 36891 - DNA, 427 bp, Zea mays
  unsure (1)..(427): unsure at all n locations
ttgcattntgatgatagcagtttataaaanaaaacttggttttttcggtattaatgcctgnggtcggcactcaatgatacacacaacccactgatggctaagaaaagaccgaaacattggtcctgtctgagaaaatctctgaaccctggcctcccatcagtaactggtcggtgtcattagtccactatgcaacggcccaaccggagggtggcacacatgacattgtaatccgagagcggatgaggcacaacgaggggattttttaatcaaactagaaaattcgcccctaaggggaatcaaacccgggacttggaggtgctactcgcaagcccgtaacgactaggctagaggccctctcgctgatagcagtttatgaagtaagtagtttacaatcttacaacactatgaagttgctaatgactccata

SEQ ID NO: 36892 - DNA, 316 bp, Zea mays
  unsure (1)..(316): unsure at all n locations
atccttaagcaccgcngctgcagcttaacaagnactgagaccgtaatatatattattatttctaagctagaaaataaagttgaaaatcttcaagggtcactctaggagagagatgctatggtgcaatcacttaaggcagatttagtcaaagctcaaaaatcaaacaaagatatagaattagagaggaaactcaaggatgaaaagatcatagagcaagataaacacatccaagaattgagaaatgaaatggagaagatgaanacaagacatagtgatgatgtctatcggcttcatctcgaagtcgagagtttaaagc

SEQ ID NO: 36893 - DNA, 431 bp, Zea mays
tgagccaccgcctcagtctcatgttcaactctgactgggtttatatatacttcaggctcttatgatctgtatagacgtgacagatattccctagcagataacgacgccaaatttttagggcatgaaccactgcagctaactccagatcatgagtgggatagtgttcctcatgccggcgcaactgccttgaagcataagctattactcggccttcttgcattaaaacacagccgagaccactgcctgatgcgtcacaatacacatcaaagggcttttcaagatccggttgagccaataccagagcagtggttaataataccttcaatttttcaaaggctttattacacttcgaagaccaaataaacttagtatcattcttcaataaacttgtgattggtttcacaagcttggaaaaatctggtatgaatcgg

SEQ ID NO: 36894 - DNA, 237 bp, Zea mays
  unsure (1)..(237): unsure at all n locations
ctgaccaagttntgggctctggtgatggcactgagttggtgcatgctggttcattgcaagctgcttcgggtagcggccttacgcccggtcatcaattgatctctcatgatttggggggtcccttcgttcttttccaacctccacgtactgtggtatactttagcttgatttttacaccgcatgaactgctgtcattacactcatctgctctccttatcacgctttggtggacgggat

SEQ ID NO: 36895 - DNA, 433 bp, Zea mays
  unsure (1)..(433): unsure at all n locations
ctttgtgcagcaaatacaagtgctaaacatatgttttctatgtcatgataattacactctgcccccagtagggtgcgactgagatagtacagggatacttccttccctgtgtcattgttttgtgctaaaagggcacctaatgaggtaggcatggccgctgtgtataagatcaatggtttccctttgattggggcacacaggacaggaggatttgttaaatattgtttaatatcctcgaacgcattttgacatgcttggtcccattgaaatgggaccccttttttcatcangcgggaaaaaggtttgcatctcccggataaatttgagataaatctcctaatataagccaagtgaccttggaggctttttaattcatgcaaatttctaggttgtggcatatttacgattgcctttattatggctgggtcaatct

SEQ ID NO: 36896 - DNA, 315 bp, Zea mays
  unsure (1)..(315): unsure at all n locations
agcttctccatcatctctatctatatgtctttagtctacagangcccataaaagtagcttagctccgctaatggctttcagacatcattttntacaaaaccatgaaacataataggaaggagtctttccattattatgtggtagtcatgactcttcaacccagaaaacatgaccgtcttcaaattcacagaccttctaaagctcgcggcgtaaccatttgggaactttaagttttcaaccatttcatcaattgtttcttccttttaggtttaatactgagaggagcacgtggcttcttctgggtctctactatct

SEQ ID NO: 36897 - DNA, 430 bp, Zea mays
tgcatactcggctgaaggtgtcaatacacacagttcagtctttatcaaggaggattgaaattctaagggatgaggagctgcatcctcagcttatggagttgattctggacacggagacgatcagcaagcacgacgtgatcagggattttccttcgcatctcctgtagcctaccacgcatctctgctggagattaaataatgcattgagatgtgtagtagctaagacctgtgcggcgagaggctgcactgtgcgtcgctgtttgcttggtcgtcgatctggagggttactggccggaacgacgcaaccaattcgggggcgagattccatctactaccatcagcacagcaaagctgcagatccgcgatgtaaaacagcgggcaagagcgaaaggcggcgccagactcgaaccggaagtcgtccaacgcggag

SEQ ID NO: 36898 - DNA, 447 bp, Zea mays
  unsure (1)..(447): unsure at all n locations
ngcttcnggaaaccaatacttctggccatttctcttgttacagatagctctttgttgtcaggcaggcagtataagaagtcatcttcattcattccattgaatattattgcccccttcggatattttagttcctttgcataatggatggcttcatgagtttcttcttcagatagcttcttccccgaagcatgtcgtatcatgtaatcacgcgtgctggcaggtgcttcggggatggcggtgtcagtttcttcaactaatactggttctggaatttttattgcttccgcttcaaaaggttgctccttganggctctgaagcccancttcagcttagcttgttgaccgaagctcacaacttcacactctttttggaatgtgttgatgattaattgtctcagacgctagacattaccatctttccttttgggcactgatgcccctttggtt

SEQ ID NO: 36899 - DNA, 426 bp, Zea mays
tgttggcgtcttcatgtggccacttagcacgaattgcctgtttaccttttcaatcatgaaactttgcaagacatcctttgtgattgattcaatgggcttcatctctattatccttgctgaccgattcacactcgatctcttggcgggttcaaatgtgacaaaggcccatcaaccaattttgccatcaaaggtgcaattgtcaccactatcaaaccttggcataccgagagctgttaaaatctacatttttggaatataatacttgttcttcgttgtgcgagtaggctctacttcactaggagttgaataatatcgcttggtcttcatagtgacgaaaaaccatttctcgtcaatgacaatgtgatcaaacatatccttgaacataggctcatgaggtagactcactggatcaagcattgacaaaca

SEQ ID NO: 36900 - DNA, 219 bp, Zea mays
gaattgactcaagcctagctacgggtgcataagtttctcaaaaatccaaaccttcgacttgtgaataacccttggccacaagttgtgctttgttccttatgaccacaccatgctcgtcttgcttgttgcggaatacccacttggtacctacaacattttggttaggacgtggaattaaatgccatacctcattcctcgtgaagctgttgagctcctctt

SEQ ID NO: 36901 - DNA, 426 bp, Zea mays
  unsure (1)..(426): unsure at all n locations
ctacatcaacacacttaggcatctctggtgctacgtctgtttnggctctactctgtagttgaacctttctacctgcccatattatttattgatatatccacctataatttgtttgctactactattgcacctgacccaaaatgccaaaagcatttatttttggtcccttgtgatcttgcttgctcaacatgcgtctataaaaattagcaaagaagtcaaattcattgtacatggagtactaaggtatgataccacaaattagtataatcaaccttgactacatgttgaaagtcctttacatgaccttaatggatactttgtaagttgcatgatttctcatgttggtgtgctaatcataaaaatgtagatatgttgcatcgactgatatttatgttattaatggattgatcatatacataataattc

SEQ ID NO: 36902 - DNA, 304 bp, Zea mays
  unsure (1)..(304): unsure at all n locations
agcttctncagagcacccaggtatggatgcaaatgttattacattttccaccgactgtactattgtcggcgacgatgaatctattgttgcccagtttgattttggtcctaaagaagccgcctttactaaaccaaagaatcgataaatcatttaaagccgctcttcatgcgcggtcacattgatgggataccgattactaaaatgttggtagatggaggggcggctgtaaatctgaaagggaaataggcttacacctagttcctaaataatattggtggttgaattgccaacacanatattggac

SEQ ID NO: 36903 - DNA, 394 bp, Zea mays
tcggcatgttcgcagaacagggaaaccgacttaaagatgataaggccatttagacctcgatagaatgctatagaattatcaccaaatgtaaagggcatgtatgtaattttgtatgggttgtaccccgtgcctataaataggtgaacagtacccccgtactgttcacgctgacttggcatttgcttttgcgtcacacttgtattttcatctccttccaagccgaaggtacatttataatccaatattgtttctatttctttacgatgggttaataaagttaaatgaataatgttatatgattattcacgctatcttttatgtttcatatgcttcgtcttttactaatgtatattgtaatgatgaaggttgatccttcatgaccttcgcccggaga

SEQ ID NO: 36904 - DNA, 416 bp, Zea mays
  unsure (1)..(416): unsure at all n locations
agctgagcacttancctnacactactgaatgtatctatgtgcttacaangatgattgtttgtcttggtatacagaatgatatccataaatgatatgatgaatctgtgatagattcgaaaatttcagatcattaatgaccatcagtaatgaattgtcatttccaactggttatggttggagtgaggaagttatgcacgctcctgacttgtgattaactgcatgtactggatgtacaagttcccctatgggttttagtacgtgggaatccgcgaaagatataccatgcgtacattgtgtatgttttcccaatctcaccaccgcagcgtacatgtatgggcacacaacaagctggtgatctatgtgagaaatcattctccgtcgatcattaagtcttagaatctcttcatgagaatcta

SEQ ID NO: 36905 - DNA, 442 bp, Zea mays
cttaaatctaagctcagctcatctatgtatggattgcttttgagtccgcctttgtctttgcccttctgcagcttcctgacttccatggatagcaatgggtccctaatccgaaggtatcttcatgcaaagataggcaggatgaaggattgcttctaaggcattgagggtaccacgaccaataattgcattgtaagggtattccatgtcaacaatgtcaaacacaacttgctcagttctagtgttgttgatgaacccgaaggtcactgacatggtgatcttgcccagtgctacaatctgtcttcctccgaagccacagagaggatgtgtagcatcatgaatcttatcttctggctcttgcatttgtctgaaggccttagcaaatatgatgtcagctgcactgcctgtatcaaccaaaacattgtggaccagaaatcctttgata

SEQ ID NO: 36906 - DNA, 446 bp, Zea mays
  unsure (1)..(446): unsure at all n locations
agctatancgagcctannaaacatagcacagtggatgactatctatcccaagccacaggcagactgtgtgcagacacaacccccttctagtcgaacatagcgaanaagaagtcttcagctgctgaaaaacataaataaatctaggtgaatacactatgtattccgcaagcccatcccgcccgtaaagagagagggacctatacaatacatgcttgatatggtggagctgaagtcactcttctttntatagaaaggcaacactctgatggtttaccccagagagagaagtagcacattttcacactctaccaccactgagcttcctgctcccgtggcacttgtttcatttccaaanacacccacacacactaccctgtttactgagatcaaaacactaattgtcataccacaccagaactcgtcatactagtggacacggactattt

SEQ ID NO: 36907 - DNA, 434 bp, Zea mays
  unsure (1)..(434): unsure at all n locations
tcggctattnttcctgaagtagagctggaagtctttatttcttctattacatccaatacgtggaccattcttttcctcttagaggtaattgcaagatatttttgtgccttcggcacggatacttctgccgaaggacttgtaatttctgatatctttgttctctcgacctctggctcatccaatttgaccaatggtgctttcggcgttgtagccagcccttcaattttctgcattagcgcagtttctttggctttgttagccgaagaggtctcaccaccaaattcaggcacctgtagccgtttcaatgtatcacggccggtgagtaagaaccttcaccttcttccttttcagcgcgggcccgcttggagcagccgaagcaacatccttcacaggtgccacacctttccttttctgacctcgtagcgggtagcggt

SEQ ID NO: 36908 - DNA, 482 bp, Zea mays
  unsure (1)..(482): unsure at all n locations
ngcttatctannattataggatagaaatcgattcttatatattatgaggctatgcntttactctaaaacttataacatgtgttttagcttactactatatcggttcacaaatatattacatcgttaacttttttcgaaaactttgaccactcgtcaaatatatgatatccttgtgtttttgaaaactttgacactcgtattattcgaaatatttatttaaaaatgtagaaatttaagttaggcataaaccaccttaaatgataaaacaaataaaaataataataacttattatanttttaaataatatgagtggcaaatttttctaaacacgtcagcggtgtcatatatntatatacggacgcaataccttatagcagaaatatagcacatacatattttctntatataatcaatgttaatatataaatatattttgtataaaatcatatttacctcaattgatatgtgctatctaaataca

SEQ ID NO: 36909 - DNA, 421 bp, Zea mays
tgcctatgccctatgcacagcagggcataccttagccgctcacattttatgcgagtagcggggttgcttccatccaaaggcttatgccacgcgccgacgagccatgtggtggctttggacctctgcttgagcggatagtgggggacaagagcgcatggtggcttgaagacctggggcccctgccaggagtctacatggcacacgttgcggtccaggacccacctgcggcggttaggactaataaacatggagatacagaacccacccatgggggtccgaacgacatacgtggaggtccaatatccacctgcaggggttcggactcatagcagtagttactaagcacttccacccctgggacacgtggtggcattggagctttctataggattatggggaggctacgctagtgaaaaacaaa

SEQ ID NO: 36910 - DNA, 335 bp, Zea mays
  unsure (1)..(335): unsure at all n locations
agcttgtggaggaccaaatcaccaaagcttataagtttcttgttgagaagnggtcacccaagttccgttgatgaagcaccagaagaacaatcaaggaaggaatacatgttggagttcgcaagagaaaggtgtgtgtgttggcatctatgctccttcaataagcaagctgccaagcgaaagctagaagcctgaagatgatctttgagtagccagaatcagtgttttcaatcaacaaccagatgttcctcaaaggccagactttgttgaagtttcatctcctcgaagagttgcaaagtgaagatatgtagctgaagtanagctatacccataaccct

SEQ ID NO: 36911 - DNA, 449 bp, Zea mays
  unsure (1)..(449): unsure at all n locations
accttagaatactaagcttcgctagaggtaatgtttgaagattgctcaatcattaccgttatgtgaagttntacctacaaataacacatgtttgtatatatccttaacattactgtgctgtttatatattactatactgtttatgtcaagttattagactgagcttcatattagtagaaacagtagcttatccaatatcttggtcacctgtaaagtttaaacgaaggttttttagccggcacaaaaaatgcagacatcaagcgtcatttgccgcttcagttactaatcatatctagagctcagattttacggatagtcctctagtaccagatccttacatatgttgttacctttttatccaccgtcatcgtatacttgcaattactacttccttacaggttatcacttaccgcctccgttttcgaatatttatcgttcgctagttaatc

SEQ ID NO: 36912 - DNA, 418 bp, Zea mays
  unsure (1)..(418): unsure at all n locations
tcttcctcctctacctcttggagctggtggtctgatatgttctttgtgngtccctgatgactgggagctttgatgatggccttgagtgtgatttcccctgtcgtcgcttgagttccgattatggattgtcctaacatgcctagggtggagtcttcctccaaagcccctggtcatctcgaagtatctataggcatcttcccttctctgccgaaagtcattgtcggtcctgatgtattcgtccatcttctgtagaagcttctccaaagtttgtggtgacttcctggcgaaatactgcgttgttggtcctggtcggatccctttgatcatagaaacaataacaatctcatttggcaccattggcgcctatgccctgagacacagaaaccttccgacatacgcctgcaggtattcctcatgg

SEQ ID NO: 36913 - DNA, 409 bp, Zea mays
  unsure (1)..(409): unsure at all n locations
tgcagcttatcataaatattcgtatcacttacttttaaacctaagnttcacataacgtgattatttcctgatcaagaacacaattataatagtacatgtaatgaagcattttgcaacacccaatttaatcacaacaatcatcgtgactaatatatatctatccaatctaggcatcaaccaanagcaggagcagtgaaatggctcaccacgaccaaacatgactctaatcacgcggaagcgacgacgagcaccggttcacccatatcaccggtcggacacctgacgagtgtcgcacgggattcgctctcttctccacaaattcacattcatgcacacaantaaaccacaaccaatccttcgcgcacacaacacagtccatagtaagagaagaagctcagcactataaaca

SEQ ID NO: 36914 - DNA, 429 bp, Zea mays
tatgaagattcttcatcccaacatgggctagtcggcggtgtttgatccaacccatgttagtcttagcaattaagcaagtgtcgagttcagctctatcaaaatctaccaagtatagctgaccctctaacactcccttaaatgctattgaatcatcacttcttctaaagacagtgacacctacatcagtaaaaagacagttgtagcccatttgacataattgcgaaacggaaagcaaattgtaatctaaagaatctaaaagaaaaacattcgaaatagaatggtcaggagatatagcaattttacccaatcctttgtccaaaccttgatttccatccccgaatgtgatagttcgttggggatcttggtttttctcgtaggaggaaaacattttcttctcccctgtcatgtggtttgtgcacccgctatcga

SEQ ID NO: 36915 - DNA, 415 bp, Zea mays
  unsure (1)..(415): unsure at all n locations
ttcactaaccaactctatgtcgctatgagaatttctcaagtataattagctcagtgacgagattaatcattatatggtgttaagcctataaactttctcatttatacatttgttaggcgttcctatccttactttatatctattaaggttgtaatagcatcatctccaaattagagacccactatcaattgagatatcataataatgggtgaatatactctcaatacatggacagaaataaaatgacaatatacaatttgcaacaccctgatttggagttcatatcgacaagttatgcgattaacactctattttaatgcattnttttattaaataaaactgatggcctaactgttgggccttctcttccgaagtcctaaaaacatgataacaatgtcccaccataatgtctgga

SEQ ID NO: 36916 - DNA, 411 bp, Zea mays
  unsure (1)..(411): unsure at all n locations
tagcttggtgctatgcgcagcaaatataataaatttcttttttaacttggtcaaaaagtctaagtgccatgtgtgtgttgaatcaaaacaacccctcaagccacacaaggctgctgaggcgaggagtttggcacctctagaacttgttcattctgatctgtgcgagatgaatggaattttgaccaaaggtggtaaaagatactntctcactcttatagatgactccactagattttgctatgtgtatctcttaaaaacaaaagatgaagcgttcaattattttaaggcctataaagctgaagttgagaaccaacttgagaggaaaataaaacgtttaaggtccgaccgaggtggagaatatttctctaatgtgttcgatgagttctgcgtggaacatggtattattcatga

SEQ ID NO: 36917 - DNA, 338 bp, Zea mays
  unsure (1)..(338): unsure at all n locations
gcttgaaccatggtagtagcataggctagtttatattaatngactcangcctatctacgagtgcataggtttcaccgaaatccacaccttcgacttgtgagtatcccttggccacaagtcgggctttgttccttgtcaccacaccatgctcatattgcttgttgcggaagacccacttggttcctacaacattttggttatgacgtggaactaaatgccatacctcattcctcgtgaaggtgtgagctcctcttgcttgccaccacccaatccgaatcttgaagtgctttctctaccctgtgtggctcaatagaggagacaaaagagtaatgttcaca

SEQ ID NO: 36918 - DNA, 418 bp, Zea mays
  unsure (1)..(418): unsure at all n locations
ntaccaaatggacgtgaagagtgccttcctcaatggaccaatcaaggaggaggtctatgttgagcaacctcccggctttgaagatagtgagtatcctaatcgcgtatataaactctctaaggcgctttatgggctcaagcaagccccaagagcatggtatgaatgcctaagagattttcttatcactaatggcttcaaagtcggaaaagccgatcctacacttgaaaatgatttgtttttatgccaaatttatgttgataatatcatatttaggtctactaacaaatctacatgtgaagagtttagtaggatcatgacacaagtatattcaagacattctaaacaagtttgggatgaaggatgccaagcccatcaagacacccatgggaaccaatgggcatctcgacctcgacacggg

SEQ ID NO: 36919 - DNA, 376 bp, Zea mays
  unsure (1)..(376): unsure at all n locations
taatactatccttgtggttgtggataaatctaccaaatatggacacttcttagccttatctcatccattcacagcattgaaggtagctcacgtgtttttctctcaattntacaagatgcatgggctacctcgcctgattatctcggatagggacacgatcttcacgagtactctctggcaggaactggttcgactgtcagatacaatgccaatgatgagctcgagttatcacccacagacagatggacaaactaagagaataaatcaatgtttagaagggtatctaaggtgcacgatgcattcatgtcctcgacaatggcataagtggcttcccgtggcagaatattggataatactaccatacactcttccttgg

SEQ ID NO: 36920 - DNA, 430 bp, Zea mays
tgccaattcttgtcaaagcagcaacatttactggctcagctttctgtagaccatacctataacatggtcgtttgcgtgttggggttagacatgattggacccttcaagaaagttcagggaggctatacccacgtgttggttgccattgacaagttcaccaagtggatagagtacaaacctatcgcttctttaacctcagccaaggcagtggagttcatacaagacataatattcaggtttgggataccgaataccatcataaccgacctgggatctaacttcactagctctaaattctttgatttttgtgaacaacggagtatccagatcaagtatgcatcagtagcacacccaagagccaatggtcatgtggaaagggccaatggaatgatactggaagcactcacgaagaaagtgtttgaaaaaaatg

SEQ ID NO: 36921 - DNA, 238 bp, Zea mays
  unsure (1)..(238): unsure at all n locations
attaaaatacaccatgtgaatgataccactctgaggagtctctcaaagattactctccctaaatgagttgtcttctttagaaagagtttttctccccctttagagatgaagaaatactccccttgatagagaacctctacttatgaaaaagcatgtngaaaatagaggtgcaagacatgatttgaaaagactaacttcccttatgcataggtaacagaatatgagttaaccacttatg

SEQ ID NO: 36922 - DNA, 427 bp, Zea mays
tctaaagggagaacacattttaggactaacaaatgttctttttgagaaagacaggatttgtagcgcatgtcaagcaggaaagcaagttggagcccatcatccacacaagaacatcatgacgaccgacaggccgcttgagctactccacatggatctattcggcccgattgcttacataagcatcagcgggagtaagtactgtctagttattgtggatgattattctcgcttcacttgggtattctttttacaggaaaaatctcaaacccaagagaccttaaagggattcttgagacgggctcaaaatgagttcggcttaaggatcaagaaaataagaagcgacaacgggacggagttcaagaactctcaaattgaaggctttcttgaggaggagggcatcaagcatgagttctcttctccctacacc

SEQ ID NO: 36923 - DNA, 338 bp, Zea mays
  unsure (1)..(338): unsure at all n locations
ggatctctgagtcacctgcggcatgcangcttgagtcagncatcttataaaggataattgattcgcacaagaatgatgaaggcaggaaacatattcgtgtaaagattgaagtcggcaaagccaaatgcttccgaaaagatgatcaaggggttgtatggttcaataaccgcatagttgtgccgaanatgaagaggtccaccagcaaattcttgatgaggcacatcttagtcgctattctattgatcccagaagcactaagatgtatcaagatctgaaacaacattattggtggacgaaaatgaagattgaattgcacgctatgtggctagatgtgacac

SEQ ID NO: 36924 - DNA, 426 bp, Zea mays
tggtgccgatggagaaacaaaaatccttgaagtcttggctgtcaaactgcttgccgttgtcaactgttagttcggacggtactccgaagcggcaaacaatgttttgccagaagaatttttgggcagtctttgatgttattgtagaaacagccctcgcctcgatccatttggtgaagtactcgacggcaacgaaggcgaacttaaggttcccctgagcggtgggcaggggcccgacaatgtccaggccccagcgctggagaagccatgtatgggcgatcagctttgtatactgcgaggggctgcctgaccgaggagaaaacttctggcaggcttcgcaggaccttgagacccgaattgcggcgcagatcattgcgggccagtaaaaaccctggcggatcaccttggcagctagggcccttggccctg

SEQ ID NO: 36925 - DNA, 396 bp, Zea mays
  unsure (1)..(396): unsure at all n locations
agctnngacattgctccctgttggagaccaatgcattcttaatgccagggtgtctcccattatagagcatgcttctagcaaatntaaacttttcattntcaagttcatgctcattaattntagcagttaatttggctatgtgatcattttgttgtttaatcattacaaggtgatcatcaatagcttctatattaacatttctacatctagtacaaatagaaacaagatcatcggtagatgtagaaggtttgcatgcatttaattcttctatcttagcagttaattngacattctcatctctaagacaggaaatagaatcattgcanacattcaattctttaatcttagaaactaaactagcattttcatttctaagactagaaatngaatcatgac

SEQ ID NO: 36926 - DNA, 421 bp, Zea mays
  unsure (1)..(421): unsure at all n locations
cttgatgattactactccattaaataatactccgaccacggcgctngttaaatatatgcgcgggcccactcgagattagcagcgcatgtatacgtatcatcatgcgcctggccggcttagcttggcacttggcaggcatagttcatatatttaatgatgaagaagaacagactacagagtacacaggtgatgtgtttccgcagatgatgatcatcattccgatctgccgacatccccggccaagactactccggcgacggcacaagcagcaaagccttcgcactgcgacgtggacctacgggccagttacaccggcggcgcccagcagcagcagcagcagcagcaccgaaccactcgtgccgccaacagctcgtcgaagcgctcggcgaccgaaccagaaggtaccgcggccgtccggacc

SEQ ID NO: 36927 - DNA, 304 bp, Zea mays
  unsure (1)..(304): unsure at all n locations
agctcgcanttgnnggctgaactgtgtgtgcgtgcttcatactttcttataacatgccctcgtccctgctgttatcgtggaatcttaccctgtgcttaatgttgacgtcttgcttgtctcccatatgcatgaattacatgtaacctgatatctcgcgggtgcgtggggcgtgtccgtatcggttctacccttattggatctctattataatgataacacaacccatctttgtattctacaagagattgaccacttctattgttaatagtgatatgctatgacaaccttgatgtattatgcttat

SEQ ID NO: 36928 - DNA, 336 bp, Zea mays
  unsure (1)..(336): unsure at all n locations
agcttctcctcnctctctcgactacttgtaacctctactatgaggttgagcatcaatggngtcggtagcgcaaaccaccaatgataggatgtatggacattctgttctaactagtataaatcttgcaccctccacgcacaccctccggagctcagagcatgcacaataaatataattgttgaagtgaggtacgaaacaccgatagttggcatgtcangtaggggccttatgcattccgcgacgagattctctgagctctaaatgtctgganatgatgtttgcatatcacgggctcttggagcaaccaaacgcttctagaactcatgcaatgccctg

SEQ ID NO: 36929 - DNA, 436 bp, Zea mays
  unsure (1)..(436): unsure at all n locations
tgcaatcacaatatttncatttgaaagaatatatgataggattcttcagtaaatgaaactatgtgacacatacatagtactacaggttagcaacatatcatttaacatctgacactttatttatcacgtcatctattcatagttatttttattccattaatatggcaagaagtgagccacaggaatgctttaataacttaccccgggagaagaatacattccacaactaagggcaaacatcaaaagtggctcagctgtcgcaatgcagaattttttctgctcctcagataccttaatcttctaaagggcaagaagcagagccttgaaccgatggtgtgtgcagccaagatagaaaacaagtaacgcaatatgattcttcggaaagaaaagtgtgttacacagcaagcaacaaagagaaaaatgaataatttgaacc

SEQ ID NO: 36930 - DNA, 436 bp, Zea mays
  unsure (1)..(436): unsure at all n locations
agctngctaaannatctttcatccagaggctnggtgaatatatcaactaattagttgtgggtgctaacataggcaatttcgatatcccccttttgttgttgatctcttagaaagtgataccggatgtctatgtgctttgtgtggctgtgttcaacaggattaaccgccatgcagattgcactctcattgtcacataggagaggaactntgctcaacttgtagccataatccctaagggtttgcctcatccagagtaattgtgcacaacaatgtcctgcaacaacatactcggctttggcggtatatagagctactgaattntatatctttgaagtccaagacaccagtgatcttcccagaaactgacangtccctgatgtactctntctatcaatattacatccgacataatcagcatcagaatacttcgatagat

SEQ ID NO: 36931 - DNA, 437 bp, Zea mays
tgtgttaattggtgaaagcactaaagcattgtgatgggctttcctattctatacttctgcaataaacataaaaacgattatattagccaatcatttcgtaacatctggaatcagactggtttcagtaaggttttcctctgtggttagagaacaaaatatcctggtaaacatagcgtaactagagtacgatccatttagaaacgaatatagaaaagcctccccccattccttcagtaggcaaagctatggtttcaaagtatggaaaaaggatggaaggaaatgcatgacaaataatcaatggtgcttacattacagagacgccagatgacatgtgcagctgtcgatgaagctcatatgagaacatcagcatacaaactgcaataaaaaatgaactgaaaatttaggatagaattgcatgaagcatcatagcaaactga

SEQ ID NO: 36932 - DNA, 447 bp, Zea mays
gaacttagatactaagcttctaagggagaacacgtgatacgtttgagtaatgttcaattctttttataagaccgtgtgcagcttgtcaagcaggtaaacaggtgggaggagcgcatcacagcaagaatgtgatgaccacctcaagatctctggagctgctgcatatagacctgttcggacccgtcgcctatctgagcataggaggaagtaagtatggtctagttattgatgatgacttttcccgcttcacttgggtgttctttttgcaggataagtatgaaacccaagggaccctcaagcgcttgctcatgagagctcacaatgagtttgagctcacagtgaagaagataaagagcgacaatgggtccgagttcaagaaccttcaagtggaggagatgcttgaataggaagggatcaagcacgagttattcgctttctacacaccac

SEQ ID NO: 36933 - DNA, 295 bp, Zea mays
  unsure (1)..(295): unsure at all n locations
atccttaagtcacctgcggcatgcaagcttcnggaaccccatactgctagccatcttctttatacagataattctctgttgtctgggaggcagtataagacgtcatcttcatctgtgtcgttgaatactaaggccccttttggatacttcagttctcgggcatagtgattagcttcaaaaatatcttctacagataatttcttccccgaagcatgtcgtacaatataatcaagtactttggaagatgcttttggggcagcagcgccagtctcttcagccaaaatttgttctgcta

SEQ ID NO: 36934 - DNA, 432 bp, Zea mays
ccttagaaactcaacttctacctggtatcgaattaatatggaatggtttgtttttacattaattaattgtctagaaaaatgtaaagtttgaagattattttagttggtttgcaaattcttcagctcctgcgtatgactattgtcatctcaatttattttagttgacatttgtttactggagactatagttcagttgctctatgtggtattggccatatacacaatttatttgactttttgttatgccttttgtctacggacttctgcatcatcaggcaggagtggactgtcgtccgcatccagtccgccttccatgcattcctggtaggcttacctgccgcctttgtttttttgtcctctcactggctcttgtcagaggatgtgtgaatgcttggagggcgttgagggcactgcggtgcattgtgcggctac

SEQ ID NO: 36935 - DNA, 279 bp, Zea mays
tggctgcatggatgcaatatgccttggtcgacgtatttctgcaagatagcagatgaagattgctttaagcttaagataccacaccaataattgattgaaggatattcatgtaacaatgtcaaacacacttgctattttagtgttgagatgattcgagggtactgacatgtgatcttgccagtgtacatttgtcttctccaagcacaagaggagtgatcatcatgatctatttctgcttgctttgctgaggttaccaaatgaggcgctgcctgctgatca

SEQ ID NO: 36936 - DNA, 428 bp, Zea mays
  unsure (1)..(428): unsure at all n locations
tgtgaacagtacaaatacagaagggagaaggctgtctcggtctatcagccgaaacccatgcttttatgcgaagatatcgcagagcagaaggtgctgctgggatctcaattgtctgaggaacaggagaaaaacttgataaggtttctgttcaacaacaaagatgtctttgcatggtcagctaacgatctctatggtgttaacagggatgttattgaacactcgctcagtgtcgattcatccttcagacccagaaagcaaaggcttcggaagatgtctgatgacaaggccgaaggtgcccgaaatgaaataaaaagacttctcagtgccggagttatcagagaagtgaagtatccagaatggctagccaacactgttatggtataaaaggccaatggcaaatggaggatgtgtattgattntactgatct

SEQ ID NO: 36937 - DNA, 430 bp, Zea mays
tagcatgtaaaatatcattttcacttctaagattggtaatggaagcattgcaaacatctaagtctttagccttagcaatcaatttctcattttcaatcctaaggctagtaagagaagcattcaattttttgatcttagcaagtaaactagcattatcatctctaagattggaaattgaatcatcacatacatttgaatcaaccttagcaattaatctagcattctcatttctaaggttggcaatgacatcatggcaagtgcttagctcactagatagtttttcacatttttctacttctagagcataagcatttttaaccttaacatgcttcttgttttccttaattaggaagtcctcttgggtgtccaagagttcatccttctcatgaatagcactaattaattcattcaacttttctttttgtgcatg

SEQ ID NO: 36938 - DNA, 382 bp, Zea mays
  unsure (1)..(382): unsure at all n locations
atctctgagtcacctgcggcatgcangcttgaannnnatattagcagctaccgactactttatattgtcgatagntcatttcattccaactttaaggtaagattcttataataaaacataattctattattagtttgaatcgatgaagctagcttatgaaggtctattcggtacagagtattctgctgagtaaagcgctacaaatgcaacacgacctcgacaaaagaaaaatgaaattataatcgatggtctggaaagcaatatcaaataatacaaagcctctcttgaaaagacagatttcctaatccaaccagtgcaagcgtcctttgcacaaacgcagcccgagaatattggataaacaacgaactcctgccaaattata

SEQ ID NO: 36939 - DNA, 388 bp, Zea mays
tgtctgttagaatcgaacgaagctccagtttgaaacctgcttctgatgaagaaagtattaacgttccaaaagttcataattaaatggccagagtgcgttgtactgccagggttgagcgtgagggggactaaactgaagcttcggagactgttcctatctccgaagctatgcaacgttccgggctggtgacttcggaaaagatccttcatgatgatgcccgacaagcagaacaagcaatcgctgaagcagaagaagaagatattgagggaactgattctgaagatgattatcgcattgccatgccaagcaagcccagccacttggacttccggaaatctactgttcccaagtctgatctgtccaagaatgtaaagtcaggctttttact

SEQ ID NO: 36940 - DNA, 181 bp, Zea mays
agcttgctcaagactgaaccgaggacccgtattatctgaatagcacaatcgtgctcgccggagttcaaaaacccgccggcgcacgtggaccgggtaagtctctgcaccattattcaattctgtgcgcgcatggcctttacattaacccgtggagcttctcgtgcaccttaattgaactata

SEQ ID NO: 36941 - DNA, 429 bp, Zea mays
  unsure (1)..(429): unsure at all n locations
tgacttggattantcaaacgtgagccaccctatgcgcaccttacagtgtctgatgcccaggctatcagctggccgaacaggccactcttgggaaattggtcacgcgctctatctataattcattggactgtccagtgtgcaccaaactgtccggtgagccaagcggccaacggctctcgccagcgtcaatgatcagcgcgtaatcaacggtggacacgtggcagcaccggactgtccgatgtgccgaaggatgcaatggctaactcaacggtcggtgtgggggatggaaataaattgtgcactgttcactgtccgatgtgcaccggacagtccggtgcatccgcggacataaggcaatcanggccttacaaataaagaagaaacggttcctttagcccttgcggctataaaaggaacccctacgcacat

SEQ ID NO: 36942 - DNA, 220 bp, Zea mays
  unsure (1)..(220): unsure at all n locations
agcttcngatatacaacattgtgtgccatcttccgttagacatgtatctacttattgtctggtagacaatgaaggaagtcgtcttcgtcatcgccaccatacaccaagaaccctctagggttacttacattcgctggataatgttgtgcttcagcaatttgcctcttacatattattttttcttcgagcatatctgactatgaattccaattcttcggta

SEQ ID NO: 36943 - DNA, 426 bp, Zea mays
tctaagggagagcacattgtgggactaacatatgttcattttgagaaagaccggattgctagcgcatgtcatgcatggaaacaagttggtgttcatcatccacacatgaacatcatgatgactgacaggccactcctgctcctacacatggatcttttcggcccgatagcatacataagcatcagcgggagtaagtactctctaactattgaggatgattattctccgcttacttgggtgtactttttgcaggaaaaatctcatacccaacagaccttaaagggattcttgagacgggctcaaaacgagttcggcttaaggatcaagaaaataagaagtgacaacgggacggagttcaagaactctcacatccaatgcttccttgaggaggagggcatctagcatgagttctcttcttcctacacc

SEQ ID NO: 36944 - DNA, 330 bp, Zea mays
  unsure (1)..(330): unsure at all n locations
agcttcngctntgaaaacagttattagtgtttcctaatatgtctgaagctgctaagaaggctgctgctgagatgaagctgagtcttgatgaagagaagaacttanggttccttatagcaatgtcgaagaccaacacagaanagatcaccagggaaattctggaagggctgtctgaagatactggtgacagtgaaagttatgatgtggacagcggtggcgaagactccgaagatcgcccctggcgaccaagccattcagtttatggtaaatcaactatcanagagaatcatctttgtaatatgagaggaaggtatttncgggatctgtcca

SEQ ID NO: 36945 - DNA, 422 bp, Zea mays
ctgggctacaaggggtaacacctaaacagttttttttctttttagattctgttgaagatctttgagctaattgctactcaatacaactcgaagttcaaggggtacaccatatggtgtgcatctagtgatgtgccccatatttttcaacttagctccccttcaagatgattctacaaatcctcatgaagctcaagggtttctagaaagcatgtcccataggatcccatgagtataggaaataacacatctagttggtggaccaattagcatcttgaaggggatacagtacaagacggtgtattctatgcaacagaaggatgaagttctaaccggttacgatttccggtatgattagtactcaaattgtaagttggttaggtctatagctcataaccgactcataagtctagcccatgcatata

SEQ ID NO: 36946 - DNA, 392 bp, Zea mays
  unsure (1)..(392): unsure at all n locations
agcttgaatgcntgcttgatttataccattgatcctcatcagcatccacttgcccacaattgacccattggtttttatccacagcaagactgacaattacaagcgtcatgaattggaagaactctaacatctaaaacatgaagtgcattaaagtttaccttgtctattttctccgacagcatatatataaaagtccatgactctaagatcaacacctacaggagggccttgaacatatgcagtaactntggatggctgtttttcaagcttgaatgctgctttgatttcataccattgatccccatcatcatccacttgcccacatgaatgcgctgcaggaagttctgttgcgagcgaaagcatgtgatcagtgcttcatgagcaaagtatgc

SEQ ID NO: 36947 - DNA, 434 bp, Zea mays
  unsure (1)..(434): unsure at all n locations
tctcggtatcttcttgggtaaggcactntnttcttcagttgggttaagatgagaatggaagcataaggtgaggattagctctaatttgtgatctatgtttttagagaaaacctttttaagaaaaacgaaaagaaaacacacaagctcatcaatgataagcacaaacaaatcaaatgttttgaataagggaagaaaagagttttttcccaaagcacagactactcagatttgggggctaagcataacgactattgcttggctcctgaattgagaactatactaaatgcaacttatgagcactaacgttaaagcatcacatatgcactcaaaaggggagaagacatcaagtgaaattcattttgaaatgccctaggggggcacacaattagagttttgcaaaacacgagtctacacgattacctctcatacatgca

SEQ ID NO: 36948 - DNA, 340 bp, Zea mays
  unsure (1)..(340): unsure at all n locations
agctntagctccatctatgttatgaatagcctttgaatctgtccagttcccttcagcccttctggcagcttcttgactcccatggacagcaatgggcccttgttccgaaggtatcttcatgcataaatatgctggatgaagtattgcttcgaaggcattaagtgtccctcaaccaatgattgcactgtaggggtactccatgtcaacaatgtcaaagacaacctgttcagtccttgtattgtggatgtagccgaaggtaactgacattgtgattntaccaagtgcgacaatctgcctttctccgaaaccatagagagggtgtgtagcatcatgaatcttg

SEQ ID NO: 36949 - DNA, 437 bp, Zea mays
tcatacttctaacaactattagaatagcatattgtttaaactcttgatttcacaagttactgtgaaaagctgcagacctcctgaccttaactggatggagcgtagacactgaattttgatggcaatgatgcatgtctatattgtgagaatctgggcaccatttatttgttgtttatatgactttttgcaagcaccaatcacttcaatttaccttatcttaatttcctattatattctaaacactgccatcttctcaataatcctctatgcttcatgactgtggaagtgcctaggagttttcttatttaatcttttattcttcatatttgtatgattatatcagccatcttgataagatctttggtacaatagatatttatttgtggtgttacttattcatcttcaggttgattctgtaccaaactgatatatgtccg

SEQ ID NO: 36950 - DNA, 438 bp, Zea mays
  unsure (1)..(438): unsure at all n locations
agcttcatatcanannatttcttttcttgctcgaagctntctgactntaggaggagttcactgtttaatctggcaatttcggcttggacctctgccaatgaaccctccattgtttgaagaacaaaatctttcttttcaagagaagcttcatgatctttgattttactttccaagccttcagttataacctcatttttcttatatttgaggtcctgttgcatcctcaaggctttacttagtagcatactttgtgcaaaataaccttcatcagaaatcaccttcatcgcaaaacaataaaaagttgagggaaaaactntaccttanaattagaatagaataagctgtcgacgatatgctgtcgtcggtagcgactgatgtcagcttcaagcttcggaaaaccaacactcttcgacagagtgccgataatctttgaataca

SEQ ID NO: 36951 - DNA, 438 bp, Zea mays
  unsure (1)..(438): unsure at all n locations
ntagagagacctagaaatacaaagcgcagtagaagataaactagcccaagccacaggcagaactgggtgaagacacatccccctcaatcaagcatagcagaaaagaagtcctcagctgctgaaaaacataaataaatctgggtgaatacactaagtattccgcaagcccaccccgctcccgtaaagagaaagagacctatatcatacatgcttcatatggtggagttgaagtcactcttctttttcttagagaaaggcaaactgtttagggttttcccgaagaaatagaaataacacgtagcttaaccaccactgagcttcccgctcccgtggcaccattttctcttccggagacacactcacacacacatatttccctgttcacggatgttgtaaaacactaattgtcataccacaccagactcgtccattccagtg

SEQ ID NO: 36952 - DNA, 409 bp, Zea mays
  unsure (1)..(409): unsure at all n locations
agcttgcctggcgacgtacgagtcatgatgagtgcttcttatgctgcagcatgggcatactgcctgccaacggaacggacaggcacgccgcctgctggatggcctggttgctgcctgtcagtaaagtggatagggcacattaaatgctggggcgatacatcgcccgctagtgaattggacagggctcattaaatgctaaggtggcacatcgcctgtcaatgggagggataagtggcgcgccttgtctgcaataaatgccacgccgcatatcccagagacctgacgtcaggccccgcccgttggcttacatcatgcgtggtaagccacgtggcagcatcgggtctccgcctgagcgaagagcggatgtgtaatggacaanggcccgacacatgtcaaccccggacccatg

SEQ ID NO: 36953 - DNA, 450 bp, Zea mays
  unsure (1)..(450): unsure at all n locations
gaccataatactaagcttaatcacgcagcgtatatgatgaagcatggagaggaggttcttgtttaagcgattacatcgactagactccgcctccaagatctccttggacgacttctttcataatcgccatttgcaaaggaggtgtcttcttcccttcgtacccctctcttcagaagggttgggatactagaagcgagaaactacatacccatttacgaaaccgaggcgacgcgaaacaataccgcattggagcttgcgaaactgaattttaacacttcagcaacttgatttctgtgaagagctaaatcattgctcagcgtaagattgttgtcatctctcacttcgaattaactgatggngctctctctctctctcatgtttaaattggcttattaatagttatctgaacatgcatgcggtangcggtggaacgagatgatatcccaatca

SEQ ID NO: 36954 - DNA, 276 bp, Zea mays
  unsure (1)..(276): unsure at all n locations
atcttaagtcaccgccgctgcagctttaaaggaaaacgtgattgttacttactgcattccaaaagaagaccttgtgagcttgcaagcacgttaacagtgggaggagcgcatacaccaagaatgtgatgaccacttcaagacccctggagctgctgcatatggacctcttctgacccgtcgcctatctgagcatangaggaagtaagtatggtctacttattggtgatgactattcccgcttcacttgggtgttctttctgcacgataagtctgaaa

SEQ ID NO: 36955 - DNA, 428 bp, Zea mays
ctgaatgtgtctagcgatggagtactgtgattttcttgtgttctcaggccctgactccgtacttgcactcatgacatgttatctcatgaggttcactggaggagaatgagcacctaaaactttgggaataatgtcttagttaaggaatgtgcataacaaaagcactacccaagcatttttcaattatcacctacggcaagagaagattaaagcctagacccttcttgagcgcttaactgccaaaactcctggtttaagggaaaggttaagaaaatgtgcaaatcatgagttaacccttaaccaaagtttaagtacacattaaaatctataatatgcagaggggaaacatttcaaaaaggccccttgtagaccccgaatccattctttaattagagagcacactagagctctcttatcttctacaagtc

SEQ ID NO: 36956 - DNA, 435 bp, Zea mays
  unsure (1)..(435): unsure at all n locations
agctattaaagggagaacacgtgataggtttaactaacgtgcaattcgaanaagatagaccttgtgcagcttgtcaagcaggtaaacaagtgggaggagcgcatcacagcaagaatgtgatgaccacttcaagacccctggagctgctgcatatggacctcttcggacccgtcgcctatctgagcataggaggaagtaagtatggtctagttattggtgatgacttttcccgcttcacttgggtgttctttttgcaggataagtctgaaacccaagggaccctcaagcgcttcctcacgagaagctcaaatgagtttgagctcaaggtgaagaagataatgagcgacaacgggtccgagttcaagaaccttcaagtggaggagtttcttgaggangaanggatcaagcacgagttcttcgcttcctacacaccac

SEQ ID NO: 36957 - DNA, 431 bp, Zea mays
  unsure (1)..(431): unsure at all n locations
ttgaatgtgtcttgngatggagtactgtaacaccctttgtgttactcaagccctgactccctacttgcactcatgacatgttatctcatgaggttaagtggaggagaatgagcacctaaaactttgggaataatgtattagttaaggaatgtccataacaaaagcactacccaagcattttccaattatcacctatggcaagagaagattaaaccctagacccttcttgagcccttaactcccaaaaccctggtttaagggaaaggttaagaaaatgtgcaaatcatgagttaacccttaaccaaagtttaagtacacattaaaatctataaaatgcagaggggaaacatttcaaaaaggccccttaaagaccccaaatccattctttaagtagagagcacactagagctctctaatcttctccaagtcaa

SEQ ID NO: 36958 - DNA, 412 bp, Zea mays
  unsure (1)..(412): unsure at all n locations
agctatcactcttcgaaccatatccagatattntttttgcttctgatccttagccttacaacttttgtcaatatgacccgaaacaacctgcgaatcagatttaagtatggcccttctgattcccattgcttttaacttccgaagacctaaaatcaatgcttcgtactcagcaatgttatttgtgcaattaaaatcaagttttgccgcataacaggttttcactttggaaggtgaaaccaacacagcagccgctcctgctccgaaggttccccaagatccatcacanaacactatccaggcctcggtggctttatttgcttcctcatctgagcccctgtgtccatcaacaataaagtctgccagtgctgcgactgattcgaaaactatgacatattaatacaaaatcattgac

SEQ ID NO: 36959 - DNA, 432 bp, Zea mays
  unsure (1)..(432): unsure at all n locations
taatcctgaaaaatgtgttntcggggtaccagctggtaagttactcgggtttatcgtcagccaccggggaattgaggctaatccataaaagattgaagctatcatgaagatggaggcgcctctatcacaaaagaaggttcaacgacttactggatgtatggcagctctgagcagaattatatccaggctgggagaaaaaggtttgccatattacaagctactcaagaaggtggataagtttcaatggacttcagaggcacaggaagctctagatgcactgaaaaagttcttgacaacacctccagtactgaagccaccccggcgagctacgtcaactcaaccggctgaagatttgctactgtatatctcttgcacgactcacgtggtaagcaccgcgttggtagtcgagcgagtagaagaaggacatgccta

SEQ ID NO: 36960 - DNA, 307 bp, Zea mays
  unsure (1)..(307): unsure at all n locations
agctatggctatggtcaaatatatggcagtataatattgcaatagcaatgaatgttgtggtaacttcacacctacccgtctgtttatatagtgccgcacgtgggaaggtgaatcgtcaagtctttcgcaccggacgaacagtcgctcgcacccactaaatggtgggccacagaacccgagaaggtgaatcgccaggacgcgtgtacctgttgcatggtgggaccatttcacgctcggaatattgtaatcgtttctcagcaacgagctcanggaaggtgtttttcggatcttcagctctccgaagcct

SEQ ID NO: 36961 - DNA, 432 bp, Zea mays
tcctccagcattcttgagcccctcgggcatccaaaggtagcaataagttccactaggagttatgaagcttgttttaggctcatcctcctacttcatccaaatttgatgataacctgaatagcagtccagcaagctcatgagctccgaagtggctgccgcatctatgaaggagtctattattggcaaagggaattcatccttcgggcatgccttgttgagatccgtaaaatcaatacacattctccactttccattgaacttatttaccataccagtgttggctagtcattctagatatgttacttctctgattactctggcactgagaagccttttaacttcatttcttgcccccttcgactttatcatcggacatcttctaaagcttctgcttcctcggtctgatagctcgatctacattgagtgagtgtt

SEQ ID NO: 36962 - DNA, 412 bp, Zea mays
  unsure (1)..(412): unsure at all n locations
ngcttctgccatgacagtgatgtccctggccggatataagagtaccatgtctgggccacacttcggactgccatgacgaaggacttcgcaatgactgcggtattgcccccgtacgaaaatatagttgcttcgtagctcatcaggaactgcttcggatctgagtgcccatcatacatggggagttgaggtggcttgtatgatgggggccatggggtagcctacagttctgctgataaaggagaagcatcatcaaaagcaaaatttccacgatggaaattgtcataccaatcatcatcattgtaggaattgtcttgacgaagctctctttgtggaggtcttcggtcctggtcatcttgagtaagatgacgtatntcttcagcagcatcatcgatcttcttctgtagatcggaaa

SEQ ID NO: 36963 - DNA, 433 bp, Zea mays
cttctaagggagatcatatgttaggactaaccgatgtctgttttgataaagacacaccttgtgcagcatgtcagacagagaaataagtgggaagcactcatcacaacaagaatgtgatgacgacatcaagaccactcgatcttcttcacatggatctcttcagacccgttgcctacatcagcatcagggaagtaagtatggtcttgttatagttgatgatttttcccgcttcacttgggtattctttttacaggacaaatctgaaacccaagggaccctaaagcgcttcttaaggagagctcaaaatgagtttgagctaaaagttaagaagataatgagcgacaatgggtccgggttcaagaaattgcaagttgaagagtatcttgaggaggaaggcatcaagcacaagttctccgctccctacacgccacac

SEQ ID NO: 36964 - DNA, 208 bp, Zea mays
gcatttctttatctccgatgttctgtaatgtctgcaagacgggtaagaccttcctggtaaggtaaggaaagatacccagcttgtcaagtagttcaagggcacctacagggttgtctaaaatacgttggacaacgacactgtatgtgggcctaattacttgggaggtttcgtcacagggtggccgacttttgtgcgcccgtgagctcca

SEQ ID NO: 36965 - DNA, 430 bp, Zea mays
ttgtcatccgaaagacaattaccttggaggatagatataatttcagtcctccaatcttcactatacacaggggatattgcaagcattgctcttcccataagttcaaccgaaggtgcttttattgtctcaaaaaatacttccgaaggtagagggagcccctgtgccgctgatttggctaacagatctgcatgctcattttctcctcttggaatattcttgacataaaaacctttgaaaaaagcctccagccttcgaactgtatccagatatttttcaagcttcggatctcttgccttgctacttttgtctacatggccagaaatgacttgagagtcagttttaaagattgcccttcttattcccgttgcctttaacttctgaagccccaacagaagggctttgtattcatcaatattatttgtacaactaa

SEQ ID NO: 36966 - DNA, 220 bp, Zea mays
  unsure (1)..(220): unsure at all n locations
agctnggtgccgatggaaaaacaaatattcttgatatcttggctgtcaaactgctcgccgttgtcaactgttagctcggacggtactccgaagcggcaaacgatgttttgccagaagaatatttgggcagtctttgatgttattgtagaaacagccctcgcttcgatccacttgctgaagtattcgacggctacgaaggcgaacttgaggttcccctgag

SEQ ID NO: 36967 - DNA, 344 bp, Zea mays
  unsure (1)..(344): unsure at all n locations
gggaggcgtctatgggttgtcgacttggtgtanactccttcttcttctcctccgtcgccttgaatgcaacgggctgagctctagatgaggtggcatcatcaagctagtgagcttcctcgagccttcaatatgcactcaaaacttacaaaatttccgataacttactcgggggtcattttagtatatctaagattaccaccaattaattgaacttgagtagggttgaggaaaataagtgatcttataataaccttaaccacctcgagggcatcccactatacgctgccgaggttgcgcgcttggttcaccaacgtcttgagccgattgtacatgagcggaggcta

SEQ ID NO: 36968 - DNA, 325 bp, Zea mays
aagcttccctacacgccaaggatacgcagatctctgacgccgggacacaagaagattgtctcggcaatagacattagtatgctccaagcactatattctttatgtccctgggcccacatgtcggggcccagttcctttgtgcatgccccccttcagctataaaaggggaggcatgcgacgttacacacacacgcaatctcaggtcacaccttagactcgcaaactcatacaagctcacaagcaatacatctcacagtggagtagggtattacgctccggcggcccgaaccaactctaaatcttgtgtgttctcgagttcttccca

SEQ ID NO: 36969 - DNA, 138 bp, Zea mays
ttaactgaacccttttaattaaccttccttggctgcgccctcttccacttttggaagggccttggcatccccttttataaatacaaggggatggctccacttgtcctattgggggttacttccatctaaccttgcccg

SEQ ID NO: 36970 - DNA, 232 bp, Zea mays
tctacacggtgcacttgtgatgttgtcatgactaggaccgtacctctcattgcgaccaccacaaacagtgttggtatattatcattaatctattatgttggttgacgcagaacccagctcagctcccaagaattctctccacagtgaatgcgccactggatctcctcatagctgggaccctgcaatgcatcatacacgacgtctatatgcgtgtctgtagtgaaatgctttt

SEQ ID NO: 36971 - DNA, 269 bp, Zea mays
caagttgagtatatcatgtcacactacagattattgtgacccacaaattatcttatgaactgcggcttcacttaaggaatggactatagttctgatggattggccgacttaggcatgcctctattgtcactggaatgataccatcatttcccaattaattccactgcgactcaataataacgtgcaaggcaactatgggaccgactttacgaaaaactggttttctaatatttcattattcgacacccacaataaatacactagataca

SEQ ID NO: 36972 - DNA, 214 bp, Zea mays
  unsure (1)..(214): unsure at all n locations
tatgcgcattgtgccagagcctatgccttacttgaatcacctttgaaatgccattttgctcggcgctcatctctatgcctatcattacaaacatgtctatgtaccagaaactatctgactctcttactcgtatctgacacagtcgagcgatattctcaccgatngattctcttgcagctggatgctttgacgagtgttccactccattatatat

SEQ ID NO: 36973 - DNA, 175 bp, Zea mays
  unsure (1)..(175): unsure at all n locations
cctagtattagcaaggcgccatacacctcatgacactgtntctggtgtactcatgtcaataatattgactgttacatcgagctcacaatacatgatacactacatgactttgtacatatatataacagagcactgctaagtaagtgtcatactactctaataagtcatccatgta

SEQ ID NO: 36974 - DNA, 59 bp, Zea mays
tgtcaagaacagggagaccatacacagatgtgtaccctcgagacttggactgtcatatg

SEQ ID NO: 36975 - DNA, 237 bp, Zea mays
tgaccagtgaaagcactgcaagctgtgactagataagctaccagcaccggcggcacgtgaaagtttactcgggagcctctaaattaactcgtgagactgcagccttcacattgaggcaatgagcctgcaagttactggctggctttggctgtctctcggcactgagttttaagctgtgccgctggaaattgtacatgccaacttactatcaccgcgacttactgcattctcacctgc

SEQ ID NO: 36976 - DNA, 148 bp, Zea mays
tcactccctcagagttgtcaatgtgtacccgctttatctaagtcttgtatgcgtgccagcacacaaaggaaaaagaaaaaagtctctgagagggcatccatttgccaatggatcacaagctagcatctcgacacagcccccacatgcg

SEQ ID NO: 36977 - DNA, 256 bp, Zea mays
  unsure (1)..(256): unsure at all n locations
tcttttagactcaacaaaggcgagcttgttcaaacgaaactttagttgtcatcagagtttctgcgcagatttcggtaaaagttcacctcctatgcatctcttaaccaaacaagttngaagtaatatagcaaggctcccaacaaaatcttgagattaaatatcccagtctcctgttgaaagcagatggagctattcactaagtgcagaatctcagtactatggcccttcattacgtacgtcgctcatgtaagaaaca

SEQ ID NO: 36978 - DNA, 95 bp, Zea mays
acactgttcaggctttcgcaatttctggcggacgagatattctgtctcgtcagcctcggattagctactagtgctccatgtctctattgttccac

SEQ ID NO: 36979 - DNA, 261 bp, Zea mays
cataacaggcagtcagtcttaaattctattactgccttacactctaagcatgatatatttctaaacggcactttcaaaaaacgtgacccttgctatgaaacgaacaatgattaagattcaacacatgaaggatggcggatacattaccacctgacaactgatcatccatgtaagtgtggactgttttaagagaacactttcccgctgggtggtcgtcataccatacccgtgtactcaaagtagttgcttgccatgttggct

SEQ ID NO: 36980 - DNA, 328 bp, Zea mays
caccctgataagctaggagcttgctagtgacgggatctttggtatgatcccgcggccggttaaagaattctatgtccttcgtacacccctcaatatcttgaaaagtatgctggctagtaacataggagatgtgcgttatatcctgcctcttaattttcatttgtagcaatactgacttgcttccttcagtattctagaagtctggcagtactactttggcgctattctgaagccctcctcatctaagcatgtggcaaatctgctcaggtttccctcctaaagattcctataaacttttgcctttacatcctttttttttcttaagctc

SEQ ID NO: 36981 - DNA, 171 bp, Zea mays
actgcgcttctcagtacgcgttaacacgaagagaggattcccattacacatctctcactacacagaaggctgtataaacttccatctcacagaggaaaatacccctcaaagtctcatgggagccgccttatacaatgcttttatacagcacacaaaggaaaagaataagct

SEQ ID NO: 36982 - DNA, 106 bp, Zea mays
catatgacaccacatgcactgagctctacacatggacctatcgccgatgctactagcatcgcgagtagactgctagtatgtgatatatctccttactggattcttt

SEQ ID NO: 36983 - DNA, 91 bp, Zea mays
  unsure (1)..(91): unsure at all n locations
actaagctctaacatgacctatttgccgttgctacttcatcggcggagtagactgtcancattgggataaattctcctccttggtattctt

SEQ ID NO: 36984 - DNA, 169 bp, Zea mays
ccaaacagtagagaattcttaaaagagatgccaccacttttaacatacgtatttagtttttgtgttggagataactaagtacacaatttggaggattgactgttctcgggctgcagaatctgtgtttgattaattattgtttcttcgaccccttgtttgtaacttgatc

SEQ ID NO: 36985 - DNA, 260 bp, Zea mays
ctgactacctaagaaaataaaaagcataggttcgccctctttcccaaacggggatagcctaatactagacactctgaaacaacaactaatctgtctgacaccggtccaaccccaatgtctaactcctctacatattataattcacgcttcttagatacatacggagccaattaatattctataaactatactatattgtcatgagacactacactgactgatacggcccactgtaaaaactcttgcagagtttatatata

SEQ ID NO: 36986 - DNA, 283 bp, Zea mays
aatactgactgagactgcgaagcatgctagctctcgtgtagtacgatcaactactggatatcttgccagtcgttgtctgtaccactctattgtgtgcgaaccatggtctcacattgtagaggactaagctactatctggaatgtactctttgtgcacccatcgattgatgtcttactggtgtataagacaagatatgccaaatacaccaatcatgtccctataatgcagtggtacgggacctgatgtgtgactggggtgctcacgatactctgtgaatgattc

SEQ ID NO: 36987 - DNA, 184 bp, Zea mays
actgttgctgtcacgcgtaacgctactgcttctgcaagcctggacgcgttttgtcaatctttttctggagccagcaatatgcggaggaataaaggaaattgtggtcactaccaccgaacaaagggtaagggttaccctaggagtgcattttcacggctaggtattgccctttgcatggtcaagt

SEQ ID NO: 36988 - DNA, 109 bp, Zea mays
cactctatctgatgtacaatcagcatgatggactgcacctcattgcttctcaagacaaaggggacaataattacttgactgcttgtgagctacattaatcctgctgctg

SEQ ID NO: 36989 - DNA, 190 bp, Zea mays
  unsure (1)..(190): unsure at all n locations
tagcctccacctttcactgtcaggagctctggtgctgtgttcgcgctcgctctctgggaccattatctgggaatcctgccctatangacgganacgtgtcgtcggtgttcatcacacagggtctatacctgcatatggcgtgatctgtatctgaaaactgcctcctctcctgggatcggcacccgtgggc

SEQ ID NO: 36990 - DNA, 298 bp, Zea mays
atctctgcaaaacttatctgttttgtttttccatggtgttaactctttaaatattctctaatttggttcaaaaagtgctactataaataaaggctctctaactctcaaattatgattggtatgccttcttaaaaataagatattgctctgtaagatgttattgatatccttgctgatttcatgtaagtgaactcacccctgtatgaactctattaaggtgtgctcagttcttattaagctctgaggtctttttacgtaatctcaagctacctagggtttaaagttttgtaaattacat

SEQ ID NO: 36991 - DNA, 133 bp, Zea mays
taacaagtgggaatgctatcacaacagaacgtgatgaccacatctagaccctggagctgctgatatggacctcttcggacgccgtcgctacctcagcattctggggaagtaagtatggggtagtaatcgctga

SEQ ID NO: 36992 - DNA, 161 bp, Zea mays
ctaaatctgtgcatctcaagctttctagtactactctgtccacaccttgttgaacttttgaaaaagtaggatgtccttaatggtaacaactaccatgctgccggcgtaacgttactgggacacttttaacaaactgtcgtgatgtggcagttttcctcaaa

SEQ ID NO: 36993 - DNA, 158 bp, Zea mays
  unsure (1)..(158): unsure at all n locations
ttacaacatattggccttcttccaacctctgaggattatgaaaaccacaactactgaagatggaaatggttgcaactaataatttgattatatgtataatctcatcatccagcgtacaacttattgtactgacccanggctagagaaaacaataaatc

SEQ ID NO: 36994 - DNA, 253 bp, Zea mays
  unsure (1)..(253): unsure at all n locations
tgacaaacacaaattgtactctactaaacaacaagataacctgagtgatactcacagctaccgactagaaactccaggatctgctaagagcatgaggcttcatataaacctgttgnaatctactagggactaaatcattatgtaataacatactcactagttttactgtcatactggctcctccatttacaaaccactttatgatctcttatcatgcactctacccgagacggacatcattctactagttcat

SEQ ID NO: 36995 - DNA, 248 bp, Zea mays
ctatgaacgatgcttggcctgtgcaatttattaaatccctgctgaagatactttttgcaaagactttggaatgcggcagtcttcgaacctgtatgcaaacgtctggtctttggaaaaacttgccttggtgtgaattttctccaaatgacttagataccaaactgcactttatgctttatgctccaaccctaacaatttcccaacttttttacagcgctcttctgctcaatgattttttgaagtttctt

SEQ ID NO: 36996 - DNA, 285 bp, Zea mays
  unsure (1)..(285): unsure at all n locations
actagctgaacgaatagctccatactgctctactaaggtatctttgttgacccgaaccacctaagcttatctcacctactgtacaattcgactgttttgctaaaggtccatgggatgctaaccttggaccgaaacatggtgcaacaaacatttgtgtgataaactacaatcttctgtctaatacgaaccacaaccttgtctgttattactaagctagttactatcgcaacgnctttcttgataacgtaagctggtcacatgatgtgctgattgcgttctcgctct

SEQ ID NO: 36997 - DNA, 190 bp, Zea mays
acataacaattttctagcatgagaaatttctagctatcttacatctatagaaactggaactcatactaaagcattgctgtaataaagatacactctatagacgttttatatgacaaaacatgtctttatacactgcaaaggctcctttctgggaatgacctatgtgtagtctgctccttaacaacctcta

SEQ ID NO: 36998 - DNA, 119 bp, Zea mays
cccaccgactccgcttgctgcgaagcaattttttagctgctcgtaccccttgcactggtgctcctgaacccattgcaatttggtgagttcaaaaccaactgcatcatggaggacactct

SEQ ID NO: 36999 - DNA, 330 bp, Zea mays
ctatgagtacaccaacagcaaagtatacaatatgctatgttcccaacatggagtaaggtattggacagtatgagaatgaagtaaattcatctttcaacactgtgtggactaacttatgattaggtatggaataaataggtgtatcattgaggaggattttaaacaggatctttttatttcattctgccaacactgtcctttctattgattattagtaaatactatgcgcctactctattaattataacaatatgctatttcacactactatgcttgatgtctatgtatcacatagcgggggctaaaacatgtcataatatatatttgtta

SEQ ID NO: 37000 - DNA, 147 bp, Zea mays
tccgaagcatgattgtagacagcgcgtaatgctcctctgtcgactcacggagtgcttcccgctcatccgctatcttcaagctaactaggccgatgagaccttgaagaccttttagggcgctagccccccaatgagccctagtgctat

SEQ ID NO: 37001 - DNA, 153 bp, Zea mays
aaagttttctttcggacacggcttcccagacattaacgcgcgtgctccctgttttcgcatgtctacatggagaatgcgaaagaaatccctctggtctttcgaatcaccaactaggttgacgctcaattgtagtcaaaaacaccgcggtaaccc

SEQ ID NO: 37002 - DNA, 233 bp, Zea mays
tgctcactatattcttggctaaaacatgcatttactgggcaaacacagagatttgactattaaactattgattggatcatatgaatcacacagtggatatattcagtatcattgaccgaaataagcatggagtgtctactccgagacaataaagtatatgggtacctctaactaaactgtgatgtgaacaagacacttatgatatatctatgctgttatctcacaactaatgt

SEQ ID NO: 37003 - DNA, 240 bp, Zea mays
tactacaatgaccagctattcatgcaactcacctggaatttattaacctacaaatactgtgttcagaactcctattagcactggtaactatcaaaatggttcgagaagaaggacatctttgtgtgttaaccacgatcactatcaataataacttctaatgaccaccaaaaggtacgtcagaacgtttatatttcataaaaaatcctttatgtataccagttatggaactacaaacttaac

SEQ ID NO: 37004 - DNA, 209 bp, Zea mays
gcgctactcctactgctctaacgctgagtctgaacacactcactaggtcctcgagtgagggccaacacggagcatctcgaggtaccctccggatacctgaggcacccttcgcgagaaacacccagactgagttcgctaatagtagactgcctctaaacttgagctaatgcacacggcacacacggattccactcgcatgtcggtgcgct

SEQ ID NO: 37005 - DNA, 152 bp, Zea mays
ctttcttaggcctgtgacctatgctttgtgctcatttgcaggaccaacttgagcttattttccttcgtctcattttatcctgcctcgcaccttatatggcagggtgctttacttcgggcgaagctacacaatcagctgggcgtcaatactgc

SEQ ID NO: 37006 - DNA, 193 bp, Zea mays
taggtatcattacattatatgctgccacctgccgaagggtactgaattccctccagccctcacgcgaacattcgtcgccagctgctcctaaacaccctatgatcccgaccacgacgatctagacattaccacagtgctacacttatctgaccctccccgcaaacaatgacgcgcattccgtcctgccgctaaa

SEQ ID NO: 37007 - DNA, 245 bp, Zea mays
  unsure (1)..(245): unsure at all n locations
gctctcacattctgagccctangcttcgagagacacatgtgcattgtgagtataactagtctcgactcatcgtctctcatcatatctgtgaatcgggtgcaccacaactatagctctgaaactgtgatctacagagagttatcttggtatgaaaccctcttcgacagcctttagactggaatcataccattctcatctgcatggcttcctacatacagattggctaccctctggaatttacctct

SEQ ID NO: 37008 - DNA, 99 bp, Zea mays
tgcctaactcctcgatcagaacgagcgactacaatagtcacacagtcatcttctgtttacacctctgtgaaacccagttactgggctggcttctccacc

SEQ ID NO: 37009 - DNA, 59 bp, Zea mays
aacattgaccatctccacagacatatacaccacagccgctgactactcacatgatctat

SEQ ID NO: 37010 - DNA, 97 bp, Zea mays
  unsure (1)..(97): unsure at all n locations
agttagctctatcaagatctactaagtatagctgaccctctaaccactccttanatgctattgaatcatcacttcttctagagacagtgacacctac

SEQ ID NO: 37011 - DNA, 251 bp, Zea mays
aatgagttactgctaggcttttttgttctagacattggcacctctcctaaagattgacttctctttcactcagggacagacttctctacttggggacggctgtttgcagaccagacaagggaacacatgtctaaacttccttgaagaaggctaaaaaaaatatgtactattcacattgtcaattgaaatctcttttacatacggcgcaacacaaggctcctaggctccctttgtgtttcacacagcgtaat

SEQ ID NO: 37012 - DNA, 122 bp, Zea mays
ataacggggccggcaaaccaaattttgattgatctaacataaacggattaatttgattacgttaacattgtgttaggcacacacgaacagagccgcacctcacatcaaagtgtttgaagtat

SEQ ID NO: 37013 - DNA, 368 bp, Zea mays
  unsure (1)..(368): unsure at all n locations
ccatgtagtctacaatatactatgtgagtcactctatcaaatcacangttagctgaccttacctcctaatgcttgatatactctttaagaaggcactactcatnaaacagtgaccattacatatgcactgacagttttaaatccaaaactggagggggaaattaattccgcttgcactgttctccatgaaccgtggactgtttcgagagaacacatttctgaatggtgccccttggactctacccgtgcactcaacagagctgttgccacgttgctgcttacaattgtcccagttaccggtcccatgctttcgtttgaacaagcagcttaagaacttgccaggttcagatccgggcgccaaaccttta

SEQ ID NO: 37014 - DNA, 329 bp, Zea mays
attaaaaagtgacgttttttatttgccaacccgacatgaagagccgacctcctgttttgtcaactctacagggggatagcagatggtgaatctctactgtattttgagaaattaaccaaacataaggattaatggcgacatcgtaagtaaaataacactaacggtaacctcacagatctggaaggttactatttcccccctacaaggaggaaaaaacttgctgagctgctataaccacgtggtagaaacccttctaagctctcaataaaattacccccaccgtttaattgcacctttaaaaatattcggaagtatgttacagttgtcat

SEQ ID NO: 37015 - DNA, 201 bp, Zea mays
aacctggcggcaagagattgtctataacaagcagaccgcacaagtaaagagtctcatgcacataaacataccacaagacggatttctgccacagagcgtgcctgactctgataatcacattacttggattatgatagtacctgatggggttgctttacctcaccagaaggctaattgacggccgtttttttataccggata

SEQ ID NO: 37016 - DNA, 285 bp, Zea mays
tgctgctaggacccgatacgattgacccatgcaattcttcttaatactccacacaaagagtgcactgtactacgctggctaacatatcagcatggtaccttcgcttttgtgagctacccaaataactgtaccaacatctagctccactgcaccttaagactatagaacctttcctcgttacaacactaaaactgcacccactcagatacagaacctttcgcgcgaatcggagcgccatgagccttttaaatgttcccgcgtcactcaaactaattgaatatccat

SEQ ID NO: 37017 - DNA, 155 bp, Zea mays
caccactatcttgcccgccttttggcaaactggccccggagacaagtgatttgagcttattcacaacaaggtacgctctcgtgtctgcgctcgttgggcactttgcagagcaactgacaggttcctccacttctcagacgtacatatggtaaccc

SEQ ID NO: 37018 - DNA, 135 bp, Zea mays
cccaaaacccctgcgaaatttagggctcggaaactcttttaacaccgactctcatagactcgttatctcttttacaccgaggcaaagatactgggagataggccggcggaattttttaagcgaggtttgactaaa

SEQ ID NO: 37019 - DNA, 165 bp, Zea mays
acattcatgtctgtgaatgttgggttatcaagggaattggctaactacatactcactgagaactattagggaaattcgggaatatttgtctagataaggtctgatcatactaggaatggagtgtgaacataatctctgtgatgtggaagatagtctaatacatga

SEQ ID NO: 37020 - DNA, 369 bp, Zea mays
cgtactatctattacataatctatttttcttaatgacaaatatggtgttatctactatatatttacaactatgtgaggatagataactttggataacgaagctcaccatgttcaagatgacatatctagccatgtttatggtatcttggcttgaccctagaaataacctggatgactaaattactgttgacgatatttgaatcagctattttttgacacactcttaatatgtgattggcattagtatattaatgctacaacaaaatacctgttagattagcagaaataattatcctcatggatttttaaatgaaagttttagtattctcaaaaggtcatgagctactaaacacacttagtccttatgta

SEQ ID NO: 37021 - DNA, 263 bp, Zea mays
acacgcgtcactgtagcaaccgtcaattcttgggctattgttccattcgtaaccagggttcgccttcaagacacgtgcttgataggcataggctaaagaaaaactcacctatcattggattaaagggtcgcacggctttcaagtcctcaaatgggatatgtctaagtcggtaagaccatgttccatgtcctttcccctactagctgaagaggttgaaacatgttttccctggcaaaatacgctgacaagatgttttgatgcac

SEQ ID NO: 37022 - DNA, 262 bp, Zea mays
tttttttaaacatcttcaggccttatggatacattttcccactctaaaggcccctgttagacactggtttctcccaaacctcaactggtaaaagcatcagcttctcgagctcaaaaaaattgcaacatctctgtgcaagacggaatccaatcaaaccctttgtcctacacgctttcttggggaaaacggagtacttctctaagtcggataggtacacaaggggtttggtacacaacggtaatccctttatgcaattttcccc

SEQ ID NO: 37023 - DNA, 414 bp, Zea mays
agcttaatgcccctaagaaatcgtctaactctgtttacgtctatgttcctgtcagggaccataattaggggtacccccaagactcctaatctcagctggtaacccccatcagcacaaagctgcaaaggcctgatgggcgcgattccggtcaaggctctgtccacacgagggacacgatctcgtctcgcccgagcccagcctctggtaggaaaagtagaccaaggcagattcatgcctcgcccgggggtctcctcaagcaacggacgcaccttctactcgcccgaagcccagctcgaacaggcttcacggagaagcaaccttggccggatcgctatgccaaccgaccgtatcgtaggagcattcaatgcaaggatcgcctgacaccttatcctgacgcgcgctcttcagtcgaca

SEQ ID NO: 37024 - DNA, 419 bp, Zea mays
  unsure (1)..(419): unsure at all n locations
agtgaatgcagctgcagcttgcttccttagactatatcgagttacttgtttntggagcgcgccaatgggaaaatcttcacagctgtcaagaagatgctccttgatgaaaaaaaggcagatggaccgacttgttaccggaggcagtctgggcgctaaacacaaccgagtgcagggcgaccgggttcactcctttccgccttctatacggatcggaggcaatgaccccacaagaaataaagcatgggtctccgcgcacatgctcgtcagccgcccctgacgtggatgagccaacctccaaagatctcattgacggagaccgggtcttcgccctgcaggccttaaacaaataccaagcccagaccacagccttgcgcgaccgcgcagtcattctaaaggagttcagcgcgggggacctcgta

SEQ ID NO: 37025 - DNA, 413 bp, Zea mays
  unsure (1)..(413): unsure at all n locations
cctgangcatgcaagcttgaagccatggcaagtagcataggcaagttaaatgcgaatngattctagcctaactacgggtgcataggtttcaccgaaatccaaaccttcgacttgtgaataccccttggccacaagtcgggctttgttccttgtcaccacaccatgctcgtcttgcttgttgcggaagacccacttggttcctacaacattttgattaggacgtggaactaaatgtcatacctcattcctagtgaagttgttgagctcctcttgcatcgccaccacccaatcagaatcttgaagtgcttcctctaccttatgtggctcaatagaggaaacaaaagagtaatgttcacaaaaatgagcaacacgggatcgagtagttacccccttttgaatgtcgccgaggatgg

SEQ ID NO: 37026 - DNA, 399 bp, Zea mays
agcttgtgaagggtcttcatccccacatgagctattcgtttatgccacagccagcccatgcaagtcgtagccattaagcatgcatctagaccggcctcttcttttgcaaaatcaactaaataaagtttgccgactaatacacccttaaaagctagtgaaccatcacttcttctaaagacagacacatctatatttgtgaacagaacagaatatcccatattgcacaattgactaacagatagtaaattatatcctagtgactctactaaaaacacattagagatagagtgctcattaaaaattgcaattgtacctaacccttttaccttgccttgattcccatcaccgaatatgatagaatcttgggaatccttattcttgacggaagaggtgaacatc

SEQ ID NO: 37027 - DNA, 408 bp, Zea mays
  unsure (1)..(408): unsure at all n locations
agcttctaaagggagagcatagttgaggagtaactaatgttctttctgagaaagacagagntngcagcgcatgccaagcagggaagcaagttggtgctcatcatccacacaagaacatcatgagactgacaggccactacagctcctacacatggatttattcggcccgatagcttacataagcatccgcgggagtaagtactgtctaattattgtggatgattattctcgcttcacttgggtgctctttttgcaggaaaaatctcatacccaagatactttaaagggattcttgagacgggctcaaaatgagttccgcttaaggatcaagaaaataagaagcgacaatggaactgagttcaagaactcacaaattgaaggctttcttgaggaggagggcatcaagca

SEQ ID NO: 37028 - DNA, 409 bp, Zea mays
  unsure (1)..(409): unsure at all n locations
agctttgggcacacacttgaagttcantttatcttatcacccacagacagatggtcaaacagagagaaccaatcagattctggaagatatgttgagggcttgtgctttgcaagacaagatcggttgggacaagagattaccctatgcagaattctcttacaacaacaactaccaagccagtctgaagatgtcaccattcgaagcgctctatgggaggaattgcagaaccccattgcattgggaccaacctggtgaaagataggtgttcggtctagatattttgcttgaagccgaagagaacatcagaatggtctgagagaatttaaaggcaacacagtccagacaatgaagctatgctgacaccacaagaagggaactcatttntgaagtgggagactatgtctacttg

SEQ ID NO: 37029 - DNA, 409 bp, Zea mays
  unsure (1)..(409): unsure at all n locations
agcttaaaggagagaagaanaagaatgaactcgttctattgccctatcattttaagttcaagaaacacttcaaagaaccctaccaagaatggttggatacaattgaagttatctgcaatgaaatcttgggcaattatacgaaaaaagaagatcaactaatgacagcagccttcggcacccggccgaaacgaaggttaaaccgagtaatggacgctttgaaatttgaatacccagactatgaaaggttaagcaaagatgccaaagggccaaaacgaaaaagggttgtcagtgttatgcaaagacaagctgccaggatgataaaagaagagaatttggcaaaaacgaaaaaatccagtcctgagccgaggtggccgtgtcgaagaaaagaaaggctacaactccgaagcca

SEQ ID NO: 37030 - DNA, 390 bp, Zea mays
  unsure (1)..(390): unsure at all n locations
agcttgagggtggctcgccgaagcaacatattctgtttgtggttgcctacatattctgggatgtaaggcgaatgttactaagcagtgtgcatgacctgcttcggctgagcctgttgtgctgccgcttcngctatttccttttgcttctggatggtaacatggcacatcctggtggtatgacctttgttctcaccacaaaataagcaaaagattcttctcggttgatcgccaaatcttccgccgaagcccctggcgcctctgcctctccgagctggtggtcggaaggagccttgctgttgccccgaagtctgtgaggagcactgcggcctctgctgttggctccccctatcatcattttgcgtagagctatgaattgatctaacgtgcctc

SEQ ID NO: 37031 - DNA, 396 bp, Zea mays
  unsure (1)..(396): unsure at all n locations
agctntctttggcggcatgacgaaggtctatgttttttgaatgtgttcgaaactcaaaaagtggaagtgagttcaccggacgtgggcgccaatgttggggacttgttctcaaatgctaagagttaagaacaaggcaacacaaaaagtgttaaatgttaaagtccttcttccttcgaagcattatctcccttcggatataatgaatttctaacgaaggttatgaaggaaaaaccttcataagcataataaatgatgaagaaggattcatatgcaagatatgaaaaataatataaacactttaaacgttattatcaacttatttttatttgcgttactatatcaacaataacaaattataaatgtatctttggctcgaaggaaagcaagggtacaagc

SEQ ID NO: 37032 - DNA, 402 bp, Zea mays
  unsure (1)..(402): unsure at all n locations
agcttgtgcaactgcattggaaagtcgtgaagtcattgcggttgaagccctgaagcaagccaaggatgagcacgtccagaagctgatggaggcctacttggtaacccacaaccaacgtanagccctgcggatccaagagcccgcttcatccaacccacttcaacccatgagagctgaagatccccagattcttgaaggtcgcccagtctctatcagaggagagatgaagacttgggaactcccggaaggagccattgtcttggaaggaattccagtcttccctcaggctatgaataagcaagagcaccctgaatcctcccaagatccccgcccaaagttgtttgagcccctcaccatgaagaagattccagcaccatcccttgaagtcaaggaagaagctgc

SEQ ID NO: 37033 - DNA, 404 bp, Zea mays
agctttggcttcttccatttcagatcattgtcctttattgctgggcttgagggactccttcatgggtaaacgtcgctttcattttgaaagtttttggccaaaacttgatggatttatggaggttgtgcagcagtcctgggagcagccgattatggctgtttgccctttacagaggctcgctgacaagctgcggaggcttgccaaaaatctgcaatcttggagtcataggaagacaggcaatatcaagcgacaacttcttcttgcgagggagattattcatcaactggaatctgcccaggattcaagattgctgtcctcactggaaatttggcttcggagacagcttaagcatcatattttgggcttgtcttcttttgagaggaccagggcaaggatgcgttctg

SEQ ID NO: 37034 - DNA, 350 bp, Zea mays
  unsure (1)..(350): unsure at all n locations
agctntgctttgctgcgcttcactgttggtagttaacgcctttgccccagcagcctcaggccggaggcggtcctccgatcctcctccatgttggtcctgcttattaccagtaccagctgcacccaggttgatgagtacgtagctacctaatgttaggttgtcttcaacagctttcatatcttatctcccgctctacctcatgtttcagatttcactccgtaaatattactgtctacaacgggaaacagagtgttttccacggctcagggacgtccctacgcaagtgtggcacgtgcgatcgcacagggtcctataggaacacccccccacacacacacaccaaatatatt

SEQ ID NO: 37035 - DNA, 418 bp, Zea mays
actgaggcatgcaagcttctaagggaaacacatttgggactattatgttcattttgagaaagacaggatttgtagcgcatgtcacgcagggaagcaagttggtgctcatcatccacataagaacatcatgacgactgacaggccactcgagctcctacacatggacctattcgacctgatagcttacataagcatcgacgggagtaagtactgtctagttattgtggatgattattctcgcttcacttgggtgttctttttgcaggaaaaatctcatacccaagagaccttaaagggaatcttgagacgggctcaaaacgagttcagcttaaggatcaagaaaattagaagcgacaacgggacggagttcaagaactcacaaatcaaaggctttcttgaggaggagggcatcaagcat

SEQ ID NO: 37036 - DNA, 400 bp, Zea mays
agcttgtgaagattcttcataccaacatgggctattctgctatgccagagccaaccccatgttagtcttagcaattaagcaagtgtctagttcagcttggttatcattaaaatcaactaaatatagctgaccctctaacacccccttaaatgctattgaatcatcacttcttctaaagacagtaacacctatattagtgaatagacagttgtagcccattttacataattaagaaacagaaagcaaattgtaatctaaggaatctacaagaaaaatattggaaatagaatggtcaggtgatatagcaattttacccaaacctttgaccaaaccttgatttccatccccgaatgtgatagctctttggggatcatcatttttctcataggaggagaacatt

SEQ ID NO: 37037 - DNA, 395 bp, Zea mays
agcttctaaagagaccgaacccgggccactgtttctgttgcatgcatatgcacgcaccggaacggagcatctctggtttagggaattctcaatacacacacatgctgacatgcaggcaaatatgcatgcatactgctgctatctgaatagctaaatagctgggaaaaatctagctcaccctcgactactagtcaaacacaaccatgtggttgaactgatgtgtttcatgcaccctcacagtatatgtactggtctaacctcagcgacgaagtggtctacacatactggacggtgtctatacctctgatctcacctctaggggtgagaatgtatgcgtacgactcactctgaggcatgcgacgatagaatttaatgaattagaatgcatggaaaca

SEQ ID NO: 37038 - DNA, 412 bp, Zea mays
  unsure (1)..(412): unsure at all n locations
agctttntcttgaagatccatttgcaacctataggttgacaaccataaggacggtcaacgacctcccaagttccattagacataatagattccatctcactccttactgcttccttccataagtcagcatcaggagaggaatatgcctcactaatggtagttggtgtgtcttccacaaggtacactataaagtcattaccaaaggattttgcaaccctctgtctcttgctctttcgagtgactaaaatgtcatcctcctcagggatgtgcacgtgagaatcctcagcatgatctataggaatcgacagttcgtgttcatggggaattatagtctcatgacttgtatcactaggtgtattcttcatgggaaactcattctcaaaaaatgttgcgtctcttgattccatgatag

SEQ ID NO: 37039 - DNA, 409 bp, Zea mays
agcttcggcataaagacaaatctcaagattattgtgtctaaccgacttaaagatgaattgacttaaagacccatgatgttttgtgtcattattgtagtcgattgtaaaggacataaatgtaattttacgcaggttgcatcctgtgcctataaataggtgaacagtatcccggcactgttcacgcgatcctgtaatcatggacacgttacgcttggattattgttttctgccaaggcgaaggtataaatgtgcctaaatattatgttttaatacttgtatattcatataataaaacatgtgaatatattttgtgctttatatttcatttctcattgttgtcttaaaaatatgatcacgaaggtgaaaccttcatgatactttacttatgaccttcgtccgaagctcatta

SEQ ID NO: 37040 - DNA, 407 bp, Zea mays
agcttaactcggatcaaacttgacaagtcttatttttaagcttttagtgcttgaattcttactttttatgcaattgttggttcttgaaatatgcatgaggtactgcacttagggggagtattcaaaactcaaatcactcatgaaaacctctagtgcaaggccaaaatgcaaatttcaccatttgcctattttctctaaaaattatctagcctatgacaaaatattttgaaaattatgagaaaatatatgagggtgccaatacctgtcccaacaagtgttattttgtgtgattataagttgggatttggtttggttgaaaattagatagataaattaaaaaatttcaaaacttccctctgtctgggctcaccggacagtccggtgtgcaccggacactgcactgtgca

SEQ ID NO: 37041 - DNA, 396 bp, Zea mays
  unsure (1)..(396): unsure at all n locations
agctntagctgattcagagtcccttgttggattattcccaggtttagcttttccatctcttgacacaatgtgttgtcagaggtcttcaccataacacagtgacaggaagtcttacggctcagtgcatctgccaccacattggccttgcctgggtgataatggatctccagttcatagtctttaataagctcaagccatcgtctttgtctcatatttaattctgactgtgtgaagatgtacttcaaacttttatgatctgtatatatgtgacagatatttcccagcagatagtgacgccaaatcttcagggcatgaaccacagcagctagctccagatcatgagttggataatgctcctcatgtcggcgcaactgccttgaagcatacgcaattact

SEQ ID NO: 37042 - DNA, 91 bp, Zea mays
agcttaatacacacgaatggtcactaagtgtctctttgttctctctttgtcaggggtgcccactgtgtgagagaaggttatcactcactag

SEQ ID NO: 37043 - DNA, 406 bp, Zea mays
agcttgtgaagggtcttcatcctcacatgtgcttatctgcgatgccacagccagcccatgccagtcttagcaattaagcatgcatctagaccgacctcctcttttgcaaaatcaactaaataaagtttgtcgtctaatacacccttaaatgctagtgaaccatcacttcttctaaagacagacacatctacatttgtaaaaagacaattatatcccatattgcatagttggctaacagatagcaaattgtagccaagagactcaactaaaaacacattagagatagagtgctcattagaaattgcaattttacctaacccttttaccttgccttgattcccatcaccgaatataattgaatcttgggaatctttattcttgacataggaggtgaacatcttcttct

SEQ ID NO: 37044 - DNA, 405 bp, Zea mays
agcttgccttcgcttcagtctatcatccacagtctaacggggtcgcggggcgcgtcaatgggaaaatattcacagctgtcaaaaagatgctcctctatgaaagaaaaggcagatggaccgatttattaccagaggcagtctgggcgctaaacacaaccgagtgcagagcgaccgggttcactcctttccgccttctatacggatcggaggcaatgaccccgcaagaaataaagcatggatccccgcgtacagttccgtcagccgtccccgacgtggatgagccaacttcaaaagatctcattgacggagaccgggtcttcgccctacaggccctaagcaaatatcaggcccagaccaaagcatggcgcgaccgcgcagtcatcccgagggagttcagcgaggggg

SEQ ID NO: 37045 - DNA, 389 bp, Zea mays
  unsure (1)..(389): unsure at all n locations
agcttcacaacccctctgattgaactagaccatcctgggttaccgngaacgcccgtgttcatccgttgcccatacggtcactgtggtcaaggcattttagtgtgtcattagtgaaattaatttaggggaaacttcggttgaggtgtgaattatgtgccagtcaacggagagcgccggtcattgcgtaaatcggccagtactggcacgccggtgatcggtgtgtcgccgtccaccgtcgtggactggactctgtgaagacataggagttcgagggtttatttgaaagtgtcagtgactatctaaaatagtgtcttggactctttcgggttatgcgaaatgatagggactttcttgcaaagtttacacgcgggcctgggcgcgcacgtttt

SEQ ID NO: 37046 - DNA, 410 bp, Zea mays
  unsure (1)..(410): unsure at all n locations
agctntttcagaagaaagaagaagctctggctacaaagaagactaaagggctcaagaaacgaagaattggtagcgtaatgcaaaccattgaaaagaagccaccatcggcctcgacatctaagatagcacctacaagtgccgaggctgctgccgaagcaaacatatcggccgaagctacagctgccgccgaagttgccaacttggagagcacactatctggaattgataaattgctattggatatgcctacagaagaaacagttgtggctgcagaacaggtcatggccccagtgcctgacaaaggaaagaaaattgctgatgctgcttcacaagaaaaagattttgagcttcagaacctgatcggacaagagctacgacatttcctgtggctaccagccaggagcgatgct

SEQ ID NO: 37047 - DNA, 402 bp, Zea mays
gctgagtaatattctgcaaaagataattgtgctttttagataatctgggtatgaagcacatacgagagaagataagggctggaacagccaaatgtttcaaggaagacgatcaaggtgtgatatggtttaaaaaccgcatagtagtgccaaagaacgaagaactccgccagcaaattcttgatgaagcacatcttagtcgttattcaattcatcccggaagcactaagatgtatcaagacttaaagcaacattattggtggacaaagatgaaaatcaaaattgcacgctatgtggctaagtgtgacacttgcagacgtgtcaaggccatacacatgaaaattgctggtccattacaatctttgccaatcccaacatggaaatgggaagacatcagtatggact

SEQ ID NO: 37048 - DNA, 398 bp, Zea mays
agcttcgaaactggtgctggtgtgccaacttattctttttttctcgagctgaggaattggtggtcctgacattgctgttttctttcttaaggagttatagataacccagtcgtggaagttaatgagttaagccaaggtaggtaagtcaagattggagtgatgggaaagactatctgtttcctgtagatgagctaggcaaagaacgttctcaaggaatatctctatcgtattcatagctcgtctcgtattgatggataaagatgcaaaacctttgctgaggaataagagtgctcttgggatcccgctgctttcaaatctctatactttactttactacaactagatttcacaaagccgtataggcatccgttgttgggaattccattatagggcttggt

SEQ ID NO: 37049 - DNA, 401 bp, Zea mays
agcttaattgataatctaatgcgtatgttgttcttttgatcacatctgttatttgtttgatcattgaatgacttcaatcaacaatcatgcttcttagtgccgtatatactaccaatcgatatctctcttgatatgcactaagttaaaaggagaattcatgatacatttatgcaacttgtgatccatttgatatatgctaacaataacttgaaaagattactagttgtagaactctctcttgtgcaaaatatttccatatattgtcattaagaataggtcttaagcatctaagactaaggacaaagcacaatgaagagagcgtccctatgtaaaggtacaaaaaggtaaaactatctcctttcatttaaacttgtacctaaatcttccttttctatactctc

SEQ ID NO: 37050 - DNA, 411 bp, Zea mays
agcttgcagatatgtggatgtgctctaacttcggaccttatttaaattatcaaaattatgggcgacttcaaactaaaaaaaatatttcaggggatgtttggttccacccaaataaaatttagtcactaccatattaaatatttgaatgataattgaatgataattacgggtattaaaagtagcctaattataaaactaatttgacaaatcttttatatattttatactatattaaaacactagtttcaacgatcatcttgtgcatctttttttaaatgtcattatactttcttttaatttaatccatcctacctaccctgatgctaaacctaatgagtcgctgacagtagcccaaaattgggttggtttctcctacacttccatgttcgatgcgagcggcgagccaacttc

SEQ ID NO: 37051 - DNA, 405 bp, Zea mays
  unsure (1)..(405): unsure at all n locations
agctntggaaaatgcaaaattgaagaatgaagatgttataagacttgaaaaagaaaacttgcaccattcaaagtggattagtgaactcgaagcccaagcaagggaggctgctgaaacacatgaggccgaaatggccaaaataaaacaagaaatagagaaactacgcgaggatttggaagtagaaaaggccaaaagagaaatccttagtgataaaaagataggctatagaaaactacagacgttttacaaagctcattagaaaactgtttttccaccacaactcgatgctataaaaaacttaaagatattctctctacaattagtgcacgctccaacgaggttaacttcgtgcacagggatgtagttagggcggtcaagtggatagaagaaaatatcgatgcattt

SEQ ID NO: 37052 - DNA, 400 bp, Zea mays
agcttgaggctgtgtatagattaccgccatctttatgtggtaactatcaagaacaagtatcctttgcctcgtattgatgttctctttgaccagttggtcggggccaaggtgttttccaagatagaccttcgctctggctaccatcagatcaagatacgagcaagtgatattccgaagacggcattctcaaccagatatgggctatatgaattcttggtgatgtcattcgggctgacaaatgcaccagcatatttcatgtatctgatgaattttgtttttatgccggaattggacaagttcgtggtggttttcatcgatgatattctggtgtactcaaagaacgaagaagaacatgccgggcatttgcatgtagtgctgcaacgtctgcgagagcaccacc

SEQ ID NO: 37053 - DNA, 397 bp, Zea mays
  unsure (1)..(397): unsure at all n locations
agcttccttcgaaggattntctgtcaaaaatattcctcgaggacaaaatgagcttgctgatttgctagctaagtcagcagcacaggggctgcccttacctttggatgtgttcttcgaaacaataaaagcaccttcagtggaactccttgaaagagcagtccttaatatatctcctgtttatagcgaaaactggagaactgagatcatctcttaccttcagggtaaattcctttcagatgacgaaacttataacaggaggatagaggcaagagctcgtccatatgtcatgatagaaggggagttgtacaagcatggagtttgtgctccactactcaagtgtttatctagaaccgaaggcatagaattgatgaaagaaatacatgcaggcctgtgtgga

SEQ ID NO: 37054 - DNA, 399 bp, Zea mays
agcttcatgaaagctggacttcagttccctctatacaaaatattggtcgaagttctgaaaacttttgaaatttatcttcaccaacttacccccgaagctgttgtcaaagtaggggttttcatatgggccatgagaagccaaggattagagtgagatgccaggtgtttttgaaatatgcacgagaaggcaaccgggaaagagcaatatcataacaattttggctgctacagcttcgtacatcgcgccgaggccaactatcctgtgccaacatttcagaaaaagtggctaggctcctggatgcaagaatggttttatgtgaaggttgatctgagtgagagagaagataaaaaagagatcattcagtggcctatatggtcacgcttcagcatcaggaggctg

SEQ ID NO: 37055 - DNA, 405 bp, Zea mays
agcttatgtagacaatgtggtaatcaaaacatattattcataaaatttcattgaagatttactgctggttttcaacagtctacggcgatatcgatggaagcttaatcccgaaaaatgtgttttcggagtaccagcaggaaagttactcgggtttattgtcagccaccgggggattgaagctaatccagaaaagatcgaggctatcatgagaatggaagcaacacgatcatagaagaaagttcaaagacttaccggatgtatggcagctctgagcagatttatatccaggctggggaaaaaggcttaccattttataagttactcaagaaggtggacaaatttcagtggacttcagaagcacaggaagccctagatgcattgaaaaaattcttgacgacaccacca

SEQ ID NO: 37056 - DNA, 396 bp, Zea mays
  unsure (1)..(396): unsure at all n locations
agcttggcggaaggatagctgtcggagctgtctagtccttgctgacgtcctcttgcttctgtaagggggctgagagccgctgtcgtcataaagcgtgcggggcgccatcattacttgtctggcggagcgagccagatgggacgccggtcttgttccccgtagcctgagtcagcttggggtagggaaatgtggtgcctcccgttgacgtggtcggtccgcgccctangttgggcgatgtggaggcccctccgaggtcgaggtcgagtctgtcttccgtggccgaggtcgagtccgagcccctgggtcgggcgaggcggagaccgtcggctgaggccagggctgagttcgagccctggggtcgggcgaagcagagttcatcgtcttccggggctgagc

SEQ ID NO: 37057 - DNA, 393 bp, Zea mays
agcttcacgggccactggcgaagctaaccgaatcgctggcgcgacttgggggtgactggagtgggctggccacggtggccgaagctctatcggcaatggctggccggtgatggtgagcgcggggtgaagtgaggcgcgcccggggaggctttatatgagtgggcgaggatggccgagggtggggcactgacaagcgctcggggcgtgcgcggcgaatgccactgcgcgctctggcgcctggcacagcgtcgagcacgaggcagcgcagagagaggtcaagttcaagcgcggattgggcccaaatctttgagattatggccatgatcccgttgagagatctcttcctctgaggtccctttgtcgtttgtgtgtgggggctagcaagtttcgctg

SEQ ID NO: 37058 - DNA, 396 bp, Zea mays
agcttcagctccatctatattatggattgccttggaatcagtccagcttccttcggcccttctggcagcttcctgactcccatgaatagcaataggcccttgatccgaaggtatcttcatgcagagataagctgggtgaagaattgcttcaaaagcatttagagtaccacgaccaatgatggcgttgtaggggtattccatgtcaacaatatcagacacaatttgctcagtccttgtgttattaacaaatccgaacgttaccggcatggtaatcttcccgagtgccacaatctgccgccctccgaagccacaaagagggtgcgtagcatcatgaatcttgtcttcaggctcttgcatctgtctgaaggctctggcaaatataatgtcagctgcact

SEQ ID NO: 37059 - DNA, 403 bp, Zea mays
  unsure (1)..(403): unsure at all n locations
agctntcttcggcgccatggcgaaggtctatagcttcttattgtgttcacgaagactcgaagtggaagtgagttcaccggaggtgggcgccaatgttggggacttgttctcaaattctaagagttaagaacaaggcaacataaaaagtgttaagtgttagggtccttcgtccttcgaagcattatatcccttcgggaaataatgagtctcggacgaaggttaagagagacataccttcgtaaacataacaagtaatgacgaaggactcacgtaaagcacgaaatataatataagcatcatcatagaatcatttctattttattaaaatggaaaaacagaaatgttttcaaattacaaatgtaccttcggtcttgagagaaaggtgaaaagtacgagcgtgacc

SEQ ID NO: 37060 - DNA, 393 bp, Zea mays
agcttgcacacatagctcatttgaatacctttgatcatatctcttttatatgctatgactaatgtgttttcaagtctatttcaaaccaagtcataggtatattgaaagggaattggagtcttcggcgaagaaaaaggcttccactccgtaactcatacttcgccatcactccgagcaactctcttttctttgggggagaaatgagcatcaaggaaaaggacttcatccttgggggagagagtaaaaagctcaaacgcaaaaggaccggatttcgtctttggtataatcttaactcattcatttatgaccaaagaggaggaacttacttcacgggctctaatgattccgtttttggcgattcatgccaaaaagggggagaaatgatcccacagc

SEQ ID NO: 37061 - DNA, 412 bp, Zea mays
  unsure (1)..(412): unsure at all n locations
agctntagggtaaaagtcataaaatgaccccaataataaacttgaatcacttttatacccctgggataccaggaaccctaattggaaccctggaaaaccctaaaaccaaaccctaggggcttatgtgcaaaagtgatgaacctttggactaaaatgtaaaaactactatgtttaagcatctaaagccaattggttcacaaatatgtgaatttacaagccaaaccctgagatttggacttaagtgcaaaagggccacacttgactcatgtgatgaagtctgaaattcagtgttaaaggctccactttggggctttgtaactttcaaagcatagggtttttgccctaggtcaccacatcaagattgtagcccaactataggagtataactttgcttaagagtgtcagtagagtt

SEQ ID NO: 37062 - DNA, 400 bp, Zea mays
agcttagtccttggtgcgccgacccataggcttgttgggatctcgctatgttggaccctttcgtatcaaggaacgagtcggtgaggtcgcctaccgcttagaactcccaacaggagcacacatccatgatgtctttgacgttgaccttctcaaaccataatgaggttctccactaatgctacctcctactcttccgacaatggagaatggtcgaccgctgccctcataagagaaggtgctcaaagcaagattgcaacaatgtgtctggcatgttcagatctattagaaaccctaaccctaacaggggttgggtgatctattaatagactggagtaactggccgttcccattacagagggtgagactatgattacaaggggaaaaccccaaaccctaatcg

SEQ ID NO: 37063 - DNA, 396 bp, Zea mays
  unsure (1)..(396): unsure at all n locations
agctntatatgggaggaagtgcaggactcctttgtattgggaccagactggggagagagttctttgggcctgaattgattcaagaagcagaagaacaagtccgtataattcgagataatttgagggtagctcaaaccagacaaaagagctacgcagataatagaagaagaccactggaatttgaggaaggagattatgtgtatctcaaggtgtcaccacttcgtggaatgaagagatttaaagtcaagggcaaattgtcccctcactttattggaccatccagagtttttaggcaagttggagagatggcctatcaacttgagctacctgataatatatctgatgtgtataatgtaatttacatgtctcaacttaagaagtgtctccgtgtcccta

SEQ ID NO: 37064 - DNA, 396 bp, Zea mays
agcttgcacacatagctcttttgaaaccttttatttatctcttttatatgctatgactaatgtgttttcaagtttatttcaaaccaagtcataggtatattgaaagggaattggagtcttcggcgaagacaaaggcttccactccgtaactcatgcttcgccatcactccgagcaactctctattccttggggagaaatgagcatcaaagaaaaggatttcatccttgggggagagagcaaaagctcaaaagcaaaaggaccggacttcatctttggtataatcttaactcacttatttatgaccaaaggggaagatggcactccgagggctctaatgattccgtttttggcgattcatgccaaaaagggggagaaatgagcccaaagcaaaagga

SEQ ID NO: 37065 - DNA, 397 bp, Zea mays
agcttccttgatctcgtagggtccaatgtagcatggatctaacttgcccttgatcccgaatctctggacacccttggtgggtgataccttaagataaacatgatctcccacttcaaactgtagaggcttccacctcttgtaatgatagctctttttcctggcctgagcagcttctaagttcttcttgatgattctgacctttgcctctacttcaagtaccaaatctggcccaaaaatttccctctctcctgcttgagaccaattcagcggggttctgcatcttctcccatataaagcttcaaaaggtaccatctttagactggactgatagctgttattataggaaaactcagccaaggaaaaacacttgtcccaatcttttccgtagtgcagtaca

SEQ ID NO: 37066 - DNA, 401 bp, Zea mays
  unsure (1)..(401): unsure at all n locations
agcttgtcngcggaggcgagcgtggctgcgactgctcgcatgaccaggcaaagaagggagagacgatttcatttttagtcgtgggatgaacgaggaaaaggggtctgggcgctgcgcatagggaagtggcactggttgagggagatttatagacgacgaaatgcgtgatggctgaaattttacgtggaggcggctcgaacttgacaggcgggtcctagcgacgtgggagacggttgtcgattttgccgcggtcccgatctggccgagcgaaagaaacggttgcacgaaaaattacgcgagactgtgtaagacagagactgagttagacgagctgaatagtcacaaggttagataaaaattagacgaagacagtcagatctatcccgtgggtttaagtcgac

SEQ ID NO: 37067 - DNA, 397 bp, Zea mays
agcttgcctccgtcaaggggtcttttgtatcttcaatacagaacacaccttcggcttgggccacaatcttcacatgttcgcatcctgccttctccaaaatagccgcaattcccctggcacctgagaaggcgtaaacatctccaccgccactcaaaacttcctcaaaagctctcgcttcaccattgatccagtcgattggaccttccggatcgcctagtacgaagatgtcttcattcaaatatgcgccaatattggcgaagctggattttatcctttgtacacatgctacatatttttcatagcatctttcttttgaagaacgaacctccacaactgtttttcccagtaatatttccagtagtcaatggcgtctcagtcagctatcacaattgcacat

SEQ ID NO: 37068 - DNA, 396 bp, Zea mays
agcttttagctttgaagcttcggcttttaaaaacagttttttagtgtttccgaagatgtctgaagctgctaagaaggctgctgctgagatgaagctgagtcttgatgaagagaagaacttagggtttcttatagcaatgtcgaagaccaacacagaaaagatcaccagggaaattctggaagggctgtctgaagatactggtgacagtgaaagttatgatgtggacagcggtggcgaagactccgaagatcgcccctggcgaccaagccattcagtttatggtaaatcaactatcaacgggaatcatcttgttaatatgagaggaaggtatttccgggatctgtccattgtgagggcggacgaaggggaaaaaacttgtccacaccctgaagaaaa

SEQ ID NO: 37069 - DNA, 396 bp, Zea mays
  unsure (1)..(396): unsure at all n locations
agcttcggcgatggttaaaacttttggcagcttttcattgcttatagcaatgaatgctgtggtaacttcacacctactcgcctgtttatatagtactgcaggtaagaaggcgaagcgtcaggatttttacaccaggcgggcacccgctcgcactcgctgcaaggtgggaccgctacgcgctgggaaactgaatcgtttctcgacaacgagctcagggaaggtgttttttggaccttcggctccccgaagcttaagagactttttttcacggatcaagctcgttacgaaaaacgatctatcaccgcgaaaggggctactgttgggtctatgcttcgtcgccgaaggtcttctangaagaagtggctttcggctgaagctgcttgtgtgagatagccg

SEQ ID NO: 37070 - DNA, 401 bp, Zea mays
  unsure (1)..(401): unsure at all n locations
agcttancaaaagaaatttctagaatcaagaatattgtgtttatgcctaagtctggtaaaagattgttcatcaagtggcttggtaaagatatcggctaattgatctttagtattaatgtaagaaatctcgatatcccccttttgttggtgatccctaagaaaatgataccgaatggctatgtgcttagtgcggctatgctcgacgggattgtcggccattttgattgcactctcattatcacatagcaaagggactttggttaatttgtaaccgtagtcccgcagggtttgcctcatccaaagcaattgcgcgcaacaatgtcctgcggcaatgtactcggcttcggcggtggaaagagcgaccgaattttgcttctttgaagcccaagacaccaaggatc

SEQ ID NO: 37071 - DNA, 401 bp, Zea mays
agcttataacccaaaacttggtacctgtcagatgttctcttttcatgtgttgaatccatcacgaccatcatggattcaccatcatatgttttctttgtaaaaactcccattctagtgtgaagcatcacctttttaaaacaaaacattttgttttctaagcaaggctaagcatcattaaaacatgtttgaatacatcaggtaacaaggaatgatactcaatttctcaaggaaggaaatgcaacaatagtttaccacaccattcctattacataatgcagcattcaaagttaataaaactttaaaatacaaggaaaggtaaatgcaccgaggcttgccttgtgttgtaagagtagctacttcaccacagatgtcgaagtaaaatttattatccacgagaggat

SEQ ID NO: 37072 - DNA, 378 bp, Zea mays
  unsure (1)..(378): unsure at all n locations
agcttcagtcttagcgntagtctcggtcttagttatttttagttatacagggcagcnggctatatcctgtgcatttatgtttgtcatgatgaactatgtttgatttggatctttgtaatgattgtcaccagagtgtgggtatcccctgcattttggtttacatactatgtcaataaagttagttatatagttgggaaacccattattctcctttcctctttatctgagaagctgtgtggtctgtgttggagatcagtgaagatgctcatctgttcagtgctgttggagaatactatactctcttctcatgctgcaagctttgccagatcagttctgatgtgtggttgcgttctgcagatgtcagagaacatgcgtata

SEQ ID NO: 37073 - DNA, 393 bp, Zea mays
agctcgtctgttataaacgaacgaagctccagtttgttttctgcttcagaggaaggaaatattaaagtttcacaagttcataattgaatggccagagtccgctctaccgccagggttgagcgctagggggaggaaactgaatcttgggaaactcttcccatctccgaagccatgcgacgatcgggtctattgacttcagaaaagatccctcatgatgatgcaaaacaagcagaacaagcaatcgctgatgcagacgaagaagatattgaggacactgattccggatatgattacacgatcgccatgccgagcaagacgagccacttggacttcggagaatatactgtttcggaggctgatttgtccgacaaggtaaaagcgggcttttttact

SEQ ID NO: 37074 - DNA, 395 bp, Zea mays
  unsure (1)..(395): unsure at all n locations
agctntaccaaatggacgtgaaaagtgtctttctttttgaccaatcaaggaagaggcctatgttgagcaacctcccggctttgaagatagtgagtaccctaaccatgtgtataaactctctaaggcgctttatgggctcaagcaagccccaagagcatggtatgaatgcctaagagatcttattatcactaatggcttcaaagtcggaaaggctggtcctactttatttactaaaattcttgcaaatgatttgtttgtatgccaaatttatgttgatgatattatatttgggtctactaacgaatctacatgtgaggaatttagtaggatcatgacacaaaaattcgagatgactatgatgggggagttgaagtacttcttgggatttcaagtga

SEQ ID NO: 37075 - DNA, 397 bp, Zea mays
  unsure (1)..(397): unsure at all n locations
agctntggccccacctgtaggctcgcattctctcttgtggtgggcctgggggccactatcggtaccctgaaactagggtaccccttactactgtataaagacgcagtacccacgcgactatctttagtcgcgtggtaaaagagctgtacgtgggaccaagccatgactcgccccagcctcgggcgactactctgggaacacaacagcgcctgactccgccacatgggcgggtccggagccgccacgtgtccagagaaagtgatatactctaagacatcaacaatgagtccggacctccatgggaaagtgtcggacccctggatatacagtccggacctccaagtttagtccaggacccccacgtgtacggaccggacccctggaatgggtccagacc

SEQ ID NO: 37076 - DNA, 406 bp, Zea mays
  unsure (1)..(406): unsure at all n locations
gcacgcacgcaagccnancaagaacataaggagccggattttgttctcattcgccataaccaaagcgactcaaatccttttccacataatgggattgcacaagcgtgatcccaccattaccttctctcagtagcttaatgttaagcataacattagcttctcccaaatctttaatttcaaaattaccggacagaaagtcctttatctctttaatcacatcaagactcgtccccaagactagaatgtcatcaacatacaggcataaaattactccctcgcccccaccataccgataatatacacatttgtctgctttgttcacaacaaagccgacagacgtcaaagccctatccaacttttcatgcgaaaaccgataatatacatatttgtctacttcattcacaac

SEQ ID NO: 37077 - DNA, 397 bp, Zea mays
agcttctaaagggagagcacattttgggactatccaatgttcattttgagaaagacagggtttgtagcgcatgtcaagcagggaagcaaattggagcccatcatccacataagaacatcatgacgaccgacaggccgcttgagttactccacatggatctattcggcccgatcgcttacataagcatcggtgggagtaagtattgccttgtaattgtggatgattattctcgcttcacttgggtgttctttttgcaggaaaaatcacagacccaagaaactttaaagggattcttgagacgggctcaaaatgagttcggcttgcggatcaagaaaataagaagcgacaacgggacggagttcaagaactctcaaatagaaggcttccttaaggatga

SEQ ID NO: 37078 - DNA, 405 bp, Zea mays
agcttataataagagaatggaagcaaggacaacttcgtatgtgataatacaaggggaattatataaacatggagtctgttctccacttctcaagagcttatcaagagctgaaggtattgaattaatgaaagagatacatgcaggtctgtgtggatctcatattgggtctaggcccttgctgggaaaagtgtttagacaaggattttactggccgaaggcatctttggatgcagcagagctagttcagaaatgtgaaaattgtcaaaaatgtgcaaaagaccagaaacaaccttcatctcttacccagctaatacagcctacttggccattgcaaagatggggcctgtatttgttaggcccacttccaccagcgcaaggtaatttgaaatatgttgtggtggctgt

SEQ ID NO: 37079 - DNA, 408 bp, Zea mays
gcatgctggcgcgtgttcgcctgactgtagcatccacactttcatctgttgttttggtgcgcgccaatggtggaatttgcacagtcgttgggaacatgctcctcgactaccataagggccggtgggccgatctgttacctgaagtggtgtgggcgctgaacactactgagtgcacgtcgactgtgttcacccctttccgtctgctatatggatcggaggccatgacctcgcatgaatttaaacatgggttaccgtggacaatcacttcagccgttcctgacgtatacgagcctacttcgaaggacctcatctacggagacagtgtcttcgccctacacgctcctaactggtaccaagctcaaacaaaatcgtggttcgaccacacagtcatcccgagagaattcagcg

SEQ ID NO: 37080 - DNA, 393 bp, Zea mays
  unsure (1)..(393): unsure at all n locations
agcttccaccctttntgtgtccaatccgcccgtgactgatagcaatttgggtcttagagtgcgaccctccgctgaagaagtccgtactttggttgcttcgctcggggagatacctgatgatgaacggcagatttattttgaagtgcccctgaaccctagtgatgcagacataaatgacatgcttgatctgctagctgaggattcatctgatgctgctcctgatggtacattggcagtggtgcccttcccagaggttgatgcaaccttggatgtcccgaaacctgtcagtactcgcccgaggcgccctagccgaaccagtcagcccgagccttctgctgatgagcagaagaagaaaagaagacgcctccggcgagtatccagctttgacgagga

SEQ ID NO: 37081 - DNA, 400 bp, Zea mays
agcttgccttcgcctcagtgtaccacccacaatccaactgcgtcgtggagcgcgccaatggtaaaattttcacagccgttaagaagatgctcctcgacgacaagaagggcaagtgggccgatctgttacctgaagtggtctgggcgctgaacacgactgagtgcagggcgactgggttcacccctttccgcctgctatatggatcggaggccatgaccccgcaagaaataaaacatgggtcaccatggacaatcacttcagccgtccctgacgtagacgagcctacttcgaaggacctcatcgacggagacagtgtcttcgccctacaggccctaaacaaataccaagctcaaacaaaagcatggcgcgaccacacagtcattccgagagaattcagcga

SEQ ID NO: 37082 - DNA, 402 bp, Zea mays
agcttaggatggccaaccatgatgccaatcggtctgctgaaacagcgatccgattcaacagcctcgacttctccttcgacggcaaaggcaaagcgatcaaggcccaagaatcctgacctcctccaccgaggaatctcaccatgatcgtgagtaccgctagcgaccctcgcatcgaatacaccactggagcggtcatctgcttcaagaaccttgatttcatcatcaaccaaaaaagcgatatggtcaaagcggtacccgccctcctccaccccagagcactaacgcaatctgagaggcccttggtggcctcagcctcgccccacgcggatggagggagaggcgcgcagccaccccgccttctgaggctgacaaaataaggcgatagatcaccattcatatggg

SEQ ID NO: 37083 - DNA, 403 bp, Zea mays
agcttggtatgtatgtccatcttcttatcctcgaaagctgatttgcttagctgccatatttcactgtgagaaaaaaaagcctgcaattttagcttcatgtgtacttcagcagagtggaccaagatgggcaattgacagcaaaaaaagaaaataccttccatggaaaaggagaacgtgggaaaccgtcgcggtaaggcatgcaaaactaaaaccgtagctggaagcgaagaacgtgctgatgtacagtggcccactcttctcatatgcgtctgtatcgaagtaaaaatgggagtccatgatgctatagatgttgtacttctgcccagccaccgtgtagaggccatctgagtagatggggaagttgcgtgccttgtaaacattgaaccaatagttgatcggtgtg

SEQ ID NO: 37084 - DNA, 402 bp, Zea mays
agcttctaaagggagaacacgtgataggtttgactaacttgctattcgaaaaagatagaccttgtgcagcttgtcaagcaggtaaacaagtgggaggagcacatcacaacaagaatgtgatgaccacttcaagacctctggagctgctgcatatggacctcttcggacccgtcgcctatctgagcataggaggaagtaagtatggtctagttattgttgatgacttttctcgcttcacttgggtgttctttttgtaggataagtctgaaacccaagggaccctcaagcgcttcctaaggagagctcaaaatgagtttgagctcaaggtgaagaagataagaagcgacaacgggtccgaattcaagaatcttcaagtggaggagttccttgaagaggagggga

SEQ ID NO: 37085 - DNA, 405 bp, Zea mays
agcttggaggcgtcgatgggtgttctactcggtgtatattcttcctttttctcctccgtcgccttgaatgcgaccagttgtgcttcgaacgtggagggatcatcaagctcattgatcttcttcgagccctcgatcatgcactcaaaacttacaaaattcccgattacttcctcgggggtcattagtgtatatctagggttgccacgaattaattggacttgagtagggttaagaaaaataagtgatcttaaaataaccttaaccatttcgtggtcatcccatttcttgctctcgaggttgcgcacttgattcaccaaggtcttgagccggttgtacatgttttgtggctcctcccctttgcgaagccggaagcgatcgagctccccctcgatcgtctcccgcttg

SEQ ID NO: 37086 - DNA, 394 bp, Zea mays
agcttcttcacgcgtcagaggaaaaagtgcattactacaccactgcgactgtgttgcaggtggttacacgtcttatggcaatgaaggcaaagtataacttctcgaataattgctataacgatataatcaatctgattattgatctcatcccatcgaaccataagatgccaaaagacttataccagtctaaaaagattgtgtccggtcttgggatgaagtataagaagattgatgtgtgcgaagataattgcatgttgttctggaaggaatatgaagcgagcacccattgtcagaaatgcggtaaatcaagatatgcggaggtactaaaagaggatggagctacttttgctacaaaagtggcagttaaacaacttcgatatatgcccatcactcc

SEQ ID NO: 37087 - DNA, 394 bp, Zea mays
  unsure (1)..(394): unsure at all n locations
agcttcggnggtgagttgatgaatatatatctctaatcttttaattacttcgaccagcatcttatgcaaaggaaactaaaggcaagccttcataaaacctttgaaaacaaccactttgtcagcttcaggaagaggaacaatgttctctcctccggctctcactatgggttgtatcacggaaatatttacccttcattgcttcaacctgtccttttttaacagtgcatttttcaaacacaacatgacttggcctccatggccaatcttcaacatcatcgttgttggggacttgttctcaaatgcttcaacttgaaagaaatgaaagtacaagcgtgacgcaaaagcgaatgccaaatcagcgtgaacagtacgggagtattgttcacctatttat

SEQ ID NO: 37088 - DNA, 398 bp, Zea mays
agcttctaactctatatttttttgaaatttacttgtggttggctgatccatttgctttggccttaatttctccccctttggctttaagcaccaaaacgggagacctttttggccctttaaccccattgcctcactaaaatgtcaaatatgagcaaaaaggcaattagagtgcaacaaagaacttaggacaagatacattttaccgaaatgcagtggaagctcttttctttgtccaagttcacatttttctttcaatatccctttgagactattacaagagcacttaaacaaacaaattagtcgtaaaggagtcaagttgtagcacatcctccccctaaacatgtgcatcatttgcatagggacttgtgaggttcagggatgacttgtacaacttgagc

SEQ ID NO: 37089 - DNA, 399 bp, Zea mays
agcttgcatgccatggaggcgatcgcctgtccttcttattccaacaatatccctcccagagctctcggtagtggcgtaatccttgactaccaaagttgtttgtgatcacacaacaaatcatgaacatagttttataataaatgttcaaaaggctacataacatctgtaaacttactaaaaaatacaagaagtgtgtgtctaactcgtatgaaaggggaaccaaggtctcaagaatatcataggggatttaatttgttgatcatttggtagcatggtggatatggaatcataaaaacgaatgtatctttgtgggtgcagaggtcaatttcaaaaataaaatcaaataaatcgtgcaagatatcagtgatgagtttgacttgtgtgccaagagccaaaggt

SEQ ID NO: 37090 - DNA, 410 bp, Zea mays
tgcttgtaaaaaatgaacacattctgggactatccaatgttcattttgagaaagatagggtttgtatcgcatgtcaagcagggaagcaagttggtgttcatcatccacacaggaacatcatgacaactgacaggtcgctcgagctactccacatggatctattcggcccgatagcttacataagcatcgacgggagtaagtactgtctaattattgtggatgattattctcgcttcacttgggtgttctttttgcaggataaatctcaaaccaagagaccttaaagggattcttgagatgggctcaaaatgagttcggcttaaggatcaaaaagattagaagcgacaatgggacggagttcaagaactcacaaattgaaggctttcttgaggacgagggcatcaagcatg

SEQ ID NO: 37091 - DNA, 381 bp, Zea mays
agcttgtcaaaagagttatgcagaccaactatgacaacccttatactttctcgtgggagattatgtctacctgaaagtttcaccaatgagaggcgtatcgcgttttagggttaaagggaagcttgcacccaaggacattggtccattccctatacttgagcaatgtggaccactggtgtatcgacttcagctacccgaaaccttggctactgtacataatgtgttccatgtgtcataattgaagaaatgtattcaggtaccaaatagaaccgctgaggtgacagatattgtcctttaaccagacttgacatattttgaatataccattcgagtcttggatcaaaacgacagggttaccccgagacaaactatcaagttcta

SEQ ID NO: 37092 - DNA, 398 bp, Zea mays
agcttgtcagacgaagattacttcgctcctcttgtgtcattctgaagcttttctgattaatgaagctactgtaatattcagtagtacgctgaaagcaaatggttagtcgtgttttgaggatcttcggaagaggaaggccccccaacagtagcccctcgcagtattaatttgtttctttgtaacaaattcagactgcgaaataaacgaaagcctttatccgaaggtccgaaaaaacacctttccttcgctagaatagtgaaacattctgcattgtgggccccaccgcttagtggtgctttgtgtatatatacaaaagcttgcgctaagaatatttttcgtgctatctagctttgtgctatgcttgtcgttttagctttctttctctgtgaccacaattg

SEQ ID NO: 37093 - DNA, 401 bp, Zea mays
agcttctccattcatagcttcggaattgattcatccttcttccaggccatgcctttcataccgtgtgcacattcatctcaaatccgaaggtacctgtgatagcatattatacttggaaaacatgttagtcgtgtttttgaggaccttcgaaagacgaaggcccccaccagtacgtaaaacccaagcttaaattccttgcaggtttatgcatccgggggctcaagctgaattatcgacagcggatgcacaaaccacatgacgggggagaagaagatgttcacctcgtacgtcaagaaccaggattcccatgatactattatctttggagatgagaaccaaggcaaggttaaaggactgggaaagatagccatcacaaacgagcactcaatatcaaatgtatt

SEQ ID NO: 37094 - DNA, 399 bp, Zea mays
  unsure (1)..(399): unsure at all n locations
agcttgtttattaacacaccaacctaattntccaaagcttgtgactcaaaactcaacgctagctgcaataatattatactacatgttttggtatttatgattatcaagctacatgtttgaggctaaaggtttagctcttacgtttatatatatatatatatagtttatatattaagagccctgggcttccaataataaaggaagcctaggttagtcaacatgggcattttggttgaaccacaccgagtcaactgggcatagtcacgacgccgttacccccgtgaaccatccacctctcccacgtttcctgtttctaaaaccgtactctcgcattcaacggagataaaccagcgtccatttgaagaaaaccccagccgcgcagagtttgctttcgtggga

SEQ ID NO: 37095 - DNA, 400 bp, Zea mays
  unsure (1)..(400): unsure at all n locations
agctntctcgactgagtcggagacaaggcctttggattgttgaaagtacgcgtaagcggcaaggccgaccgagccgagggattcccacgcctctgggatacggataccttactcgtcccttccgcgaaaaacaactctcgctcacacaaacatccctgttaccgacagagtccagatgctcgaaacaagaggaaagaaggcgcagcttcncaagcgcggcgagggtgtgttttttctggcctcggcggccgcagaaagcacacgctacaagatgatctgatcctgcaggctcgggtcttcacgctgaagggagccatagcaccctcggcatcgacgacgtcctcagcaaagtccgacccagcctcgggcggcgacgcgatccnaggactcctccgggaat

SEQ ID NO: 37096 - DNA, 404 bp, Zea mays
agcttctaaagggagagcacattttaggattaacaaatgttcattttgagaaagacaggatttgtagcgcatgccaggcggggaagcaagttggcactcaacatccacacaagaacatcatgacgaccgacaggccgcttgagctactccacatggatctattcggcccgattgcttacataagcatcggcgggagtaagtattgtcttgtaatagtggatgattattctcgcttcacttgggtattctttttacaggaaaaatctcaaacccaagagaccttaaagggattcttgagacgggctcaaaatgagttcggcttaaggatcaagaaaataagaagcgacaacgggacggagttcaagaactctaaaattgaaagctttcttgaggaggagggcatc

SEQ ID NO: 37097 - DNA, 411 bp, Zea mays
  unsure (1)..(411): unsure at all n locations
gagcttctaaatggagagcacattttgggactatttaatgtttattttgagaaagacagggtttgtagcgcatgtcaagcaagaaaacaagttggtgttcatgatccaaacaagaacatcatgacgaccgacctaccgcttgaattactccacatggacctattcggcccgattacttacataagcatcggcggaagagagcaatgctttgatattgaggatgattattctcgcttcaattgggtgttctttatgacgagaaatctcgnacccaagagaccttatatggattcttgatgtgggctgcaaatgagtttggcttaaggatcaaaaagattataagcgacagcgggactgatttcaagaactcacaaatagaaggctttcttgatgactaagggatcaagcatg

SEQ ID NO: 37098 - DNA, 390 bp, Zea mays
agcttcttcccttctttggcggaagtctttgtccgcctggatgtactcatccattttctgaagcagcttctccagggtctgagggggtttcctattgaagtattgggccataggccctggccgaagacccttgatcattgcctcaatgacaatctcattgggcactgtgggtgcttgtgctttgagtcacaaaaacctttagacatatgcctaaaggtattcctcatggtcttgtgtgcactggaacaaggcctgagctatgattggcttcgtttgaaagtcttgaaaactggtgaccagcatgtcctttagcttttgtcatgacgtgatcgtccctagccgaagagaagagcaccatgactgggccacgctttggactgccatgacaaa

SEQ ID NO: 37099 - DNA, 387 bp, Zea mays
agcttgcacttacgaccaaaccgcacccgcattcatatcacattcaatggcttaacaatagtggtaaggtcaaggtaaccaagctggtacgaattaattttgctattggttcatatcgtgatgttgttgactgtgatgttgtgcctatggatgcttgtaatattctgctaggtagaccatggcaatttgattcagattgtatgcatcatggtagatcaaatcaatattctctcatacaccatgataagaaaattattttgcttcccatgtcccctgaggctattgtgcgtgatgatgttgctaaagctaccaaagctaaaactgagaacaacaagaatattaaagctgttggtaataacaaagatggggtaaaattgaaaggacatt

SEQ ID NO: 37100 - DNA, 401 bp, Zea mays
agcttggaaattgaaactaggtgttcactacattcatcaatgtcaaaatctttacacctagtacaaatttcaacatgttctacacaagaattggatttatttgctacttctaatttagcatttaaatcattgttgacacctttcaaagtagaaatggtttcatgacaagtagatagttcaaaagaaagcatttcatttcttttaacttctaaagcataggatttttgtgcctcaacaaatttatcatgctcttcatacaacaaatcctcttgcttttctaaaagtatattcttttcattcaaggcatcaattaattcattaattttgtctatcttagatctatctaagcccttgaacaaacatgaataatctacttcatcctcatcactagattcgtcctc

SEQ ID NO: 37101 - DNA, 401 bp, Zea mays
  unsure (1)..(401): unsure at all n locations
agctntgttccagtgcactcaagatcattaatattactcttcggtgtatgtccgaaggttcttacgactgagggcgcaggcgccaacattgcctaatgaaattgttatcgaggccatgattaaggggcttcggccaggacctatagcccaatacttcgctaggaaaccccctcagaccctggagaaactgcttcaaaagatggatgaatatatccgagcagataatgactttcggcaaaggagggaggaagcttacaggttctccgaaatgaccaggggcttcggagggagaatccaccataggcacgtcaatctatccattctactcagattgacgataggggaagtcagcaacaaaggtcgcagtattcctctcaagcttcggggcagcaacagaacta

SEQ ID NO: 37102 - DNA, 403 bp, Zea mays
  unsure (1)..(403): unsure at all n locations
agctntaccaaatggacgtgaagagtgccttcctcaatggaccaatcaaggaggaggtctatgttgagcaacctcccggctttgaagatagtgagtaccctaaccatgtttataagctctctaaggcgctttatgggctcaagcaagccccaagagcatggtatgaatgcctaagagatttccttatcgctaatggcttcaaagtcggaaaggccgatcctactttgttcactaaaactcttgaaaatgacttgtttgtatgccaaatttatgttgatgatattatatttgggtcaactaacgagtctacatgtgaagaatttagtaggatcatgacacagaaattcgagatgtctatgatgggggagttgaagtatttcttatgatttcaagtgaaacaact

SEQ ID NO: 37103 - DNA, 392 bp, Zea mays
agcttgtgaagattcttcatcccaacatgggctagtcggcgatgccagagccaacccatattagtcttagcaattaagtaagtgtcgagttcagctctattgaaatcaactaagtatagctgaccctctaacactcccttaaatgctattgactcatcacttcttctaaagacagtaacacctgcatcagtaaatagacaggtgtagcccatattgcataattgagaaacagaaagcaaattgtaatctaaagaatctacaagaaaaacattggaaatagaatggtcaggtgatatagcaattttaccaagtcctttgaccaaaccttgatttccatccccaaatgtgatagctctttagggatcttggtttttctcatacgaggagaacat

SEQ ID NO: 37104 - DNA, 400 bp, Zea mays
gatccttaagtcacctgcagcatgcaagcttcatgtgctcctgagatatgtgtgaatgttagccatcgtgctgttacttttatttgcaggttttggaaacctccccgtgcaggggaggtgctgccgaatttttttgttgacagacttgtttatttttttgcagaggtcttcctagccgctgcgggtctgcctcgcgtcgccactgcaccgacccgccacagccccactagcctgactccaccgccaccctaggtataacctctatttccgcatcatggtcgtagatcacgtaacccaggtaggcgtctcccgttcgaaagagatacggtgtagatatgcagatctttgcatatctacaaatgtatcagtttcgaattgtccacgttttttggacagcccg

SEQ ID NO: 37105 - DNA, 393 bp, Zea mays
agcttctaaagggagaacacgtgataggtctaaccaatgttcatttcgaaaaagatagaccttgtgcagcttgtcaagcagggaaacaggtgggaggctctcatcacaccaaaaatgtgatgacaacatcaagacccctggagctgctacatatggacctcttcggacccgtcgcctatctgagcataggaggaagtaagtatggtctagttatcgttgatgacttttcccgcttcacttgggtgttctttttgcaggataagtctgaaacccaagggaccctcaagcgcttcctcaggagagctcaaaatgagtttgagctcaaggtgaagaagataaggagcgacaatgcgtccgagttcaagaaccttcaagtggaggagttccttgagg

SEQ ID NO: 37106 - DNA, 406 bp, Zea mays
agcttgttcaaagggttagatagaactaaagtatacaaaatcaatgaattgattgatgctttaaatgaaaagaatagacttttagaaaagcaagaggatattttatatgaagagcatgataaatttgtaagtgtgcaaaagtctcttgctttagaggttaaaaggaatgaaatgctatcttctgaattatctgcttgtcataaaactgtatctagcttaaagagtattaatgatgatttaaatgctaaggtagaagtagttaataaatctagttcttgtgtagagcatgttgtcatttgtaataggtgtaaggattttgatgttgatgcatgtgttgagcaccttacttctattacaaaattaaatagtgaagtggcaagtcttaatgcccaacttaagacttgca

SEQ ID NO: 37107 - DNA, 405 bp, Zea mays
agcttgccgcagttgtgacagccgtcgtctcgtgccggcttcttgttgccgacggcgccgccttgggcacctccacgggcaccgccctcagcatgtccttgtgccccggcctgggcgcctccacgcgccttgcgcgccttgccgcgtttgcggcctcgtggcgaggaggactcccccttcttctggtcaccctggcaggcctcccactgctcccgagtgagatgtagcttcacgccaatagtgatagggccagagggagcctgtggttcgtcgccgtcgaccaccttgagacgacctatcgcctcttcgatcgtcatcgtggagaggtctagcaaagactcgatcgagcgagcgatctgcttgtacttcttggggatgcaacggaagagcttctcaacagttctc

SEQ ID NO: 37108 - DNA, 395 bp, Zea mays
  unsure (1)..(395): unsure at all n locations
agcttctaaagggagaacacattntaggactaacaaatgttcattttgagaaagacagggtttgtagcgcatgtcaagcaggaaagcaagttggctcccatcatccacacaagaacatcatgacgaccgacatgccgcttgagctactccacatggatttatttggcctgattgcttacataagcattggcgagagtaagtattgtcttgtaattgtggatgattattctcgcttcacttgggtattctttttgcaggaaaaatcacagacccaagaaactttaaagggattcttaagacaagctccaaatgagttcggattgagaatcaagaagataagaagcgacaatgggatgaagttcaagaactctcaaattgaaggctttcttgaggag

SEQ ID NO: 37109 - DNA, 396 bp, Zea mays
  unsure (1)..(396): unsure at all n locations
agcttggaaatngaaactaggtgttcactacaagcatcaatgtcaaaatctttacacctagtacaaatttcaacatgttctacacaagaattggatttatttgctacttctaatttagcatttaaatcattgttgacacctttcaaagtagaaatggtttcatgacaagtagatagttcaaaagaaagcatttcatttcttttaacttctaaagcataggatttttgtgcctcaacaaatttatcatgctcttcatacaacaaatcctcttgcttttctaaaagtatattcttttcattcaaggcatcaattaattcattaattttgtctatcttagatctatctaagcccttgaacaaacatgaataatctacttcatcctcatcactagattcg

SEQ ID NO: 37110 - DNA, 403 bp, Zea mays
agcttgagtcagttcttctatagagaattattgatgcccaaagaagtgacaatggtatgaagcacattcatgagaaaatagaagctgaccaagctaaatgctttataaatgatgaccaagggataatatgtataataaccgcatagttgtgcctaaagatggtgaggtccgccaacaaattttggatgaagctcatcttagtcggtattccattcatcctggaagtactaagatgtatcaagacttaaagcaacattattggtggacaaaaatgaagattgagattgcacgctatgtggcaagatgtgacacctgtagacgtgtcaaggcagtgcacatgaagaccgctggaccactgcaatctttaccgatcccaacttggaaatgggaggacattagcatg

SEQ ID NO: 37111 - DNA, 403 bp, Zea mays
agcttgttaccagtccttttgccactatgacaagtatatcatgttgttggtcaatgtgaataacaataaggcttcttgatattgtgggcatagctattatgggcacatgagagtatgagatgctaggtcacacttgcaattgattctgatatagggcaatgatctaaaggttgaaaatatttttggagcacaccaaatccctgttctcttttgaggttatctatagcccttataaaacaaaacccactagcatgcatttatgatattctatctcttcatgcaagctatccacaccatcccacatttgttgttgtccacttgtcactacaagtacaaattccatccgtccaagtccaatgtcatcccatctcttagattcacaagcccagtcaatggaaacggt

SEQ ID NO: 37112 - DNA, 405 bp, Zea mays
agcttatgaagattcttcatcccaacatgggctattcggcggtgccatagccaacccatgttagtcttagcaattaagcaagtgtcgagttcagctctatcaaaatctaccaagtatagctgaccctctaacactcccttaaatgctattgaatcatcacttcttctaaagacagtaaaacctatatcagtaaaaagaccgttgtagcccatttgacataattgcgaaacggaaagcaaattgtaatctaaggaatctacaagaaaaacattggaaattgaatggtcaggagatatagcaattttacccaatcctttgaccaaaccttggtttccatccccgaatgtgatagctcgttgggggtcttggtttttctcgtaggaggagaacattttcttctcccca

SEQ ID NO: 37113 - DNA, 390 bp, Zea mays
agctttccaactaattgtggagcactctttttggtggtctagagaccaagttacagctgtttgaactatagactctgaatctgtccaaatctggacagagaagtctgtttgtattaactgactttgatatgtattgaattgacatgagatgtttataaatgaattatagacaattctattagctttctaaaaagtctaggatcacctgatttggatgcctaaaactccagttataaatttttgaagtaagtagtcgaattctgtccaaatctggacagaatttatgtttagcactgtttgacatttctcaatatagatgctccaacattggaaaggtttgcactacagcttggtttttgatggagttgtaccagattttttttgttcaaa

SEQ ID NO: 37114 - DNA, 399 bp, Zea mays
agcttctaaagggagaacacattttaggactattaaatgttcattttgagaaagacagggtttgtagcgcatgccaagcaggaaagcaagttggtgcccatcatccacacaagaacatcatgacgaccgacaggccgcttgagctactccacatggatctattcggcccgattgcttacataagcattggcgggagtaagtattgtcttgtaatagtggatgattattctcgcttcacttgggtattctttttgcaggaaaaatctcaaacccaagagaccttaaagggattcttgagacgggctcaaaatgagttcggcttaaggatcaagaaaattagaagcgacaacgggacggagttcaagaactctcaaattaaaggcttccttgaggaggagg

SEQ ID NO: 37115 - DNA, 424 bp, Zea mays
gctttgctgaagacgtcgtctattcctagggtgctacagctcccttcggcgtgaagacccgagcctgcaggatccgatcatcttgtagcgtgtgcttcctgcggccgccgaggccagaagaaaacaccctcgctgcacttgcgaagctgcgcctttttttcttctgtttcgagcatctggacttcgtcggtaacagggatgttcgtgtgagcaagagctgcttttctcggaagggacgagtgaagtattcgtatcccagaggcgtgggaatccctcggctcggtcggccttgccgcttacgcgtactttcacccgtccatgaggccctgtccccgacttaatcgagaaagcttgaaggactgcttctgcaggagagcttccgaacgtgatgactcggtccggccacggagtcgctttattcgag

SEQ ID NO: 37116 - DNA, 396 bp, Zea mays
  unsure (1)..(396): unsure at all n locations
ggacttattatttattttctaaaaatccagaatcaatggtttaggctattttaaataccctaaaattccctgttcaaactaaaaatcatagaactatttttattaaatactatggaaaataacaagcctaggaaaattagtctcatatttttaggatttttctataattttctacagatttctagagttctgatgtaaaagaaaaaggaaaacgataaaacagtactgggccgattctggcccaacaagcccaggtccagggagaacagtgctcgcgcccgcgcgcgcgcgcccgcgcccaggcaatattgcagaaagggcctcgcgcttctggctaaacagaactagatccctttactattngtttgagtcactgacggattgcacaaatgccct

SEQ ID NO: 37117 - DNA, 160 bp, Zea mays
caccgagaaccaaactacattattcacgtcggattctgatccgacgacgaacgagacctgcgtgtcatgcttaagaggagaaaacagatacgaacggcgcgactggaaagagacgccttgacaacgcaagtcaggaactaactggtagagtatatcaggc

SEQ ID NO: 37118 - DNA, 317 bp, Zea mays
accatatagactgggtaaggtgatttggcctcccgtgagctatagcacacgttttcatggcgagcgaccatttttatgttcgcgttcctccacacgcgtttttgttcccggacaacacccgcggtttggtccccagagcacctctaagttgtcttgggctaccacaaatgtagcactcgtttctgaggccaagagcccaattcatggattcgaactgcccctaccctttataccggagaaggcgtacgacaatttatgtacaaggagctatacccacgttttattgaacctaaccccgatccatccctaaccttacc

SEQ ID NO: 37119 - DNA, 460 bp, Zea mays
agcttgtactcccgataacaggcggttcatgcacatttcctgctaacaagaggtagaagatagaggcacagagaagggtacaacatgtatgggtgcaaggacccttcatcaagtcaagatggtctcatatcccgattaccttctcacaagaggatcttcagctcaaggattaccctcacaattatgctatgggtatctcttgtgttatcaaaggatttctggtccacaatgttttggttgacacaagcaatgcagcggatattatatttgctaaggccttcaaacaaatgccagagcccgaagataagatccatgaccccatacatcccctttgtggcttcagaggaaggcagattgtaacacttggcaagatcacgatgccgtgtaccttcagatttatcaacaacacaaggactgaacaagttgtatttgatattgttgacattgaatacccttacaa

SEQ ID NO: 37120 - DNA, 336 bp, Zea mays
  unsure (1)..(336): unsure at all n locations
tgctccncctaagaacttgtctaactttgttaagggcatggctcccatgcctcacgataacgagggttacattttataccctgccggttatcctgagagcaagattaagaaaattcattctaggaagtctcactctggccctaatcatgcgtttatgtataagggtgagacatcaagatctaggcaatcaacccatgccaagttgcctagaaagaagaattctaatgcatcaaatgatcatgctatttcatttaaaacttttgatgcttcttacgtgcttactagcaaatccggcaaagtagttgccaagtttgttgggggcaaacacaagggctc

SEQ ID NO: 37121 - DNA, 395 bp, Zea mays
  unsure (1)..(395): unsure at all n locations
actatanaaatactcaacttagacacatcattggcagtctcttctcgatgcagagcctgctttctgtatagttcaaacaaatcgtaattattactcattaagttgacatggattttaacctttatatcataaattcatatagaacatgactcttaccaaatatcaatgccctttgctcgaattggtaccttttcacgaacaccatgcatctcttacaccaactccatgatacagtgctgtgggatcctgctttgctgcattgaactgagagactccatgtactcatgatcatgagtctcgtccattgcaagtgttctttacagatgcttcttatgaaatctgattacgcctaagtgaccatactattctacaactacaaatttcttttgagcatc

SEQ ID NO: 37122 - DNA, 401 bp, Zea mays
  unsure (1)..(401): unsure at all n locations
cttgcggggagaagcgatgcttatgggaacgagggggagtgttcgaaatctttcatccatctcttatggcatgactatatttatgcttcaacatgtgtgaacgactcacagataaagatttgagttagattcgcgaaaacaaaccaagcggtggcaaacgatgatccataaatgctcaatacgaatcagaataaatgtgaggtttatttgacgtgatgtcgcacattgcctaggtgctttatgtcgtgtcggcataactcaccaaaaacggggaaattgaaacggaaacgtacccttgggccatttctaagtattttggtgattgagtgcaaacacaagtgctcatatgtgaatctatgcacatggtgaacaaattgcanatcacaattaaatgtttgtat

SEQ ID NO: 37123 - DNA, 371 bp, Zea mays
gatccttaagtcacctgcggctgcagcttgtaccactactatgagcaccctggtgtattataatataagcctcatcctctctcttgtgtgtcagctcgcatcaatccatctgggcagggacacgcagcgtcaaattcactagtcggttgagggtcctctcgggtccaaaacaccgacagttggcgcgccaagtatgggtccatctgcgtgttggcaatactttaccgtcgagatccaaatggacaattcttagcagcctcttaagcccgggacggtgctctgctttgggagtctcgagttcatgtcccccgatggcagctacgacatggtactcctccccccgcagcacgacaacaacgacggtcgtcggc

SEQ ID NO: 37124 - DNA, 376 bp, Zea mays
cgcaaatattcatcatgaacttgtgcgcattggaaaagagcctgttctttaactcgctcatttgagagccttgaaagcttgtgatcaacatgtccttcaattattgccaagaggttattgttcccggctgaagagaagaatatcatatttgagcaacactccttactgccatgacaaaggatatggccatgacagttgtgttgccttgataagatgagtttgttgcttcgtagctcatcaagaattgcttcgggtcagagtgaccgtcgtacatacgcaataaaggtggtttgacaaaggtggccattgtagtgcctataactccacagctagggggtagcatcatcatacagaacatcattgtgattgaatgctt

SEQ ID NO: 37125 - DNA, 454 bp, Zea mays
  unsure (1)..(454): unsure at all n locations
nactngagnnnagaaggccctatattgcttattatcattgactctctcaattaaggactttgccacccatatttgtctatgtctactcttgtttggtggacctatgaatgtatccttaacctttccatatgcaacctttcttataacataatgagcattgaaagcaaatggtcttgagtgcttatgcaaaggagttggtggcttggctttgctagtgagggcatagtgaccttcattttcacactcaaagcattctataggcttgtattgagcggtagctttcttttgcacaaaagcattgtatccaataccactcttgttgtttctcataacagcgctcataagcagcttatattgtaggtatagacccttgttgaacttttgcacacttgttgcagatgtacattttcactttataatttcttgacctcattttataccctttgattattca

SEQ ID NO: 37126 - DNA, 277 bp, Zea mays
  unsure (1)..(277): unsure at all n locations
gaggcnatccacactcatggaacccatagatacgactctattgataatactccagcctcgccagcggaaatatctactctatatcacaattctccgcagtcatatttactctatatatcaactctataccaactaccacacaatatatgattttctgccacattactcgattcactgaacgcgcccagtaccacttgtgcctgcctgcctggagcagaccgcacgacggagaggacatgagagagattagaggaggatgggacatatgatgtatacg

SEQ ID NO: 37127 - DNA, 391 bp, Zea mays
atctgcagtgccaacgcgtagctatgatttgggtgccacttgggctacaccaaacaattcatcagaaattagattcaacatccagtatttcagagaaacagttagatcaatgcattcatttgattcctgtcagattaagacatctcaaaattcagcagcaaatcgagaaatgcatcatcaaacacaaaagaaagatgggttttaatattttaagacagatggaggagcttaactgatgatattctagtgacgtcaggggtctcatgctggtccaaagtagccttttcttcaggcgttatgagaagctcgatctctatgcaaacaaaaaattagtggtagtgtagaacacaaagaagtagagcggatgccttctcagagagtggaccgagaa

SEQ ID NO: 37128 - DNA, 348 bp, Zea mays
agcagaaggtgctattgggatctctactgtccgaagagcaggagaaaaaccttgattaggtttttgttcaacaacaaagatgtttttgcttggtcagctaatgatctttgtggagtaaacagggatggtattgagcactccctcaatgttgatccatccttcagaccaagaaagcaaaggcttcggaagatgtttgatgacaaagccgaaggtgctcgcaacatagtgaaaagactcctcagtgctggagttatcagagaggttaaatatccaaaatggctggctaacactgttatggtaaagaaagccaatggtaaatggagaatgtgcatcgattttactgatctc

SEQ ID NO: 37129 - DNA, 363 bp, Zea mays
agcttcaactccatctatgatatggattgcttttgagtctgcccagtttccttcagcccttctggcagcttgctgacttccatgaatagcaatgggcccttggtccgaatgtatcttcatgcaaagatatgctggatgaagaattgcttccaaagcattgagagtaccacgaccaatgattgccttgtaagggtattccatgttgacaatatcaaacacaacttgatcagtccttgcgttgttgataaattcgaaggatactggcattgtgatcttgccaagtgctacaatctgtcttactctgaagccacaaaggggatgtgtggcatcatggatcttgtcttcaggctcttgcatatgtct

SEQ ID NO: 37130 - DNA, 380 bp, Zea mays
  unsure (1)..(380): unsure at all n locations
tgcctcgggcagactaatgccagaataagataacacgctctgggagtggagcggcggcgatagtaacgcgtaccctccgcggcaagaggctggacaggggagtatctgtgctctcggttgacgtgaacctgatctggtcttaagaaccccggtggcgggttgacatatgcaagggttaagagctacatatgtcgtgtgatcggagatcctcatctgagtataaatcattcggatcgccgcaccttctctgttatgaagacttggacattgccctacaacctacttcacgatgtgaacctcatgaatgaaaatgatgntgtattgatgagatagtgaaattagaccagatgctaacagagtctattaatatttaatctggc

SEQ ID NO: 37131 - DNA, 346 bp, Zea mays
tcttgtggcaggcgcaacagatatgaggtggacggcgtctcttgtttctatctctatgcctctttggcgcacgctgaatggtgaccatccgctacatgtataactcgactctcgcctactcggagtacactgttttcacaagtataaaatgggcctccttggctaaacggatctctaccactcagatggtatcactgccgggccacgtacgaagaaggccaactatgaaatccatcccgatcgcatcccacttccactgagagaaaaccaagtggctgaacaatccggcaggcctttgtgctccgctcgggtctttgacaccacacagatggtacacattctgcga

SEQ ID NO: 37132 - DNA, 419 bp, Zea mays
  unsure (1)..(419): unsure at all n locations
agcttgtggaggttcttcatacccacatgtgctatattgttatgccacagccagcccatgcaagtcttagccattaagcatgcatctagaccggcctcttcttttgcaaaatcaactaagtaaagcttgccatctagaatacccttaaaagctagtgaaccatcacatcttctaaagacagacacatctacatttgtaaatagacagttatatcccatattgcatagttgactaacagatagcaaattatatccaagagactctactaaaaacacattagagatagagtgctcattngagattgcaattttacctaactcttttaccttgccttgattcccatcaccgaatattattgaatcttgggaatctttattcttgacgtaagaggagaacatctttcttctccccgtcatatg

SEQ ID NO: 37133 - DNA, 464 bp, Zea mays
  unsure (1)..(464): unsure at all n locations
tctttacttcataagtnggtagtgggattccttaatccacatttcttatatcgnggagtgtttcttattcgaagtatacatcttcacaaatctttatgctagactttggttcccatatgagtttgtcattgttgacacaaaggtccactttctgacttcaatatgactttaatttacaacaaagggattcatattcatatttaggtacatgtcttgatcttcaatgcaaaatttcttagccctttggatatattggagtatattcatgattggtatttatttatacttattgccattaccgatcaaacacaatgacacatagagtgtctaccttgngtgtatcgacatggtatttcctccccctcatccttaggttcttataggtctgggttcacaaatgaccgaccaattaatagtattttcataatgcacgtttctataatngagaaccttctcagtatgat

SEQ ID NO: 37134 - DNA, 419 bp, Zea mays
gacacctgaggcatgcaagcttcttatctcaatgtgcaaacagaggaggaacattgtctcatgggatctcaccctcacggaggctggcggcacggcagcacggtgataccaaacggaggtgtttcatatggcgccggctgcctaggcgcagccgtgcaggtcgctgggcctgggcgcatctatgcagcatggggcacgacgtatgtctgcagggcgccgacaacatggagcctgtggtcgcggcagatccatcgtccggcgacttggcgagggattaaggagggaggacgctaagggcgacgtacgggcgttagacgagcaacgaagttgggcaccgccgcgccgggtcaaaagacaacggcgctgaaggaggaagcacccaacgaacggcaccagctgggctggactgtttcttacgt

SEQ ID NO: 37135 - DNA, 385 bp, Zea mays
ctctgtcgaagagtagaggttcctccgatgctagagaccgatatctgtcgctaccgaccacagcatatagattgtagattaatctattctaactgcaaggtaaaacttttcttcgacgttacaatgttcttaataacgaaggtgatatctaacgaaagttgcttccagacatgcggacgtcattgagtacagctctgaggatgcatcaggaccttgcatataaaatacatgaagccatatttgaacgcttatcaagcaatatagaagatcaagcacgtgctcgttggggaacgattcatactactacaatggatggttagtggaaaagcgaaccttaatgcaatgtggataaagagctcttcaaatcaaacgcgtgaacatgaaa

SEQ ID NO: 37136 - DNA, 481 bp, Zea mays
  unsure (1)..(481): unsure at all n locations
tcggggcagcagcaaagctcttttcggccgccagcgccaatgtgcataggcgccaggggcttctgnggaagatttggggatcagccaagaagaatttactgcctattctgtggtgaagacaagggccataccaccaggatgtgccatgtcaccatccagaagcaaaaggagatagcagaagctgcatcacaacaaagtcagccgaagcaggtcatgcacactgcttcgtaccattcgccttacattccagaatatgtaggcaatcaccctgcagcttctgttgcttcggcaagtcaaccccaagcatcttggcaacagcctccaccgccaccaccaacgcagcgaggtcagcagccagaagggagtcagcacactcaccttcagcgggacttcagagaggagtccgaagctcgcacagtcaatagcactgtgctagagtcgaagcacaattactgacagatatcctacctcgacagcagtc

SEQ ID NO: 37137 - DNA, 398 bp, Zea mays
  unsure (1)..(398): unsure at all n locations
gctcagcatcgntgttctctctatcgccttatcccctgtcgtccaatcagcaatgaagtctgctaacgcttgggattggatccaagatctatgaatgtaatcaatagtgaattcattcagctntgccgcccactttccaactcttcatgtagcttctctgtttctcattatatccctgagaggttgcaaagaaggtactatgatatggtacctctggaaataatgccgaagctttctggatgccatcagtacagcatatagtaccttctccaactttgtgtaattttcctttgatggctaagtacttcggagacgaagtatactggcacttgcttctttgcttggccatcctgcttttcttgtaccagtgctgcactaaccgcagcgtgggaagcaac

SEQ ID NO: 37138 - DNA, 365 bp, Zea mays
  unsure (1)..(365): unsure at all n locations
attcttgagcccctcaggcatccgaagatagtctttatttctcctaggagttatgaagctagtcgttggctcatcttccttcttcatccacaattgatgataacctgagtagcaatccaataagctcaagagctccgaagaagctgctgcatctacgagggagtctattcttggtaatgggaactcgtcctttatacatgcttttgtgagatctgtaaaatcaatacacattcttcatttgccattagccttcttcaccataacagtggtagctagccattctagatatggtacttctctaataacactagcactgagaagtctctttacattgntccgagcacctttagctttattctcagaca

SEQ ID NO: 37139 - DNA, 251 bp, Zea mays
agcccacgcatgtttgagttatcaaataagcaagtggaccggtcagctctattgcaaacaactaagagtagaggacgcctctacaataacctcaatgcgactgagacatctcttcttctctagagagagacacctatatacgtgtaaagacagaggtatcccccttagcgtatatgtgaaacacagagcgcaatgtattttcaagaaactacactaaaaacactggaaatataaagggctcgaaatatatc

SEQ ID NO: 37140 - DNA, 411 bp, Zea mays
  unsure (1)..(411): unsure at all n locations
gtcttctnctataagctctcatgaatagcctagtgatcttatattcactccaatcatcacttcctagaactcttatcttggtcactgacaccatcaatccatcaaagagcgattaaagagactcatccttgatccaatcatatctagcaagctcgctttccaaagattcaatcctatgtcttttagccttaggatctccttcatgtgacatcttgagaatgttctaaatatcaggagcatcctctctaccctgtacttttcggtattctttcgggcttaagcttcctttgatgatgctcactacatgagggttacgatgcacttcttgcattaactctgatgtcatctcttctccntgggtgggcttgntcacacctacatggacaatcttccaaagacttggatgcacac

SEQ ID NO: 37141 - DNA, 437 bp, Zea mays
  unsure (1)..(437): unsure at all n locations
ggatccttaagtcacctgcggcatgcaagcttctaaagggagaacacattttgggactatcaaatgttcattntgagaaagacaggatttgtagcgcatgtcagacagggaagcaagttggtgttcatcatccacacaagaacgtcatgacgactgacaggccgcttgagctcctacacatggacctattcggcccgatagcttatataagcatcggcgggagtaagtactgtctagttattgtggatgattattctcgcttcacttgggtgttctttttgcaggaaaaatctcatacccaagaaaccttaaagagattcttgagacgggctcaaaatgagttcggcttaaggatcaaaaagattagaagcgattacgggacggagttcaagaactcacaaatcgaatgcttctttatgaggaggcatcagcatgag

SEQ ID NO: 37142 - DNA, 483 bp, Zea mays
  unsure (1)..(483): unsure at all n locations
ggtaaagattcttcatcccaacatgggctagtcagcgatgctatagccaacccatattagtcctagcaattaagcaagtatcgagttcagcttggttaaaatcaactaagtatagctgaccctctaatactcccttaaatgctactaaatcatcatttcttctaaagacagtaacacctatatccataaaaagacaattgtaacccattttgcataattgagaaacagaaatcaaattgtaatctaaagaatctacaagaaaaacattggaaatagaatggtcaggggatatagcaattttaccaagtcctttgaccatccacgaatgtcacaaccgggctntaaggaacaaagctgggtgcatctcagacatgcgctaagaagacaacatatataataacagagtgtatagagataaatgtcacaataacatcagagtatttattacatagncggaagtcttattacaaaatataagaataa

SEQ ID NO: 37143 - DNA, 310 bp, Zea mays
ttgagaccgacatctaccgctacacgacgacaagcatatacgactggagtctattctagctaacttcaagtaaaacttttcttccactcttcattgtatttaaaaacgaatgtgttttcttacgaatgtcgcttccgtacaaagaatgtcattgagtaaagctttgaagatgccacacgaccttgaagataaaaagcatgaacgtataattgaaggcttacaaagccaaattaaagatccagcagctgctcttgaaaagaaagattcaaacttcatacatggaaggttactggcgaaagctgagccaaaa

SEQ ID NO: 37144 - DNA, 367 bp, Zea mays
atatttctttggtggctaggagacagtataagaaatcatttttgtcggtaccatagtacaccaaggccctcttctgatattttagttcccgggcgtaatgtctagcctccgcgatttcttcttgagataaccttttttccgaagcatgtcaaataataaaggcaagatcttttgacatgtaacaccctagtaattcctagagttcttcccaaggcttactcaagaaccattatttcatgtgaatcaaattgagcacaagacaccaaaaacttgagaaataaagtccaactaattggttttgcctaaggctcatgcctaaatcatattatacattcaaaatgggaaacatgttaaaaccctagaacaa

SEQ ID NO: 37145 - DNA, 459 bp, Zea mays
  unsure (1)..(459): unsure at all n locations
actcagctaacttaagggactcatcaccatgctcatagagtttcttcttctcttctcgntagcctttacataaaaccactcgtttgtctagccagtaggccacttggtgcggtacccaatcacaggagccttcgtatcatttcaatatgcgaagttatagcatccgaagtttttgtgcagagcatctgctctcaccttggtctggtagtggagttcatggactgcataatccttcaacattggcactttnttccttgcttcggagagcccatatgtagacattgaatctgtttataacgtttggggtcaactgatgaagatatatctcanatctttttaacacttcaccaattattccgtacagcgcgaatcgaagcccgacacggaagaagctcttgaaaaccaccacctcatcatccttcagctctagaattatctcttcacctacgaaccttatca

SEQ ID NO: 37146 - DNA, 404 bp, Zea mays
ctataaaactcagcttctaagggagaacacgtgatagggttgactaacgtgcaattcgtaaaagatagaccttgtgcagcttgtcaagcatgttaacaagtgggaggagcacatcacagcaagaatgtgatgaccacttcaagacctctggagctgctgcatatggacctcttctgacccgtcgcctatctgagcataggaagaagtaagtatggtctagttattgttgatgacttttcccgcttcacttgggtgttctttttgcaggataagtctgaaacccaagggaccctcaagcgctttctcaggagagctcaaaatgagtttgagctcaaggtgaagaagataaagagcgacaacgggtccgaattcatgaatcttcaagtggaagaagttcttgagga

SEQ ID NO: 37147 - DNA, 407 bp, Zea mays
taagcactgcagctgcaacctaaccagggagaccttattctttattatacgaattgactcaagcctagctaccggtgcctaggcttcaccaaaatccaaaccttctacttatgaatatcccttggctacaagtcgggctttgatccttatcaccacaccatgctcattctgcttgttgcggaatacccactcggttcctacaacattttggctatgacatggaacatgatgccatacctcactcctcgtgaagttgttgagctactcttgcattagcaaaacccaatccatgtctcttagagcatactctaccctatatggctcaatagaagacacaaaagagtaatgttcaccaaaatgagcgaaatgagaaccagatgttaccccactatgaatatcaacgacga

SEQ ID NO: 37148 - DNA, 474 bp, Zea mays
  unsure (1)..(474): unsure at all n locations
ggctaggctgctntcaacatagtgtgcacctatattgtgtcttatgacttagctcaagagcatattgcttacaaagtatggccccttgtgagcgaatgagaaatgccgaaggaaaccgccgccggctccagccagggtggcctggtttatcttaagtatacttttcagttcacaaaccagtttgatgagccacatgatgattgggtggatgctatataagcaacaagtgatgagatacttggagcgtactcgaaggtagaagatgaagctatgacgggtgccttcggcgcttgcagcaagaaggggttgaatggagtgtttgatgtgattgggttctgttatccacactactgttatcccgcctataagcaacggaggtgttggggtatgcttcatagccgaagatcctgaagaaagatacaccttcagcggattctctcaaaagcaatgctgaagctatcacgtataaagctt

SEQ ID NO: 37149 - DNA, 472 bp, Zea mays
  unsure (1)..(472): unsure at all n locations
tttacggaccttgaaactaagctgagcagtaccggcttcgtctganacccttggaaactggtgatctgcatgtccttcagtttctgccatgacgtgattgttcctggccgaagagaggagtaccaggtttgtgcaacattcttgactgccatgacaaaggatttcgccatgactgcagtattgccaccatatgaagatatggtagcttcgtagctcatcagaaactgcttcggatctgagtgtccgtcgtacatggngagctggggtggcttgtaagacggnggccaaggtgtagcctgcaattctgctgacagaggagaagcatcatcaaaagcaaaatttccatgatggaaatcctcataccaatcatcctcgttgaagaagccctcttagtgaagctctctgtgttggggccttcggttttgctcatcttgagtaagatgacgtacttcttcagtggcttcgtcaatct

SEQ ID NO: 37150 - DNA, 85 bp, Zea mays
ctctgctaaatctccacccgcccagcacaaataaatggacaaggaaattgaggtccaacaaacaaagaaaaccccaataggggag

SEQ ID NO: 37151 - DNA, 481 bp, Zea mays
  unsure (1)..(481): unsure at all n locations
tctttccacctgccttctttgatgtcatggngctctttagtgtccatcttcccgatgaggcaatgcttataggacctgttcaatatggatggatgtacccaatagaaaggcgactaggcactttgaaaaattttgtaaggaacagggctaggccggaaggatcaattgctgaggcatatatggcaagtgataccttaacattttgttctangtacatgaaggatgttgacactagatttaaccaggatgatgatagtggtacagagatgccactgcctaatgacatgtctattnttaagcatggtgctactcttgttggagctactaagactgagtacattaatgatgctatcatgnaataagttagttggtatgtgctacataatgctgatgaagtacaggaatatttgaagtaangtagtttggtatgtgctacatanattatgttatatttattaaatttgaaaatattcttatgaat

SEQ ID NO: 37152 - DNA, 462 bp, Zea mays
  unsure (1)..(462): unsure at all n locations
agcttgttggtcagaactttggaaatgaatttgtttttcacattcaaaagacagataggcctaaaattcttcatgtcagccgcattatccatctttggtaataaagtgaccatcccgtaattcggcctttctatcttaagatttccaacataaaaatcattgaataaatgcaagatatccaattgaatcgtatcccacaaattttgaaagaattcagcagcaaaaccatcgggaccaggagcactattatgcttcatctcgaaaatcacttttttaatctcatcaatagaaaaaggagccgtaaaaaaatgacctttcattgtccgacaactgatgcatattgaggttatacatattaatactagataacacagaagggccaaatagatatttataataggaagaagcaattntattgataccttcagcatcattcacagagacaccttcatgaattaagaa

SEQ ID NO: 37153 - DNA, 458 bp, Zea mays
  unsure (1)..(458): unsure at all n locations
tctgggattcgagttctacaccctcgcgcacttcatccttcttcttattatngtccacatcagcggcgacaaacacaaaatcatggtcctcatcctcaataccaagtgcctccctgctgtgcggcatctcctccagggaagagaagggcgccgccgagttagcacgatcgacgtctgtggaggagtgcaaggctatatcgcgctctatcttgtcgagctcggccagaataatctcctggcgaagtcggtccttctggagcagcgacagcagcgcgtccctgatcaccaacatcgacgagtcttctgcaagagcctcatgcccncgaggatcggggaaccggcggtatcgaccgccttcgtcgccgcacgaggcggtttctcggtctcggccggcgatcaactcgatcgatttggcaatggggtcctctggagagcaatgcgccattgcnngcctcctg

SEQ ID NO: 37154 - DNA, 450 bp, Zea mays
  unsure (1)..(450): unsure at all n locations
ttaagtcacctgcggcatgcaagcttgtccaaaagatgagttctcattgccaatgatttattctctagtagatgcagcagctttgtcagagctcatgagtctactagattgttactcatgctaccaccaaatctggatgaagaaggaagatgagcctaaaactagcttcataacccccagtggcacatattgctatctttggatgcctgaggggctcaaaaatgctggaggaagcttcagcagaatgacagacagagtcctccattctcaaataggcaggaatgtgttgacttgtgttgatgatatcatagctaagagcacaaagcaagaaaatcacattgctgatttgcaagagacatttgctaatttcangcaagctggtttgaaattaaatccacaaaaatgtgttttgggggtaaagaagggcaagttccttggctgtctagtatc

SEQ ID NO: 37155 - DNA, 428 bp, Zea mays
  unsure (1)..(428): unsure at all n locations
aagctccttttgagcctctcattttcttctttgagcctttgatatgaatcatcatttggtcctgccaattctatctcaaaggaagaattgcttggtgacaaacaaccagcattagcacatgggaatatagtatcaatttgaatacatgtgcatgagtganggtgttgggaatttaagttctctatcacaacctcatgagcaatggttaatatgatatgattatccataagattntcatgagaacataaaagcatatcatatttatccngaaaagcctagatttcaacctttagcttttctacttggtccttgagcanagtattcctatttactaatngagcgatacaatgttgaagcgtatcttgctcaatngaaatagtttcataccttttgaccanatcaacatgagagcactttagctcctcatg

SEQ ID NO: 37156 - DNA, 278 bp, Zea mays
  unsure (1)..(278): unsure at all n locations
aagattgttcatcaagcggattggtaaacatatctgctaattgatctttagtattaatgttagaaatctcgatatccccctttggttggtgatccctaagaaaatgataccgaatggctctgagcttattgcggctatgctccaccggattgttcgtcattttaattgcactctcaatatcaccatatcacagggactttgggcaatttgttaccgtantcccgcagggtttgtctcattcacagtaattgcgcgcaacactggcctgcggtaatgta

SEQ ID NO: 37157 - DNA, 293 bp, Zea mays
  unsure (1)..(293): unsure at all n locations
tcaccgngccctcgcgagcacaacacacccagcgcctgtccttattatatccggcagcctcaccgacgataccaccgccgcgggcgcccgccacctcgttgtggactgggcattccaagcgccctccgaaccaaatggccctaccactgtgatcccctacccccgcccgtgccttgccaccactccattgtcacagaatctggaccccggcggagagccgccgcagacctcaccggcggacgggctccgaccggtttcccccctgtcaccacctcctagcgtcgatagccttc

SEQ ID NO: 37158 - DNA, 145 bp, Zea mays
aaaacgagcgcgcaggaaaaaaagggggcttttttgtatgcgccaacacccggcaaagcccagcaccgcacgcgaagtaataaacctgggaaatgagatccaaccacaagaaacccaaaaaggggggctactggcggagaaaaga

SEQ ID NO: 37159 - DNA, 460 bp, Zea mays
agcttaagccacaaaactgtgattaagcgttatcacatttaatgccaagtggctagagagaagatcttgcacaatatgataaccacaaggagttcaacacagaaaagacacagtgatttatcccgtggttcggccaagtacaaaacttgcctactccacgttgtggcgtcccaacggacgagagttgcactcaactcctctcaagtgatccaatgatcaacttgaataccacagtggtatgcttttcctttcaatttcccgtttgcgaggaatctccacaacttggagtctctcgcccttacacttgagattcacaaagaagcacggagtaagggagggaagcaacacacacaaatccacagcgaaatgcgcacacacacggccaagaatcgagctcaaagactatctcacagtttctcacaagaacggagctcgaatcacttagaataacaaacggatg

SEQ ID NO: 37160 - DNA, 412 bp, Zea mays
  unsure (1)..(412): unsure at all n locations
ngacatctcgaaagcctctgactctgttcggtgggactattattctctctcttggctcatcttggcttccctcctaaatggcgagattgggtggcatctttactggctacctgcagttctcaagtgcttctaaatggaattcctggtcaatcaatcactcatggtaggggcctaaggcaaggagaccccctctcgccatttttattcgtgctcgccattgatcccctgcagcgcctcctccacttggccaccgaggctggcattctgtctagagttgccaaggctagaacacgtctccggatcgctatgtatgcggatgatgccatcatctttgtcaaacctganaagagagagctggattccttcgcaaccttgctacatcaattctgggaagcgactggtttgcgtacca

SEQ ID NO: 37161 - DNA, 440 bp, Zea mays
agcttgagcctcatattcttggatagatctcttactcacatttatttctaaaacacatgacaaacatatgtgtataagatcaagccatgtcaacagagtaacagaccaaatgtacatagtacatattgaactgaacatgagacttcaggttgcttattttcacaatgaactacaaagtttgacaaacatcattactaaattgagtgacaaagaaattacttgctgaaatataggtaacgaagatctatcgtatgcttaacagttctgtggagaatttatttaaaacaatgctgaccatttaaaaggataaaacacataattgatttttcaagtgacaccactacaaatttctatattatgtttttactagtaaaaaactacggaagaaggatgtacaatgtgtgcaattcatgtgtttgcatgcaagaatttgcatgtca

SEQ ID NO: 37162 - DNA, 465 bp, Zea mays
  unsure (1)..(465): unsure at all n locations
nngctgacttgngatggcaaaacatgtaagttatctgtatgttttcttattcctatctgnagaaagaaactcaaatgtcaacaatagtattttatcttcaccgaggaaatgcagcgcgttcttttgtacctgcacctctactaataacttcttgtgctagttcaacctcttctgtaagagttaaccacttcattttggctgtcggtgtccctgttagcatatattntgcttggattttcattgtcagccatgcttttcactcggcaatagttctgaagtcttagatatggctccaacttagctngagggttttataccttgactggttgttctccccttaaaggctcaaaatatgattctcatatatacantaatttaacctgggcttctttctctagaggcctcacatctggcaccgtaactaggctttangggccgtgtntattttgattactgatgtacctc

SEQ ID NO: 37163 - DNA, 435 bp, Zea mays
cagcttgtgaagattcttcattccgacatgatcttttctgggcgccagagccaaccctaggtagacttagcaatcaagcaagtgtggagttcaactctatcaaaatctaccacgaatagctgaccctcttacactcccttaaaagctattgaatcatgactttttctaaagacagtaacacctatatcagtaagaagacagttgtagcccatttgacacaattgggatacggaaagcaaattgtaatctaaagaatctacgagaaaaacactagaaatggaatggtcaggggatatagcaattttacccaaacctttgaccaaaccttggtttccatccccgaatgtaatcgctcggtggggatctttgtttttctcataggaggagaacaaccttttctcccatgcatatggtttgggacccgctgtcgagtat

SEQ ID NO: 37164 - DNA, 358 bp, Zea mays
ccacggcgaaggcgcctacgagcccgacttgtgttttccggtacacacccagagagcgcatgagcggagcccgtggcggttcacggtccggcttatgatcagcatgatgaccaccatagactctcccaacgccgtggtgttgaatttaaataaccccatgaagcggcccgggagcactgggttcccggcgaccgccaggtggtcgccgtcgtcctggctgttggacaagaacccgcccggcgtgctcagcccgggctggtacgtcatcgtcgtgacgagggtcgcgaagaatagcatgtacttgcgcgagcgctccacgggcccaggctcttcattcgggtgtgcctgcgcctgcgcc

SEQ ID NO: 37165 - DNA, 467 bp, Zea mays
gatccttaagcaccgcggctgcagcttgacacatagctggtgtgaataccttttatcatatctctcttatatgctatgactaatgtgttttcaagtcgatttccaaccaagtcatacgtatattgacagggaattggagtcctcggcgaaaacaaaggcttccactccgtaactcatacttcgccatcacaccgagcaactctctcgtctttgggggagaaatgagcatcaaggaaaaagacttcatccttgggggagagagtaatagctcaaacgcaacaggacttcgtctttggtataatcttaactcacttatttatgaccaaaggggaagattgcacttcaagggctctaatgattccgttttggcgatttatgccaaaaagggggagaaatgagcccaaagcaataggaccgcaccaccaccaccaaattcaaaaacttagtgctttccgaaagtcttatca

SEQ ID NO: 37166 - DNA, 481 bp, Zea mays
  unsure (1)..(481): unsure at all n locations
tgacattgtctcccctgtgaaagccaatgccatccttaatattattgcgtctcccactataaagcatgctacgagcaaatttaaatntctcattntctagttcatgctcggcaattatagcatctagtttagctatatgattatnttcgtgtttaatcatatcaaggtgatcatgaatagcatcaatattaatatctctacctctagtataaatagaaacatgctcaacggtagatgtagaggtttgcaatcatttaattcaacaatcttagcatgttaaatagcattctcatctctaagattggaaacatctaattccttaaccttagcaattaatttatcattctcaaacttaaggctagcaagagagtcattcaacatgtcaatcttagcaattaaactagcattatcatttctatgattaacaattgaatcatcacaaacatttgatttctcaaccttagcaataatttggcatttc

SEQ ID NO: 37167 - DNA, 437 bp, Zea mays
cctgcggcatgctagcttgtcattgaccaagtcatgataatctcttcctgtcgtgaccggaagatggaggcctactgcgactaagtccgacgcctggaagacaagttctacgggctggagctcaaccacatcgctcgacggtacaacgagactgtggatgagctggctaaaatagcctcggggcggacaatggtaccccctgacgtcttctccagagacatacatcaaccctctgtcaagaccgacgacatgcccgagcccgaggaggcctcgaccgccgatggtgaagcactgcgcgtctagggagagcgaaatggggtcacgcctaacccaaactggcaggacacgtacctggaatatctcctccgaggagagctacccctcgaccaggccgaagctctgcgactggcgcggcgcgccaagtcgttcgtcttact

SEQ ID NO: 37168 - DNA, 377 bp, Zea mays
gagcccccagcatccaatcagcgatgaagtctgctaacgcctgagactgtattgaagatatatgcacataatcaatggcgaattcattaagctctgcagcccatatcccaattctttcagtagcctctctatttctcatgatgtcctttagaggttgtgaccaaagaacaattatgtggtatgcttgaaaataatgccgaagctttctggaggccattaacacagcatataatacctcttccaattctgtgtaattcttctttgatggacttaaaactttagagaccaaataaattggagctctgcttttaacctgaccatctaacttctcctgtaccaatgccgcactcactgcagaatgtgaagctggcacatat

SEQ ID NO: 37169 - DNA, 411 bp, Zea mays
  unsure (1)..(411): unsure at all n locations
tatcaagaatcaatgactctatgtgcagaaatgcttactatttgtggatccttaaaaatctagttntattatcaggttaagtcattacctgtatctagagttctttctatcctagttcaggcacttagcctatacaagccatcttttatcaccccttgtgttcactggattgctacgtgtaagtcagtgaccaagtcttcatgtccgagaaataacggtgatccgaatcgattaatacccagctggggatctccaaccacacgacatatgtagcacttaacccttacatatgtcaactcgccacctgatttctcaagaccagaatgggttcacgccaaccgagagcacagatacaccaccgtccagcctcttgccatgaaggatacacactactctcgccatctctccact

SEQ ID NO: 37170 - DNA, 465 bp, Zea mays
agcttgccttcgcctcagtatatcacccgcagttctctgtgttgtggaacgcgccaatggaaaaattttcacagctgtcaagaagatgctcctcgacgaaaaaaggctggtgggctgatttgttacctgaagcggtctgcgcgctaaacacgactgagtgcagggcgactgggttcaccccttttccgccttctatatggatcggaggccatgaccccacaagaaataaaacatgggtccccgcgaacagtttcgtcagctgtcctcgacgtggacgaacccacttcgaaggatcttatcgatggagacaacatcttcgctctacaggctctaaataaataccatgcccagacaaaagcatggcgcgaccacgcagtcatcccgagggaattcagcgaaggggacctcgtactcgtccgaacagctcggacagagtccaggggcaagctggagcccaagtgggag

SEQ ID NO: 37171 - DNA, 484 bp, Zea mays
  unsure (1)..(484): unsure at all n locations
actaagcttctaagggagaacacgtgataggtctaaccaatgttcatttctaaaaagatagaccttgtgcagcttgtcaagcagggaaacaggtgggaagctctcatcacaccaaaaatgtgatgacaacatcaagacccctggagctgctacatatggacctcttcggacccgtcgcctatctgagcataggaggaagtaagtatggtctagttatcgttgatgacttttcccgcttcacttgggtgttctttttgcaggataagtctgaaactcaagggaccctcaagcgcttcctcaggagagctcaaaatgagtttgagctcaaggtgaagaagataaggagtgacaacgggtccgagttcaagaaccttcaagtggaggagttccttgaggaggaaggaatcaagcacgagttctntcgctcctacacaccacagcaaaatggtgtggtagagaggaagaacatgacgctaatcgatat

SEQ ID NO: 37172 - DNA, 377 bp, Zea mays
atctaagtacctaatcaatggtgaattcattaagctctgtggcccattttctgacccttcctgtagcttctccgttcctcattatgtcctttaagtggtgcgagaaggcactattatgtgatatgcttggaagtaatgtcgagctttctggaggccatcaatacaccatacattaccttctccaattctgtgtaatttttctttgatgggctgcgctaatgttggttacttggtctcaaacactatgaattaagaacaaagcaacacaattgttaatggttaaagaccctcattcttcggaacattattttcctctggatataattatcttcagacgaaggtcatgaaagacatacccttatcatttcaacatataa

SEQ ID NO: 37173 - DNA, 451 bp, Zea mays
  unsure (1)..(451): unsure at all n locations
gatatcagccgctaccgacgacagcatatcgcttgtttttattctattctaagttcaaggtgattcttttgtcttcggctattcattgttataacaccgaaggtgttttcttacaaaggttgctttgcacagagtatgctattaagtaaagccttgaggatgcaacaggacctctaaaataaaaaacatgagattataaatgcttatagagcaaaataagagatcacgaagctgcccttgagaagaaggagtttgaacttcaatcaatggagggcttactggacgaagcccaagctaaaattgccagattgaatagtgaactcctcaccaantcacaaagcttccaactagaaaaacagaaatatgatgctaagcttgaagctgaagtcgaacaaagttcacatttgcagaaatcattgatagagcttcaagataaatgttagacttctgc

SEQ ID NO: 37174 - DNA, 462 bp, Zea mays
  unsure (1)..(462): unsure at all n locations
aagctggcacacatagctctnttgaatacctctgatcatatctcttttatatgctatgactaacgcngcntcaagcgtatttcaaaccacgtcatacgtatatcgaaagggaattggagtcttcggcgaagacaaaggcgtccactccgtaactcatacttcgccatcactccgagcaactctctcgtctttgggggagaaatgagcatcaaggaaaaggacttcatccttgggggagagagtaaaagctcaaacgcaaaaggaacttcgtctttggtataatcttaactcacctatttatgaccaaaggggaagattgcacttcaagggctctaatgattccgtctttggcgatacatgccaaaaatggggagaaatgatgcccaagcaaaaggaccgcaccaccaccaatttcaaaaacttagtggtttcaaagaagtatctatcatttggtatcctatt

SEQ ID NO: 37175 - DNA, 204 bp, Zea mays
  unsure (1)..(204): unsure at all n locations
agcnttgggcacgcatcagacggtcagaacatcttatcacctctccgacagatggtccgaccgaaaggaccaatcaaactcttgaagacatgatgagagcctgtgcgtagccagatcactcccgatgggataaaagattgccttatgccgagctttcctataacaacagttccaggccaagttgcagaagtcaccaattcaggc

SEQ ID NO: 37176 - DNA, 336 bp, Zea mays
  unsure (1)..(336): unsure at all n locations
catgtgctgagcgacgatgccttattcagtccatgctagnggtagcaattaagcatgcatctagaccgacctcctcttttgcaaaatcaactaaataaagattgccgtctagtacacccttaaatgctagtgaaccatcacttcttctaaagacagacacatctacatttgtgaataaacagntatatcccatattacacagttgactcacagacaacaagttatatccaagcgactcaactaagaacacattagaaatagagtggtcggatgaaatagcaatttttcctaacccttcaccttgccttgttcccatcaccgaatatgattgaatct

SEQ ID NO: 37177 - DNA, 285 bp, Zea mays
gagcggcgcaaagcataaaggacggcgaatgccatctagacctacaaacgagagctatgctgcactcataataaacattcagtccgtgttgctgcgcgttcaaacacgctcatgcattcttggcgtggcacaccaaaagtcaacactagcacgcacccttgcaataccctcaaccataacactcactccatcgtcgactataagacatatgatgtgtgcagcacaacgcatgtgtaacaatttgccatctagcatgagagaggaaaggggcaacttatcttgcat

SEQ ID NO: 37178 - DNA, 419 bp, Zea mays
caacactaggggctgcattgcagccacaggacatctatttttatacactacgcgaagctagaagcccaaagaggaaggctaagtccaacccctcacgaggaggaatgagaccaagaaatcagggatcttgaagcaatccatcagcagggccaaaggaagaaggagaagatgctttgtcttgctgatctttaaaagaagatcgacgaggccgctgaggaaatgcgtcatctcacccaagatgaccaggaccgaagacctcaacacagaaagcttcatcaggacaattcctacgatgatgacgaatggtatcgaagattttcatacaagccaccccaactccctatgtatgatgggcattcagacccgaagcagtttctaatgagctacgaagcaaccatatctttatatgggggcaacac

SEQ ID NO: 37179 - DNA, 452 bp, Zea mays
agcttgccaagccctcggacccgaccggactttacttgatgcccgagatcaacctcaccggacttcggtcttccgccgccgcgcgtggaccgagctatccagtgagtctccggccgattcctttcgctcatgtcttctctggcatcccgtggacctccctgacctatttgattgaactatctcgccgtgaccaggccggtctcctcgccgccgacgagcatccccgcctgcgcgcgtggaccgaccgactctggccacctccgacggtgttccgcacaccgttgtgatccccgcgacctccccttcaccctcgaccacttcaccggaacagtctcgccgccggtaagcccctccgcccttttcttcgccgcggctactgtttaaggtagaagaaggacctcgggttaggttctgtagaacccgaggggtttttcgtaatgtcagcgactcat

SEQ ID NO: 37180 - DNA, 434 bp, Zea mays
  unsure (1)..(434): unsure at all n locations
tctaaagggagagncacatttaggaataacaaatgtttattttgagaaagacaggaattgtagcgcatgccaagcacggaaccaagttggtactcatcatccacacaagaacatcatgacgactgataggccactcgagctcctacacatggatctattcggcccgattgcttacataagcatcggcgggagtaagtactgtctagttattgtggatgattattctcgcttcacttgggtattctttttgcaggaaaaatctcatacccaagagaccttatagggattcttgagacgggctcaaaatgagttcagcttaaggatcaaaaagattagaagcgacaacgggacggagttcaagaactctcaaatngaaggcttccttgaggaggagggcatcaagcatgagtttctcttctcctacancccacaac

SEQ ID NO: 37181 - DNA, 299 bp, Zea mays
  unsure (1)..(299): unsure at all n locations
agcttcaggtaaaatgggatggtctagttnttgtcataactctgaatcggccttggtcatataggctaaaggacatggaaggaaacaaaataccaaagtcatgatgatgataagcttcgtagatactatttataacattaagtgtaattttccattttctttatattggtttatttcaaatcaacaccatttttatgggaccgcctttgcaagtattgtaactcttgccccaaaatataaggatgtttccccttcaaattgataaaagcgctattgtgttgtcatttttgagtgcaaaa

SEQ ID NO: 37182 - DNA, 417 bp, Zea mays
ggaggctgtgtatagattaccgccctcttaatgtggttactatcatgaacaagtatcctttgcctcgtattgatgttctttttgaccagttggtcggggccaaggtattttccaagatagaccttcgctctggctaccatcagatcaagatacgagcgagtgatattccgaagacggcattctcaaccagatatgggctatatgaattcttggtgatgtcattcgggctgacaaatgcaccagcatatttcatgtatctgatgaattctgttctcatgccggaattggacaagttcgtagtgggtttcattgatgatattttggtgtactcaaagaacgaagaagaacatgccggggcattgcatgtagtgcttcaacgtctgcgagagcaccaccttttatgccagttatccaaat

SEQ ID NO: 37183 - DNA, 453 bp, Zea mays
  unsure (1)..(453): unsure at all n locations
agcttaagcgtgtagatcactctctcaatgaatcctaactgaactgtttgtatgggacatatctgtctaactttttcacgtgtttttcataaacaaatataggttttgcactttcctctcacaccacataaacattttaattaatataatagctgtcctaattacttaaaaattgtaccataacacaaatgagttatttaataggattaaagctattntatagaggagttggaagaagaaatagattggtgcaatgcataaatccaaccaaagaggaaagattattacagcaatagtcatttgaatgaaataccatagtattacaaccactttccttttaaacaaaaaaatcatcatcatttgagtcgcgtgaagagtccacaggtgctacatatccatcatcaatgtacgtgtcgtcttcttcctcctcatctgctaaccaatatcatgtga

SEQ ID NO: 37184 - DNA, 406 bp, Zea mays
  unsure (1)..(406): unsure at all n locations
tcagctcttcttggttganaccttctgacaggtagagatatttcgtattcagttctgttattatagcttcggctttcgctagtaaaccttcagttgtttggagctcgaactcttttttctcaaaagcaggtgtttgatcttttattctgttttctaagttttcaattataacctcgtgcttcttgtcttgtaaatcattgtgcatcctcaaagctttgctcaatagcatactctgtacacgaataaccttcgttagaaaacattctttatgataataaaaagttagagagagattgtttaccttgaaattggaataaaacaaactaccgacgatgtgctgtcgtccgtagcggcttatatcggcttcgagcttcgggagatctatactctttgatagagtaccgat

SEQ ID NO: 37185 - DNA, 326 bp, Zea mays
agcttataacaagagaatagaggcaagagctcttccatatgtaataatagaaggggagctgtacaagcatggggtctgctctccgttactcaaatgtttatccagagctgaaggtatagaattgatgaaggaaatacatgcaggcctgtgtggatctcacattggatctaggcctttgctgggaaaagtttttcgccaaggattttattggccaaaaagcagcttcggatgcagcggaattagtccaaaagtgcgaaggttgttagaaatgtgcaagagataaaaaacaaccttcgtctctaactcaggtaatacaacccacttgg

SEQ ID NO: 37186 - DNA, 427 bp, Zea mays
  unsure (1)..(427): unsure at all n locations
ntatagataatagcttcagcgcttgcttctgagaagacctttctttgtgttctttntaggatcttcggctacaaagcatacccccaacagacggtggtgaagtcgcgtcggggacggactgcaccgttatcgcaggtacgaggctaacgcccagcaagtccttcgtgagggtgctggcgtcatcagtccgcttggggttggcccgttgcggagaggcgacatccgtcgttgcctcaggtgcgaggacaacacctaacatgtcccccgcaggggtgccggtgtcgtcgactcgctctggtttgatagccgatgaggtgccgcctcctgcctggccacggttgccccgtctccgtttcctccggcgaggagggtggcagggtaaacccgggtattcctcttctatcacggngagatgtcgtcgtcgagt

SEQ ID NO: 37187 - DNA, 425 bp, Zea mays
  unsure (1)..(425): unsure at all n locations
taagctgcacacatagcttatntgaatttcttttatcatatctctcttatatgctatgactaatgtgttttcaagtcgatttcaaaccaagtcatatgtatattgaaagggaattggagtcctctgcgaagacaaaggctttcactccgtaactcatacttcgccatcacaccgagcaactctctcgtctttgggggagaaatgagcatcaaggaaaaagacttcatccttgggggagagagtaatagctcaaacgcaacaggacttcgtctttggtataatcttaactcacttatttatgaccaaaggggaagattgcacttcaagggctctaatgattccgttttggcgatttatgccaaanagggggagaaatgagcccaaagcaaaaggaccgcaccaccaccaccaaattcaaaaaactt

SEQ ID NO: 37188 - DNA, 427 bp, Zea mays
tgacattgtctctctgttgagagccaatgccattcttaatatcagggcggctcccactataaagcatgctacgagcaaatttaaatttctcattttctagatcatgctcggcaattttagcatctaggttaactatatgaatatattgttgtttaatcatcgcaaggtgatcatgaatagcatcaatattaatatctctacatctaggataaatagaaacatgctcaacggtagatgtagaggtttgcaatcatttaattcaacaatcttagcatggtaaatagcattctcatctctaagattggaaacatctaattccttagccttagcaactaatatatcattctcaaacttaaagctagcaagagattcattctacatgtcaatcttagcaattaaactatccttatcattttaagaataacaa

SEQ ID NO: 37189 - DNA, 354 bp, Zea mays
gcttctaaagggagaacacgtgatatgtcttactaatgttcaattcgaaaaagatagaccttgtgcagcttgtcaagcagggaaacaggtgggaggctctcatcacaccaaaaatgtgatgacgacatcaagacccttggagatgctgcatatggacctttttggacccgtcgcctatctgagcataggaggaagtaaagatggtttaattgttgttgatgacttttcccgcttcacttgggtggtctttttgcaggaaaagttcgaaacccaagggaccctcaaacgccttctcaggagagctcaaaatgagtttgagcctcaagtgaagaagataatgagcgacaacggatc

SEQ ID NO: 37190 - DNA, 424 bp, Zea mays
  unsure (1)..(424): unsure at all n locations
tctaaagggagaacacattntaggactaaccaatgttcactttgagaaagacaggatttgtagcgcatgtcaagcagggaagcaagttggcactcatcatccacacaagaacataatgacgactgacaggccactggagctcctacacatggatctattcggcccgatcgcttacataagcatcggcgggagtaagtactgtctagttattgtggatgattattctcgcttcacttgggtattctttttacaggaaaaatctcaaacccaagagaccttaaagggattcttgagacgagctcaaaatgagttcggcttaaggatcaagaaaataagaagcgacaatggaacagagttcaagaactctcatattgaaagcttccttgaggacganggcatcaagcatgagttctcttctcctaca

SEQ ID NO: 37191 - DNA, 268 bp, Zea mays
  unsure (1)..(268): unsure at all n locations
tacttccagatcatggctcgctcatgtacttgcagtgcaacaaggcagacatctcttatgctgtgagtaagctaagtcggtttgtgtcgaaaccacgagatgatcactggcgtgctcttgagagagtgttgcggtatttgaaaggtactatgacatacggtattcaattataccnganaccccaaaagtgctgtgaaggctattgtgatgccaactggatttctgatgctgatgagctttatgctacaagcggatattgttgttctgt

SEQ ID NO: 37192 - DNA, 428 bp, Zea mays
  unsure (1)..(428): unsure at all n locations
taaagaagcaagggatgcaattgtcatgcaatcaactcgtactatcttgctatgagaaaatatcactcctagaatgtntaggattgaagttttgctataggggattcagtgctgtgaaatattcaaagcatgaaagacaaacacaagttttcagccctctagaaggtcccctacatcatcttagaagtgctctggtagagagcgtagactccaacaggaacacgatactctctntactaatccctggaatgttgagcaatggcgttgtttttacgtatcatgaccagagatgtttcctctcgaccttttaatttcatgttctagaagagntcttaatttctattgattactaatcacttcttgaatattttttcttgaaggataaaacatgggtaagcccctcaactctgtcggtctgtcatcgctct

SEQ ID NO: 37193 - DNA, 385 bp, Zea mays
gctccggtctatcgtcagccaccgacgaattgaggctcattcggattagattgaagctatcatgaagatggaagctcctcgatcacaaaagaaggttcaacgacttactggatgtatggcagctctgagcacaattatattcaggctgggagaaaaaggtttgccattttacaagctactcaagaagggggataagtttcaatggaccttagaaacacaagaagctctagatgcactgaaaaaattctcgaccacaccaccagtactgaaaccaccccggcgagctacgtcaacttaaccagctgaagaattgctactgtatatctcttgcacgactcacgtggtaagcaccgccgttgtagtctagcgagtataataaagacat

SEQ ID NO: 37194 - DNA, 372 bp, Zea mays
  unsure (1)..(372): unsure at all n locations
tacaagttggccaacgatcagggcgaggtctacaacaacgcttggaacatccgacagctacgtcccttttacccttaagatgtattcaagtcggtcatatacctcgctttctataccatacaaaataaagtctaaccgccaacgaaggggcagccatgcctcgacaaagcccgacccttccctcggggctagaaagagggaacccnctctgcgtcaaaattttcctcggaaaaagtctcttgccagaacatctatcgcgcttctcgactgcttcgatagcggggtcctgaaaacgacngagtacacctaagcggcaaggccgaacgagccgagggactcctacgcctccaggatatggatacctcactcatc

SEQ ID NO: 37195 - DNA, 468 bp, Zea mays
cgactgcagcatgccagcttctctgccaatctgaacagtgtgaacattatatgcatgatcttaatgcacaacttgaagccgaagtccaacaaaattcagatttgaaaaaactattggcgggccttcaagacaaatgtttggatattagcaacaaatgtattcaacgactgagaaaaattttccactcagttggagctagcagtgagaaattcaccccatcagctgaggatttaccaaagaccttcgaacatattgagggtgaaattgatgagcttgacgaaattatagccgggcacggtgacttctgcgcctgggtagcttctcggggcactgctgcagctttcctaaaagctggctgcgatcatggaaaaattgtcaataagcccaatttcactttatcaccatcaattctagatgaaattctgatctcgcccgaagcattttaatagatttgtaaaagatatggac

SEQ ID NO: 37196 - DNA, 271 bp, Zea mays
  unsure (1)..(271): unsure at all n locations
gacagacatatcccatattgcataattgactaacagataacaaattatatccaagagactctactaaaaacacattagagatagagcgctcattacaaaatgcaattttacctaacccctttaccttgccttgagtcccatcaccgaatataaaagaaacgtgggaatccttattcttgacgtaggaggagaacatcttcttctcccccggcatatgngttgcgcatccgctgtcgataatccagctcgaacccccggatgcataaacctg

SEQ ID NO: 37197 - DNA, 61 bp, Zea mays
  unsure (1)..(61): unsure at all n locations
aaaaaaaacnagaaanaaaggccccaggcagggaagagagagattactaagaggacgacca

SEQ ID NO: 37198 - DNA, 454 bp, Zea mays
agcttatgttacgtcggttgagatggctttgttatatccaacgaagacctgaagaggcaccagtgcatatcggaataattaggcgtcccgagaatgtgaagagaggtataggtcgaccaaccttgacatggacagaggctgtgaagagggacctgaaggagtggaatattgattaagagctcgccgtggatatgaaagggtggaagtgtgcaattcacgtgccaaaaccctgatttgtagtttcagctttcctccttagtcgtttgaccttttcttgtgcccctttaaatcttgctggctcttgtgggttttatctctttttatgtgtttccccgcttcgtcgttttacggttctactttgactttgtctcccttttcttttctttggaggttgagctctgaaggtttcatatggggtgtcatctctagcctacctccacgtgctttggacaaa

SEQ ID NO: 37199 - DNA, 344 bp, Zea mays
tacctagacacagtccgaaggatcgaagctttcttctattgattttctggtaagaatatccctcgagggcaaaatgaacatgctgatttgttagccaggtctgcagcacaggggctgccgctaccttcggttgtattcttcgaaacaataaaggcaccttcagtggagttacttgaaagagcagttcttactatttcttctgtgtacagtgaagattggagaactgaaataatttcttaccttcagggcaacttcctatcagatgacgaagcttataataaaagaatagaggcaagagctcgtccgtatatcattatagaaggggagttatacaagcatggagt

SEQ ID NO: 37200 - DNA, 441 bp, Zea mays
  unsure (1)..(441): unsure at all n locations
agctntgagagcttataaggaagcacatgactatagctgtcctatagctcctggaaatcttgggtcggaggtcatcacattaaggaacgaagctttngaaaaagaaaagatattgacttccttagtggacaagctgaagacttgcgagaccaagcttattgctcaagacgaagcccataaagctgaagtcaaagatttaaagaaaaaacttgcagagatgaatgaaaatttcgaagttgtcgaggctaaacaagaaataagtgaaatggaaagatccacagtgcaaaagaatgttgaagagcttcaggatgccaaagaaagatgctacaaaacatctatatgatgcacgaagaaactgagagatagctttgctaaggtgggagcatactcttcggaacacaagcttattcatggtgatcccggaagagttatccaatggat

SEQ ID NO: 37201 - DNA, 359 bp, Zea mays
  unsure (1)..(359): unsure at all n locations
ngngaagatacttcatcccaacatgagctagtcggtgatgctctagtcaacccatattagtcttagcaagtaagcaagtatcgagctcagctctattaaaatcaactaagtatagctgaccctctaatactaccttagatgttactgaatcatcacttcttctaaagactgtaacacctaaatccgtaaaaagatagttgtagcccattttacataattgagaaacagaaagtaagttgtaatctcaagaatctacaagaaaaacattggaaatagaatggtcaggtgatatagcacatttatcaagtactttgaccaaaccttgaattcccgaatgtgataactctttggggatcttc

SEQ ID NO: 37202 - DNA, 323 bp, Zea mays
agcttctacagcgtctaacgatgtccttgaatcccttcccgaagctcaagtgacgtcaacggcacaaggtgccgacgacggatctctcactttccgtgggcttggcactggcggcgacagtttgttctatgggattaagctcgcaagagagggtagtagggaaagaacgcccatttatctctcggggtcccaattcggagagaagagaaaggtcgcccacgacccgcgcggcgacttctgcgcccgtcgttgcgaaagagacagaagtgcgctgacgtgcgggacccaacagtgagcacggcacgagcgtggggtttaatcac

SEQ ID NO: 37203 - DNA, 473 bp, Zea mays
ccttaaaactcagctttgcgtctaaggtacctggcctttgcatcgtggaggacttctctgacgtagtagactggcttctagatgtttcagacccctgcgggtggtcccgagtcctcaaacttctggccttccgtcaacatcgtggtggtcggaccaccaccttctcctaggggaactttctgactcccctggagttgttgtgccgtcctttcggctaccagcaccatgctcaccgcctctgtagccgctgcaatgtataagtacaatggctcccctggctctagagctaccagtattggtagggacacaaggtgctgcttcaactcttgaaaggctcgttctgcctcttgggtccaagagaatggctcggacttctgcaatagcttgaagaagggtcgcgccctctcagccagtcttaagatgaagcggctaagagcagctagtgatcccgaagcttctggacgccttgatgt

SEQ ID NO: 37204 - DNA, 231 bp, Zea mays
gcgcgttacacactgacggaaccctgggtaccaataatcgctgcacaatccctttcgcagctggctaaaaaagagccgcccgaccctccaaagtgccacgaggcaagggccgagcgtttctccaccactggcgaatcacacgctagggcctcatacactgtctgagcgaaggaacagccaaccgcaaccgtaccaacatgtgcgacaaaaagcggaagggcagcacgctac

SEQ ID NO: 37205 - DNA, 379 bp, Zea mays
  unsure (1)..(379): unsure at all n locations
agcttctacgccttttatttcggtggtatcttcttncatttnccgccgaaagctctgcattccctttggaacgacttttgagcagaaaacttacgctgcgtttccttaagaacgacttttgttgcttctacaaaaacttgcactgcatgccttaaaacaacttcttgttgcttcgtcaagacctttagaacttcgccgatatttgaagaaggtatattacattatgataatgacgaagctattacaatcaattgaacacaacacacgaactaagttgtcagtgattgctctatattgaaaaggtcaataacaaccaacgtgacatctatttcataggtaggatatatcttagtatatgtgctctgattctggcacaata

SEQ ID NO: 37206 - DNA, 367 bp, Zea mays
  unsure (1)..(367): unsure at all n locations
actcagctcttggaaaacaggccaagcgcggaccgttcggtcctttgttgcggaccgtccgcgacatcggaatatccctcggacagaaccaatgcaaaaacacaagtttccactacagaccgtccggaggaaaagcaaagaccgtccgagccctcgcgcggaccgtccggcctcaggcgcggacctgtcgatcggtaagaaaccgaaatacccgaaggtaacgggttcggagaaatgaattatatagggcctcgcggaccgtccggtgtgcacgaccggaccgtccgcgactggctctgtctgacatctgacgacgcattaaatgcaatatagacgtngatatagctcgtactgctgaccgttgcat

SEQ ID NO: 37207 - DNA, 381 bp, Zea mays
tgtatgcctccccttttatagctaaggggggcatgcacaatggtactgagccccgacatgtgggcccatgaacataacagatgtagtacttggagctactaatgttcgccactcgagcaatcgtcttgcgccctgacatccgagatctgcgtagtatcggcgtgcccgggaagcttctcgataagggatgatggacacagtgcgccgcgcagcacgacgcactgtttgacaatggactggacaggcgcgccatctacaggatggccctggcgccacctgccagcggagtggataggacacattaaatgctgagggggcacatcgcctatcagcatggtgaataggcggcgcgtcctctccgcaatatatgaagagaccgcg

SEQ ID NO: 37208 - DNA, 475 bp, Zea mays
  unsure (1)..(475): unsure at all n locations
ggatcttagtaccgagctgcactgagaaataaaaatactttggtgttttattgggcatattgcaaatctctatgaatcacaaagataaatgtatgtttgtagcacttagtcatttgttttaggtgctaacaatgttcatctaagtgctagggaacttctcaagtcaagtcaaaatggggtgaaaaagtttggctaagtttggccaaacttgggctagtctggtcctcaccggacagtcacccgggacaccctcgggcgagtcgggatgtgctccagctagttgtgactgcactcgggcgagtcgtgactgcatctcccgccgaggttggcctcgggtgaatcggaacgatgtttgtcacagaagttggccttgagcgaatcggaaccgcatcttccaccaaggttggcctcangcgaattggaactacatctccggcccggagttggcctcgagcgagtcatgactgtgtcgggc

SEQ ID NO: 37209 - DNA, 330 bp, Zea mays
  unsure (1)..(330): unsure at all n locations
accacccgcaggaacacaacacctagcggcgcgtttttttgttgcggaacacgaaggcggcgttacgccagcagaagcctgtaatatgcctctaaattcaaaacaaccccacgctttatcttccaagagccgtgcgagtcaaagcctgctcgcaacaactctgacacaaacagcatcgcacaaacatcttgtcatcaaacaaaaaagccacagaaaagaggtaccttgaactggacaaaaaaacaccacnatggccgcgcggaaccgtgaatctggacgactcaggaaccgaacctttgacgagaccaaaacctcggccaatagacccca

SEQ ID NO: 37210 - DNA, 369 bp, Zea mays
  unsure (1)..(369): unsure at all n locations
tcttcatccccacatgtgctanttcggcgatgccacagccagcccatgctagtcttaccaattaagcatgcatttagaccggcctcctcttttgcaaaatcaactaaataaagtttgtcgtctagtacacccttaaaagctaatgaaccatcacttctcctaaagacagacacatctacatttgtgaataaacagttatatcccatattacagagttgactcacagacaacaagttatatccaagcgactcaactaaaaacacattaaaaatagagtgctcggatgaaatagcaatttttcctaaccctttcaccttgccttggttcccatcaccgaatattaatgaatcttggggatccttgttcttg

SEQ ID NO: 37211 - DNA, 387 bp, Zea mays
agaccggcttctggatgggtcggacccctgcgggctgctggtggtcccaagccctcaagctccatggtggttggaccaccaccttctcataggggaactttctgactcccgtggggatgtagtgccgtcctttcgacgaccagcaccatgctcaccgcctctgtatccgctgcaatgtacaagtacaatagctccactggctctggagctaccagtattggtagggacacaaggtgctgcttcaactcttggaaggcttgctctgcctacttggtccaagagaatgggccggacttccgtaatagcttgaagaagggtagcaccctctcagccaaccttgagatgaagcggctaagggcggccagagaccctgtaagcttctggaca

SEQ ID NO: 37212 - DNA, 491 bp, Zea mays
ttggctcagtgacttgtctcaagacgaatgagtgaaccgacctaattatgaaatgaccaataaaccctggatagtttgtgtcatgactgtaatcgattgtggagggcataaatgtaatttcacacaagctgcgccctgtgcctataaatagatgaatagtacccctgtactgttcgcgctatcttgtaatcgctcgcgcaccaacacttggattttgccttctatcaagctgaaggtataaatgtaattaaatatcgtatttaaatattcaagtttgtataatgataatatatgaatgatattatgatgtgcttatttgtgcttatctttcatgttttatatggttcatcttttcattctcctataaccatgatgatgaaggtacgttcttcatgaccttcgtccgaagatggttatatcctaagggaaataatgcttctaaggacgaaggacattaacatttaatatttcgtgttgccttgtcttgattc

SEQ ID NO: 37213 - DNA, 436 bp, Zea mays
agctcgagcttcttcttacacacccacttactttcttcttgtttgcatccatatggtcgatcagagacttcccatgtaccatttgaaagaatggagtccatctcattatgaactgcttctttccaatcatctgcatctggagatgcaaatgcttctgccatggtagtaagagtatctgccccaaggcacacaatgaaatcatcacccaatgatatttcaaccctttgtctcttgctcctcttatgagcatcattgtcatcctcctctaggacaatttcatgtggctattcagaactctcaatagatgtactatggtcaggagttatctcagaagagtatctacaatctctatgaatgtctttcattagaaatatgtggtcaaagaaaggagcatcacgtgagtccattatagtatcaacctacacatcagaaactt

SEQ ID NO: 37214 - DNA, 361 bp, Zea mays
  unsure (1)..(361): unsure at all n locations
tatgactggggaccttgntccattagatggcatggttcggtgtcttaatcacctgcgcattgcgcagtaccatcagcatctggcggagaagctggacctggacatgtcagccctggcttacatgatgaaggaataccctgngactgaagaagaaaagatgcgtgccgctgttggcaggttctgcctgtcaagaaaggcgcatgtgatgccgatgaaaaatctttctgatgggcaaaggagccgcgtcatctttgcatggctggcatataggcagccgcaactgctactgcttgatgagccgacnaaccatctggatatcgagaccattgactcactggcagaagcgctgaatgagtgggat

SEQ ID NO: 37215 - DNA, 365 bp, Zea mays
aatcagcgaagaaggctgctaacgcctgcgacttaattgaggatctatgcacatagtcaatggtgaattcgtaagctccgcacccattttcaatccttacagaactctctggccttatatgtccctcagaggctgagacgaaggaacaattatgcgaaatgcttgaaaataatgtcgaagcttcctggaggctattaacacagcatacaacaccttctccaactctgtataatttttctctgataaactcataacttcggaaacgaagtacactggagcctggcttttgacttgaccatctaacttctcctgcacaagtgctgcactcactgcagagtgcgaagctaccacatataagagaatgg

SEQ ID NO: 37216 - DNA, 238 bp, Zea mays
  unsure (1)..(238): unsure at all n locations
cggacgngaaaagcgcacccctcaacggactctttaatgaagacggcaatgttgagcaacctcccggcttagaagatagagagtatcctaatcacgcacataaactttctaaggcgcaccatgggcctcagcaagccccaagagcgcgacatgaatgccgcagagactttcttatcgctaatggcatcaacagccgaaaggccgaacctactttatgtaccaaaaccctagaaaacga

SEQ ID NO: 37217 - DNA, 405 bp, Zea mays
  unsure (1)..(405): unsure at all n locations
atgggagtggagagatggcgagagtatcatgtacccttcgtggcaagatgctggacggtggtgtatctgtgctctcggttggcgtgaacacaggctggtcttgagaaactcggtggcgagttgacatatgccagggttaagtgctacatatgtcgtgtggttggagatcctcagctgattattaatcgaattggatcgcccgtacttcttggacatgaagacttggtcactgacttacacgtagcaatccaataaaggttaagggtgataaaagatgactagtataggcccagtgtttgaactangatagaanaaactctaaatgcatgtaactttacttaacctgacaataaaactggattttatggatccactattagtaagcatttctgctaacagagtctt

SEQ ID NO: 37218 - DNA, 392 bp, Zea mays
  unsure (1)..(392): unsure at all n locations
ggtgagctatcctacccgcgttcctaacctcaccggaatagttccacggnggaagaaagggcggcggngcttaccggcggtgatccagctccggcgaagtgtccacagaggtcgaggaggtcctggcgaacacgtctatgggcggatggcggtcggaggtggtcggagtcgctctggccgcgcgcgggggtggaaaagtgaagcgccccacatcctctgagactcaaacgtgatacaattactagtcccaggaggctagtaaacacatttatacatcagatgatacccaatctgcttaaacgagacaaacctataaaggtggcgatcaactttaagagttggtccacaactcgggacatatcatcagagtggggctgaagcagcccgatata

SEQ ID NO: 37219 - DNA, 452 bp, Zea mays
catgcaagctataaccctcgcgagacctttgcccttctcttttaaccatggccaattcattatcgtatgtgatattctatgcatatttactctattctgtctcttgtatggagcactgtttgattcctaatttaaatggatggatgtatgtatacttgcaatcgcatatagaacgatccagttgaagagcccgatgaactctcacgagaatccccctgacaacagacggttgtgtggaggcaagtgtcccttgacctatctctgtcctattcattcattaattcacatcccgctttacacattaatgcctaaggatcgactagctttgttgtccatgccctcgtatacctatttgggtgggattattagtgcttagctttatgctattgctcaaactctaatcaatgaacatgatgagattatctatgaaaccctggtttcacttttcttat

SEQ ID NO: 37220 - DNA, 453 bp, Zea mays
ctagtggcaggtttagtgcgcctccaagagaaccattttgcttgttttgtggtgagaacaaatgccacacaataaaaacctgccaccatacaattaacaagcaaaaagaacttgcttcatcagctactcaaccttcctagtcgaaagaagtgtttagtacatcttcatactattcaatatatgtcccattgtatgtccaatcccaatcataggaactgtcacacctggttctcaggtacaccaagacccgtgcgcgagcataatcatcaggtgtgctaggaccaagtcttacacatatgatgactcatggtacagaaacgaatgtcataacattaatatataacggagttctgtacaaaataaataaataattacatcataaggagacaacgatccagcaacccaaagttgactgagagacgatgggctacaccactcacgaactcatcacag

SEQ ID NO: 37221 - DNA, 441 bp, Zea mays
  unsure (1)..(441): unsure at all n locations
agcttnaaagggaatacacatataggatttacaatgttcatttcgagaaagacaggatttgtagcgcatgccaagcagggaagcaagttggctctcatcatccgcataagaacataatgacgaccgacaggccactggagctcctacacatggatctattcggcccgatcgcttacataagcataggcgggagtaagcactgtctagttattgcggatgattattctcgcttcacttgggtattctttctgcaggaaaaatctcaaacccaagagaccttaaaaggattcttgagacgagctcaaaatgagttcggcttatggatcaagaaaataagaagcgacaacgggacggagttcaagaactctcatatcgaaggctttcttgaggaggagggcatcaagcatgagttctcttcttcctacacaccttcacaaaatg

SEQ ID NO: 37222 - DNA, 444 bp, Zea mays
agcttctaaagggagaacacgtgatatgtttttcttatgtgcaattcgaaaaagatagaccttgtgcagcttgtcaagcaggtaaacaagtgggaggagcacatcacagcaagaatgtgatgaccacctcaagacctctggagctgctgcatatggacctcttctgacccgtcgcctatctgagcataggaggaactaagtatggtctacttattattgatgacttttcccgcttcacttgggtgttctttttgcacgataagtctgaaacccaagggaccctcaagcgctttctaatgagagctcaaaatgagtttgagctcacggtgaagaagataaaaagcgacaacgggtccgaattcaagaatcttcaagtggaggaagttcttgatgatgaggggatcaagcacgagttctctgcttcctacacacctcaacaaaatg

SEQ ID NO: 37223 - DNA, 473 bp, Zea mays
  unsure (1)..(473): unsure at all n locations
tctaaagggagaacacgtgataggtgtgactaacgttcaattcttataatatagaccttgtgcagcttgtcaagcaggtaaacaagtgggaggagcacatcacagcaagaatgtgatgaccacttcaagacctctggagctgctgcatatggacctcttcggacccgtcgcctatctgagcataggaggaagtaagtatggtctagttattgttgatgacttttcccgcttcacttgggtattcaatatgcacgataaatctgaaacccaagggaccctcaagcacttcctcaggagagcntcaaatgagtttgagctcgaagtgaagaagataaggagcgacaacgggaccgaattcaagaaccttcaagtagaggagttccttgaagaggaatggatcaagcacgagttcttcgctcctacacaccacagcataatggtgtggtagagaggaagaacacgacactcatcga

SEQ ID NO: 37224 - DNA, 412 bp, Zea mays
  unsure (1)..(412): unsure at all n locations
agcnttggaaaaagataaaattctgcttacattggtggataaagagaaaaaagacgaggccgcttcaaaggcccaatccgaagctcaaaaacgcgagattgaagatcttcggaaacaactggctagagcgaaagaggagcgcgcgcttgaggaaacgaatcgtgaacttagtgattttatggtcaacaaaatggaatcaagagttaaggagcttcgcacatcgcagaagaaatgctatgttaaatctatagaatgcgtgaataaaattaaaaacagctttgctagcgtcggcgccttctccagcgaagagaatttttctcgaggcaatcccgaaggtccgctggaatggattatccacgaagcagaggccttcgaaaaaattctaaacagccgcggcgacatatgctgcttt

SEQ ID NO: 37225 - DNA, 438 bp, Zea mays
atcatataacaagagaatagaagcattatctctaccatatgtcataatagacagggatgtatacacacgccgagtctgatcaccattactcaagtgcttatccagataccaaagtatagaaataatgaaggacatacatgccgtctggtggatctacatcggaacaagcctctgcttgataaagttttttaccacgattatattggccaaaggcagcttcggatgctaccaatttatttcacaagtgcgaaggttgtcacaaatgtgcaagagatcaaaaacaaccttcgtctttatctcaattaataccacccacttggccattgccaaagaggggtctggaattgctaggtccattaccaccggcccagggaacttaatatatgtggcggtggcagtggaatatttttccaaggactgaggcgaacccttatccac

SEQ ID NO: 37226 - DNA, 388 bp, Zea mays
gcttatgactgcatccagactttgtggcgattcttctttatgattcgacttcccattttaggtgtgaaagcagtatagtgcatcatgctggtatagattaagatatctcctactatcataaattgttaattcctaaattgggtaaaggttgccaaatagttttgtttctgtgaaagcttcctaattaatgcaaagtattacccaaataataagcctattactccatgctgagatctagctaaagtaaacgctctgaacctagacactagcatgcacctagacatgtaggattatttccaataatttataggcatgagaaaaacaaggatattagtttcattgtttactgagttaagttccttataaatataagcccaatgtgaaaaga

SEQ ID NO: 37227 - DNA, 324 bp, Zea mays
tctgggtgctaaacacgactgagtgcagggctaccgggttcacccctttccgccttctatatggatcggaggccatgaccccacaagaaataaaacatgggtcccgaccaacagtttcgttagccgttcccgacgtggacgagcccacttcgaaggatctcatcgatggagaccgagtcttcgccctacaggctctaaataaataccaagcccaaacaaaagaatggcgcgaccacgaagtcatcccgagggaattcagcgaatgggacctcgtactcgtccgaacagctctgacagagtccacgggcaagctggagcccaagt

SEQ ID NO: 37228 - DNA, 446 bp, Zea mays
  unsure (1)..(446): unsure at all n locations
tgcagcatgaagcttctaagggagacacatgtcgggactattcttttttatnttgagaaagacagggtttgtagcgcatgtcaagcacggaagcatgttggtcgttatcatccacacaagaacatcatgacgaccgataggcctcttgaaatactccacatggatctattctgcctgatccgcttacataaacatcgatgggagtaagtattgtcttgtaattgtggatgaatattctcgcttcacttgggtgttctttttgtaggaaaaatctcnaacccaagagactctaaagggatgcttgagacgagctcaaaatgagttccgcttaaggatcaagaagattaaaagcgacaatggaacggagttcaagaagtcacaaatagaaggcttccttgaggaggagggcatcaagcatgagttctcttcttcctacacgccacaac

SEQ ID NO: 37229 - DNA, 380 bp, Zea mays
tactcaaacttatgatgacatacgccattacctcgaagatgagctcggatgtgtctattggtgctccactcggagaagactcctccatcttctcctacatcgacttgaatgcaaccggttgcgcttccgacgtggagggaccgttcaagctcgttgatcttccgtgagcccttgtcataactcaagctcaaaaattcccgatatctctcttgggagacattagtgcatatctaggaatacccacaatcaatagtacttgagtagggttcaaaaaaataagtgagcgtagaataacgcctactaccctcgtggctatcccacttatagctcccgaggttgcacccatgattcaccaaagctttgagccgggtgaacatgtc

SEQ ID NO: 37230 - DNA, 415 bp, Zea mays
ctgagctgcagctgatgttcatattgaccgattttttttgtgcagctctgatacaaatgtagatccgcgatgaaaaattatcattttgaatgctatgcacatgaacaaacatgacacttatttgcattatggtgattctcacttcttagacctgttatgcacacattatattatgaatgacattgatgtcacattgatccccatttttggatgttggtttatccattaatggggaaaatgggaggatgaaacctttccggattatcatgaaacaatttctcgtaagggattcctttgacccttccgaaaaaaccacataaggtccacatggaaaatcattttattgtaagatgtgaaacagaagtggaaagcttttgagaagacattttttaatagaactcccttcgatcttttt

SEQ ID NO: 37231 - DNA, 405 bp, Zea mays
  unsure (1)..(405): unsure at all n locations
tctggacgtccttgattngggccggaggcctcattactctattttctgatcttctctggcgttgcctcaatgccccggtgtgaaaccaggaatcccagcaacttctctgcagagacaccaaagacgcacttttccgggttcagcttcgtgcgcgttgcctgtagcttgtcaaagaccaaggttaaatcttccattaaggtcgaccctctcttagtcttgaccatgatgtcatcaatgtatacctctatcctatccctaatcaggtccccaaaggtcttactcattgcccgtacaaatgtcggcaagacgtttttcagaccgtaaggcattacaacataacagtaaagcccatccacagttacaaaagcggtatgctccctatcttgcctagacatctggatctga

SEQ ID NO: 37232 - DNA, 390 bp, Zea mays
  unsure (1)..(390): unsure at all n locations
tgagctgcagctntcttatatcatgagccgaacatttatttctttcgatttccaccctgctgcccatttgcttcggtagctaatcacaggacactctgaagttttccgataagcaaaattatagcaaccaaaggtgtcatgtaatccattttttctagcctttgtctgatagtgcaagttatggaacttgcaaaagctgtccgcaaacggttccaccgcctgagttcggagtgcccaaatataaacactaaagctaacgataacgttaggggttagctggtgaaaatagaatccaaaattattcaatatctctgcaataatcccatgaagggggaatctcaccccacctttaagaagcttttataaaaacaattcatctttcccggcttt

SEQ ID NO: 37233 - DNA, 388 bp, Zea mays
gcttcaaagagagaacacatgtcgggacttttttatgttcattctgacaaacatagggtgtgtagcgcatgtcaagcatgaaagcaagttggtgttcaatatccacacaagaacatcatgacgactaacaggccactgcgagctcctacacatggatctattcggcccgatagcttacataagcatcggcgggagtaagcactgtttaggtcctgtggatgattatctcgctttacttgggtgtaccttttgcatgaaaaaactcatacccaagagacattaaagggattcttgagacgggctcataatgaggtcggctaaggagtcaaaagattataagcgaccaccggacggagttcaagaactcacacattcgtgggttccttga

SEQ ID NO: 37234 - DNA, 334 bp, Zea mays
gcttgactctgaagcctataaaatacttcaactcccccatcctagacatttcaaactgattatccattatgctactaaactcttcacatgtagatttgtagtacacccaatataattcatcactaaattggctacaacatatattggaattgttttactaaaaaagtaagatcggctttcccaccttgtagccattagccataagaaaatctcttatgcattttaccatgctcttggtgcttgcttgagcgcctaaaacgccttaaagagattatagacatggttagggtactcactatctttaaagccgggaggttgctccacatagacatct

SEQ ID NO: 37235 - DNA, 461 bp, Zea mays
  unsure (1)..(461): unsure at all n locations
agcttgtggctattagctggtgaatnttacttgtatcatctattcaccccccctctaggtgctctcaattggtatcagagccgttctcttcacgtaagggactaatcgcccgaagagatggatcctaagggaaaggggatgatggtcaacgataatgagaaggagtccatcttccacgagccaagagatgataagcccactgactctggctcgagtcataacgagaaggatgtgaagaagaagaggcgcatcaagaagatcgtctactatgacagcgacgaatcttcctcttcaccaagagacgatgacgacgagaaaaagaaaccggctaattcacattattcattcgattattctcgcattccttttaattcccatgctcattagctatcaattcctcctggaaaccttcacactttgatggagagaactactctttttggagtcacaaaatgcgtaat

SEQ ID NO: 37236 - DNA, 397 bp, Zea mays
  unsure (1)..(397): unsure at all n locations
aactcaagcctctnacaggagaacacattctacgaacaacaaatgttcattttgataaatacaggacttgtctcgcatgccaagcaagaaagccagttggcactcatcatccgtataagaacataatgacgaccgacaggccactggagctcctacacatggatctataccgcccgatcgcttacataaacaccggcgggagtaagtactgtctagatattgtggaagattattctcgctccacttgggcattcttttacaggaaaaaactcaaacccaagacaccttaaagggaatcttgagacggactcaaaatgagttcggcttactgagcactagaatgagaagcgacaacgggacagagttcaacaatgaacaaattgaaggctgtcttgag

SEQ ID NO: 37237 - DNA, 351 bp, Zea mays
  unsure (1)..(351): unsure at all n locations
agcttctgcanatctcattcgagaagaacttttattctaaacatacaacaaccaacgagtttaaaaagcaacccatcttacactgcagctaagtttactccaacaatacaaatgtagaattgtggatattatagaatattatggaataaaaaatagtaacatcattttgaaggtgaatgtcttttgcctttataatttgtatcaatggacaaagtatagaaaatgagcgaaatacaagagtatcaattcatcatgtactaatttgtcaaaataaaccattacatgctcctaactcagctggagaactatgtcagtgagaacattaccatatagtcttagggggtgtcttca

SEQ ID NO: 37238 - DNA, 460 bp, Zea mays
  unsure (1)..(460): unsure at all n locations
ntaccaaatggacgtgaagagtgccttcctcaacggaccaattttgaggaggtctatgttgagcaacctcccggctttgaagatagtgaataccctaaccatgtgtataggctctctaaggcgctttatgggctcaagcaagccccaagagcgtggtatgaatgccttaaagatttccttattactaatggcttcaaagtcggcaaggccgatcctactttgttcactaaaactcttgacaatgatttgttcgtatgccaaatttatgttgatgatattatatttgggtctactaacgaatctacatgtgaagaatttagtaggatcattgacacaaaaattcgagatgtctatgatgggggagttgagagattttctatgattccaagtcaagcaacttcaagagggcaccttcattagccaaacgaagacactcaagacattctataccagtttgaat

SEQ ID NO: 37239 - DNA, 441 bp, Zea mays
  unsure (1)..(441): unsure at all n locations
agctctgcatcaaaatccttcctctcttgtttttatctttntgatttcgnggagagttcactatttaatctagtaatctcggcttgggcctttgccaccgaaccctccattgtttgaagcacacgaaatccttcttctccagagcagcttcgtgatctttaattttgtcctctaagccctcaatataatctcattcttcttgtcctcgaagtcttgttgcatccttaaggttttacttagtagtagactctgaaaaaatagccttcatcagaagtaactttcatctcgaaaacaataaaaaggtaagggtagaactttaccttaaaattagaataaaacaagctaccggcgatatgttgccgcccgtatctgctgaggtcggcctcaagcttctgaaagcccacactctttgatagagtgctgacaaccttcgctccagtc

SEQ ID NO: 37240 - DNA, 453 bp, Zea mays
  unsure (1)..(453): unsure at all n locations
cttccttatcgncatcaacctcgacatagaaccactctgattttcagcccgttgcccacttgcttcggtagctaattacagggaactttgtagttntccgatacgcaaagttatagcaaccaaaattatcgtgcaatccatcttttctagcctttgattgataatgcagctcgtgaacccggcagaagctgtccgcaaatggctccactgcttggcttccgagtgcccagatataaacaataagcctaacgatagcgttaggggtcagctgatgaaaatagataccgaacctcttcagcacctctccaatgatcccatgtagggggaatcttaatccaccctttaaaaagctcttgaaaataacaatttcatctttctccggttttggggagcctctctccctcaagcgcaaagcatctctgatttcaggaaaaagccgatttacatttggac

SEQ ID NO: 37241 - DNA, 424 bp, Zea mays
  unsure (1)..(424): unsure at all n locations
agctntccagattgttaaagagtgcattcatattatttgtgaaactccagntatgtttgttttactgtggctgttcctgtttgcctgacaaaaatgagtgggtctgttcactggtgggtttcatctaataaatggccaaattggctcttccaactatgaagacttttgtagagggataaaagatcttacttccaacagaatttcataatttttggttcagtagtttgggagatatcaaattttaaagttaaccataccgctgtctaaaacagattcagtcagttatcttgtcagatgttttagaacttgtagatggcagaagttaattatccattgaatactgaagttgtagagtattttgtgtagatacttctagagtatttgtttgatatcaccgctgttttaattttaaagatacaaaatt

SEQ ID NO: 37242 - DNA, 460 bp, Zea mays
gacctataaaactcagcttcgctcaatgctcttcgcttcatcatcctgtcattatttagcattataaggggaattcaagtttcaaggaaaaggtaagcacaaggtatgagtttattaccggtttaagatgacttcgagcttctacaccagccaagtttcgcccgccctttgcctatatttgagtaacgaatctgtttccgatgctttgggccaggccggggatgtcatcctagtctgctggtgacatgctgaagtttggtctgtttacaatatttccatgtgtatagccagccttcatgaaagcgacagttgtgcctcgagaagctagcaaggcataaaagtcaccatgtgcagctataacttcgtcgagagcatcaacttcaccttcaatatgatcaaatgtactccgcaggtcttcaaccgaaagtgtaaatattttggagctggtccaactgaataa

SEQ ID NO: 37243 - DNA, 335 bp, Zea mays
cacgagcatagtgccataccgatgttgcagtgcatatgtgctcagcaccaaccttgggaggcataggagccgctaaaactggtacacactgcaccatcattggcagtgccaacatgctctctacaaactgcgattgcaatttcgctgaagaaaacacttgtcgcaacattccttgctttccacaataattgatgttttaggcttacgcacaaaaataaagatggaaatggaacaaccatgctaccctattaatcccctctcaagagtgcattactactgcatttatagtctctaacagcgtgttctattttggggcaggattggataaaaacggt

SEQ ID NO: 37244 - DNA, 461 bp, Zea mays
  unsure (1)..(461): unsure at all n locations
acgcgcctgatttgccaattggacttgtttttgtctctcttgacgcgggggcgcgcgccgagccggccggtagcccggagcccggaggcgcccgcccgtgtgctctggggattggacggcgacggcatcaaaatgcgggagggatgcgcgatcgacgtgatctggcggggagaggaatctgctttcgcctgctcgcgattgcgatgctcagcgtcgggatcagaataaaaaaaaattcctgttgggccggggtttgtgaccggatcgagcatctgttgttgcttcacttctctcatgagaagacccgggatgggagtactgtgcatgggtgtgtggggtgatcgcaaacctgatgatgaagtgatacgactgctggggcaccgaaatgcttctcttttgcttctcagaaacgagcgacgaggatactcangtacgttgcccgcttctctttacttgtctgc

SEQ ID NO: 37245 - DNA, 422 bp, Zea mays
catgggctattttgcgatgccagagccaacccatattagtcttagcaattaagcaagtatcgagttcagctctattaaaatcaactaagtatagctaaccctctaatactcccttaaatgctactaaatcatcacttcttctaaagacagtaacacctatatccgtaaaaatacagctgtacccactttgcataattgagaaactgaaagcaaattgtaatctaaagaatctacaagaaaaacattggaaatggaatggtcaggtgatataacaattttaccaagtcctttgaccaaaccttgatttccatccccgaatgtgatagctctttggagatcttcgtttttctcgtaggaggagaacatccttttctcccctgtcatatggtttgtgcatccgctgtctattatccaacttgagc

SEQ ID NO: 37246 - DNA, 463 bp, Zea mays
  unsure (1)..(463): unsure at all n locations
ttaagcaccgcagctgcagcttgctttgngtcttcggaaatcaaaggcaatggtaatcannaaggccatccttaaaactgattcccaagttatttctggtcatattgacaaaagttacaaagcaagagacccgaagctcgaaaaatatctagatacagtccgaaggattgaggcttccttcgaaggtttctctgtcaaaaatattcctcgtggagaaaatgaatacgctgatctattggctaagtcagcagcccaggggctgcctgtaccttcggaagtattttttgaaacaataaaagcaccttcggtcgagcttcttgaaagagcaatccttaacatatcccctgtttatagtgaagattggagaactgagatcatctctttccttcatggtaattttctttcagacgacgaagtttataacaggagaatagaagcaagagctcgaccatatgttataata

SEQ ID NO: 37247 - DNA, 491 bp, Zea mays
  unsure (1)..(491): unsure at all n locations
tctaagggagaacacgtgataggtctaactaatgttcaatttttattatatagaccttgtgcagcttgtcaagcagggaaacaggtgggaggctctcatcacaccaaaaatgtgatgacgacatcaagacccttggagatgctgcatatggacctttttggacccgtcgcctatctgagcataggaggaaagaagtatgggttagttattggtgatgacttttcccgcttcacttgggtgttctttntgcaggaaaagtccgaaacccaagggacccttcaacgcttcctcatgagagctcaaaatgagtttgagctcaaagtgaagaagataatgagcgaccacggatccgagttcaagaaccttcaagtggaggagttccttgaagaggaagggatcaagcacgagttctccgctccctacacaccacagcanaatggtgtggtagagaggaagaacaggacgctcatctatattgcgaggacgatgct

SEQ ID NO: 37248 - DNA, 368 bp, Zea mays
  unsure (1)..(368): unsure at all n locations
tcaagaaaacccncgaacccctggccccacccctacataatggcatcataacccatataagaacaaccgtgaccaagaccgagacttaggccctatttgtttgagctacagcttttggagcttttctgaaaagttgcttctaggcttttgatccttaagaagtcaatgataacttntcggtgatgtattagcttcctaaactcagtaagctacagaaagcccataaaatcaggcttctcagctnttctgagcttctggctttccagtttccagaagctaaacccaaaagctagttgtttggtttagctnttggcttttcacactgagaagtaggtaagaagctcaaacaaacagggccttagacatgt

SEQ ID NO: 37249 - DNA, 441 bp, Zea mays
  unsure (1)..(441): unsure at all n locations
agcttctaaagggagaatagcatttgngacttatcaatgttnattntgagaaagacagggtttgtagcgcatgtcaagcangaaagcaagttggtacccaccatccacacaagaacatcatgacgaccgacaggacgcttgagctactccacatggatttattcggcccgatcgcttacataagcatcggcgggagtaagtatgtcttgtaattgtggatgattattctcgcttcacttgggtattctttttgcaggaaaaatctcaaacccaagagactttgaagggattcttgagacgggctcaaaatgagttcggattaagaatcaagaaaataagaagcgacaatgggacggagttcaagaactctcaactcgaaggctttcttgaggaagagggcatcaagcatgacctctctttccctacacacctcaacaaaat

SEQ ID NO: 37250 - DNA, 425 bp, Zea mays
  unsure (1)..(425): unsure at all n locations
ttgaccgcgccttaaagatcatactctgggttatttgacatattatataaagcgggccgtgctttcgattaggtaacatatttactaacagaaaagcattataactgcgaaatctggtgttgggcattgacaggtcaattaggttcgtagtttgtcccatttggtatattagatactctctccagtttcaaaatactagtcgttttggacatgaaaccacataccaaggactgatcaactagaagtcatatttccagtcgtgcccctattaaatatgttttgttgcctctgctattgagttgtcttagcccgtccagctggtcagatcgatctctattgcaccaccgtggtttgattcttcttggccacacgcgctgttttattacccatttttatggcgttgcatgtgcttgantttccacatg

SEQ ID NO: 37251 - DNA, 414 bp, Zea mays
  unsure (1)..(414): unsure at all n locations
cctgcatgagaagnggtcacccaagttttattgatgaagcaccacaagactaatcaaggaaggaatccatgtggaagtccgcacgatgaaggtttgcgtgtcggcatcgatgcttcttcaataagctagttgccaagcgaaagccataagcctgaagatgattctttgagtagccagaatcagcgtttgcaatttagcaaccagatgcccctaaaaggccagattttgttgaagctctatctcctcgaagagtctgcacagtgaagatatgtagctgaagtaaagctatacccataacccttctaagccaaatctcgaggacgagattccttttaagtggggtagatttgtagcatcccaacatttccaattctgaaaagttctcacactccctctaaattcaaaatgaatttc

SEQ ID NO: 37252 - DNA, 432 bp, Zea mays
  unsure (1)..(432): unsure at all n locations
ggagaacacgtgataggtttttctaacgtacaattcgaaaaagatagaccttgtgcagcttgtcaggcaggtaaacaggtgggaggagcgcatcacagcaagaatgtgatgaccacatcaagacccctggagctgctacatatggacctcttcggacccgtcgcctatctaagcataggaggaagtaagtatggtttagttattgttgatgacttttcccgcttcacttgggtgttctttntgcaggataagtctgaaacccaagggaccctcaagcgcttcctcaggagagctcaaaatgagtttgagctcaaggtgaagaagataaggagcgacaacgggtccgagttcaagaaccttcaagtggaggagttccttgaggaggaagggatcaagcatgagttctccgcttcctacacaccacaacaaaat

SEQ ID NO: 37253 - DNA, 400 bp, Zea mays
  unsure (1)..(400): unsure at all n locations
tcaactcttcgaaccatatccagatatttttcaagcttctgatccttagccttgcaactcttgtcaatatgacccgaaacaacctgtgaatcagttttaagtatggcccttctgattcccattgcttttaacttccgaagacctagaatcaatgcttcgtactcagcaatgttatttgtgcaactaaaatcaagctttgccgcataacaagntttgactntggaaggtgagaccaacacagcagccgctcctgctccgaaggttccccaagatccatcacaaaacactgtccaggcttcggtgctttattcgtttcctcctcctgagcccctggcgtccagtcagcaatgaagtctgctagcgcctgggactgaatcaagatctatgaacatattccata

SEQ ID NO: 37254 - DNA, 447 bp, Zea mays
agcttggatgaggtgtcatcatcatcatcattcttctatcatctgaatcccattcaactaggtaggctctgccatctttcttcttgttgtagaatttcttcttcttattactatctccatctttgcccttcttcttcttgttaggtcaattcatggcgatgtgaccgggttccccacactcaaaacactttctatcattgaaagcatctcttcttgatgtttgacctcttctaggttgacccctcttcatcttcatgaatttattgaatttctttacaaatagagccatatctccatcactctcactttcatttacttcaacatcactatctactttttcaattgccttagaagctctagctttgagagcgattgattcattcttcactttctttgccaaacttatagcatctacttgagatttcttgaaaatatcttgagtaagaa

SEQ ID NO: 37255 - DNA, 390 bp, Zea mays
  unsure (1)..(390): unsure at all n locations
gacaggattcgnagcgcatgccaagcanggaagcaagttggctctcatcatccacataagaacataatgacgaccgataggccactggagctcctacacatggatctattcggcccgatcgcttacataagcatcggcgggagtaaggactgtctacgtattgtggatgattattctcgcttcacttgggtattctttctacaggagaattctcacacccaagagactttaaagggattcttgagacgggctcaaaatgagttcggcttaaggatcaagataataagaagcgacaacggaacggagttcaagaactctcagattgaaggttttcttgaggaagagggcatcaagcatgagttctcttctccctacacgcctcaacaaaat

SEQ ID NO: 37256 - DNA, 251 bp, Zea mays
cagatcatcactttagatctagtgcaagaatacctaccccacggcgtattatccacctcgaatgaatggagtatgcccaaacttgaaggaacaaataagaagaatgaacttgtgtcgatgccctatcgcttaaaatttgagaaacaattcagagagccttgcccagagtggctataaatgactgaagctatgtgcaacgaaattttaagcggttctactaagaaagaagatccactgatgactgcagcctt

SEQ ID NO: 37257 - DNA, 202 bp, Zea mays
ctggcgaactattgtgccataagttctggctgaagacccttgatcatggactcaatgatgatttcattaggcactgtttgcgctagtgctctcaatcgcaagaacctgtggacatacgccctgaatgtatccctcatggacttgtgagcactggaacaaggcctgagttgagactggcttcgtctgaaagcctagaaaactg

SEQ ID NO: 37258 - DNA, 342 bp, Zea mays
atcaagacagcatactgttccttctccaactctgtataatatttctttgacaaactaagaacctcggatacaaaatatattggggcctgcctcttaacttggccttcgagcttttcctgaacaagtgctgcacttaccgctgagtgcgaagctgccacatataataacaaacgagccctggcgtatgtggagttagtgttgtcagatctatcaaatattgttttagctcttcaaaggccttctactggattggtccccattgaaagacttccgctgacttcagaacttaaagaatggtagagttctttctgctgatctggatataaatctattgagagatgc

SEQ ID NO: 37259 - DNA, 458 bp, Zea mays
  unsure (1)..(458): unsure at all n locations
tgccagcccctcctcgagctatggcacctgcccgatacctatgaaccgggtcaccggcggcaagtcaccgttgaacccgccggcgaccgggttttccccgaggatcggccggttcgcccctgtcccgtcgactactgacgccgtctcccctcccactctccctggcgcgtgggccccgtgaccatgacaccgttttctcgcgcgcccgcgccgtctctcgcccttgggccgtgctgggtctgcgcgctcgtgcccgcgcgcgcacctgcacccggctgggccggaattctcccccggcccaccagagccgaaaatccgtttctattttccttttctttttcccaattagttttgtgcatatatcttgatattttatgtaccaaaaattatccaaacactttctaagtcacataaaatgataatgttaggaactcgacacanctcactcagtaaaccaa

SEQ ID NO: 37260 - DNA, 359 bp, Zea mays
agcttagcaaaagaaatttctagaatcataatattgagctcatgcctaagtctggtaaaagatagttcatcaagtggcttggtaaagatatcggctcattgatctttagtattaatgtaagaaatctcgatatcccccttttgttggtgatccctaagaaaatgataccgaatggctatgtgcttagtgcggctatgctcgacgggattgtcggccattttgattgcactctcattatcacatatcaaagggactttggttaatttgtaaccgtagtcccgcagggtttgcctcatacaaagcaattgcgcgcaacaatgtcctgcggcaatgtactcggcttctgcggtggaaagagc

SEQ ID NO: 37261 - DNA, 308 bp, Zea mays
  unsure (1)..(308): unsure at all n locations
tgtccaccgagntgggaggacttccatgtacggccctgctgtgttaatcaaccaaaaaagggactaccggacgaactactaggatggtcgaaagcgaaattttggcatacatacagcagcgaacaggcacgcgttggaattcccgatcgaagtgtaaaaaaaaagaacaatgcagttcttatgggaggcaaaaaggccatgctgaaacgcattggcctagcaaatatgtagtactcgagtggcggcaccggcacctagtcgatccacagcttcacttggtacgaaactagacctcgaagtggtacctc

SEQ ID NO: 37262 - DNA, 409 bp, Zea mays
  unsure (1)..(409): unsure at all n locations
ntctcgactaagtcggagacagggccttatggactggctaatgtacncgtaagcggcaaggccgaccgagccgagggactcctacgcccccgggatacggatacctcactcatcaccttccgcgagaagcaactctcgcccgcacaaacatccctgttaccgacggaaagtccagaggctcggaataaggggaaaagagacgcagctttgcaagcgcagcgagggtgtggtttctggcctcaacggccgcagaaggcacgcgctacaagacgatctgatcctgcaggctcgggtcttcacgctgaagggggccgtagcaccttctgcatcgacgacgtcttcagcaaggtccgacccagcctcggacggcggcgcggtccagggacttctccggtgatccggcccgagc

SEQ ID NO: 37263 - DNA, 474 bp, Zea mays
  unsure (1)..(474): unsure at all n locations
agactttattggctcttattgtctctattgtcaaaagttggcttcttgtggggagaagtattgagtatgggaaataggggggagttttgaaatctttgatcaatctcttttggaatgactctctttatacttcaacatgtgtgtttgacttanagatagagatttgagtttgatttgcaaaaacaaaccaagtggtggcaaaggatgatccatatatgtcaaaattgaataaaaccaatttgagtttttatttgaagtgattntgcacttgtgctatctactttatgttgtgttggcataaatcaccanaaagggggagaatgaaagggaaatgtgcctttgggccatntctaagtattttggtgattgagtgcaaacacaagtgcttaaatgtgaaaatatgctcaaggatgaacaaagtgcaaatcacaagttaagggatgtttctaagcctagtacattggtttgtgacta

SEQ ID NO: 37264 - DNA, 439 bp, Zea mays
  unsure (1)..(439): unsure at all n locations
gagacagttctttgggcctgagctgatccaagaagcagaagaacacgtccgtataattcgagagaatttgagagtggctcaaaccacgcaaaagagttatgctgataatagaagaagacccctggaatttgaagaaggagattatgtgtacctcaaggtgtcaccacttcgtggaatgaggagaatcaaggttaagggcacattgtcccctcgctatattggaccattcctgttttttagaagagatggggagatggcataccaactcgagttacctgctagcctatcggatgtgcataatgtgttccacgtatctcaactaaagaagtgtctccgtgtgcccggngaacaattaccaatggaagagctcagtgttcaaggtgatttgacttacacggagtacccgatcaagatnttggatactttgactcgagttaca

SEQ ID NO: 37265 - DNA, 398 bp, Zea mays
  unsure (1)..(398): unsure at all n locations
agctngaagagtaaaatgacgaagctngaatatgtctgtatgttggngactngttctcaaatgctaagagttaagaacaaggcaacataaaaagtgttaagtgttaaagtccttcgtccttcgaagcattatgtcccttccggaaataatgagtttcggacgaaggtcataagagacataccttcgtaaacataacaagtaatgacgaacggatcatatacagcatgaaatataatataagcatcatcatagaatcatttctattttattaacatggaaaaatagaaatgatttcaaattacagatgtaccttccgtcctgagagaaggtaaaaagtacaagcgtgacgcaaaagcaaatgccaagtcagcgtgaacagtacgggagtactgttcatc

SEQ ID NO: 37266 - DNA, 415 bp, Zea mays
ctggagtctgttctccattactcaaatgtctattcagaactgaaggtatataactgatgaaagaaatacatgcacgctcgtgtggatcttaaatccgatccaggcctttgatcggtaaagtttttcatcaaggattctattggccgaaggcagcttcggatgcaacataattagtccaaaaatgtgaaggttgtcaaaaatgtgcaaaagatcaaaaacaagcctccttctctaactcaattaatacagtccacttggccgttgcacagatggggccttgatttgctatgcccacttccaccatcacaacgaagattaaaatatgttgtactgcagtggaatattttctaatggattgggcaaacctttaccacaatacttccgtactgtcacagttttctgcaaatattgttgt

SEQ ID NO: 37267 - DNA, 499 bp, Zea mays
  unsure (1)..(499): unsure at all n locations
ctcactctccgctgcccaggatcggtaagctgtttgatggctctctggtnagtcgctccagcgttattgaggccgaacgacatggagggttagcacacagctccanacggggtaatgaatgtaagtttttcctcatcttctnttgccaggctgatctgatggtatctagagtagcagtccaagaaagacaacatagaacatctggtgcttgaatctaccacctgatctattctagggagtccgaagggatccttcggacagtggttgttgagatctgtatagtcgacgcacatgcgtcaatccactattattctttttagtacaagaacaggatttgctagccactcatgatgcagtacttctctaatgaaccctgctgcgactaagcgagctagctctgcgcgaatagcctctctcttgtcaggcgtgaaacgacacagtctttgtcggatcgaccttgcctacggatagacccttcatttgtgctctgccagttctc

SEQ ID NO: 37268 - DNA, 103 bp, Zea mays
  unsure (1)..(103): unsure at all n locations
agctngagacangaacaaccgtagcgtgcacttattctcttgaagaaaatgtcaaggactngaggatttccaaaaggaggaaacaaaaaatatcaatgcctct

SEQ ID NO: 37269 - DNA, 302 bp, Zea mays
gcgatccttagactcacctgcggcatgcaagcttatgaagattcttcatcccaacatgggctagtctgcgatgttatagccaacccatgttagtcttagcaattaagcaagtgtcgagttcagctctatcaaaatctaccaagtatagctgaccctctaacacacccttaaatgctattgaatcatcacttcttctaaagacagtgacacctatatcaagaaagagaccagtgtagcccattttgcctaattgagataaagaaagcaaattgaatctaatgaatctactaaaaaaacattgg

SEQ ID NO: 37270 - DNA, 420 bp, Zea mays
  unsure (1)..(420): unsure at all n locations
gctgttgaaccttcaagctgtcttcgagtttcacttgatactttagttcggctctaactgtaggcttttaaactcctgctagattggtgtgcttcaggataaagctggcattttgatcaagataatgctttgatacttggacttatgttccaattccttttcttccagtattatcctttggtagtctcatctccttttactataaatattgtttattatcctccttgttggtggccctttatacttgcagattaatttactgaaccttttttccagctcttttaagtcaagctgtaattaagtacagcgtgtgttcatcagtgccaatcgttgggcaanttgctttnggatacccctactgatattcgagaaatggtggtgaaaggttctangagcattatgtaaatcatgaacagtagt

SEQ ID NO: 37271 - DNA, 353 bp, Zea mays
agccatgatatcatgagtatcatggtatatcatacctattcttcttctcgaatgaaactggcttatattaaggtcgtgagttagggtatcaacatatatccctttttgaaaacctcaattgtattgaacatgattctgttagatataaacttagaggatcttatattcttaaaatacatttgatgcttcttgctcaaatttgcttacacgaaatgatggtactcgagctagtactgagaagaaccctaactgacactggggtgtcacagaacacctggcaaaatcaatactggtgctgttgcaacttcttcttcaacacctcatatgactcttggcatgctgcggtccacttg

SEQ ID NO: 37272 - DNA, 173 bp, Zea mays
tttctgtgtgccggctctgactgccatggagaaaagtcattttatccttccccatggactttattaattaccgtggatatttctgttaaagcctggagctaataataaataatatactcgaattagtacatgaacaggttcatattgctggtcattctataataaagattaat

SEQ ID NO: 37273 - DNA, 468 bp, Zea mays
  unsure (1)..(468): unsure at all n locations
gattctntcatcccagcatgggctagtcgacaattgtcagagccaacccatattagtcttagcaattaagcaagtatcgagtttagctctattaaaatcaactaagtatagctaaccctctaatactcccttaaatgctactgaatcatcacttcttctaaagacagtaacacctatatccgtaaaaagacagttgtaacctattntgcataattgagaaactgaaagcaagttataatctaaggaatctaaaagagaaacattggaaatagaatggtcaggtgatatagcaatattaccaagtcctttgaccaaaccttgatttccatccccgaatgtgatagctctttggggatcttcgtttttctcgtaggaggagaacatccttctctcctctgtcatgtggtttgtgcatccgctatcaataatccaacttgagcacccggatgcataaacctgcaaaacaat

SEQ ID NO: 37274 - DNA, 270 bp, Zea mays
cacttcgacagaagacaggggtttgtagctgcatggcaagcacggaaagcatagttggcacccatcatccacataagaacataatgacaacagacaggccactggaactactccacatggatgtattccgcccgattgcttacataagcatcgataggagttagtattatattgtaattgtggatgagaattctcgcttcactgtggtattctttttgcaggataaatctcaaacccaagagacacttaggggattctcgagacgggctc

SEQ ID NO: 37275 - DNA, 259 bp, Zea mays
agcttgaatagcacaagataagtgagagtgtggaagttgacccgacatatgcagctgagagcctgagacatagttttaaattgaactgtgtaaagaattaaggaatacctgaaattctatttgacctagaacaaaatatatgaaattagagtagtttgcttagaaacgtggacaatctttatgaacagtaatttgtgtgtaaacattgtttcgtttaattaaaatatgtcccattcagaaaactatattgacttttatg

SEQ ID NO: 37276 - DNA, 420 bp, Zea mays
  unsure (1)..(420): unsure at all n locations
cgttcaccgtattactttgctctagcttcgtgacaagatgtgatcttcggcaaaggtaaagaataatcaacttcgtcaaaacgcaagaaattcaacatcaaatggccagagtgcgctcaacagctatggttactggcgacggagaggaaaccgaaactgctgaaactgtcccgatttccgaagtcatgaggcggtcgggattggttgtgactgatggcgcttctgacgaagatgcacccgctgctgaagccgagaaggcagatattgaagagggcgatgctggtgaagaagagattattataacaccactatgccatcgaagcccagccatttggaatttgggaagtcgactgtgtctgaagctgatatgtctatgatgacgaagttaggctacttcagagaangccgatatgggttgat

SEQ ID NO: 37277 - DNA, 353 bp, Zea mays
  unsure (1)..(353): unsure at all n locations
gatatctatactatagcctaaagtccattgaaattttaaattctatactttgacgtatggatggtgtttggagtgcaaatatgcatgtttatgttcatttccttttgcaggttcataaagcatggntaccaccttggctagcggcacaatatgctcattatgtggtaagagcagaaccataaatatttatcacttcaantttcattcttatgttctcccatcactgaccacaaatatttactactacaatttccatgttcttggtctctcattgctatagacgtcatcattngtaggagggtgtctcagatcactggagctaacatgggaaacctgctatgcagaatgggttt

SEQ ID NO: 37278 - DNA, 434 bp, Zea mays
  unsure (1)..(434): unsure at all n locations
ttgaagaggctacgtgagcgacctccactttgaaaaagtgagtacgctgaccatgtctataactctaaaggcgcttatgggcttagcaaactccaaagcatggttgaatgcctgcgagatcttttatcactaatggcttcaagtcagaaaagccgatcctactctctttctaaaactattgcagaagatttgtttgtatgccacatntatgttgatgatatcatatttgggtctactaacaaatctacttgtgaagagtttagtaggatcatgatacaaaaattcgagatgtctatgatgggggagttgaagtatttcctaggatttcaagtcaagcaactccaagatggcaccttcatcagccaaacaaagtacattcaagacatacttaacaagtttggaatgaaagatgccaagcccatcaagacacccat

SEQ ID NO: 37279 - DNA, 479 bp, Zea mays
  unsure (1)..(479): unsure at all n locations
tctggatgaatcgacggtataaccatttcttcttaggacacttcggacttgatgtacagtgggtggnggtttccactccaaaatatccttgactctgctaggatccaccgcaatccccttagcagataatacatgtcccagacattggatctcctctagccagaatgcgcacttactgaacttagcatataattggtgttcccttaagcgcgttaatatgatccgcaaatgccgagcatgctcctcttcattcttggagtatattaagatatcatcaatgaataccacaacaaatttgtccaactcgggcataaataccgagttcatcagatatgtgaagtgtgcaggagcatttgttagtccgaaagacataaccaaatattcaaataatccataccgcgtggtgaatgcggtctttggtatatctttgggtcggatcctgatctgatgataacctcgacctgatgtcaatcttggag

SEQ ID NO: 37280 - DNA, 441 bp, Zea mays
  unsure (1)..(441): unsure at all n locations
agctttcatccttcttcttacaaatagtgctttacatccccaaggcgaagtgcttgggcgaatgaatcccttatccagcaattcttgcaactgcttcttcaattctgccaactcagcgggtggcattcggtaaggcctcttggaaaattgggccgttcctggttgcaactcgatggcgaattcaatatcccggtccggtggcattcctggcaattcatcaggaaagacatctgcatactcacagaccactgggatcttcttcaggggtaactccgtcatagagaaagtacatgactgagaaaaaccctgactangcagaatcaaagtgaaattcccgcagaaaggagaaataacttccatagtacgactggctacatcaagcacaacttggtgcaggtcatccaattgcccctaaataatgtcacattttccaatcccaca

SEQ ID NO: 37281 - DNA, 435 bp, Zea mays
  unsure (1)..(435): unsure at all n locations
caccgcggctgcagcttcaatttctcttgttcttttcctctggcagcatctattattgaataggctnttgaagcagtagtcatgtccacatcaagagaaaactctgtgctggtagtcaccttcagttcactagtcgcattttcaacgacagttgcgctgagagaacttttggtaaccttcgtcactacaggaaaagccacctttgaaggtttcaggacagcctttagaacattgaccattcttttcgcctttagaggagttcccatcacaatagctgtcagcttcggctggtctccaacactagtnggcaccttcggttacatgccgattaggggtatttcacccataataggcacatcagcagcgtccccttcgattttttccatttcctacattaaaacaaacattnntgccaaaaaacaaaatagtcaaaga

SEQ ID NO: 37282 - DNA, 494 bp, Zea mays
  unsure (1)..(494): unsure at all n locations
tatcgcgcatacctggccactgcagcggtggggactagatatcatctgactattgcccacagcccaaggcaacctcaaattcaccatcatcgctgttgaatacttcaccaagtgtattgaggctagagccgtatccacaataacttccaagatgacgcaaaaatttttctggaagaatatcgtatgtcggttgggagtcccatccgagctaacagtcgacaacgacaagtagttcgataaccaagactntcgagaattctgcaattctattggcatgaaggcagtgttcgcctccgtctaccatccgcaatccaacagagtagttgagcacgccaacggcaagatttgcagtgcaattaagaaaaggctactcgacgacaagaagggcaaatgggcggaccagcttcccgaagtcgtatgggcactgaacacaacagaatctagagcgactgggttcacacctttccgcttgatgtacagatccgaagcaatga

SEQ ID NO: 37283 - DNA, 175 bp, Zea mays
agcttctaccacgacgtgatggtccctggccgaatagaagaattccatgtttgggctacattccggactaccatgacgaaggacttcaccatgactgcagtgttgcccccatacgaaaatatagtcgctttatagctcatccaaaactgctttggatctgagtgtgcatcataca

SEQ ID NO: 37284 - DNA, 466 bp, Zea mays
  unsure (1)..(466): unsure at all n locations
tctgntgccaaaatacagaaagctcagggatggttatttagttgtgattttccaacagttaatgccaaaaaggcaccttctactgccttgttatttgaaaatgtcaaacagcagatttcatatttttcctatgttcttcataacaaaacattaattttcccaagggttgggggtgttttgccttggggttatttntgtagggtttttctaagttttccttgttttcttaaaataaaaggtatcctatttattttatactaaaccacggtataataaatntttctagtaaactacactgaataagcatactaacaaaaataggggtgccccctggttccttaatntaaatacctttcctattttctntaactttaagcacaatgtgaaataaatggtaaactctaccttaatgnngtgtacagangnnggttatcattttaaatangtcagtaggtgattaagtact

SEQ ID NO: 37285 - DNA, 379 bp, Zea mays
  unsure (1)..(379): unsure at all n locations
agcttctcatgtggggacttaatgggatancttatatttagaatnctgaaattcagaccttgagccaaagatcaaggatgttcaccttgatccctaactcgaaacctaatggccccattgacaaaaatgtgcctaattaacccctctgtcatgtgccangagatggcaatgggacgcgtgcctcggacacgtcaaaccagagatcttctccctgtgtgtggcagtgagacaaataggatttctcccctctctatctcttaatccagtcagcgaaacttgctagcctccacacacaaacgacaaaggaacctgagaggaagagatctctcaacgggatcgtggccttattctcaaagaattggcccaatccgcgtttaac

SEQ ID NO: 37286 - DNA, 440 bp, Zea mays
  unsure (1)..(440): unsure at all n locations
catccctataacatggccattggcatgctatgggttggacatgatcggacccttcaagaaagctcagggaggctatactcatgtgctggttgccattgacaaattcacaaagtggatagattataagcctattgcctctttaacctcagccaaggcagtggagttcatacaagacataatattcaggtttgggataccaaacagcatcataactgacctgngatccaacttcactagctctgaattcttcgatttctatgaacaacggaccatccagattaagtacgcgtcagtagcgcatccaatagccaatggccaagtggaaagggccaacagactgatactggaagcgctcangaagatagtgnttgacaaaaatgaaaagctngcaggaaagtggatcagagagctaccgtatgtggtttggagcttgagaactc

SEQ ID NO: 37287 - DNA, 327 bp, Zea mays
  unsure (1)..(327): unsure at all n locations
agcttctcacctctgaactaactgctttgtatcacttttgaccgtcggccaatagaatcccgacctgaagaccttcccgactagtgtctgggatgctgcgtgtattccacattgtgcagcatggacctcatccagatgtcgcttcccagtagatgagagaatgcatttcatgaggacgcctgatgcaccccttctgtatagtgtctccactgagtgtggtatgagctgactgtctancgatgcgcctcgctggcattttggatctgtttctcttcattcttatatatctgagatcggcctttccagcataaaagttgacttggttga

SEQ ID NO: 37288 - DNA, 393 bp, Zea mays
tatcgtcagccaccgaggaattgaggctaatccggataagattgaagctatcatgaagatggaagcgcctcgatcacaaaagaaggttcagcgacttactggatgtatggcagctctgagcagatttatatccaggctgggggaaaaaggtttgccgttttacaagctactcaagaaggtggataagtttcagtggactttagaagcacaggaagctctagatgcactaaagaaattcttgacaacaccaccagtactgaagccaccccgacgagctacgtcaactcaaccagctgaagatctgctactgtatatctcttgcacgactcacgtggtaagcaccgcgttggtagtcgagcgagtataagaaggacatgcctatccagtacaaca

SEQ ID NO: 37289 - DNA, 356 bp, Zea mays
  unsure (1)..(356): unsure at all n locations
agctntcccnatatgagatctttaaaggtcattatgatatcaaattattagtaatggatctctcacgctcggtaaattagtggttttaaggtattaacactacaattnttggtatatctcaattctgtctcctgtgcattgggtgaaggattttagtatattgattccgtagcaacgcaagggctacacctatgaatgctgctccttcatttttttgtaataaaaaaactacaccgaggtacacaaacacagtcaaccgttgagatgaatttattcaaaanaactaagggaggaggtttgcttcgcaggatcagtggccggcttccaccgctgtcaagtcgttctaaatacaattc

SEQ ID NO: 37290 - DNA, 457 bp, Zea mays
tactaagatcaagcgattatgagacgaatgagagtttcatttgtggatgagagacatgttggccacaacttcgcatggccagtgagccactcaaggatgttgtgatatgccaccattaggatcacatagatcaggattctaagatgattgaactttaggtgttggcagctactaaatcgtgtgtttaatatgcaattgaaccccatatggcgtgtacttattgttgtgttcaattttagtatgggtgagcattttgctcgactatggtcagatattgacatggttataaaccacacaacttatgtttgccacagtttgatatttctctagtccacaaaactaagcatgtccttagacctcggtgttctattatctctcttaattcatctccaatcctcaccaaactgaacataaccttattaacacaaaaagattccaaacaaattttggtgcccat

SEQ ID NO: 37291 - DNA, 461 bp, Zea mays
  unsure (1)..(461): unsure at all n locations
gctntaactctcgcgagacctgttcccatttctttctaaccgtggtgaattcattatcgtatgtgatattctatgcatatatactntatttgttctcctgtatggtgtactgtttgtttcctaatatgaatgtatggatgtgtgtatgcttgcaatcgcatagagaacgatccggttgaagagcccgaggaactcgcangagaagtccctgagcagcagtcggttggtggaggcaagtgtccctcgacctatctctgtcctattcattaattaattcacctcccacattacacanttatgcctaaggattgactagttntgttatccatatccttgtttacctatttgggttggataattattgtctagctttatgctattgctcaaactctaatcaatgaacatgatgagattatctatgatacgcttgtttcctttctcttattatgatgtcgtacttg

SEQ ID NO: 37292 - DNA, 357 bp, Zea mays
  unsure (1)..(357): unsure at all n locations
atagtgccgaagctttctggacgccattaagactgtatactttttcttctccaactctgaataatctttctttgataaactaagaacctcggatacaaaacatattggggcctacctcttaaccggcccctcaagcttctcctgaacaagtgctgcacttaccgctgagtgcgaaactgccacatataataacataagagcccntggcataagtggagtctatgttgctagatctatcaaatactgcttcagttcttcacaggccttctgctggagtggtccccattgatagacttctactgtcctcagcacttcgaagaatggtaagtttctcattgctgatctagatattaatct

SEQ ID NO: 37293 - DNA, 324 bp, Zea mays
  unsure (1)..(324): unsure at all n locations
agcgttgggcacacgctggaagttcagttcattttattatccgtagacagatggtcagactgagagaaccaaccagattcttgaggatatgttgagagtttatgcattgcaagacaagttaggttgggacaaaagtctaccgtacgcagaattctcctacaacaacagctacctagctagtctaaagatgtcaccgttccaagcactctatgggaggaatngtagaactccgctgcattgggaccaacctagcgaaagacaagtgtttggtccaaatattctgcttgacgctgaagagaacatcanaatgggtcgagagaattt

SEQ ID NO: 37294 - DNA, 434 bp, Zea mays
  unsure (1)..(434): unsure at all n locations
tatcatgtntntcttgcanagctagatagtgaatatttatcttttctaccgcgntcttgagcatagcatttgtattttctaattgagcaatatatgatgaatgattaatagctntaatttgctcaattgagatgtcttcatacctttggaccaaatcatcatgagagcactttagcttctcattctctttggtcaacttctccaagtctttgattttttcgatgaggatatattcttgcttatgaagcatttccttttgttcttccgctcttttcatgagtttgagcaagctcatctggttcttcttgcttagttgagcgaagaattcttgaagatcttcctcatcttcactatcactttcgtgctcctcctcatcctcactttcgctttcactatcactcccattagcaataaagcacatatgagaagtggat

SEQ ID NO: 37295 - DNA, 458 bp, Zea mays
  unsure (1)..(458): unsure at all n locations
agcttcttctcgtcatcgatgagcgacgccaacgcgagtgccttctgcttatggtgtttgctcggggtttcaagtaagaaacatggattcatgcttggcgttggtttatgaaaatgactcacaagtctgatctatggaaaaaatattacgaagaanaatgtcacgcatgcaaaanagggaatttaagcataatacattattcatacaaaagagattgcatgcaaagctcttctttaaataatattacctccatccaaaaatataattcaagaatcttggtgatacttatctactactacgcattatgcaagggtagcaagtgagcttggtgagagatgtagtagatatggtcatagatgccaacatgaacacacatgtggtgtagtggtagctactcttggcctttgcttgagaggcatggggttcatatcccttaggacatgtgtgtcttttaattt

SEQ ID NO: 37296 - DNA, 419 bp, Zea mays
atcctctgagtcacctgcggcagcaagcttcctttaaccccgaaacgcgatacattcttcattggtgaaaccttcaggtagacatagtccccttcaaggaaacataagggcattcgccgtttgtctgcataactcttttgacgaacttgggctttcttcatattatgaataattttctgaaccttttcttcgacctctttcaccatatcaagcctaaagaagtacctttctccaagttcagaccaatttagcggagttcgacaccgtcgcccatataaagcttcaaaaggtgtcatcttgatactttcttgataactggtattgtatgaaaactccgctaagggaaaacattcatcccatttctatgagaagtccagaacacatgcccgcagcatatcttccagtatttgattgactct

SEQ ID NO: 37297 - DNA, 438 bp, Zea mays
ccttctggctttgaagatagtgagtatcctaatcacgtatattaactctctaaggcgctttatgggctcaagcaagccccaagagcatggtatgaatgcctaagagattttcttatatcactagtggcttcaaagtcgtaaaggccgatcctactttatttactaaaacacttgcaaatgatttgtttgtatgccacatctatgttgatgatattatatttgggtctactaacgaatctacatgtgaggaatttagtaggatcatgacacaaaaattcgagatgtctatgatgggggagttgaagtacttcttaggatttcaagtgaagcaactccacgagggcaccttcattagccaaacaaagtatattcaagacattctaaacaagtttgggatgaaggatgccaagcccatcaagacacccatgggaactaatg

SEQ ID NO: 37298 - DNA, 245 bp, Zea mays
  unsure (1)..(245): unsure at all n locations
agcttcgataggccatctcctgcgtgatattggcccattttgccggcagtatctcttattgcagtcggccgtagcctaagtcctagtactgctactactactctctctctctcactaccggaatttggctctttgccgagtgttntatttcgggcactcggcaaagagctctttgccgagtgccacacaaaaaaccctcggtaatagataacactcggcgaagatactctttgccgagtgtttaa

SEQ ID NO: 37299 - DNA, 412 bp, Zea mays
  unsure (1)..(412): unsure at all n locations
gaaaaagctcanggcgtctgttcgcaacatgctaaaatcgaatggtgtattgcggaggcttttgcccttaaggagatatctcaattctcaaccaggtatttcgctcgagccaacaatgtgtttgctccttcagtgcgacttcatgtcgaaaatgaatcgccccaaagcacccttcaaatttttgcgaatcctggtaaagcagatggaaaagggagtgtacgtcacatcgaaggatcagatttgaacacgctaatgctatatatgtatagcaatatcgacagcacacgctagtgctaatgtttgtaagtcatgggaagacttgacttgtgacggtacaggcagacgtaccaaagtgaacgcggtgttgggtagcctcttgcgcttctactcaccctgcatggtggagctcaat

SEQ ID NO: 37300 - DNA, 409 bp, Zea mays
ctgcagctactgccctgcgctgacgattcatatatttgatgtgtcattgggactaaatctgtatgttgagcgtggaaatggtgcttgaaaaacttgtggcatacaaatagttatattcatgagaaatgataaacccaccaggagtgttttcttctctttttcttgccatttatttggtctttcctactgcacagctgttcattctgtccaaaattgaattttggttgcttgaatttcaggtccattgttgctttatagcattcgagacaatgattaaatttcgacccaagatttttaccgctcaaaatcaaggaactgtctgaatgcatgtggagcatgattgttgtgcacaattcttgtggggactagctgaactaccaatgaacactgatcgatgcttggtgtcaca

SEQ ID NO: 37301 - DNA, 463 bp, Zea mays
  unsure (1)..(463): unsure at all n locations
gctttgaagatagtgagtatcctaaccatgtgtataaactctctaaggcgctttatgggctcaagcaagccccaagaacatggtatgaatgcctaagagattttcttatcactaatggcttcaaagtcggaaaagccgatcctactttatntactannaactcttgacaatgaatntnngtttgtanttgtcaaatttattgtttgatgaatattttatattnntgggtctaccctaatgaatctacatttgtgaggagacntagtanggatcattgacacaagaaaacttcgagaaatgtcgatgaaatgggggatgtttgaagtactctcttgggatttcaagtgaagcaactacaagagggcaccttcattagccaaacanagtatattcaagacattctanacangtttgggatgaaggatgccaagcccatcaagacacccatgggaaccaatggaca

SEQ ID NO: 37302 - DNA, 283 bp, Zea mays
  unsure (1)..(283): unsure at all n locations
agnnctgactaagtgattctatctccttgctccgacctatatatatgaatttatatagcataccaaattaccatattagcccgtgtggtaaacgatacatgctgggtacttattatggactacctgggtaccacactatggtgaatgtgttaaactatattacttcaacctagccattctttgaattattcaaacaaactagctgggtttttgcgttgcttatggccacactggtgcgtgtgacatattacggatgaattgctactaattattgcagccttat

SEQ ID NO: 37303 - DNA, 453 bp, Zea mays
  unsure (1)..(453): unsure at all n locations
tcgttatcttttgggctttcttcgtcctgagaccctggcgtcctatcagcaatgaagtctgctaacgcttgggaatggattgaagacctatgaacataatcaatagtgaattcattcagctctgcagcccactttccaactcttcttgtggcttctctgttccttatattgtccttgagagggtgagacgaaggtactataatatggtatgactggaaataatgtcgaagctttctggaagccatcaatacagcatatagtaccttctccagctatgtgtaatttcttttcgatggactaagtacttcagagatgaagtacactggcactngcttcttcgcttggccatcttgtttctcctgcaccaacgttgcactgactgcagcgtgggaagcagctacatacagtagcaatggggctcctgacgaagtggtgtcaatgttgcaattctat

SEQ ID NO: 37304 - DNA, 441 bp, Zea mays
tactaagcttaaccgagggcccgcgtcaccggcgtagccaaatcgcgctcatcttagttcaagaacccgccggcgcacgtggaccgggtaaaccccttcaccatatcccgattcgttgcgcgcatggcctctgtggcaccccgtgaagctcctcgtgcccattaattgaactctaccgccgtggtttgtgcggagcaggcgtcaccggcgatgcccgacgcctgtgttcgtggccaggggagctcctaccacctctggcgccgacccgcacatcgacgtgaccgtcgtgacctcctgaacatcaccgaccgcctcgtcggaccttcctcgttgccggtgagccgcgccacccttatctattccgcggctactgtttcagttgagggaaagactgcgggtgagagggagagaaagtcatgtggggtaaatgaaaagtcaatg

SEQ ID NO: 37305 - DNA, 385 bp, Zea mays
  unsure (1)..(385): unsure at all n locations
acccaagttctgccgatgaagcaccagaagaccaatcaaggatggaatccatgtgggagttcgcaatagacaagtttgtgtcttggcatcgatgcttcttcaataagctagctgccaagcgaaagctataagcctgaagatgatctttgagtagccagaatcagcgtttgcaatcagcaaccagatgcccctcataggccagattgtgttgaaactctatctcctcgaagagtctgcaaagtgaagatatgtagctgaagtagagctatacccataacccttctaagacaaatctcgaggacgagattccttttaagaggggtagagttgtatcatcccagagattcaaattctgaagtattctcatactcgctctanattcaaa

SEQ ID NO: 37306 - DNA, 406 bp, Zea mays
agcttatgttgagagacaacacactctccatgtatcaccttacaaaccaagcttactagtctatcctctcttcttgtgaggataaagtcaatctaactggattattgaccactactgtaggttactaaatgggattctcttcgtaaagaaagtgttggctatcaacatgacaaaagatgacgcgaagtccaagacttcttattcctcttgattcctactaccatacccaaaacctctatgaaccgcctcgaaagttgcacttgttgtgtctacatgccattgagatcttctttgaaaagcttctcactaataggtatagttctaaccatgtcatctacatctttctagaagagtctcttagcactcttattatgacctactatggggatacatgctaattacactc

SEQ ID NO: 37307 - DNA, 463 bp, Zea mays
  unsure (1)..(463): unsure at all n locations
tcacaatgacttggctctttctttngacacactcaatgatgatgntgtgctcataattcatgttcattactcatgtgctgatttcaactgcctactgccaatactagctgaactaaagctcgatacataaaattatcacctacatatattaacacaaccatatgttntatgtagaccatggattcggagaacgcaaagctccgaagagcactggctcatttaattagagtagtggagcagcgttgtgccgacatcgtcgacgtcgtccacagtgccttccaaccagttagcggaccagtcctcaatgaaatgaatcgtgctttagttcagatcgaggacctcgccaaggaccttgatcacctagctctggaaaaagactgagagatggagcacatggcctcttctcaattgcctcatatcagaacagaggatagcttctgcttattatgatcanagtgaatct

SEQ ID NO: 37308 - DNA, 401 bp, Zea mays
  unsure (1)..(401): unsure at all n locations
agcttcatgaacggcacccttcggcatcacgtacggacagcttcagccgaagctgtttcttcctgcaggaccttcggcgacgaagcatggtcccaacaccgccaaactcaggtaccacgaccgtttcaatataacgcggccggtgggtaatgactttcaactttttgctcttcgccgcaggctcatctagagtggccgaagcagcagttttcctcttctttccctgacttcacagtggacagcggtagtcggggtagacaaaaccaatggcatcaaaaactctattcaatctctttttcacccgacctccgaaggctgtggatagtgcattgtcttccgccttggaatatgatccaagcagttcatcactggtagcttcgatgcantttagctagtcatca

SEQ ID NO: 37309 - DNA, 511 bp, Zea mays
  unsure (1)..(511): unsure at all n locations
cttggtgatcgagctctnggtgttgtgatctaagatcagcttataatagtatgcatgcttcagaagttaggatagagcaatacctttatatacctagtggggcaagctggctaagattgtaagtgtgacagctgtagttggaaattcaaatgcaacaatccagtgaaaacaagaccagactaggctttcgagcctcgtttttttccccttattcaaatagctgctaattccagaaaagtatggattatagatntgcaatggatttagcataactatttattatgttacaaacctaataatacaacaaatggcccaactaaagaaaagaataacatggtcatggtggtagtctttcattttatctattaagctataattaagaatctcgtntacaactgtacagttacagaaaattcaggtgtccaaaatgcatgggtaaatcgcacaatttaaacattatatgggcaanaccgcacaagactaattggattacatattacatatgtgatat

SEQ ID NO: 37310 - DNA, 422 bp, Zea mays
  unsure (1)..(422): unsure at all n locations
agcttggcgatggaggaaccgacgcctgaatattcantgtcatcacgaagctggggagcaggacccgacatagcctgtatcccgagatgaagtcttagaagtaggagaaactcctgacgagcgagtcttcagagaaaggaggaactctcgtcgacgtgatcgccggaaagctcaagagcaagctgagcaagatgcgaggttacgccgagagaaccattatttcgcgtgaaacctgaacccttgacttggccgtgtaatgaacacaccgagcgaggtccgaagagtattggctcggatagctaatggcctcccccggactctagacgctgaaggctcactcgggcggctaatcaacttctacccctcgctcatccccaagcgatcttcggcacgnatcaacagttagcgggcgcacggagctc

SEQ ID NO: 37311 - DNA, 343 bp, Zea mays
agccaattcttgttgtagaaatcactgttgttgcccccgaaggatctccaaagccttgatatattgtcgacatgctttgggaaaaaatgtctaaaaagaaagcatgagcccagtttaccccaaactgaatatcaaagggcgtgatttcacggcacggaaagaaacttttgtattgttcctgaagcaagagattttgtttgcggagagagcaaagctcatatccctcactaaagacggctctggtgttgcaaaacagctggcgaagcttgggtcatacttaatggcaaaatgaacttgtttttattaaccaaatttcgttgttacattatgccacacctttttt

SEQ ID NO: 37312 - DNA, 297 bp, Zea mays
agctgacttcgctaggttcgcaggctccataccatatatggtagttacctgatccattttcctgcaagcttctcgcttttatcgaacaccttctttctgagtgcatcaagtatcatcccgttggctctttccacctgcccattagctgttgggtgtgccactaatgcgtacttgatctgaatgctcctctgctcgcagaagtcaaagaaatccgagctggtgaagttagaccctatgacagtgatgatgctattaagtattccaaacctgaatattatctcctgaatgaactccact

SEQ ID NO: 37313 - DNA, 452 bp, Zea mays
tccaaccttcgaactgtatccatatatctttcaagcttcattctcgtgccttgctactattgtccacgtggccagcaataacttgagaatcagtctttatgatggcccttcttattcccattgcccttacttttcgaagcctcaatagaagtgcttcgtactcagcaatattatttgtataactgaaatccagtttgactgcataacatgttttaacttttgaaggtgccactaggaccacagctgctcctgcaccgaaggctccccaagaaccatcgcaaaacactgtccaagctccggcatctttgcttgtccactcttcatgagccctggcgtccaatcagcgataaaatctgctaccgctcgagattgaattgaagatctgtgcacgtagtcaatattgaattcattatgctcccgtgcccactttccaacccgttcagtagcttctc

SEQ ID NO: 37314 - DNA, 355 bp, Zea mays
taaaacacatagatgtgtgtcaactgtgtctgtaaagcgctcccaatttttacatattactcagaactccctcatgtgtagctacaaaagacgagttttttctggctcttcacaaaccatctatcgctataaacgatctggtggagaaagaattaaaatcgaccccactaatcatttagatgtctctcacaacagatattgacgagtcattttttgtacacctcttgaagatgctctggcataactaaaattgagtccattagatctggacgtacccttagtgcacgtatataccgaagccacatatataccgtagcacgctgtcatactaacgtctttagaccggatacaaata

SEQ ID NO: 37315 - DNA, 335 bp, Zea mays
acttgagcccttcaccctgtacaaacaacaggcaagacccgtctgaaatcttcaccgaagacaatgggtttaccaccaaatggcagtgcggggcgacccattatatcgtgcatgctattgtccagtgcctccacggcttgtctcttagtcatagaagcctcgtgccagataatgagagatgctgttcgtagcaactctggtgttgcactatgctccgtgaagctacatacagcgacatcgtcaatagtgagtggtatcttgaagcatgaatgggcggttcttactccacgcattatggaagccgcaatgccagatgtagatgttgcactgcaatc

SEQ ID NO: 37316 - DNA, 437 bp, Zea mays
acgtgaaaagtgccttcctcaatggaccaatcttagaagaggtctatgttgagcaacctcccggctttgaagacagtgagtatcctaaccatgtctataagctctctaaggcgctttatgggctcaaacaagccccaagagcatggtatgaatgccttatagatcttcttattgcaaatggattcaaagtcagaaaggccgatactacactctttaccaaaacacttgaaaatgatttgtttgtatgccaaagctatgttgatgatattatatttgggtctactaacgaatctacatgtgaagagtttagtaggatcatgacacagaagttcgagatgtctatgatgggggagttgaagtattttctaggatttcaagtgaagcaactccaagaaggcaccttcctaagccaaacgaagtacactcaagacatttaa

SEQ ID NO: 37317 - DNA, 414 bp, Zea mays
  unsure (1)..(414): unsure at all n locations
agctggtgccaattgagaagcagaagtctttgaagtcctggctgtcaaattgtttgccgttgtcaactgtgagctcggacgggactccgaatcggcaaacaatgttttgccagaagaatttctgggcagtcttcgatgttatcgtggatactgcccttgcctcgatccacttggtaaaatactcgacggcgacgaaggtgaacttgagggtcccttgtgccgtgggtagtggcccgacaatatccaggccccagcgctgaaggggccatgtgtgggggatcagctttgtgaattgcgaagggttgcccgagcggngggggaaattttttggcaggcttcacacgatctcgtgactcgattcgcggcacagatcgtggcgggccagtagaagccttgacggatcaccttggcagc

SEQ ID NO: 37318 - DNA, 452 bp, Zea mays
  unsure (1)..(452): unsure at all n locations
attggccgacagcttagcatataatagtttaaaggtatgagaatgaactttttgtactctaaaaacaaaagattttttatttgcttatacttaataccgcactcctttcacagggcctcattcttagcaacgccctccgggcgcaaaaaagtgccgaagacgaaggatgcactatagctttgaacaacctttgttccgaggtaattgaactaaggaacgaaggtcttgaaaaagataaaatattgaactcattggtgaacaagataaaagaagacgaagctacttcaaaagcctaagctgaagcccagaaatgcgaaattgaagatcttcgaaaacagctggcagaagcaaaattaaaatgtgcaattgccgaagttgactgagacgccagtgattactgggaaaactattgngaaaaatagctgagaacttcggcttcaaataagatgtat

SEQ ID NO: 37319 - DNA, 361 bp, Zea mays
gcgatgcttgagccaacccatattagtcttagcaattaagcaagtgttcagctcaactttgtctctattaaaatcaactaaatattagctgatcttctaacactcccttaaagctattgatcatcacttttctaagacagtacacctaagtcgtaaataacagttgagcccatttatgtattgagaaccgaagcaaatgtatctaagaatttcaaaaaacatgggaaatatggcaaggattagcttttacccaaacttgacaaccttgattcatcccgatggaaactcttgggatctattttttataggagaaaaatctttctcctgcatgggttggcaccgctatcatatcttttacacc

SEQ ID NO: 37320 - DNA, 478 bp, Zea mays
cggaaacgagaggaagaattccgaatagatgtctgatgagaatatatgtgctgccgagatgatactgagcctttctgaagagatgcatctgggttttcttgagtcaatagcgaagacgaacacagagaagattacaagggagattttagaaggtttatctgaagatactggtgatagtgacagttatgacgcagatagtgggggtgaagattccgaagatcggccatggcgaccaagccactcagtcttcgggaaatcaactatcgggcaaaatcaccttgaaaacatgagggggagatatttttgggatatgtctattataagagcagatgctggagaaataactgtaccgactcccggagatgatgaagtcgttattttccgaagctttctgagagctgggctacgattccctctaagcagattcgtggtagaagttctgaatatatatcaggtttaccttcatcaacttacccct

SEQ ID NO: 37321 - DNA, 430 bp, Zea mays
  unsure (1)..(430): unsure at all n locations
agctngcctcanggatttgtgagggtgttcgcattcgtgaagcaaaaacggaagccttcatggttaaggaccatagaggagaatgtaagtcccaaaaaattgtttttgtatttctattgacacatatctaaactattccagattcatttacctagtgtacaagaagcactatccacctacgctaaaagatgaggtctggaggttggaaaaaataagaaaggatggctcattccataagaggctgaacaaatctggaatatctacagttgaggatttccttangctcgtagttcgggacccacagaaattgcgcagtgtaagttcgtatgtgggtgtgttattaacttactattattatactnnntcattttatgtgttcaagttatgactattaatgctcttctgtgatagatacttggaagtggtatgt

SEQ ID NO: 37322 - DNA, 441 bp, Zea mays
ctgtcccgacaatgatagtgatcatgatcaatggaacaagagggagaagaagaagaactataagaaggcaaaaggcgaggcgcatctacgcaaggagtgggattcggattgctcctcttccgactccgacaatgagggactcgccgccaccgccttcaacaaatcggccctcttccccaacgagcgtcacacatgccttatggcaagggagaagaaggtatgtactcaaaaccctacttatgcttcttctagtgaggatgagtctagtgatgatgatgagatagattactcatgcttattcaagggattagatagatctaaaattgataagattaatgagttgattgatgccttgaatgacaagaatagattactagaaaaacaagaggaccttttatatgaagagcatgatcaaattgtagaagcacaataatctcatgc

SEQ ID NO: 37323 - DNA, 295 bp, Zea mays
agcttggcgactgccagttcgacctctggatgtagtactacgtgaccacatgtgtcgctgcgatcggcaagctccagtgcagccttcgattggacgcctgccagagcgaatgcaccgagctgtccatcttcgaataaggggacctcatggtcgtcgacaacgccagcgactctcgggttgatctgggcaccgtatgcgacaaccgagccgttacaccgttcagctcatcattcacctgaagttcaaccttccacgtaagtcactactgaccagccattaattcttgtgcgttggg

SEQ ID NO: 37324 - DNA, 192 bp, Zea mays
acattgcaaacatctaatactctagcacttagcaattaattcttcattatcatttctaacgctagcatgagagacatttacatccttcaatcttagcatgctatctaacattataatctctaagattgagaattgaagcatcacaaacatttgaatcaacccttaacaattaaactagcatttctcatttct

SEQ ID NO: 37325 - DNA, 329 bp, Zea mays
  unsure (1)..(329): unsure at all n locations
agtatcctaaccatgcttataagctctctaaagcgctgtatgggctcaagctagccgccagaacatggtatgaatgccttatagatatccctattgctaatggctatcaagtctgaaaggacgatcctacactctttactaaaacacttgagaatgatttgtttgtatgccaaatatatgtcgatgatattatattagggtctactaacgaatctacttgtgaagagattagtaggaatatgacacatacattcgagaggtctatgatggcggagctgaagtatttcttacgatttcacagtagacaactncaagagggcaccttcatc

SEQ ID NO: 37326 - DNA, 448 bp, Zea mays
  unsure (1)..(448): unsure at all n locations
ggagcacattagcctccacactactgaatgtaccanatgtgcttacaatgatgattggttgtcttggtattcagaatgatatccataaaggatatgatgaatctatgatagattcgaaaatttcagatcattaatgaccatcagtaatgaattgtaatttccaactggttatggttggaatcaggaagttgtgcacgctcctgacttgtgattaactgcatgtactgtatgtacaagttcccctatggtttttagtacgtgggaatccgtgaaagatttcccatgcgtacattgngtatgttcccaatctcaccaccgcagcgtacatatatgggcacacaaaanaaaactggggatctatgtgagaattcattctccgtcgatcattaagatttagaatctcttcatgagaatctatntatggcccgtacgctcgcttgaatcatga

SEQ ID NO: 37327 - DNA, 299 bp, Zea mays
  unsure (1)..(299): unsure at all n locations
agcttgcacacatagctcttttgaatacctttgttcatatctcntttatatgctatgactaatgtgttttcaagtttatttcacaccaagtcataggtatattgaaagggaattggagtcttctgcgaagacaaaggcttccactccgtaactcatacttcgccaccactccgagcaactctctcnttctttggggagaaatgagcatcaaggaaaaggacttcatcccttggggagagagtaaaagctcanacgcaaaggacttcgtctctggtataatcttaactcacttatttatg

SEQ ID NO: 37328 - DNA, 382 bp, Zea mays
  unsure (1)..(382): unsure at all n locations
agcttatgaagattcttcatcccaacatgggctagtcggcggtgccagagccaacccaagttagtcttagcaattaagcatgtgtcgagttcagctctatcaaaatctaccaagtatagctgaccctctaacacacccttaaatgctattgaatcatcacttcttctaaagacagtgacacctacatcagtaaagagacagttgtagcccatttgacataattgtgaaacgggaaagcaaatgtaatctaatgaatcaacgagaagaacattggaaatagtatggtcaggtgatatagcgattntacccaatcctttgaccanacctttgattccatccccgaatgtgaatagctcgtggggatcttgngttttctcatatg

SEQ ID NO: 37329 - DNA, 262 bp, Zea mays
  unsure (1)..(262): unsure at all n locations
agctttgaagntgaagttgcagtaactacctttatcagactagnggaattcttagtagatgagaagtttgttggtgacaacatccgggtggttagagattntttgaatgtctctccagaggagttattagggatgccaccagataggaaagttgagttggtcattaatctcttacctaggactgcttctttttctaaacggccatacaggatgtccgtagaagaactaaaggaacttaagaagcaattaacggaattacaag

SEQ ID NO: 37330 - DNA, 484 bp, Zea mays
  unsure (1)..(484): unsure at all n locations
taacctatgttngagcacttctatcacacaattgtgcttaaatttgcatcgtctttattatattntgagaaacgatgtggcaaattgatgtgtggtgttttacttgagtggaaataaacaccttttaagtatgacttgaatagaggagattatacgaaatctgtcatcacaaaaggtcattagctagcccactaacgtcttcatccactagttgtactctaataccctctcatgcgaatacaatgccctcaatatgatagaaacactatttttagtttcaaaggtgatctattgttttgaattatttatattccaactttttagcaactgtattgtggaaaaaagttgccttacaaccttaacctatgtntggacatatctcttacataatntggctaaagttcccatgagtctctatttattatgagaaacgatgtggcatatcgatgtgtggtgtttacttgagtggacataaacaccatct

SEQ ID NO: 37331 - DNA, 439 bp, Zea mays
ccggcgagctacaccgactcaaccggctgaagaattgctgctatatatctcttgcacgactcacgtggtaagcactgcgttggtattcgagcgagtggaataggggcatgcctacccggtacaacatcctgtctacttcatcagtgaagttctaggcccatcgaagaacaagtatcctcaagttcagaagctattatatgcagtactactaactgcccgcaagctgcgtcactactttgacgaccacaaagtcatagtagtcactggttttccaataggagatattcttcacaacaaggaagccattggccgaatagccaagtgggcatgcgagttgggatcccatgatatctagttccgacctcgcacagcccgcaaaactcatgcactgtgtgatttcgtatcagagtggacagaacagcaagtaccggataatcag

SEQ ID NO: 37332 - DNA, 407 bp, Zea mays
  unsure (1)..(407): unsure at all n locations
agcttctcacaaacctttaggctttaggtgacatatatgatacgaatgcaaatctgtacttcacaggccattccccccacggccccacctcctcattaatttcattcctcgttgaccacagatgccataagaggatgagaaccatgcagcgtaaacactcaggactgatttgatggngttttttttttttttttgctcctgatttgcattgcacaagtatgttcagttgatatatatgtgcagagaattgagcaaaaggatgtttcagctctctttcggactgaagatttagatgggctgctaggcatacgaaatctagaaatttggagtggatatatatttgtttgagtaaatttgaacggaacgggggaacggcaaagatgttctctggatccgatccgtgacat

SEQ ID NO: 37333 - DNA, 365 bp, Zea mays
  unsure (1)..(365): unsure at all n locations
agcttgccgcagttgtgacagccgtcgtctctttctctcttcttgttgccgacggcgccaccttgggcacctccacgtgcaccaccctcagcatgtcctcgcgtcccggcctgggcgcctccacgcgccttgtgctgcttgccgcgtttgcggcctcatgtcgaggaggactcccccatctttttgtcaccctggcaggcctcccactgctcccgagtgagatgtagcttcccgccgatagtgataggcccagagggagcctgtggttcgtcgctgtcgaccaccttgagacgacctatcgcctcttcgatcgtcatcgtggagaggtctagcanagactcgatcgagcgagcaatctgcttgac

SEQ ID NO: 37334 - DNA, 419 bp, Zea mays
  unsure (1)..(419): unsure at all n locations
tcttcacaggctgcgtcctgtttctataatagtgaacagtattccattactgttcacgctttttgattntcgcaatcgcatctgctgagaatcagacgttgtcaaggcagaggtataaatgtattcaatgatataacatgatttgtctgcgatttattcctttatttataccctttattttattttgtcttatgcaattcaccaaaatctgattacgaagatttaaccttcgtaattgtattcttattaaccttcgtccgaaatacattatcctcaaaggaataatgttntacggactaatgacgttaacatttaacattttatgtcgctttgttcttaattcatagcatttgagaacaagtctccaacactgcaagaatgggaaaacggagaaatggagaaaccctcggtgcaacaat

SEQ ID NO: 37335 - DNA, 466 bp, Zea mays
  unsure (1)..(466): unsure at all n locations
ctcagagtcacctgaggcatgcagcttccactgaaatctacaagtagattcatgtcttttatgaccacattcgntatctattacatgtcttctctagttntttattagactacatttcatatcttatacttcccatgttgctataaatgcatatgttgacaaaatatatttgttacctatgcataaggggagttagtctaatcaaatcatgtcttgttcctctatttctatcatgccttctcctaagtagaagaattctgtcagggggagtctttcttcttctcttgaggggggagaagattctttcaaaatgagaacactcatttatgaggagtaacattctagaagctaaattgatgaatctttaagagggcagtcttattgcttccacatgctttaataattcttttcgtggtgatgccaggggagaatttttggcccatcaatggaatttatcaacacacca

SEQ ID NO: 37336 - DNA, 448 bp, Zea mays
  unsure (1)..(448): unsure at all n locations
actaagctgacccgctattctactgaaagacattcgcctgttgttgttaatgcagagtgcactaccctctgggccgatcgctaaagggggtgtctctcggtgggcggcctgttatgcctggatgatcgtggaatatatcacatctatgtttactaaaaacatatgtcgcgcggttagaaatcctcagctgagtaaatcattccgatcgtcgttatatcccctgacagtggagacttgagctccgacctacaacctaagtcacgaggtgaacactatggatataaacgatgttgtcttgatgtgatgtgcaattatactagatgctaatctagtcttttatacttaatatggcgtaaagattgaatgtanggactcacttattagctactttgcaaagtataagtgattttgtaaacctttcttgatctattatccacatccctgaagt

SEQ ID NO: 37337 - DNA, 475 bp, Zea mays
  unsure (1)..(475): unsure at all n locations
gcttatcaccatcgccacttaggatcctgtcttgtntcccctctgagatcccatcgaatggacttatcgagaattaaggttcntactggcacctcaaactcttgactccctcctccttgaaataccatcctactacctcgttaagatcccaactcatcacccacaaaccatagacgccttatccaccacacacattatctttaacataggattcacaaagtttgtaacctatattaaggtcccattatgccagattgccataatctttatatctttcctcgccccacactaaatatagatgttgcgatgatgtgttgggtgagaaagcatacaagaaggacaagtgaggcggtatagagaanaaggcaagacatanaaactccatacatttatgtctggccccacaactataaatgtagcaccaccacacatcaatatcttgtgtgagcatgactcctagtgcattcaaagaaaa

SEQ ID NO: 37338 - DNA, 362 bp, Zea mays
ctaagcgccatgtgtgtgtttaaacaaaacaaccccgcaagcctcataaagctgctgatgcgaagagtgtggcacctctataacttgttcattctgatctgtgcgagatgaatggaattttgaccaaaggcgcgaaaagatactttctcacttttataaatgactccactagatttgctatgtgtatcttttacaaacaataaatgacagcgtcaattattttaaagcctataaagctgaagtgaaaaccaacttgaaggaaaaataacgtttatgtcgaacatgtggaaatattctctaagtgttcagaatttgctggacatggattattatgatagaaccgctttttacaaatcaatgga

SEQ ID NO: 37339 - DNA, 417 bp, Zea mays
  unsure (1)..(417): unsure at all n locations
agcttcttcaccacgcgcgcgaggatatcttgttaaagttgagccatgcgtcttctccttagttgctttggtttcttgttcctttctttattggatagcactttttcctttgatcctgcaacttgatgctcatccaagagttggctttcttttgagcaacaggggttagcacatggtgatatattacttagatgtgcacgtgtgccagaatgaggttcacaagtatttatgttcgctattacaacctcatgagcaatatcaagcatgatatgtctatcccagagattatcatgataacaagacaataaatcataattgtttgtaagagcaagtttatcatgacctaaccaatctacttgactcttaagcatgggattttctcattntaaggtgagcaacacaagataaaatatcatc

SEQ ID NO: 37340 - DNA, 179 bp, Zea mays
cctcttctgacccgtcgcctatctaagcctaagacgacagcagtatgcgctcactattgtggatgactgttcccgcctcactttggtatactttttgccggatagactctattcccaaggcgctcctccccgctccctgctgagatcttagaatgattattacctcttcgtgaacagca

SEQ ID NO: 37341 - DNA, 241 bp, Zea mays
  unsure (1)..(241): unsure at all n locations
agctnttgaagagatccttagtgatcacggtgacatttgtgctttctccagcgcccgagggaatgcgacaatattggagaagggtggttgcgaccatgttaaagctgcagcccaaaccgaagccgccttctccacagacgacataaaagacccttcggctgaagctacttttgttggcggaaaattttactctgatgtttgagtgaacagtggccgacatttggccgccgaaatcataaag

SEQ ID NO: 37342 - DNA, 493 bp, Zea mays
actataaaaatactcaagcttcggaaaagaataaattctgcttacactagtggataaaatatatgaagacgaagctacctctaaagctcaagctgaagcccaaaaacgcgaaattcaggatcttcagaaacaactggccagagctaaagaagaacgcatactagaagaaacaaaacgagaacttagtgatcaatgggcaaatcatttggaaataaatgttgaagagcttcgtgcttccaagaaaaggtactatgataaatccatagagtgtgttaagaagataaaatccagcttcgccagcgttggcgcattctctagcgaagagaatatcacaagggggaatccagaaggcccgattgaatggatcagtcacgaagctgaggccttcgaagaaattttgaatagccgcggagacatatgtgctctttcaggcgccacgggggattgctactgtttggaaagaaaggatgtatcatgtaaaattttagcacaa

SEQ ID NO: 37343 - DNA, 401 bp, Zea mays
  unsure (1)..(401): unsure at all n locations
ccacaaccagcccatgcaagtcttaaccattaagcatgcatctagaccggcctcttctcttgcaaaatcaactaaataaagtttgccgtctaatacactcttaaaagctagtgaaccatcacttcttctaaagacagacacatctacatttgtnaatagacagttatatcccatatcgcataattgactaaccgatagcaatatatattcaagagactctactaacaacacattagagatagagtgctcattagaaattgcaatttacctaacccttttacccttgcctggatcccatcaccgaatataattgaatctcgggaattcttgttcttgacggaggatgtgaacatctttttctcccccggcatatgggttgtgcattcgctgtcaatatccac

SEQ ID NO: 37344 - DNA, 318 bp, Zea mays
  unsure (1)..(318): unsure at all n locations
atcatctctctgctggaagtaaggccttcttagcccgaacctggataaaccttgagtttcatcttacatcaatccatctgggcaggggcacacagcataaaattcactagtcagttaagggccccccgggtccgaaacaccgacagttggcgcgccaggtatgggctcgctgcgtattgacaatactttcccgtgaagttccagatggacaatcttcagcagcctcttcagcccggngcggtgctccgctttgggagtctcgagttcatgtccctcgacggcagctacgacatgatacttctcccaccgcagcacaac

SEQ ID NO: 37345 - DNA, 311 bp, Zea mays
tgctatcaatgggaagcccggtcattttattgctaaatgtcctatgtctagcgacagtgaccgacgcgacgacaagagagggatataaaaggagaagatgaagtacctcaggatgaatgcgcgcaatgcccatgtttgtcgcgagtgggactcctacgagagctcatgcgactcctccgacgacgaggacgccgtctacatctccgtcatcaagggactcctctttctcaacgtcggccacatgtgtcttatggccaaggacggccaaccggaaaaggttaatctaactcctccactatatatgaatcttc

SEQ ID NO: 37346 - DNA, 272 bp, Zea mays
  unsure (1)..(272): unsure at all n locations
gtcacctgcggcatgcagcttaactgaattggataaccctaaaccgtttctgttatcaacaaatctatgtaagcctaaagaacattccaaattcattgaaaatatttggaaccctaaataaactgagcacacggattgttggatccaggttaaacatgcgaagatggggaggggggaatcctgacctgagactggcatgcacttacggaggaggggacgacacacacctcnaccactaacttgaacagaggaatgtgtattctgagatgttc

SEQ ID NO: 37347 - DNA, 333 bp, Zea mays
  unsure (1)..(333): unsure at all n locations
ttttaaagaagaaatggcttcattacaagcagaaagctcacgagaaagtattccatttcttttaacttctagagcaagtgaattttgagcactaacaaatttatcatgctcttcatatagaaggtcttcttgtgtctctaagattctatccttttcatttaaggcatcaatcagctcattaatcttagctatgctagctctatctaatgccttgaataaactagagcaatcaatntcatcctcactagattcatcatcactagaagaatcataagtattagcgttacgagtgattaccttcgtttccctcgccatgacgcacgtgtgatgctc

SEQ ID NO: 37348 - DNA, 247 bp, Zea mays
agcttgtcaacaatataaacacaaaagagagattgttgcttcggcagatcagccgaagcccatgcttttatgtgaagatatagtagatcaaagggtactggtggggtctcagctatctgatgagcaggaaaaaactttgataagaattttgttcaacaacaaagatgtcttcgcttgaacagccaatgatctctgtggtgtcaacagagatgtcatcgagcattcacttaatgtggatccatctttc

SEQ ID NO: 37349 - DNA, 516 bp, Zea mays
  unsure (1)..(516): unsure at all n locations
tcttcttcttcttcgacgtcatcagctgtcgtataaggcaccctcgttgcttgctagtaccactcgttgatctccggaggaggaggatggagaggtacatcangagagcggtgggcgataggagtacccaaagaggaagcctgacgacataggttgtcgtcagtctcccgctgacgtcgagccacctcatggacatccgcagcaatgttccggcacatggagaagaatgccgcatacccgtgggccaagcgggcacccatccctcggacatgacctcgaccacgaccacgtggtgtgggagatccgcggccaggagaagggcgcgaggcaccggcagcagcagtagcaggaccagcagacggacccgcagatgtatgagcacgagaactggagggggctttcctgaggcgcccttgctggattgttggatcaatacagaaaggggtatatgactgatgtcttgtaccttgtcaaatttaaacttgggtcacaactcaatcatcttcatgataaacg

SEQ ID NO: 37350 - DNA, 198 bp, Zea mays
catgcaaatttaatgtatgagaacacgctcgatgctttttaatgatctcgcccaagagtttctttctacacgatcttcggcgactaatcataccccctatagtagcccccttgcggtgctagatcgtttctcgtacgagcttgattcggaaagagtctctatgattcgtgaagcccagatccgaaaacacctttctta

SEQ ID NO: 37351 - DNA, 457 bp, Zea mays
  unsure (1)..(457): unsure at all n locations
tcacgcctcctgccagcagcattcataactctagcaatttcagctctatcaaagcaattccgactgcatggcttggcagcagagtaccataagaaatcagctacagggatttcaccttctctccttatactttgcctctcaggatcaagaagtatcacaacttgattnttcttttgcatctttttagatatcctagcaggaacgccaattcctcgtggcccatacattacatgactcgcaccagttacaacaacgagcattcctgaaggatctccattactaatttctttcattattgtctgggacatggtataatcatcgactactcttgcctgtgctgataaatatgagcttgggccaaaaggggaaccacgagttgatgaaatnttgtctatcaatgatcgacctgagatggatgtaaagccagaaacgaagcctgagccagctggaggagcat

SEQ ID NO: 37352 - DNA, 458 bp, Zea mays
  unsure (1)..(458): unsure at all n locations
ctccggacttgatgaacaggtggtgggggtttccactccagaatatctttgaccttgctaggatctaccgcaatacctttagccgataacacgtgccccacaaattgaatttcttccagccagaacgcgcacttactgaacttggcgtatagctgatgttccctgatgcgcgtcaatacaatccgtagatgctgagcatggtcctcttcattcttagaatatatcaagatatcgccgatgaagactaccacgaatgtgtgcaattcgggcatgaacaccgagttcattaagtaagtgaagtgggcaggagcatntgtaagcccgagagacattaccaagtattcaaataatccataccgcgtaggaaacgcggtcttcggtgtatcctacggccgaatacggatttgatgatagcccgacctgagatcaatactggaaaatactctgcgcccaggcag

SEQ ID NO: 37353 - DNA, 432 bp, Zea mays
  unsure (1)..(432): unsure at all n locations
agaatcactgaataaatgttttgtattaatgaaacgcgagagtcgagttgggcagcacaaactggcacgtctagcgtccgactagcaatctccaagagaggtcaatttcggaaatatgccagctagctgggactctggactagctagctagtacgagtagcactagcagcattactttcgctcgcggctggctggcatggcgacctccaagaacagcagcccgtctctgtctccgctggtcgtcttcctcctcggggcggcttcngccaccgtgctgctcctcttctttctgacggcgacagcgagccccgcgtggaacgcgctggaggccggtcctcgctctggctcatgcagcgtgcgctgcagtactagtactccacgagcaaacggcacggtggtcgtcgacgctctagagcaacacgccggcggagt

SEQ ID NO: 37354 - DNA, 354 bp, Zea mays
  unsure (1)..(354): unsure at all n locations
agcttgctnttaagataaatgaagtttatgtaattgcttccgcatttatatatctccgatgttctgtaatgtctgcaagactggtgaaacgttcctggtaaggtaaggaaagataccaaacttgtcaagtgacttaagaacatctacagggtgtctgatgtctgttggataaggacaactgtaggtgggcctaattacttgggaggttccgtcacattaaatgtgtgacatgactttaccttatgcttaaccgcagggccaaattaatgcctctttgataaacgagtgggttaatttataattatgttacgtgatctcttcttgaccgtatacgcgactgtcttcttctctttt

SEQ ID NO: 37355 - DNA, 513 bp, Zea mays
  unsure (1)..(513): unsure at all n locations
actcagctggccatgatctgctgatgaatgcctttctgcatgtacctctgtanttggtgcgccttaatgtccttgtcggctatcatcgcgtttttgaatgtatgaagctaattttgaactgcccgcggtatcgttcacttgtgatgttacaaagaaaggcactctattcctggagtcttctagaggaccactacaccctcaatctattcaatttggtggctgctgatgtgagcggctgtcattcctggtgtttgtcttgtacaattcaggttagcaacgccaaaccatgtgtattttatcgtcaaaagctgtactcattccgctccgtaccaaaataattgacgttcttgttgttaacatcggaaaaaaatacaagagaatattaatatttatagtagataattagtatcatcatatatctatttctataacatattcatttgaagatataaatatggctaatgattttataaatcaaataattctgttagaaaataccggcacgaatatgat

SEQ ID NO: 37356 - DNA, 426 bp, Zea mays
  unsure (1)..(426): unsure at all n locations
taagtcacctgcggcatgcaagcttgtgaaggttcttcatccncacatgttctaagctgttatgccacagccagcccatgctagtcttagctattaagcatgcatctagaccggcctcttcttttgcaaaatcaactaaataaagtttgccgtctaatacacccttaaaagctagtgaaccatcacttcttctaaagacagacacatctacatttgtaaatagacagttatactccatgttgcataattgactaacagatagcacattatattcgagagactctactaaaaacacattagatatggagtgctcattagaaattgcaaatttacctaacgcgttttaccttgccttgttctcatcaccgaatattaattaatcttgggaaatcctattcttgacgtaggaagtgaacattttcttct

SEQ ID NO: 37357 - DNA, 357 bp, Zea mays
  unsure (1)..(357): unsure at all n locations
tagcanaagaaatntctagaatcaagaatattgagctcatgctttattctggtaaaagattgttcatcaagtggcttggtaaagatatcggctaattgatctttactattaatgtaagaaatctcgatatcccccttttgttggtgatccctaagaaaatgataccgaatggctatgtgcttagtgcggctatgctcgacgggattgtcggccattttaattgcactctcattgtcacatagcaaagggactttggttaatntgtaaccgtagtcccgcagggtttgcctcatccaaagcaattgcgcgcaacaatgtcctgcggcaatgtactcggcttctgcggtggaaagagcg

SEQ ID NO: 37358 - DNA, 309 bp, Zea mays
  unsure (1)..(309): unsure at all n locations
agctngcatgaagtattggatataatgaatatattaaatcaacggactaagcaacatttattgtgtaggatgagcgtaacacaatgactggatgtgaacatgcgttaacattaataatagctggtaaccaagtatatattaaaaaaacattgttcatttgtatataatgaatatatatatttatgctgcatggaaatgctgatgtatttgggttgagctatataggaggacaacatgagaagtccacctgatgttggtgaatacaagtcttcgtgtcacgttgcacatgaacaaatggaacatattgct

SEQ ID NO: 37359 - DNA, 414 bp, Zea mays
  unsure (1)..(414): unsure at all n locations
tgctngctngcctgcctgcctctgatagtgattatttattgtttcttcttccaaggcatgagaatccgnctgtttcgtttcgctcgttacatctttgtgtgtactgtgtaggtatagctgctgctgctactctagtcgtagctagcaacatcccgtctctcccgtcccatgcatctcttcttttcttgcatctcagctgtacagtactagattagagacagatcagaggtgcattgggaaatggtgccatggctgacctgttcttcttcacctgtctcaactgtagtactcctactcctactgccatcgtgctgggttgcagcagcacaggcgtctcagtgtgtgtgtgtgagagagagatagtcgccgttcgtgtcttccggggggtgctgccggcctgctttgcatctggac

SEQ ID NO: 37360 - DNA, 255 bp, Zea mays
  unsure (1)..(255): unsure at all n locations
gacccgggacctctcagtcacctgcggcatgcaaactcgtcgttcgtgacatgtatctattatgctatcacanccacgcatccagtggtgcaggtatggaaatcaaacatgttggtcattcattagtccataccccaactcgcaatttaagtctaaacaatattcctcatgttccaaaggctgctaaaaatcttgtttcagttcatccgttcacaaaagataattctttctttcttgaatttcaccctgattatt

SEQ ID NO: 37361 - DNA, 359 bp, Zea mays
taacaagcgggaggagcgcctcacaacaagaatgtgatgaccacgtcaaaacctctggagctgctacatatagacctcttcagacccgtcgtctatctaagtataagaggaagcaagtatagactagttattgatgattacttttcccgcttcacttgggtattctttttgcaggataaatctgaaaaccactggaccatctagcgcttactgacgagagctcaatacgagtttgagctcaaggtgaagaagataaagagcgacaatgagtccgagatcaagaatcttcaaggggaggagtaccttgaggaggaaaggatcaagaactatttctccgctccctacacaccacagcaaaa

SEQ ID NO: 37362 - DNA, 340 bp, Zea mays
aataaagaggcaactctcaaggacaaaacatgaataaatctagacaacaatgacttacctgcacttgcgcgaccattaagtgctgaatctttagcctcttctcctccaaataacccagcttgctttctgaagaaagtatattgatcaattgcagctgaagcctttgaagatgagcttgaaagtttctttatggccattgtcacaacatgttggaactttgtgtttcttgccattttggaagttttaccgctttaggttaaggcagtactatgaaataaatggcacaacaatcataactatatgttaatacctgaaatttaaggttaagggcaccatcctc

SEQ ID NO: 37363 - DNA, 442 bp, Zea mays
  unsure (1)..(442): unsure at all n locations
ctcatgaatggtaccttcggcatgacgcacgagcagctttatgtctaatctgttctttccgcatgaccttcggcgacgaagcatggtcccaacaccaagccttatctaagcattctaagactcctagactctgcctccacgcatttgatcgattgtgttagtganttgaactccgtctgagctgcaaactctttgtgctgtgttttgagctcaaatcttgattatgtgcttgagtgtgctacggattttggtcttgcgtgtgttgctctcccatccttactctacgggtttctttgtgatctatattgtaagggcgagagattccaacttgtggagattcctcgcanacgggaaatatactcaaaagataaaagaccgcggtattcaagttgatcattggatcacttgaaagggcgtgagtgcaacccttgttcattgggac

SEQ ID NO: 37364 - DNA, 186 bp, Zea mays
agcttctgcgcgtcgatccgtcctccgtccgatcaggtgctgcgcccttccacgggatcatccctgggaagcgcgttcagcccctcgggtgactcgacctcccagtctgcttcgggacaccctccaacttccgaagggagaccctgacgttcgaagtggtcgtgattctacgaacctaccactgtc

SEQ ID NO: 37365 - DNA, 418 bp, Zea mays
ggaacgcatgccaagccgggaagcaagttggcacccatcatccacacaagaacatcatgactagtgacaggccactggagctcctacacatggacctattccgcccgatcgcttacataagcatcggcgggagtaagtactggctaattattgtggatgattattctcgcttcacttgggtattctttttacaggaaaaagctcaaacccaagagaccttaaacggattcttgagactggctcaagatgagttcgacttatggatcaagaagataagaagcgacaacgggacagagttcaagaactctcaaatcgaaggtttccttgacgaggagggcatcaagcatgagttctcttctccctacacacctcaacacaatggtgtagtggagaggaagaatcgaactctattggacat

SEQ ID NO: 37366 - DNA, 427 bp, Zea mays
agcttagtctgagggcatgagtgagtggctctaagttcacctcctggggatctaattaatagtttcctcttcaaaggatagtttgatatattatgcttttccacaaatgactttgttacgaaagagtgagatgctccagaatcaaataaaactgatgcaggtatggagttaataaggaacataccatacaccacatcggcatccttaggagctatttctgccgtcacatgattaattcttcccttaccctggttctgaagggtcttgttctgtgcagttccacgagcaggtgtattctgatcaactctttgactgctgttccttttgggtgtctatgggttgcgcttgggcaattgttggataatgaccagttcaccacacttgaaacatccagtaggttggactggagtaggtgtattgatattta

SEQ ID NO: 37367 - DNA, 500 bp, Zea mays
  unsure (1)..(500): unsure at all n locations
gaaaatagaaaatgtaaattaattaatgaaccatagagtacctctanttttgttagggtacttattcaatatagttcactgganaaatatatcataccctgttntagtgtaaaataagtaagatccctgttgtcttaataaaacaagtgaaacttagaaaaactctacaaaaataaccccaaggtaaaaacacccccacccttgggataactattgttttattagagaaaacttaagaaaaatatgaaatctgctgtttgacattnttcaaataataatgtagtagaaagtgcctttttgacataaaacttaagaaaatcataactaaataaccaccccttagttttctgtgatttttggacagaggcctatgattaccagaggatgccaacananataacctttaggacagaacctacccctaactaagaggagtagtgtgaagtggcccattttgcctaacttttngtatttttgttaaagcctaactttattactta

SEQ ID NO: 37368 - DNA, 517 bp, Zea mays
  unsure (1)..(517): unsure at all n locations
tactaagcttccgtcactacgacttcattttcttcatgggtcggacaagtcttttcttcttcgtcggccctcacaacggacaagtgccggaaataccttcccctcatgttgacaagatgattttctttgatacttgatttgccgaaaaccgcatggcttggtcgccaagggcgatcttcggagtcttcaccaccactatccacatcataactgtcgctgtcatcagtatcttcagacaaaccttctaaaatctctttggagattttttctgtattggtcttcgacattgctataagaaaccccaggtttttctcttcagagagactcagcttcatctcggtagcagccttcttatcttcagacatcttcggaaacactaaaaaactggtntcaacaccgaagcttganaacttaataagctaagcaagtcttggtgcgcaagagctaataattgactgagcaagagcagatggcaagagagcgtaccatatgagctcgcggtatgctcttatttata

SEQ ID NO: 37369 - DNA, 209 bp, Zea mays
  unsure (1)..(209): unsure at all n locations
gcttgtgntagggatctagcaatattcagctttctattgtctctcattcctaaacacaccatgcacactgctttcactccgaatcacttcttcatacatctcctcgactttgttgtctcgtatactatgtagtgttgtttgtgggctttgttgtacgaatgttctctgaaggtcttggaattatggctcggtactatcctatttcagaa

SEQ ID NO: 37370 - DNA, 406 bp, Zea mays
tgtccttgtcgtcatcaaccttaacatagaaccactctgattttatctctgctgccatttgcttcagtagctaattacaggaaactttgtagatttccgatatgcgaaggtatatcaaccaaaattgtcgtgcaatacatcctttctagccttcgtttgataatgcaactcgtgaacccggcaaaagctgtccgcaaatggttccactgcttggcttcaaagtgcccagatataaacaataagtctgacgatagcgttaggggtcatctggtgaaaatagataccgaacctcttcagtacctctgcaataatcccatgtacggggaatcttaatccagctcttataaagctcttgaaaataacaatttcatacttctccggctattgggtagtctcttctccccga

SEQ ID NO: 37371 - DNA, 381 bp, Zea mays
agcttgtgaaggttcttcatccacacatgtgttattcggcgatgccacagccagcccatgctagtcttagcgattaagcatgcatctagatcggcctcctcttttgcaaaatcaactaaataaagattgtcgtctagtacacccttaaaagctagtgaaccatcacatcttctaaagacagacacatctacatttgtaaatagacaattatatcccatattacataattgactgacagatagtaaaatatattcaagagactccactaaaaacacattagagatagagtgctcattggatatttaatcttgcctaaacctttcaccttgcttggttcccatcaccgaatatgattgaatcttgggaatcccttatcttgac

SEQ ID NO: 37372 - DNA, 469 bp, Zea mays
  unsure (1)..(469): unsure at all n locations
ttcttattccacatgggctagtcggcggtgctctattcaacccatgttagtcttagcaattaagcatgtgtcgagttcagctctatcaaaatctactaagtatagctgaccctctaacacacccttaaatgctattgaatcatcacttcttctaaagacagtgacacctacatcagtgaaaagacagttgtaacccattttgcataattgagatacaaaaagcaaattgtaatctaatgaatctacaagaaaaacattgaaaatagaatggtcggaagatatagcaattntacccaatcctttgaccaaaccttggttttcatccccgaatgtgatcgctcgttggggatcttggtttttctcgtaggaggagaacatcttcttctcccgtgtcatgtgggttgtgcacccgctgtcgatatacagctngagcccccggatgcataaacctacaaaacaaaattagtct

SEQ ID NO: 37373 - DNA, 288 bp, Zea mays
agcttagcaaaagagatatctagaatctgtatattgatctcatgcctaagtctggttaaagattgttcatcaagtggcttggtaaagatatcggctaattgatctttagtattaatgtaagaaatctcgatatcccccttctgttggtgatccctaagaaaatgataccgaatggctatgtgcttagtgcggctatgctcgacgggattgtctgccattttgattgcactctcattatcacatagcatagggacttttggttaatttgaaaccgtagtcccgcaaggt

SEQ ID NO: 37374 - DNA, 421 bp, Zea mays
accatacccgttacgtggccatttgcgtgctgggggactggacatgattggaccgttcaaaaaagcttacagaggctacactcatgtgttggtcgccattgacaaattcacctaatggatagaatacaaacccattgcttctctaactttagccaaggcagtggaattcatactagatataatattcaggtttgggatactgaatatcatcataaccgacctgtgatccaatttcactagctttgaattctttgatttctgcgaacaacggagcattcatatcaaatatgtgtcagtagcacacccaagagccaactgtcatgtggaaagggctaatggaatgatactggaagcactcatgaagatagtcttcgacaagaatgaaatgttacagggaagtggatcagagaattaccttatg

SEQ ID NO: 37375 - DNA, 209 bp, Zea mays
  unsure (1)..(209): unsure at all n locations
agcttctcatcatgacaaaatttattatcattctgctntacctacttatcatgattcacatgctatgttcgcatctagctccacatatgttcatgataagagtaagccttggcgcaatcatactatntctcatgcacctaggaaagattacactggtccaactgctatgtatcaagcgtgtnatgcttattttgtataaaaataaaaaa

SEQ ID NO: 37376 - DNA, 485 bp, Zea mays
  unsure (1)..(485): unsure at all n locations
cttcatttcaacatgggcaagtcgactatgactgtgccaacccatattaatcttaacgattaagcaagtgtctagttcagcattgttatcattaaaatcatttaagtatagttgaccatctaacactcccttaaatgctactgaatcatcacttcttctaaagacagtaacaccaacatcagtaaagagacagttgtaacccattttgcataattgagaaactgagagcaagttgtaatctaaaaaatctacaagaaaaacattaaanatggaatggtcaggagatantaacaatttacccaaacctttgaccaaaccttgatttccatccccgaatgtgatggctctttgtggatcatcatttntctcatatgagaacatccttctcttccctatcatgtggnttgtgcacccgctatcaattatccaacttgtcccaccggatgcataaacctacaaaacaagttanagcctttgtctatgta

SEQ ID NO: 37377 - DNA, 419 bp, Zea mays
  unsure (1)..(419): unsure at all n locations
cggatccttaagtcacctgcggcatgcaagcttgaagccatggtaagtagcttatgcttataatatacgaatngactcaagcctagctacgggtgcataggtttcaccgaaatctaaaccttcgacttgggagtatcccttggccacaagtcgggctttgttccttgtcaccacaccatgctcgtcttgcttgttgcagaacacccatttggttcctacaacattttgattaggacgtggaaccaattgccatacttcgttcctagtgaagttgttgagctcctcttgcatcgccaacacccaatccgaatcttggagtgcttcctctaccctgtgtggctcaatagaagaaacaaaagagtaatgctcacaaaaatgtgcaacacgagatctagtagttacccccttatgaatgtcac

SEQ ID NO: 37378 - DNA, 476 bp, Zea mays
aaatgataggtgaactgcgtttcttcatctgacactatcttcttcggcacaccatgaaagcagactatccgtgacatgtataactcagctaacgttgctccggtgtatgtcgtcttcatgggtatgaaatgggccacctttgttaagcggtccacaaccacccagatggaatcataaccggcccaggtacgaggtaggccaactatgagatccatcccgatctgatcccacttccactgaggaatccgcataggctgcaacaatccggcaggcctctgatgctctgccttggtcctctgacagctatcgcagatggcgacatattctgcgatctctcttttcatgccataccaccagaaccttctttcaaatcctggacatcttctactccctgggtgtatggagaagctgtctatgagcttcttgagatagttcccaatggtttgaggtcggacacacatcgcctgaacatatat

SEQ ID NO: 37379 - DNA, 408 bp, Zea mays
  unsure (1)..(408): unsure at all n locations
agctngtagatgaccaatatatgggaacaatagtggatgttgaccttgttgcgttagccaaagttcatatttttacaattcatctgcatacaattcctggagttttccttagttgtattgaattagagcattttttttccaagcacgcttaggtcttttacccacctgaaacacttgtttttaattattactcatatgctgcatttcctttaacacaagatgatttacataggatgcaaccacagcctatatgcaagataaaggaaaactttctggttatcagttatcactggtatatatggtaacacattcatgactatcttggtaaaactgctaccctgataatttaacttattgaaaccgtttcccatgatgtcaaatatacagtcatagtaatatatacaaatg

SEQ ID NO: 37380 - DNA, 373 bp, Zea mays
tggtgaccacgtggcggtgagcggtatggatgctgagtcccaacaggagcgggagaaccaccctcctggtgatggcgctctgcaactcgcacgcaactccgcaatctccgttcgagccatgcttagctcgtccagagagtgatccagctccgtgttaagcactgcgactaggttgactgtgctgctcaacctatggttagcctcaccaacaggtgagacaaccacaccctctgtgctgccagtatggcggcggaggttgtacctaaggttaagaccgtcggtcacgccaccgaacatagaacagtactgggagagtgcacgccgagctgcatcctcatagccgcctctgcagtgtccctctccgagatggaat

SEQ ID NO: 37381 - DNA, 316 bp, Zea mays
  unsure (1)..(316): unsure at all n locations
gcttctaaagggagagcacattntgggactaacaaatgttcattntgagaaagacaggatttgtagcgcatgtcaagcanggaagcaagttggtgttcaccatccacacaagaacatcatgacgactgataggccgcttgagctactccacantggacctattggcccgatagcttacataagcatcggcgggagtaagtattggcttgttattggggatgattattctcgcttcacttgggtgttctttttgcacgaaaaatctcaaaaccaagagaccttatagggattcttgagacgggctcaaaatgagttc

SEQ ID NO: 37382 - DNA, 484 bp, Zea mays
  unsure (1)..(484): unsure at all n locations
tgctgttggcttcctcgatcatcagttttagcagagntatggattgacctaacatgcctcgggtgaaatcttcctccgaagcccctggtcatttcagaaaacctgaatgcttcctcccttctttggcggaagtcattgtcagctcgaatgtactcgtccatcttctggagcagcttctccaacatttgtggtggcttcctggcaaagtactgcgctgatggtcccggccgaagccccttaatcatggcctcaatgacaatntcattgggcactgttggcgcttgtgctcttaggcgcagaaacctccggacatacgcctgaaggtactcttcatggtcctgtgtacactggaagagagcctgagcggtgactgtgcttgtttgaaatccttgaaagctagttatcagcatatccttcaatttctgccaagaagtgatngtccctggccgaagagaagagtaccaagtctgagcaaacgctctga

SEQ ID NO: 37383 - DNA, 201 bp, Zea mays
  unsure (1)..(201): unsure at all n locations
agctntgccgagtgccacacagagcactcggtatataacctgacaaagggacccgctggtggatcctctgccgagtgcatgtacgtatacactcgacatagaggtgacttctctgccgagtgtattaggagacactcagcaaagctgccgtctccattacccggcgccgtgacagccgcttttctttgcccagtaccgact

SEQ ID NO: 37384 - DNA, 283 bp, Zea mays
gaatggttggaaatgattgaagctatgcgcaatgagattgtgggcctctatactaagaaagaataacaattgatgaccgcggccttcgacacccgactgaaacgaaggctgaaccgagttatggatgccctaaagttggaataccctgactatgaacggttaatcaacggtgccgaatggccatagcgaaatagagttgtcaacgttatgatgaggcatgccgctctattgatagaagaagatgagaactctttgaataagataaaaatacagccctgagccg

SEQ ID NO: 37385 - DNA, 347 bp, Zea mays
  unsure (1)..(347): unsure at all n locations
agcttctagtaacgccatgctattcttggtagtttcattccatttatcattacttgatcattgtggatatctttccaggtagcaccgccaagggctggaccatatgaatttgaatctaaaatgtctatgcaacgaagctggaaattgattgcctatagagtccagtgactacgacagagcatatgaaccatgatctgttaacataaattgataggatatgacttaagaatgatatgactggtgaaaaagaaagttaatattaaaaactgaatatactgggagccncataacagtgttttggttcaaaaaggaacttataaaaaagaacattaatataatcttacaac

SEQ ID NO: 37386 - DNA, 411 bp, Zea mays
tacaatgacacacaataagatcagtgaactactcttttttacacaaaagaaaaataatatggacaccgacacatgctaaagtggggaaatatccataatggcatgtatcgagcagtagttctacaaatatgcaccaaacctccctaaaatagcactatcttccccaaccaatcacctgctctctccagggaacgcaaggtgcaaaaggccaaagatttgcaaagacaaaaggtcttacaaaaacagagagagtactcagcacatcgccttttcaaaactttttagcaagtatctcattataaagaaatagtctttactatcccagctcacctaaaccctactctacgactgagacataagagattagccacacacaatatctgggtcttgttccatattgtattcaatctt

SEQ ID NO: 37387 - DNA, 53 bp, Zea mays
gatacccggtctcttcttatacgcctatatgaagcaatacgattactggacgc

SEQ ID NO: 37388 - DNA, 501 bp, Zea mays
  unsure (1)..(501): unsure at all n locations
gcctcaccccctccggcggcagcgatgcgggttctgtctgatgtggngaggaggttgaagacgccacagcacctatggtttctggaggaggcggagcatgggaaggacgccgcgtgggtgcaggattggaggaggagcttgggtcctgtgcgtcggcgaccctacgtttcttcgggtgcggatccgccggcggcgacgccatgatcgggctgccacggggagaattctacgacggttcggccacagccgattggcgtctctcgacagtgcttccctgagacggagacaaacctcatataaaatggagtcatttttacttgtgtaaataaaaataaaaaatgaaatgtacgcaaacttcttgtggctgacgggtaggactatagaacttaccgctgcaacctcaagactggttggtggaacttcccggtagtctcagcaccgtgtactagtgtggacatcaactgtatgaaaatgagggtntccagacacatagaacgtgac

SEQ ID NO: 37389 - DNA, 132 bp, Zea mays
attggacattatctttccctgactattggtctctctcgcgcacaatgaagcccggttactctaatccggtgaaactgcctcaaaacctctcacctgtgagagccaggttattgaactttcttgatgaaaaat

SEQ ID NO: 37390 - DNA, 488 bp, Zea mays
  unsure (1)..(488): unsure at all n locations
tctctatctgatgaatcganaagtgaagtggttgcttattgggttggcggcttgctgagattcaagccgcacttattgtcgagaaagttgctcacctggctgatgcggaagcttaacccacaaacgatgaaattagagattggtggtggaaaagagattcaaatcaccgaacacagtggttggtgtgttttgcagttaccaaacgttggcagtgatccgcccnccatgtctgatgcagatgctcgtgccttgcgggacgagctgggggagcaaatttgtggcaaatcttatagacgcatatctggtatcaatatatctggtatcactgatagattgcagaagaggactcttcatggggagctggacctgagagccttttcatggcgcatttcagtggctgctattcttcatactgacactcgcataggattgatgatgtgagttcactcaggacatncagaacatgggcaccngaactggtgcaaact

SEQ ID NO: 37391 - DNA, 212 bp, Zea mays
  unsure (1)..(212): unsure at all n locations
agctntggaatcaccgaataggtgtttgaccctctttctatctgggcngcacggctgcatatgaacatgtggtaattataagcaaccctacattaagaattaaagagctccattatctataactgagcagacattcctcattttttctttgcattggtgaatccttaataaggaccagagcaatggtcaagccatatctctctcaccttctg

SEQ ID NO: 37392 - DNA, 373 bp, Zea mays
  unsure (1)..(373): unsure at all n locations
ctccggcanacagatatctctgtgctatccggtttattgtacacaaaatcttcttctccgctgtcgctgaacactaatgctcccttcggatatttcagcttctgggcctagtgttgagcttctcgttcttcttctttagagagtctttgtctcgaagcattacggatgatatattcaatactttcttttaaagcttctggagcaggagcggtaactttttcaggcaaagtctgttctatagcctcttcctctgctaccttctcttcaatttctgagggttttttctcagcaggctctgaaggcccagcttcggcactagcctggctcactacagcttcaacttctgtcgattttgtttcagctttgatttgca

SEQ ID NO: 37393 - DNA, 355 bp, Zea mays
  unsure (1)..(355): unsure at all n locations
tacatcgtatgagcatgatgaatacctatgtgctctccgaagtacatatgtaagagatgtgatgtcggttattcacctttatggcgattaccattttatctttcgaaattatggtcaagcacagggtagaggaatcctaagtattgattgcggtatgtaccttgaatatatcagccctaaaccatgctatacgctagacaagttctcactactgggagatctactccattgtttcaatacatggagattatctacgttgtgtccaccaattattaaaattcttttggtcactatatgtgatatccagaatactgcacctatgaagatanatatattttctgcaatattacacatc

SEQ ID NO: 37394 - DNA, 507 bp, Zea mays
  unsure (1)..(507): unsure at all n locations
acactatnaatactcagcttaggccccttgtccctgtccatatgattctgtggtcttgttattgttagcacaaaacagagacaaaaaggcggcaaacaatgtgaaccctacaactatctctcanggtggttgtggtggtggaatacaaattatgaagcgtcttaccccgctcttacaancgtcttaccagcactgcaggtggcaaatcgtgaccggtgtgactgtccaacgagcgtgggtgtgattgcaaaggagtacttgttctgctcgagagaaaactagagttctgggaaggctgactaaatatatatatatatatatatatatatgtggcacacaagtcagtaacagatagcaatgctgaataagtgttccaagtactcatcctagatgctggcctagaaaatataatataacagttggaccaacgcacaagagaggaggtacatgtatgtagtaaatatggcagttctgtaaatagagcggatttttagcactagtagaatc

SEQ ID NO: 37395 - DNA, 400 bp, Zea mays
gcaagcttctgtcaaggatgttcgtttcaacttgttgcgcgcactggataatttagctcatgctgctatggttgtcttcccatagctagcagactattaatgcctattatgttttcttatcatgacatctatttatactttgttgcttccccgtttatgccactttcataggagatgctgtctaaatgttatataccaatgtcagatgtgtcgtaaataccattctggggtgtttgtggaacccgtggtgttacaatgttagtccccgttggagtcaaccgatggattcttctgccttgttgcgcccatacattccatgcgaatggcttctttgaccacttatacttctgccttctgacccgttcatccatcgtttggaaaataccattgtcctggcttc

SEQ ID NO: 37396 - DNA, 335 bp, Zea mays
  unsure (1)..(335): unsure at all n locations
tcctaaaagattaaatgagaagtgtcccgatatgatattggttattccttcataaaaacatataaaataagtattctctcgaaggagttttataaactatatcttaatgtacttgtntttctgatcttgtatgcatgaaggcatatttaaaagactttgcgtaaataggataatagataaaataattaatcaaataatatttgcatttcatgctgccatcttttttgaatgatgcatgtgagtcaaagatcgaacctcattcttaatnctaattcaaaatttaaacatgaattaagtctagaatctgcgaattagagaaaattataaagaaaatg

SEQ ID NO: 37397 - DNA, 342 bp, Zea mays
  unsure (1)..(342): unsure at all n locations
ggatcttacactcgctgcactctcctctgcgagcatatagccgtgtcttcttttgacactcttggcgagggtttgtaaatggcgagctgcaaactgaatgctatatattatgggcgngctgcttaaccgactcacttcgagctctatgctatgcctacagctactgatgttttgaactgaacatacactgctactggctatatgctgtaaaaaaactttggccctcatctacagatgctatgatgccacaatatgttataagacatgtagcatctggtaggttcaggctgactttttagacttacatcggaattcctttggaatcatttgggtgcgttaaaa

SEQ ID NO: 37398 - DNA, 118 bp, Zea mays
cttgttgaacacgatgtcctgatctgctctgcttctcattgtgcactaacacacctgtcactaagtctatatgcctgctcattgaccaactgtctcgtggccttatgctacatcatca

SEQ ID NO: 37399 - DNA, 170 bp, Zea mays
atgttaacaagggtcttacgtttcgagtcccttagttttcataactgccctaggcgacgttgcctggccgcggctgcatttttaactggcactgacaggaacgacctccctcgggctgcgtgctgtacaataagtgttctcgcagactgagccgtccctcacagacgtca

SEQ ID NO: 37400 - DNA, 101 bp, Zea mays
ctcggacccttacgtcggagggactagcctgttcaccacgcctcggatattactgcggacagggacgtgcacctgcgttcgcggaaacttactgacgttcg

SEQ ID NO: 37401 - DNA, 75 bp, Zea mays
gcgtggccggccaaccacaacttacccttgcgtttacaggattcctgtgccgtgactctgaattgcataccctgc

SEQ ID NO: 37402 - DNA, 179 bp, Zea mays
atgttgacagttatcatcgaattctgcattctcgctatatactattagcgacaccacgtaggacatactgctaaaataccccgctgcctatcatatgtgtatatactttgcactgagcatcacgtgaaacaatccgataactggctgttaattgctggaacggcaagtgcttgccgtat

SEQ ID NO: 37403 - DNA, 250 bp, Zea mays
ttgaatcccatcaaatcgctggacatgtgggtcatcaattttactgtagttacgatcttactgtgacggccaaatgattttccgcaaacgcccttgtgactgcaatagtgatgtcctgagcgcgcatacatcataatgctgacatgacctcttatattgaattataagatatcgcatgagactacacacttgtcactcgcatacacgattataataggaatgcagacatttagccaaacttcagatcaca

SEQ ID NO: 37404 - DNA, 230 bp, Zea mays
atgttgcacatgcttcataatgctaactgctgacatactctatctataccaatgccttacttcttatgaaagacttgtctcataactaatatgtgcactggcttaaggcaaatatgtatccttcacgccatattatgcgaggacctattgactatgacatgctatgactactcttgactatctttctttgacaatctattcacatccgcctgctcataatgttcagtata

SEQ ID NO: 37405 - DNA, 224 bp, Zea mays
actatatagctggaaaaattttctggcacacaacttcagaattgaaagcttttccaaaattacgatgaaaactattcacgagaattgcataatggctcattgctatgtgtgactggcactcgactgtttaagccttggggacaatgctcctttgtgtggctgtgacggggggggcgagtgtgcacaactgagtgatcctaacaacaaatgaggggtgctctatt

SEQ ID NO: 37406 - DNA, 331 bp, Zea mays
gcacgcgctgcactttacagatgggtcgtcgccagccatgtgattgccttacgctaacactccctgccttgctctggcactttatgagagggttgagcgtgttcaatgctaaataccatctttttagggatgaactttttcctccctgtgtttgtagataaaccggctttgtgtttaattgactatctactcgaacttctagtctcacgtcttatttggtgagccgttttttctacgaaattccctatagctggcgtaagaccgcgggagactctttcttcgcggtctgaaccacgacttcagaactttttcttggggccacggccacatc

SEQ ID NO: 37407 - DNA, 122 bp, Zea mays
accgggcccgtgggcacctgactttaaccacaggctctctttgctgtgctgctcctcccacggaaagcgaagtcagtgtctcccaccggaaacttatccccgcgcgcttgcgctgctgcccg

SEQ ID NO: 37408 - DNA, 144 bp, Zea mays
cttgtagtataatttttaaaaactggaaaaaactaccttgtgtcctctttgtcggacttctccacttgaaagccggtgatacaggttttaatattcccaaactcagtattctcatgcactgctcggcagtaaacaccaagcaac

SEQ ID NO: 37409 - DNA, 70 bp, Zea mays
gtatgacctccatgtacacatccaagctcgagatgtcgggaacacattgtttaacaaacagatcaatgag

SEQ ID NO: 37410 - DNA, 323 bp, Zea mays
tgcactgagcattctacttcgcaagcttgttgttttgttttatactggcttctggctggaaacctacttctatccgcatagggtcaactatagttactacgactgatcatctgccagcgcctaacacctttctacgaaatgattccttagtccgccatcactttctggactagagacctgccttcaaaaaaattagtataatatcttctgccgggaaattggacattgtttcacaatatcactgagagtgtttacactcaacaataaattgtctctctcgaccatatctcaactaataacattctctttcaatacacgcctgg

SEQ ID NO: 37411 - DNA, 119 bp, Zea mays
ctggagcagtgcatatatccacaacatatgatggacagcctgactctccatgacatcaccgacctactaacacgcggagaaacgcagtatggggatattccttctggatttttgagaaa

SEQ ID NO: 37412 - DNA, 148 bp, Zea mays
gaaataacacgtaattctagagctgggaattctgcgtaacccagtattacccggcagtacttaaatgtatggaatgaagccgctccacctaatccttcagtacattgaaatggtctgtaagcagctcaaaaaaacaagttgtcgaagt

SEQ ID NO: 37413 - DNA, 162 bp, Zea mays
ctggcctttcttgacctaacaacagcagttgttctattttcacctgactttagaaactaaagttcgaagataggacagtgaaaacccgcatcaagctctaagcgcactcacattggtatgctgttatgagactgcactaactatatcagtttagtctaggtg

SEQ ID NO: 37414 - DNA, 195 bp, Zea mays
acttagcggctcacgccctcaccgtcaaccttaattcatctgggaaagcgacgggtgggcacacggcgcctggggacgcaacacttattcactccttcttcaccgcacctgtgacttgctcgcaattcatgacactgcaagctgcgattcggactctccctggctcggttcactggccacgaacctcgatctcgt

SEQ ID NO: 37415 - DNA, 176 bp, Zea mays
attacttatgaatccatttatcctatgctattactacaatacaatatatcaagtcctaaacctaaaaagctcgtaaacatttctaacttactgctggtcatacgaatatgattgggactgttgaataaaacacttttccgctggtgtctctgcatatcataccccggaaactcttc

SEQ ID NO: 37416 - DNA, 214 bp, Zea mays
actccgactacacggtcactaagaactaagcatagcataaatactgcctgcacgaacagggacctccaatgggacttaactgactgtgttgcttcaccgctttactaagaaaatgcatatggaacttcgtctgggtttagaattaacagactacctttaaacaatattactaggaaaagcaccgtcataactatggatttggggtaccattctc

SEQ ID NO: 37417 - DNA, 281 bp, Zea mays
gttgtctactgtagaccgtgtcgaaatccactctagcacactggctagtgacgacttactgcaagacagctagggacctacgcaggtactggtgcaaactgtggctgacttctcaccctttgacttcgagcttcgaatgacatacggcttacgcaaacatagctcaaatacctacaccatctacttccacctttgaaacctcttgtgcgcttgagttcctgaccatctgcgcatccttttgcctaagatagactctttcacactgtgaatcaattgaataa

SEQ ID NO: 37418 - DNA, 266 bp, Zea mays
  unsure (1)..(266): unsure at all n locations
gtcttgcggtagactgcaagtcactctgtctcaggtgtcaaccctgtgtgangtataacaacaaatttgtgttctgctcaagtgaccaatgagagcaaacatgatcgtgtgtgcggagatgttgctccagtgaaatctaactttggtggaagggtttgctccacgatgatatattatgactcatacaccggactgaatatacttttattttataatgaataagtatgaatcgcttccgtatctatctctgtggatgatgtcacaat

SEQ ID NO: 37419 - DNA, 215 bp, Zea mays
gtgctatccagttttggcatgtactactcgggagagatgctgatggggatactctcatgggttttgagaaacttccaaactaaggctgacactaacatcgtatgataaataaacaccgcgatagactcatgagtctggagagtactgattttctcccccaaggggggagaataatttgctgaactgtgagctctgtgttgcagggacccttccca

SEQ ID NO: 37420 - DNA, 245 bp, Zea mays
actgtcttcctctggagctttagaaacaactccttccaactatcagggcttgtaggccggaaatttgctgtccgtacaaattctccggaagaaactgtttgactaaagctattgaagtatggtgcgtacttatctaagtgaactttgttaacaactttgttctattgccttgcgtgctcagcctaccaactaataggcagttaactcttagtgctgcagctgagtattatttgacataaaaactt

SEQ ID NO: 37421 - DNA, 166 bp, Zea mays
acttatattgaaagtctgtttaagtgttgactggttttttgcccttggagaaaaagtggaatacaggaacgtatggaagactcgatgatggagcttaaataatgactttctctgcagctatttctttcgctggctatactaggtaggattatcgagtgaagtggta

SEQ ID NO: 37422 - DNA, 233 bp, Zea mays
  unsure (1)..(233): unsure at all n locations
taccgacctcactattatctntactaccgatctaactaaggacagagctntcagttcactatactttactgaatgccttttgcgtcggacactaacacactatacatggatggattttcctactaatctggtaagtgagtctataagaccccaaccacgatattctgcccttggtttgtccagattaggattggatggaaaatcaacagtgtcgcggcctcaactgctatata

SEQ ID NO: 37423 - DNA, 124 bp, Zea mays
tgatgcttgtagggattcatataacatataacacaacctgtcagtctgtgtgtgaatatcgaggcactacatgtgattgcgaggtacattgcttctcgaccgcaaggatggtggatatgattat

SEQ ID NO: 37424 - DNA, 134 bp, Zea mays
ggcccagatacaacgcacggggcattttcatactcgacgagccgaagggaactggtgtccttgaggaagcgtcttgcgaacgccacttcagtactactcacaattgaaatggggcgattcagttagtgctagag

SEQ ID NO: 37425 - DNA, 57 bp, Zea mays
gtgctgaaaactctgcttggtttatctaaaaagctgtcagattttcaaactgggaaa

SEQ ID NO: 37426 - DNA, 145 bp, Zea mays
  unsure (1)..(145): unsure at all n locations
cttattcctctctttttattgaatatgtcaacccacttgcaacgaaataatggcacacgtcttncaccaagaaactgaagctcaattatctcntgtaatacaccataatattcagcattgcatcagttgattccttctgaaaaac

SEQ ID NO: 37427 - DNA, 98 bp, Zea mays
gcatggaaaaaggctctaaactgattagatgtggctgtgacaaaacatgccgaaccaacttgaaatattgatcactcaagtgaacttcttcagttttg

SEQ ID NO: 37428 - DNA, 110 bp, Zea mays
tctacactagcagatcagtcacttataaactctagatagctgctctctacatccttaatcactgatatacttctttagaagaccctattcgaaagaagtgacccttacta

SEQ ID NO: 37429 - DNA, 250 bp, Zea mays
  unsure (1)..(250): unsure at all n locations
ctacttgttatactcttatgccttatggctcacagcccaaactggttgatgcctaaattctatactatggctcagttggaaagcacctcttattctaaactctgcatgattgttgttcctattatgtgtacattattggctctacagctcatgtagaatagtagactaccaaattcaatgcatatgggagtgagactctgtattcagtancactcagagcgcctcttcaacagtcatcaactttatagtg

SEQ ID NO: 37430 - DNA, 118 bp, Zea mays
  unsure (1)..(118): unsure at all n locations
agtgtctatatcaccagacatatgacaggcangcctggactctacacatgattatttgccgacgctactaacatcgcgggagagactgctagtattgggatgatattctccttcactg

SEQ ID NO: 37431 - DNA, 305 bp, Zea mays
ggcgaattctccttaaccgctttttatgtcagtccaactcagagggccctgtctaacctgcaatctatcattgttcaaaaggcatacaacttattttgtaaggtatgactgcctaatgaagcggctgtctagccctacctgcaatgaggcaatatgacttgcctcttttaccaataactgtgcgttgacattggcacgaaatatctgtctaacttgttctgtagtagggagtactctcacgtcccatcaatgttgaatctgaattattggctaattttcgagtaggctattagtgtgctttcata

SEQ ID NO: 37432 - DNA, 88 bp, Zea mays
ggctcctggaactttcttagagcatattgtatgccaacttggctactgtatgactattccctctgtttggggaattcacaaaagatag

SEQ ID NO: 37433 - DNA, 361 bp, Zea mays
tcctgacgggtcctgcgctgtggtttacttccctattgaaaggcttttttatcgcctatggcctgtgacctctgtttggctgacaagtagtatatgacataacgcgccgactgctctatatatcgcgtcaattcagctctcgcacatgggtctggatttccatatatcccatgagatcaacgaagactactctcgacacttgtcgcatgtgttcgactctattttataggtgacgtgtgtggcgtcccctattcatgcactcctccatcttggacagcgctcctaaattaggtccattttggttcaacctctttgttttcctcacaagaaaaaacaaaatttgctttaattgtttaaataa

SEQ ID NO: 37434 - DNA, 78 bp, Zea mays
cgtaacaccaaaaattaaaaatcccacaacttcaaaggcccccacttctcacgggaattagagatacctcccactatc

SEQ ID NO: 37435 - DNA, 94 bp, Zea mays
gcacgcattcgtgtatttatcattctgttaacttctcactttatgcttacacaaggttttacaagtgttgccaagatgtgtgagtagttaaatc

SEQ ID NO: 37436 - DNA, 77 bp, Zea mays
  unsure (1)..(77): unsure at all n locations
aagcgcaagctctatgtaactctggcgtggctncctaccattggataaactccaacttagggactgaagttatatgt

SEQ ID NO: 37437 - DNA, 119 bp, Zea mays
gaattctcaccctgctttaaactagctctcttttgcgagtatgcaccaatgttctctttctgacagtttccacgttgggggttctggaaactgctgtggcccgcgacccttatatgctc

SEQ ID NO: 37438 - DNA, 290 bp, Zea mays
acgcgtgcactaatagcacgtaggcagaggagcatcatgtaatgtaccactgaacaataaattaaaaattgttaatcgagtgcttctatgttagccctctcaattgataaattataatgttatgatattgccctcaccaaagtaaaaaacgattgttcatctaccagtatttatattaaaaataagaatgagtacttaaattacagtgagtaaacaaacaatgatgtttattatatagaaacaaaaatatccataaccgtcacgttatcttatcctcgggcaatacttta

SEQ ID NO: 37439 - DNA, 166 bp, Zea mays
accccacaaacatactcaatagttgtcttaatatactcccagttttcaaacaaaaatcagtgccacgacctgctgtttggattctatattcgagactgtgaggtcaccactccagactgccttccgcggcttggtgcacatcatacgtcagaagcgtctgttgacc

SEQ ID NO: 37440 - DNA, 196 bp, Zea mays
gcaaaacccaactttcattaaacttttggcgttgctatctccctggtaccaacggaattgcttaccctgctccagctattacaggctgatttgaactgatgtctttcaggaggagtaggcagcacttcttattctaacatatacacctgtgtaaggcggacatccctcaggcattccgctgagcggggtgcatgcc

SEQ ID NO: 37441 - DNA, 459 bp, Zea mays
  unsure (1)..(459): unsure at all n locations
agcttatgaagattcttcatctcaacatgagctagtcttgtgtgccagagccaacccatgttagtcttagcaattaagcaagtgtcgagttcagctctatcaaaatctaccaagtatagctgaccctctaacactcccttaaatgctattgaatcatcacttcttttaaagacagcgacaccaatattagtaaaaagacagttgtagcccacttgacataattgagaaacagacagcaaattgtaatctagagaatctacaagaaaaacattggaaatagaatggtcaggagatatagctattttaccaagacctttgaccaaaccttgatttccatccccgaatgtgatagctcattgtggatctttggttttctcgtaggaggagaacatcctnttctcccctgtcatgtggtttgtgcacccgctgtcgagtatacaacttgagctcccgatgcat

SEQ ID NO: 37442 - DNA, 483 bp, Zea mays
  unsure (1)..(483): unsure at all n locations
agcttaaggaaagtaatacaattctcctataattgctaatgacttattctcattttaacttagccaaacaatccaattttcgaaacctgtacagaatttggacagattctgaaactggacttggaaaactcataactcctaaactactaaacctatgatctntgaaattttacacaagtaagataaagaagttatctacaactttcctatataaaattgctacagaaaatatggtttacttcattgaactagctgcataactaaaactggtcatgcagtcccaaacagcaagtagtagattttattcaagttctatactctnttaagatcaagcattcatcgaaagacaaataactttagattcttcattgcgagacacttagaacaaatataaggatagaagcaatctgctaactttctaaatcatttngttggatacctagaatacacaatactaagggaatcatctcatcgatcattcta

SEQ ID NO: 37443 - DNA, 442 bp, Zea mays
  unsure (1)..(442): unsure at all n locations
agctttgggacttatcgatgagtccaggaaggttaattgacagtccagntcaaacatttaaggggcatacaaatacaaaggttggataaaacttccacatgtacttgttctcttttcataatattcgtctacaagtggttagtgtctggttttatcttttttaagtgtaactagcagaatgtctgatgaaaagaatatggtagtttaatcttgaaagttgtactgttgcaatgaaacactacggtacgggtggttacttcacttgctctgctcaccttgtctcgtccagcaaggtcactggagttgacgaagctaaagctgaacttgaggaaattgttcactatctaccagatcctaaggtgaattattctagtcaggcacactatttgtctgtgatgactgatgagatagaacaatgaataacattatgtctagtcaatat

SEQ ID NO: 37444 - DNA, 494 bp, Zea mays
  unsure (1)..(494): unsure at all n locations
gtactacacanattntgtaatcaccaagaagtgattttatgttttactaaatcaaacattacaggtttcgaaatctgttctcacagtggacagaacacatcaaccagtttgtaaaattcataactcttaaaccgtcaggcctatagttatgaaactttaacacaagcaagatatgaaaagcatctacaactttcttataacgaccatgaacagattgcaatattaaattgagcaaacaatgcagtttcttaaatctgtacagaatttggacagattcagttactgaatttgtaaaaagcataactcctaaactgtcagacctatagctgtcaaattntaacaccaacaagataataaagttatctaccactnttctatagcacatatctacagaaaacacaatntagttcatcaaacatacagcacgggagaatcactgcgtgcagtccanaacaacaattactaaattcagctcctatacaattcaagaaatg

SEQ ID NO: 37445 - DNA, 394 bp, Zea mays
  unsure (1)..(394): unsure at all n locations
tgtgaagagtcttcatcccaacatgggcgaggttgttgatgttttatccaacccacgctagncttagcaattaagcaagtgtccagttcagctttattaaaaccaactaacgatagctgatcctctaacactaccttaaaagctattgaatcatcacttcttgtaaagaccagtacacctacatccgtaaaaagacaattggaccccattttgcatacttgagaaactgaaagcaagctataatctaaagaatctacacgaaaaacattggaaatggaatggtcaggtgatattgcaatattaccaagtcctttgaccacaccttgatttatatccacgaatgtgattgctcttttgggatcttggcttttctcataggaggagaacatccttt

SEQ ID NO: 37446 - DNA, 361 bp, Zea mays
tcctcaaacaaaggagggggaaagactaccagtcccgctccaagaaggtttgctacaaatgtggtaagcccggtcattctattgctaaatgtcccttatctagtgatagcgaccgaggcgacgaccagaaggggagaagataggagaagaagagatactcctagaagaacggcggcgatgcccatgtttgtcgggagtgggattccgacgaaagctcaagcgactcctccgacgacgaggacgccgccaacatcttcgtcaccaagggacttctcttccaaacgtcggccacaagtgtcttatggcaaaggaccgccaacggaagaaggtaaatctaactcctcactaaatatgaatcttt

SEQ ID NO: 37447 - DNA, 408 bp, Zea mays
  unsure (1)..(408): unsure at all n locations
gganttgccanggnccatatctccaatgtatatatatcattataatgcgangcgagaggaacacttggtgctacccttccttacctaaagtattatcggtgtatgaattctataatgatgtaccctttgcaggatcttattgatagatcgtgtttaatacaaatgcttcacattcaaagtaattccttccttctgttctactgggttatttcagtttttattatactcgttgagctatgacctattacttgagttaactattacccattgtatatcttcgtggcgctaactgctctggtaaacagcggatttcctctactatcactgctccaaaccttctagccattatctgtctcacatgcacccaacttagtgttattaacaagtagcagtacctgaagcacacat

SEQ ID NO: 37448 - DNA, 401 bp, Zea mays
agcttctaaagggagaacacgtgatttgtttgtttaacgcacaattcgaaaaagatagaccttgtgcagcttgtcaagcaggtaaacaagtgggaggagcgcatcacagcaagaatgtgatgaccacttcaagacccctggacctgctgcatatggacctcttcggacccgtcgcctatctgagcataggagggagtaagtatggtctagctattggtgatgacttttcccgcttcacttgggtgctctttttgcaggataagtttaaaacccaagggaccctcaagcgttctctcaggagagctcaaaatgagttcgagctcaaggtgaagaagataaggagcgacaacgggtccgagttcaagaaccttcaagtggaggagttccttgaggaggaaggg

SEQ ID NO: 37449 - DNA, 431 bp, Zea mays
  unsure (1)..(431): unsure at all n locations
tctaaagggagaacacgcgataggcttgactaacgggcaattcttaaaggagagaccttgtgcagcttgtcaagcaggtaaacaagtgggaggagcgcatcacagcaagaatgtgatgaccacttcaagacccctggagctgctgcatatggatctcttcggacccgccgcctatctgagcataggaggaagtaagtatggtctagttattggtgatgactattcccgcttcacttgggtgttctttttgcaggataagtctgaaacccaagggaccctccagcgcttcctcatgagagctcaaaacgagtgtgagctcaaggtgaagaagataangagcgacaacgggtccgagttcaagaaccttcaagtggaggagctccttgaagaggaagggatcaagcacgagttctctgcttcctacacaccac

SEQ ID NO: 37450 - DNA, 408 bp, Zea mays
gaacgctccaagtatattatataattagtatttcattccatctggctaagcttagaattgaacaaataggttcatttgttctgctcaatgcattggattcattttagtagacattgtgaagatggatcaagcaaagcttcttacctatgattggtacaagttacaacctacaagatcttgtctgtatccaatagatcttaacaccacctgctatgctatctacctagtttctgaaaaatattgtgcactcggctcataagagtagatgtgaaactagcctcacgccagaggatccaatctttgctcttttcttttccattctgaagcctacatcttacagtgcttgaaaagacaatctggtttcatggtgaatgattgctctcctctgaagcttcatggaagagtata

SEQ ID NO: 37451 - DNA, 458 bp, Zea mays
  unsure (1)..(458): unsure at all n locations
ataaacatccatctgtaccaactggacgataaggcatgtagattaatatcttaaaaggtagcttcatgaactatgatagcacgaacaaacataccgcgcaggagcagaacttggctaccccataaaaaattgcaaaataaaacaggtattattagcacgacaccacacaacaagcaaatccacgacaaactggatggagggaggcaccaagcgcaggataaaatatntggatgttcagggctcgcagcagtgaacatattctacagaacagagcaagacgatgcgtccgtcgaagcaatctaggcttacagaccaaacaaaaagggatcgaattcggtcttggatggaccctcaatcgacgacggtgcaaggggaacggggactatgaggacacctaacggataagggacggaggccgagctgctaccatgcatacctggatctggatctggatcggg

SEQ ID NO: 37452 - DNA, 378 bp, Zea mays
  unsure (1)..(378): unsure at all n locations
agcttgggaaggttcttcatccccacatgtgctaatcggttattccacagccagcccatgctagtcttagctattaagcatgcatctagaccggcctcttcttttgcaaaatctactaaataaagttggtcgtctaatacacccttaaaagctagtgaaccgtcatttcttctaaagacagacacatctacatttgtaaatagacagttataccccatgttgcataattgactaacagatagcaaattataaccaagagactctactaaaaacacattagagatagagtgctcattagaaattgcaantttacctaacccttctaccttgccctgattcccatcaccgaatataattgaatcttgggaatccttattc

SEQ ID NO: 37453 - DNA, 411 bp, Zea mays
  unsure (1)..(411): unsure at all n locations
ctaagctggtagttttatcccacaggcaagcgggagctttatncatttatgctagncttagcaattaagcatgcatctagaccggcctcttcttttgcaaaatcaactaagtaaagcttgccgtctaatacacccttaaaggctagtgaaccatcacttcttctaaagacagacacatctacatttgtaaaaaagacaattatatcccatattgcatagttgactaacagatagcaaattatatccaagagactctactaaaaacacattagagatagagtgctcatttgagattgcaattttacctaacccttttaccttgccttgattctcatcaccgaatattatngaatcttgggaatctttattcttgacgtaggaggtgaacatcttcttcatcctcgccatatg

SEQ ID NO: 37454 - DNA, 464 bp, Zea mays
  unsure (1)..(464): unsure at all n locations
gcttgataccaattgaaagtagcctagagggggggggtgaataggctacacctgaaaattttcactaaaaacttcgaaataggttaaattaaagttgcacaggtgcaaaccggttcagtcgattttaatcacaactgaacaagtttgaacccgctcaacttaaatttgataatctattgaacaagtgcgaagtagtgaataatatagctaaagatttgccctacacaaaactacttaaatgaataatatgaaccaaccaccgaatataaagcacttgacaagaacacacaagaacgcgcgatataacccgaggttcggcaaccaccacaaaggtgtcctactcctcgttgaggaacccacaaagggctgggtcttttccaaccctaatccttcacaagccgaccacaaaggtcagggcaatctcttctcanatctgctcaaggagcgggtgatacaaacttctt

SEQ ID NO: 37455 - DNA, 507 bp, Zea mays
  unsure (1)..(507): unsure at all n locations
gcttaaacaatattgaggtttgtcctcatgatttaatacttctcttctatttgtcgaggcaattgaatnttgtgggtgtttaactatagcatttgcatgaaagaatttagtcctgtatcaccattatttgcccatttgatttgtcctctctgtttcccgtagagtttatgtttttagggggcttgtagtttttgcgataggatatccctaaaattccactcctggacagtaagatgcctgctttcttctatgaaatccaaaaattgtgggatacattttatgttgtcgatgagcaaggctagactagacaattttttctgctagtcctttctagccttaatggcttctcttaaattggacatcaaccttttggtaggatcttcttgatgaaacatcttatgccaagcatgttgaaagactggttagaattcattaagctaaagctagtaattntaaaacttgaatatatgcgccttagaacatttattntgactagaagtaccctag

SEQ ID NO: 37456 - DNA, 337 bp, Zea mays
agcttcggacaaaatcttatgccaatgcttatgattattcaatatcttcttttttattaagttaatcaatgtcctattactagactcggcctgtccattggcctgagcataatatggagatgaattaagccatttaattctatataattcagcaaactcacgtaccttctttgacataaaagaagtcccttgatctgtagtcaaggtctggggaatgccaaatctatgaatatatatggcagttatgaactcaattacctccttgtgcgtcatgttcttcagagcaacggcttcagtccatttggtgaaataatccatggcaactaacacgaaccga

SEQ ID NO: 37457 - DNA, 445 bp, Zea mays
  unsure (1)..(445): unsure at all n locations
tagcttctttaatttgatgtttatttcaagctttctatcttgatcacaaatgcaagtagcttgatccatgatccgaagttgagcttcggccagatttgtttccgcatttttaatcttcaaatctttctctaccagagaattntcaagctcgttcacccttttctctaggttactaacaacgagttcattcttctgatattcggcttcttgctgaagcttcaaggccttattcaacaataaactctaccacaaggttaagaaaaagaagtagccgcaaaatctaaaagttcanaaattaaaaacaatcaaagaggcggacataagaggttgtaccttcgaaattgattagaataagttcccagtaatgtggtgtcttctatagttgctgaggtcctgctcaagcttcagaaatctaatagtctttgataaagtattaacaatcttt

SEQ ID NO: 37458 - DNA, 422 bp, Zea mays
  unsure (1)..(422): unsure at all n locations
ttaccttgattcccaacanaccagcatacccttgtatagtttttttttagtcgggtaagtcttgctgagtaattgcgtactcaaggttctattccctgctgtttttcaggttataattttgttctgttgtggatggtgctaagtgccggtgggctcggccttcttatatgagtatataccatctttagcttctttattgaggattgtcacttaagctagcatgtattttcaaacttataaatgttttatacattcaaattgtattcttttgaatcactttcttttgttatcactccgataattgtataatgtaaacatattgtaacatgtaatcattttgtaataaagagtttatttccgctgcaagtgtttgtatgtgagttgtgtttacttaatcctgcgatcttggtggaagtcgttat

SEQ ID NO: 37459 - DNA, 436 bp, Zea mays
  unsure (1)..(436): unsure at all n locations
gctgcaagcttgaagactgcttcggcaggatagcttcctaacgtgaagacttgntcggtccacggagtcgctntatccgagcgcgagttacttatcgcagaaggtgatgagtgaggtatccgtatcccggaggcgtaggagtccctcggctcggtcagccttggctgcttacgtgtactccgtcgtttccaggatccgctttccgaagtagtcaagaagcacgaaagtaatcctgctaaaaagagatcctttttcgaggaaaaattcgacgcagagggggtctccccccttttagccctcgagggagggtcgggctntgccgaggctaagccgacccttccttgacgactaaactttgcgtaggtgcgaggtatatgaacaacttggaaacatcttaagggtagaagcgacgtagctgtttgatgttccaagcgtt

SEQ ID NO: 37460 - DNA, 464 bp, Zea mays
  unsure (1)..(464): unsure at all n locations
ctaaagggagaacacgtgataggtctaactaatgttcaattctaaaaagatagaccttgtgcagcttgtcaagcagggaaacaggtgggaggctctcatcacaccaaaaatgtgatgacaacatcaagacccttggagatgctgcatatggacctcttcggacccgtcgcctatctgagcataggaggaagtaagtatggtttagttattgttgatgacttttcccgcttcactcgggtgttctttttgcaggataagtctgaaacccaagggaccctcaagcgcttcctcaggagagctcacaatgagtttgagctcaaggtgaagaagataaggagcgacaacgggtccgagttcaagaaccttcaagtggaggagttccttgaagaggaagggatcaagcacgagttcttcgctccctatacaccacagcanaatggtgtggtagagaggaagaacaggac

SEQ ID NO: 37461 - DNA, 468 bp, Zea mays
  unsure (1)..(468): unsure at all n locations
agcttgtgaagattcttcattctaacatgtgctagtcggcgatgccagagccagcccatgttagtcttagcaattaagcaagtgtcgagttcagctctatcaaaatctactaagtatagctgaccctctaacactcccttaaatgctactgaatcatcacttcttctaaagacaataacacctatatccgtaaaaagacagttgtaacccattttacataattgcgaaactgaaagcaagttgtaatctaaggaatctacaagaaaaacatttgaaatggaatggtcaggtgatatagcaatattacccaatcctttgaccaaaccttgattcccatccccgaatgtgatcgctctttgnggatcttggtttttctcgtaggaggagaacatcttcttctcccctgtcatgtggttggtgcacccgctatcgatgatccaacttgagcccccggatgcataaacctac

SEQ ID NO: 37462 - DNA, 457 bp, Zea mays
  unsure (1)..(457): unsure at all n locations
ctttcttgctcgaagtcttctgattttcagaggagttcattttttaatctagcaatttcggcttgggcttctaccaatgaaccctccattgtttgaagaagaaaatctttcttctcaagagaagcttcataatctttgattttactttccaagccctcaattataacctcattcttcttatcttcgaggtcttgttgcattctcaaggctttgcttagcagcatactctgtgcaaaataaccttcatcagaaatctttgcttcatcgcaaaaaaataaaatgttgaggaaaaaactttaccttaaaattagaatagaataagctgccgacgatatgctgtcgtcggtagctgctgatgtcagcttcaagcttcggaaaaccaacactcttcgacagagtgctgataatcttcgcccagntcgatctcgatacatctaagccttctcgnntattcgcg

SEQ ID NO: 37463 - DNA, 432 bp, Zea mays
  unsure (1)..(432): unsure at all n locations
agcttagcanaagagatttctagaatcaagattattgagctcatgcctaagtctggtaaaagattgttcatcaagtggcttggtaaagatatcggctaattgatctttagtattaatgtaagaaatctcgatatcccccttttgttggtgatccctaagaaaatgataccgaatggctatgtgcttagtgcggctatgctcgacgggattgtcggccatttcgattgcactctcattatcacatagcaaagggactttggttaatttgtaaccgtagtcccgcagggtttgcctcatccaaagcaattgcgcgcaacagtgacctgcggcaatatactcagcttcggcggtggaaagagcgaccgaattttcttctttgaagccatgacaccaaggatctttcaagactggcaagtcccgatgtgctttcta

SEQ ID NO: 37464 - DNA, 302 bp, Zea mays
acgaaatgaaggctacatcttatatcctgctgactattctgagcacaaaattatgaagattcatgctacgaaacctcataatgtttctcaccatgcattcatgtataaaaatgaggcttctagctctatgcataccacacatgttaaaatgcctagaaagaaaattcctactgcatcacatgagcataacatttcatttaagactgttgatgcatcttatgttttaactaacaaatgaggcaaaatagttgccaaatatgttggggcaaacacaatagcccaaagacttgtgtttgggtacc

SEQ ID NO: 37465 - DNA, 300 bp, Zea mays
agcttgtacagggagaagacatgttaggattaacaaatgctcactccgagagagacaggatgtgtagcgcatgccaggctggacagcacggtgcagcccagcctgcacataagaacataatgacgaccgagaggtcactagagctcctacacacggatctattacggccgatcgcttacataatcatgggcgggaggaagtactgagtaactattgaggacgatgattcttgcttcactagggtgttcgatctacaagagaaaactcagaccgaccaaaacttagaggaattcttgagac

SEQ ID NO: 37466 - DNA, 302 bp, Zea mays
tgcgaaccgttggatccattctaacgggaggatgatattgagcaacaaggccgtacttgccgttctgtggcgggtggacgaccgacaccctaatgtggtgcgtgcgggacatgctccacgtgaaggcgaccgctattgtagtcatctgacacttgtacgtgaacgacgccatgtgacgacatgacattggggccaagtcattgcgtatcagaactggacctgtaccggcccaacaatttactaagggtttatcgacatttccgactatgacggtgactacgacgttatatacacctggatgg

SEQ ID NO: 37467 - DNA, 414 bp, Zea mays
agcttgtccccgccgaggttccgtcggtaattcacaattcgcgcccgttggtggcgtcggtggcggcaaaaagcaggtttgtccccaactgcgcaaaattgccgggcaccgagttcgcagagcccggattgatatcgcgtaccagcaccgtgccgcccgaagtaccgtcggtcgcccacaactcgctgccgttggtggcatcgctagcgacgaaatagagcctgccattataggcaaagaaattgggtgatcccgtaggcgtgaccgtgctgaccaacgacgccgttaccccgtccgtccgccacagattgcccgcgccgatgtaatagagatagctcgtgaacaaaccatatgacgtgccgcccggggtcgccacaattgctgcgtccggcactcgtgccgtctgtgacccac

SEQ ID NO: 37468 - DNA, 414 bp, Zea mays
  unsure (1)..(414): unsure at all n locations
cactatccaatacataagctctaccctngtgaatggatcgtcgccgaacctgttggcgcttatattgcccgggaccccggcgcgacccgttggatcgagccgatctggaagatgatctggagcaacaaggccatacttgccattctgtggcggctgttccccggacaccccaatctgctgtgggcgggccatgcaccacctgcaggcgacagctatgtcagcaagccaagacttggacgtgaaggaggtaatgtcacgattgcgcatcggggcgaagtcatcgcgcaccgcgacgggccctggaccggcccgacaatttaccagggctttttcgacattcccgactatgacggtaactacgccgtcatcggcagctggatggtcgatggccacgcggtcggcattggcgttcgc

SEQ ID NO: 37469 - DNA, 465 bp, Zea mays
agcttaacgcacacctgaggcgatcaggtactggtcatcgggcgtcagcttgatcttggtggtggcggtctcgaacctcaggtcgtggatcaaatccagcctccgctgatactctacagccaaaacagcgaagtttcccttcattgctgcacctaatatcttcagattaagctaatatcggaatgagaagtatctgtcgcaggaacgcatgcaggtacaaacatttcaataacgcaaccaaagaagccctctcgattacatgtgcatatcctgagggttacttgaacaaaggcaacagcagacccataatttatgcacagcaaacaaagcccatttgccaacaccacattagaagttcctcacaggacataatcttcaggtatgtctagtatttatcaaaggaatagatagaagcacacgtactggcctaatgtaatggggcctgcaactaatgattcggatata

SEQ ID NO: 37470 - DNA, 404 bp, Zea mays
ggtcaattgatccacgaatcatggctgtagagacctaggcggtgatgctcttccgatccagaagctgtgattcagccatcgacggagagggcgcatagcagagaagcagggacgcgcggctaccagagctggaggaagcagaggcgtttgcaagaacatgagcaaccagcctaggggagataaatacacagaacagcggtaggattttatcgcaggctaaagcggcgcagggataacaccggcgagctggagaaacgcgtggtataacgagcgcgcaaggttgctgggtgagcggtcggcacgggcaagagctggagccacggcgttgttgcagcttgtgcggccaggtttcagaaaaatcaacgagaagatagggcattggccagaacggtggttgagcggat

SEQ ID NO: 37471 - DNA, 480 bp, Zea mays
  unsure (1)..(480): unsure at all n locations
agcttgatgctcatgtttgctactctgctctgtgattgtttgcttgcataaaaaaaaatgtgctgcgttagactaatctgctctgagattatttgcttgcacaaaaaattgcgttgggtcggactactctgctctaggattgttttcttgcaaaaaaaaaagtgttgggttggaacgataatatacgtagtcggaagaagtcagcatcctcttcatttggtaccggtttctactatttttatatcatgtgtttggttgcccgtatatgaagactcttcatatgaattgactatggctcgtcccgtgtttgatccgctgtatctagccatattggcgtgcacgcaccgatacaatctagacatatttgtctgtacacagatacgtacaaataggccgtacctagtgaaacagggctcatacgagcttggctacgcacgcccaggcatccaatcacatnggatggtgtttgctttatatatt

SEQ ID NO: 37472 - DNA, 447 bp, Zea mays
  unsure (1)..(447): unsure at all n locations
tgcatttcatattngatgtgcacgatcgnngttggtacttgatattatttcatagtgtgacaacgatgctgctgctcagtagcacaacggaacacttggcatgtatgagttctttccattacatgttttgtttcgtacttctaaaagtatatattgtagcatttttcttatgccaactatgcctcaagctgagaattagtagcatgctatgcaaattattgtacgatttatttttgtgttgcttgtattcatgtaatgcactaacattnntatcaaataattgtgtgcctttgcctctccctccctcctccgccacatcacggagctccgtctttgtcgatcgctgcgcaatcccttcgtcggcacccacgcataccttatcgactgcacgccgccgtcaccaaggtccttgtgaccagcgtcgccactccattgtcgtcctatgga

SEQ ID NO: 37473 - DNA, 390 bp, Zea mays
  unsure (1)..(390): unsure at all n locations
agcttattatatgtntagatctgatttcgaaatgctgcttatggcattgccctgttatgtgctntggtttgcgtatagctctttatattattattcccttcggacacaaataatgatattgatgttcaagacaacactacaatctccaaattgactacttatttctattagattacgtctgtactatagacttataacctaatgtactttcaagactgttagagtaactgttagtgtatgtgttagtgtatacctctattgtaatgggcattggcccacctaactctaatatatcaatgcattcccaacccttattagggttttcctcatccaacgtggtatctagccgaanaattctaccttcccctccctccccctctcacctgagcg

SEQ ID NO: 37474 - DNA, 502 bp, Zea mays
  unsure (1)..(502): unsure at all n locations
tctaaagggagaacatgtgataggtctaacaaatgtacatttcgtaaaatatagaccttgtgcagcttgtcaggcaggtaaacaggtgggaggagcgcatcacagcaagaatgtgatgaccacgtcaagacccctggagctactgcatatggacctcttcggacccgtcgcctatctaagcatagggggaagtaagtatggcttagttattggtgatgatttttcccgcttcacttgggtgttctttntgcaggataagtctgaaacccaagggaccctcaaacgcttcctcaggagagctcanaatgagtttgagctcaaagtgaaaaagataagaagcgacaacgggtccgagttcaagaaccttcaagtggaggagttccttgaagaggaagggatcaagcacgagttctccgctccctacacaccacagcanaatggtgtggtagagaggaagaacaggacgctcatcgacatggcgaggacaatgctatgagagttc

SEQ ID NO: 37475 - DNA, 442 bp, Zea mays
  unsure (1)..(442): unsure at all n locations
agctgggaggtgtctattgggtgtcgacttggtgtagactcctccttcttctccttccgtgccttgaatgcaacgggttgggcttcggatgagtcgccaagctcgttgattttcctcgagccttctatcatgcactcaaaacttacaaaatgcccgataacttcctcggnggtcattttagtatatctaggattaccacgaatcaattgaacttgagtgggattaagaaaaatgagagatcttaaaataacatttaccacttcgtgatcgtcccacttcttgctcccgaggttgcgcacttggttcaccaaggttntgagccggttgacatgtgttgtggctcctcccctttgcgaagccggaaccgaccgagctccccctcgatcggttcccgcttggtgatcttggtgagctcgtctccctcgtgtgcgggtttgagcac

SEQ ID NO: 37476 - DNA, 427 bp, Zea mays
  unsure (1)..(427): unsure at all n locations
gacgtgaaaagtgccttcctcaatggaccaatctatgaagatgtctatgttgagcaacctcccggctttgaagacactgagtatcctaaccatgtttatagactctctaaggcgctttatgggctcaagcaagccccaagagcatggtatgaatgcctaagagattttcttattgctaatggcttcaaagtcggaaaagccgatcctacactctttactaaaacacttgaaaatgatttgtttgtatgccaaatttatgttgatgatatcatatttgggtctactaatgaatctacatgtgaagagtttagtaggatcatgacacacaaattcgagatgtctatgatggnggagttgaagtatttcttatgatttcaagtgaagcaactccaagagggcaccttcattatccaaacaaagtacattc

SEQ ID NO: 37477 - DNA, 438 bp, Zea mays
agcttctaatggataggattcctacattactttggagtccatgtgctgcacattgcttggacctaatgttggaggacataggaaacttgaaggaattcaagaaaccaattgcacgtgcaaggcgtgtgacaactttcatataccgacatgggagaattcttgctgccatgagagagaaaactggtggggctgatcttgtgaggcctgccgccactcgttttgctacttcctttctcacattgaagagcttgtacaagcacaaggatgctttgaaggctttatttgcaagcacagcttggactgataacaggttgtcaaagacaagtgctggattggatgtgtataacattgtcttctccacacagttttggaattcagtagaagattgccttagagcctcagggccactacttattgtacttatggtggtagatggag

SEQ ID NO: 37478 - DNA, 387 bp, Zea mays
  unsure (1)..(387): unsure at all n locations
actaagcttaactctatgtctctntagcttgggatctccttcatgtgacattntaagaatattccaaatgtcacgggcatcttctcttccttgaactttccggtattcttctggacaaagacttcctttaattatgctcactgcttgagcattgcgatgaacctcttgcatcatttccggagtcatctcttctccttgggcgggcttatacatacctacattaacaatctcccaaagactaggatgcacaccgattaaatgcgacttcatcttgtcggcccactcgtcatagttcaactcactaagagttggtaactttccaagtggggcggaagagaagtcgggaatataatttctagagtaatcgaattgaactttgctaaattc

SEQ ID NO: 37479 - DNA, 429 bp, Zea mays
  unsure (1)..(429): unsure at all n locations
agcttctaagggagaacacgtgataggtttgactaacgtacaattcgaaaaagatagaccttgtgcagcttgtcaagcaggtaaacaggtgggaggctctcatcacaccaaaaatgtgatgacaacatcaagacccctggagctgctacatatggacctcttcggacccgtcgcctatctaagcataggaggaagtaagtatgggttagttattggtgatgactcttcccgcttcacttgggtgttctttttgcaggataagtctgaaacccaagggaccctcaagcgcttcctcaggagagctcaaaatgagtttgagctcaaggtgaagaagataaggagcgacaacgggtccgagttcaagaaccttcaagtggaggagttccttgaggaggaanggatcaagcacgagttcttcgctccctacac

SEQ ID NO: 37480 - DNA, 473 bp, Zea mays
  unsure (1)..(473): unsure at all n locations
ggaaggacaattganaaagcaggctccagtatacttcgtctccgaagttctcagtttatcaaagaaaaattatacagagttggagaaagtgttgtaagccgtcttaatggcctctaggaagcttcgacattattttcaagcataccatataattgttccttcatcacagcctttgaaggatattatgagaaacagagaagctactggaaggattggaaagtgggttgcggaactcaacgagttcaacattgattatgtgcatagatcttcgattcagtcccaggcgctagcagacttcatcgctgactggacgccaggggctcaggaggaagaagcaagtaaagatgccgaagcttggacagtgttntgcgatggctcttgnggaacctttgnggtaggtgcagctgctgttntaattgcaccttccaaagtcagaacatgctatgcagtanaacttgatttcagctgcacaa

SEQ ID NO: 37481 - DNA, 444 bp, Zea mays
gatgcagtccgaagattggattcttcttttatgggattttctggaaaaaatatcccaagggggcagaatgagcatgcagatttattatctaagtcagcggcacaggggctccctttgcctttggaagtattttttgaacaagaaaagcaccctcaatcgagctcatggagagagcagtgctcacaatctcacctgtacatagtgaagactggaggaccgaagtaatatccttcctccaaggcaattgcctctcagacgacgaagcttataacaagagaatggaagcaagaacaagaccttatgtaataattgaaggggagttatacaagcatggagtttgttccccatggctcacatacaggaattaaggaatgaaggacacgaattaatgaaggaaatacatgcaggactgtgtggagcccatattggatccaggcctctact

SEQ ID NO: 37482 - DNA, 433 bp, Zea mays
  unsure (1)..(433): unsure at all n locations
agcttattgagggactntcctttcatctctttctgttgtccgcanaaatatggaggcaaccagagcanaatttatcgctcgacaccaccgctccacgcatggcacttccgcaccctagcactgtcggattttggccggcactggcgctcatctctaagggtttctcgtttggtcctttcttttaatatttggtgttcaaaccaatttttttgttcgtatatgtacataatcctctcgggaacatgattagaactcccaatcgataattaattgaggtatttctgttttgaactgtttggtgctcgttgggtttgggcggagattgggaatcatgccaggagtgcttcgacacaagattnttattgactctcatcatctcctcttgccgtctggttgacccttanaggttatgcactagagcgatatggtagat

SEQ ID NO: 37483 - DNA, 457 bp, Zea mays
  unsure (1)..(457): unsure at all n locations
agcttggctttctctcttccttcctcagcttctcacgaggtggcctanaaatctacggacggngagggaagaaggttgtgtcgcgattgttttatggctccgaaactacgcgctccacagggatgtagtcgcccacctccgcgtttgatggcatgagcgcgacatgcgcagagatcattacagagaggacgattctgacacttgggtcccagaggtcagcgatagagtgcttgcggactacagtgcggctgacgcagcggccccaccagcagcggattattgcggaatgaaggcgcgcgcgagcagtgaccgatcgagcgggcccgtaggacagtcgctgggtgatgcggcgcagcgcggcgcggtgtatataggccggcaggccgaatgggtggcagccggcccaagtcgctacaattctggttcctcttttccctttcttttcttnttaattata

SEQ ID NO: 37484 - DNA, 489 bp, Zea mays
  unsure (1)..(489): unsure at all n locations
cctccaagagtatcanatccgctcaagatcttgatgcttgcccaaagctttaaacaagtgaaataaaagaatggtgctcaaagatcagagatctcaacctaacactaagtttcccaaaagattttggggagaaccagatttgtggtgtgtgagagaaaggggaggagtacatgctcttttcaacttttgtctctggtttggtgtgacttgaaatcatggagagaggttgaagaaaaaataagggctatataagatctagccgtttggatgaagcctgtgagttatgcggntgaaccacataaatgacgatggaccgttttcagcagatgaaacacagttaaggatggtgagctaggtggttgaagcacccatttcatctggtgcagttgaactgccccgtcgaatggttcaaccgcttagcangagaggatctcgaggcaggtttggatgaaccacaccatgggcaggttgaaccaccatcttttatgt

SEQ ID NO: 37485 - DNA, 384 bp, Zea mays
  unsure (1)..(384): unsure at all n locations
agcttcaacggtcggctgcgccagtatatgattnatttctgcaccggacagtgtccggtggtgcacagcactgtctctttcaccatttctaacaatgctacaattacctctctggattgctctcaacgtttctctactgccttacggctatattacgcatccctatgctcactattgatcacaccaaccattattttattatcttttacctcataacatctctttactcattcgttttttgtgatgtaattcgacctcttttgatcttgaactcctcagctattctacacttattttgttattgtccgctgtctgtctctctctcttagcttgttatgtattcttccactctcttatcatgttctttgtatctccctctcttct

SEQ ID NO: 37486 - DNA, 331 bp, Zea mays
actcccttgcacccacgatggtggttgatggtctgcgaagataatatggagacaaaaaaagaacccggcgacgcgattttatagcccaatggctcggctggctggtccggattttaggcaagatctcaacaacccagcgcctatgcggcgttcggttcgacggggaagaaggtctgacgaggagtccccacacatcagtggtccattatgtgcgtgcttagaggatgagagacttatagttgggacccgctaagctctggctggtgaagagcggagaaaggctgacccctgtgccctgcttgcaggcaacaagcgcgtggcaccgagtgag

SEQ ID NO: 37487 - DNA, 406 bp, Zea mays
  unsure (1)..(406): unsure at all n locations
agctngccttcgcttcagtctatcatccgcagtccaacggngtcgnggagcgcgccaatgggaaaatattcacagctgtcaaaaagatgctcctcgatgaaagaaaaggcagatggaccgatttattaccagaggcagtctgggcgctaaacacaaccgagtgcagagcgaccgggttcactcctttccgccttctatacggatcggaggcaatgaccccgcaagaaataaagcatgggtccccgcgtacagttccgtcagccgtccccgacgtggatgagccaacttcaaaagatctcattgacggagaccgggtcttcgccctacaggccctaaacaaatatcaagcccagaccaaagcatggcgcgaccgcgcagtcatcccgagggagttcagcgaggggga

SEQ ID NO: 37488 - DNA, 469 bp, Zea mays
  unsure (1)..(469): unsure at all n locations
tgaagccatggtaagtagcataggctaataatatacgaattgactcaagcctagctacgggtgcataggtttcaccgaaatccaaaccttcaacttgggagtatcccttggccacaagccgggctttgtttcttgtcaccacaccatgctcgtcttgcttgttgcggaaaacccacttggttcctacaacattttgattaggacgtggaaccaaatgccatacctcattcctagtgaagttgttgagctcctcttgcatcgccaccacccaatctgaatcttgaagtgcttcctctaccctgtgtggctcaatagaggaaacaaaagagtaatgttcacaaaaatgtgcaacacgagatctagttgttacccccttatgaatgtcgccaaggatggtgtcgacggngtgatctcgttggattgcttggtggactctngngtgtggcggacttggtcttcacctccttgc

SEQ ID NO: 37489 - DNA, 467 bp, Zea mays
  unsure (1)..(467): unsure at all n locations
agcttttccacggttattggaacggatggctcttttccagngaaagacgncgcatcgcagctctccatcgaccggtctcctcgtggttccccaatcaaaatgtgtaaaatcatatatttcctattaaaaatggatttaggatttttacagcatacaccaaatttcagggaataagagatgctcttataaggactatttgatttttagaaataaaagttgtgttccaaaaattatgaaaatttttgggcaaccttatattgaccagttgagcacttggttcaagtttgaatttgtttagaagtgatttgctctataaacagattgttgccaaaaaaataaagaggattttacccttatgtaattacgcaatgaagtttcttaagaaggtttgaattttggattaagtctatcatggattagntccctggagatttgtagtgaagatgtcttgaagtgcccttggaaat

SEQ ID NO: 37490 - DNA, 454 bp, Zea mays
  unsure (1)..(454): unsure at all n locations
tcggctgcttcatcaatttctaccttcggtcttcggatgtttaagcgggaccagatggggtgcatgatgatttctttaatgtcttctcttgccttcaaatcatttttcacgtaaaaccactcctccatccaggccccgagccatctctttcaaaatgttggcactgggtagcttgcgctagagcgagcaacgaagctatagcaaccaaagttgttatgatattgttctttaccccaggttttcgtctgatacgaaagttcatgcaaactgcaaaagcatcttgcacttggctctagaccttgacttctcacagcccagacaaagatccctattctgataattgctttgggagtgatctggtgaaggaaaatctggtatgtctttaaaacttcaaccacaaatctgctcaatgggaaccaaagtctagctntgaagaacttctgaagacacaact

SEQ ID NO: 37491 - DNA, 468 bp, Zea mays
  unsure (1)..(468): unsure at all n locations
agcttggtcttgtcgaggggaagctctcctctgaggagatattccaggnacggggtcagccagtttggatctggtgtgacaccattctgttccccctcgacgggcaaggcctcctcctcgatggccgagggttcctcgggctcggccgaggcctcctcgggctcggccgatggtacctcgggctgggccgaagcttcctcgggctcgggcgtgtcgtcgatcttgacggatggttgatgtaggtctctggagaagacgtccggnggaaccgtcgtccgccccgaggctatcttcgccagctcatccgcagtttcgttgtaccgtcaggcgatgttgttgagctccagcccgtagaacttgtcttccaggcgctggacttcatcgcagtaggcctccatcctncggtcgtggcaatgggagttcttcatgacttggtcgatgacaagctacgagtcgccacgagcgtcg

SEQ ID NO: 37492 - DNA, 495 bp, Zea mays
  unsure (1)..(495): unsure at all n locations
actcaagcttcgggcattctaagacctcgaggttctagtgccctacaatgttcaatagttatataatataatcctttgaggtcacttatgccctagagagcatctatgagtgatctaagccaccgaggctccttgtgctccaatgcactcattgctttcagcttaccgaatcagattcgctaccaaaattatggaatcttaaccaaacgggtacagtaggagaatagactcccataaatatataaatttctatagttcaattcagaatcacctcttgtcctagatttccaagattcgtgtcatccatgttaagttgtgatgctgttatagaatatgtaattcacaaacgttngaaccaaacatgtttcattttttcacagctattagttcacaatgaactttgtgtagatcacaactggaattagattctcagaattatacagctgaatcaaacatactcttagaatacttaacaatacctatcttaagctaata

SEQ ID NO: 37493 - DNA, 497 bp, Zea mays
  unsure (1)..(497): unsure at all n locations
gacctcagagncacctgangctgcagctcaatctggacccaattgaattgtgttttttatattagnaanaagagccttgagtacccacacaatccttattgtggcctttctctttgtgtaggcacccacatatacttgacaaccatcttacatggtttcaagtcaatatttaatcacatagataaaaactatagttaagaataggagccttttctccttttgttgatacatcgttgtgttgccttcttgatgatgaacctaccttgactntgggtgcacctaccttatcaaggttagttgcacaagcattcatatcataaagacaagttatgcatggaatttacaacttagtgatccaaatcaatgtgaagcatatggataccgattgaagtatatntctaagatatcaaaatatggcgtttcacaattcagagagtatggagtactaattgtacctcttatagttacaaatcatatncatgttagcgcatatgtat

SEQ ID NO: 37494 - DNA, 505 bp, Zea mays
  unsure (1)..(505): unsure at all n locations
tagcaggtgcgagttctggatcagcggagtcctgttcttgagtcacattataaaccgagagggactggctgtggatccgaagaaggtagcagctattatggactggaaagcaccgaaagatgttcgaggaatcaatagtttcattggaatggtcggctactatcggcatttcattgagggtttctccaagattactatgccaatgaaaaccttgttggcaaagaaagttgagttcaagtggaccccagcgtgccaagagtcctttgagacgttgaagaagaagttgacaacagcaccagtactgattctgccagatgttcacaagccattctcaatgtattgtgatgcttcgtacaccggtctggatgtgtgttaatgcangaagggaaagtagtggcatacttgtcccgccagctgaagaatcatgagaaggaataccctactcatgatctggagttagcagcagtgcttcatgcactgaagacctcgatacactanttatatg

SEQ ID NO: 37495 - DNA, 454 bp, Zea mays
agcttcttcagatgcggccccagtggacttattttgttatgctaagattcattcattacctttaagatttcctccacgtcggtggcagaaggtgttgcagtagcttcttcttctatatcagttgccttctgcttcggagccgcagcctttcttttcttcgaagcatctgtctttggctcaggcctcagctttctctttatcagtttttcttcatcatctttcaccaatttagcagcttctttattcaggacgctagcaactctatttctcttctgtccttcggcacctcggtccagtcgctcatagtcaggatactcaaagtttagagcatccatcacccggtttaaccttcgcttcggacgagtgctgaaggctggagtcattagttgatctttcttttagaataattaccaagaaattcgttgcacataacttcaattgcgtctaacaattc

SEQ ID NO: 37496 - DNA, 428 bp, Zea mays
  unsure (1)..(428): unsure at all n locations
tactctacatattacatatacccatcttntgagcacagaaaatgacctataggccggacagtctgcggtccggactgttagccgtaatggcgcacaccgttcgcgcgtgcacagaatcatttatggtcccaaatttcttgtgagatttgttagctaaacctgcaggattaactcgggaaccgacttgtaatgggtccagacctcccctttatatagatgaagggctacggtcgattgaacccccacaatcgatacaatcaactctacttatcgattttaccttatgcattagaagtagctctaatttagccctagtttagccttcctctacctcagatcttcacctctcttcggctctacgtcgactagaggcatcttaagtggcctgccgacgctaaggcacaccctaagatctctcctcctcgatg

SEQ ID NO: 37497 - DNA, 477 bp, Zea mays
  unsure (1)..(477): unsure at all n locations
agctntanaaatcataaccgttgatcccagatccaatgatcgtgatagcatactggttcattttaagtgcgggtagatcttagcgctcgttctctaatcggatgaccagaaactgatgatgccctgtcagccgatcagtttttcaaaagagcccttatgaattttggtaaccaacccgccgtccactgcttatataaagtaattacaggtgttccctacaaatttgtaaatggacccctggactacctgataattgtgcgtccagtccaaaaacttaagaaataggaaaaataatatagaaaatgcttttctagtataaaaataaatgtagaacttggttaatttgtagaaaatccattctaattcctttttggtccattccagttgcattaattttgtttcaaaattgtctatcacctggtaactctgtctagccatgaaacatagattaaaagtatgtacttaatctattctaac

SEQ ID NO: 37498 - DNA, 503 bp, Zea mays
  unsure (1)..(503): unsure at all n locations
tcggcgacggttannaaatttggcagcacaacagtgcacatattatttatgctgtggtaacttcacacctactcgtctgtttatatagtgccgcaggtaagaaggcgaagcgccagaagttttacaccaggcggacacccgctcgcactcgctgtacggtggaccgcagagaccgaacagtaattctgcacggtggggccgctacgcgcagggaaattgaatcgtttctcgacaacgagctcagggaaggtgtttttgagaccttcggcgctccgaagcttaagaaacttttttcacggatcaaactcgttacgaaaaacgatctagcaccgcgaaaggggctactggtgggtctatgcttcgtcgccgaaggtcttatagaaagaagtgatcctcggatgaagctgtttgtacaagatagccgaaggttcctcttcgtaaagcttcggcattgcaaaccgacttaaagatagaatgaccttttagtccataaaggtctgagt

SEQ ID NO: 37499 - DNA, 438 bp, Zea mays
  unsure (1)..(438): unsure at all n locations
agcttctaaagggagagcagtatttgngactaaccaatgttcattntgagaaagacaaggtttgtagcgcatgtcaagcagggaagcaagttggtgttcatcatccacacaagaacatcatgacgaccgacaggccgctcgagctactccacatggatctattcggcccgattgcttacataagcatcggctggagtaagtattgtcttgtaattgtggatgattattctcgcttcacttgtgtgttctttttacaggaaaaatcacaaacccaagagacattaagggattcttgagacgggctcaaaatgagttcgacttaaggatcaaaaagattagaagcgataacgggatggagttcaagaactcacaaatcgaaaagctttttgaggaggagggcatcaagcatgagttctcttctccctacacgccacaaca

SEQ ID NO: 37500 - DNA, 404 bp, Zea mays
  unsure (1)..(404): unsure at all n locations
tggatcccttgcatncccaccttcagagcgtgaacaaattgatttgtatggcagttgtcgcttcaaaaggtgtggggaaacctgcctcatcacaataaaggttggtcaaacttcattttgtaaatgtgtttaattgtcagcatgtgttttcttattgaaacattgagttgagcatgatatatggaacttttatgggatgctgcaggtctaaatgatgtaaactctagcggagctacctcggttttgaatctcttccattggaattaaatggctaagggaaactgctcaacaaaatcaatcgattcagtttcaggtgaaagcatatgcttcattctctaatgttcttccaaatggtccatagcacttagacatcttatcttttgcatctagtggtaaattcatga

SEQ ID NO: 37501 - DNA, 309 bp, Zea mays
ccagctatcaatcctcgaggaagattgtcgaaatcttcggtttgagcaccacatcatctacgtaggcctccacacgctagccccagtgatcggctaagcatgcttgaatgactctctgataagccgctccagcgcttatgaggccgaacggcatggaggtataacacaaagcaccaaacggagtgatgaacgccgcgttttcctcgccttccttcgccaaactaatctgatgacacccggaatagcaatctaagaaagacagcacggaacatccagcggtggagtgcaccacctgatctatccttggga

SEQ ID NO: 37502 - DNA, 380 bp, Zea mays
  unsure (1)..(380): unsure at all n locations
ntagggtaaaagacatgaaatgaccccaaacatttagttgtttcatatttatacccctgggataccagacaccctaattggaaccctggaaaaccctaaaaccaaaccctaggggcttatgtgcaaaagtgatgaacctttggactaaagtgtaaaaactactatgtgtaaacatataaagtcatttggttcacgaatatgtggacttgaaagccaaaccctaagttttggacttaaatgcaaaatggacctcatatgagttctattctaagtatgaaaatcacagaattggctcaactttggagctctgcatctttcagattatatggttatttgcctaggtcaccacaaccagtctgtataccaattaatggaaacca

SEQ ID NO: 37503 - DNA, 432 bp, Zea mays
  unsure (1)..(432): unsure at all n locations
agctntatttaattggatttactaatgagaatgccgatctagatgcatgtttaattgctaaaactaacttgggctggctctggcatcaccgtctagcacatgttggaatgaaccttcacaagcttctgaagggagaacaagtgttaggactaacatatgtctgttttgagaaagacagaccttgtgtagattgccaagcggngaagcaggtgggaacaagtcatccaggaaagaacgtaatggcgacatcaagaccattggagcttctccatatggatctctccaggcctgttgcttatcttagcttcagcagaagtaagtatggtcttgtaattgttgatgactattcctgcttcacttgggtattctttttataggataaatctgaaacccaagaaacccttaagtgcttcttgatacgggctcaaaatg

SEQ ID NO: 37504 - DNA, 475 bp, Zea mays
  unsure (1)..(475): unsure at all n locations
tctcagcttgattngagctggacctggatgcatgtactgtactgtacatctgtaccagtagcagcactacggcgctagacagctagaggctagagcataccacgacgacatttgtcggggtgttgatgatggcacgatgatgtangctgcaggcgtctgttttttatgcaggattcattgcccaggtgtttatcgccaaacactaattgtcatcgccatggcccatgggtttggatgcagattgcggagcctgcgaatcgagtggaatgcaaagtcgcctaggaaatcggtagagaccagcaaaatgaccacttgggccttgggcttttgagttcggcttcaaagtggtcgtgtgagtgatcagctgatatagtttggcctctagctcggtcagctcgtgagcagcttgtgagctagctcgttaacacaacgagcaaaaaaaacttgctcatcttgtaaaatatccgtcgagctg

SEQ ID NO: 37505 - DNA, 439 bp, Zea mays
  unsure (1)..(439): unsure at all n locations
agctntctcgactgagtcgggggcatggcctcatggacgggtgaaagtacgcgtaagcggcaaggccgaccgagccgagggattcccacgcctctgggatacggatacctcactcgtcccttccgcgaaaaacaactctcgctcacacaaacatccctgttaccgacagagtccagatgctcgaaacaagaggaaaaaaggcgcagcttcgcaagcgcggcgagggtgtgttttttctggcctcggcggccgcataaagcacacgctacaagatgatctgatcctgcaggctcgggtcttcacgctgaagggagccatagcaccctcggcatcgacgacgtcttcagcaaagtccgacccagcctcgggcggcgacgcgatccagggactccttcgggaatnncggccgagcaggcggctcaaccggttacccccgggg

SEQ ID NO: 37506 - DNA, 432 bp, Zea mays
tgatcagaccaggggtcgatccctgttgtggcctatgattggtgcttaacagctcacaactgggatccttactttgcggtattcaatcctttgaatagtagtggtgtttcttgctgatcctagcttgggatcatcccttgagtttgaacgaggtttggactgctaagcactcagtttagggtactaggtcagttgtcctacggtggtgaagcatgtacgcttatggtacaggactaagctaagcagctacacgacttcaggccacccccaagaacgtggtcctttcccctaggccaatctcttagtgatcggatccttattcattatcaattgatgttctaaaccaggtgcaaaaagtaggctctatcattatgagttcatgattaccacataagtatagatccacataaggggtagagggaaacaacatgt

SEQ ID NO: 37507 - DNA, 417 bp, Zea mays
agcttacccaagacgaggcttgtgaccagttaaagggtcctcggtcagcaagcctacatcgagacggtccttaatcgactcagatggagacactacaccaagactctctcttctcgtgcaagtcacccgcccggtctcagcttatcatttcaaacccaaagtttggtacctagcagaggtacatcttttccgatgttgaacccatcatggccatgatggatccaccatcaagttttattttcgaaaacatctcacccactttgcacatcatctttaagaaaacaaaacattttgtttttctaagcaaagctaagcacaagaaaatcttttggtaaacagggatctaagaaataacccaaggaaggagatgcagcaatagtttaacacacaactcctatcacctaatgcatcaagtaa

SEQ ID NO: 37508 - DNA, 432 bp, Zea mays
aagcttacaggctactggcggagctagccgaagcactggcttgtctgtaagatggctggggtgggctggccacggtggccgaagctctggcggcaatggcgggcggaattaagctcgccggagctaaggggaagtggctggccggtgagggtgagtgcacggcgaaatggggcgcgcctgggaaggctttatatgcgcggcgcggtgcacgggcggtcgtggaccggcgagtgcgcgcgggcgtgcactgggaaggcgcggtgcgcgaacgggcgtgaaccggtggtgtcagccgcggtcgaacacgtgttcccgttgcctctgcccctgttcaagcgccgattgggagcaaatcttcgcgaatttgggcaagatcactgcaagggatttgtcaccagaccaagctttgtcttttgtgtatggacgacgtgc

SEQ ID NO: 37509 - DNA, 470 bp, Zea mays
  unsure (1)..(470): unsure at all n locations
agcttgcccttcaagcgatctgttaggctactgaggagtcctcccttctaaggatcttcacatccacatccgaaaataggcaattataacccattccacaaagttgtgaaacggacaacaagttatagcttaaagaatctactaataaaacatttgaaagtgattggtggtctgagatatggaatttaccaataccaatcaccttacttttgccactatctccaaacacaatntcttgtgcttcttgagttagttgcaatgtatgaaacatgtctttctccccggtcatgtgatttgtacatccactgtcaagcacccaactggacccaccagaggagtagacctgcanaacaagtttaggctatgctnttagggtacccaaatgaattgggtcctacagtgttagttatagcctttngtacccacacacttcttttcatgacttttcgtntagtggaggcacccacata

SEQ ID NO: 37510 - DNA, 433 bp, Zea mays
  unsure (1)..(433): unsure at all n locations
ggtgaagagcactggggcgcttgctgctgacttccnctatcattattttgagtagagttgtgaattgacctaacatgcctcggataaaatcttcctccgaagcccctggtcatttcagaaaacctgaaagtctcctcccttctttgacgaaaatcattgtcggcgcgaatatactcgtccatcttctggagcagcttctccaaagtttgagcaggcttcctagcaaagtactgagctgaaggtcctggccgaagtcccttgatcatggcctcaatgacgatttcattgggcattgttggtgcctgtgccctcaaacgcaagaacctccggacatacgcctgaaggtattcttcgtgatcctgngtgcactggaatagagcttgagcagtgaccggcttcgtctaaaacccttggaaagctggtaacaacatgt

SEQ ID NO: 37511 - DNA, 453 bp, Zea mays
agcttcgacatctttatttgcttcttcttcttgaccccatggcattcaattagcaatgaagtctgctaacgcttgggactgaattgaggatctatgcacatagtcaatactgaattcgttaagctccgcagcccactttccaatccttccagtagcttctctgttcctcataatatccttcagaggctgtgatgatggaacaattatgtggtatgcttgaaaataatgccaaagcttcctggaggccattaacacagcatacaacaccttctccaactctgtatagtttttctttgataaacttagaacttcggagacgaagtatactggggcttgctttttaatttgtccttcaagcttctcctgtacaagcgccacactcactgcagagcgcgaagctgccacatacaatagcaatggagcccctggcgcaagtggagttaatgggtgtag

SEQ ID NO: 37512 - DNA, 408 bp, Zea mays
ggtgaaggttcttcatccacacatgtgctatgtggtgatgctacagccagcccatgctagtcttagctattaagcatgcatctagaccggcctcttcttttgcaaaatcaactaaataaagtttgccgtctaatacacccttaaaagctagtgaaccatcacttcttctaaagacagacacatctacatttgtaaatagacagttataccccatgttgcataattgactaacagatagcaaattataaccaagagactctactaaaaacacattagatatagagtgctcattagaaattgcaattttacctagcccttttaccttgccttgattcccatcaccgaatataattgaatcttgggaatccttattcttgacgtaggaggtgaacatcttcttctcccccg

SEQ ID NO: 37513 - DNA, 418 bp, Zea mays
  unsure (1)..(418): unsure at all n locations
catgcaagctntacttagaataagcccttgatgaagtctttctattataataaataacagatgagccatctgaaccatcatgataaaaacagaagagagatataagctaaccttcacattgttgtatgctagtcagtccgcaagttggtccttcggcatagtagataacccgagttctagcttcggatagcccatcttatccatcatttcgcggcatacttcaatttctctgctttctagaaggcagtagagagagtcgtcttcatcattgccaccatataggagtgagcccaaaggatacttcaaatctttagtgtaattctgaacttcaacaattntctcattattcaaatttccacccgaagcatggtgaataatgtattcgtgggttgcggacaaaacttcttcggatgctaac

SEQ ID NO: 37514 - DNA, 399 bp, Zea mays
  unsure (1)..(399): unsure at all n locations
ggaaggtgaaaccaacacagcagccgctcccgctccgaaggttccccaggacccatcgcanaacactgtccatgcttcggcgtctttatttgtttcttcctcctgagcccctggcgtccagtcagcaatgaagtctgctaacgcctgtgactgaatcgaagatctatgaacatattcaatacaaaattcattgagctctgcagcccattntccaatccttccagtagcttctcggttcttcataatatccttcagaggttgtgaagaaggaacaattatgttgtaagcttgaaaatagtgccgaagcttcctggatgccatcaaaacagcatataacaccttctctaattctgtgtagtttttctttgatatactaagaacttcagatacaaaatatac

SEQ ID NO: 37515 - DNA, 459 bp, Zea mays
  unsure (1)..(459): unsure at all n locations
catgcaagnctggttctangggcattaagttcgatgtttctttttttctangnnggaagccaatgccatccttaatgctagggcgtctcccattataaagcatattacgatcaaatttaaaattttcattctctagcttatgctcggcaactttagcatttaatttagctatgtgaccatattgttctttaattctagcaaggtgatcattcatagcatcaagattaattatctctacatctagtgcaaatagtaacatgctcaatggtagatgtagaggctttgcaagcgttcaattccttaatcttagcatttaaactaacactttcagctctaagacaagaaattgaatcattgcatatatctagctctctagtcaaagtttgacatttctcaacttcaagagcataagcatcttttagcttaacanatcttttatttttcttaacgagcatgtcc

SEQ ID NO: 37516 - DNA, 500 bp, Zea mays
  unsure (1)..(500): unsure at all n locations
aactaagcttagtagagaaggaggaaccctgcagaacaagcttttcatttgtttccaccacattctggccctatcaagaaaacgacccaataaataagttaaacaaagtttaagccattccgtttaggccgttttgaccaagcattgactgtttaaacgggtcaaccttttagaggaccgcctaggccctaaactacacgttgttcctctgtttactgtttagacccgcttaaacggtcgtctaaaaccatttatgataacactgcttcctacaccgaggtcatcttgcatcttcgtggctagtatctttgtcgtgcgtgcgttcagccggagtatctttgtgcactgcttcggatgtagtctacctttgtccatcctttgnttatatgcctgaaacacatttacttatactaaaggttggacgctttgagaaccttcggtacaaaggcccccaacagtcatcatgctaggaaggaccttatagagtgacacagtaatct

SEQ ID NO: 37517 - DNA, 446 bp, Zea mays
agcttaggaacttattgtttcttcgctccgttatgacttctatataagcgatcttcatcatcgtacttataactggttggtcttctgaattatcgcataggtcatgcttggcagctttcttctttattcggtctagacgcttcttggggcattcacgaatagtatgtccttcatctttacagtagtagcaagcacctcttgctttgagttctttgcgagtcaactctgcttgaccaacacgtgatgagggatgattgagtgtctgtatctcacatagctgagtctggcttgattcttcggtttgggtatccatgtgtctcggggcttctgcttgtggttgaggtggactactcatgtatccaaacatattcctattacctgttctgctcttacaatgttgatagaagttctatgcatttctgttcatattcatgtctgtagactga

SEQ ID NO: 37518 - DNA, 419 bp, Zea mays
  unsure (1)..(419): unsure at all n locations
agcttgtgaaggttcttcattcccacatgtgctaagcggctatgccacagccagcccatgctagtcttagcaattaagcatgcatctagaccggcctcttcttttgcaaaatcaactaaataaagtttgccgtctaatacacccttaaaagctaatgaaccatcacttcttctaaagacagacacatctacattagtaaataaacaattatatcccatattacatagttgactaacagatagcaaattatatccaagggactcaactaaaaacacattagagatagagtgctcatttgaaattgcaatcttgcctaagcctttcaccttgccttggttcccatcaccaaatatgattgaatcttgtgagtccttattcttgacgtaggaggtgaacatcnttcttctccncgtcatatg

SEQ ID NO: 37519 - DNA, 443 bp, Zea mays
  unsure (1)..(443): unsure at all n locations
tgtagcgacgttctcccacgagcctgggtgcggcagctttcttgtatcagtggagcatggctgtggagggaagccaacaacaaccaaacaaatagtgcctgattggatgactgtatccggacacgtaggctcgggtgaccctggctaacctgatacggcagttttctgcgtacgagtggatgcaatcaaatgactataaaataacttgttttgcatccgctcatgcaacttgcgtctcctttgtgcagacaaccaaacaggagcttagacaaagtcaacgcacacggtgatctaagaagagacggtgcgggtaactaaatatatggatagtggattatggctgctctacggtgcagcttctccactcatcangccaaccaaacacctatagtaacactccactagttaaaaacgaacacgtgaagatccgtcgcccaatgaca

SEQ ID NO: 37520 - DNA, 431 bp, Zea mays
  unsure (1)..(431): unsure at all n locations
agctntcagagagttctgtgaacaaattggctctaatattcattttgcatcggncagacatccagagtcaaatggacttgttgaaagagctaatggcattataatgacgggaataatgaagttaatcttcaatcagcccagaggaaagtggccagatgaattgatcaaaatggtatggagccacaacacaacaatatcaaggtcaacaggctttacaccattcaaattatgtttggtgatgaagcaataaccccagaagaagctaaagcaggatcaataagaacagtggcttcgacagaggacgaagctgattattctgtggaaaaagatgctatagaagggatcaggcttcaggccgtggagaacatcaataaatatcaagccgaaacaataaaatgacgtgacagaacagttcggttaaaaacattaag

SEQ ID NO: 37521 - DNA, 478 bp, Zea mays
  unsure (1)..(478): unsure at all n locations
tctaaagggagaacatactttgngactaacacatgttcattttgagaaagacagggtttgtagcgcatgtcaggcagggaagcaagttggtactcatcatccacataagaacatcatgacgactgacaggccactggagctcctacacatggacctattcggcccgatagcttacataagcatcggcgagagtaagtactgtctagttattgtggatgattattctcgcttcacttgngtattctttctgcaggaaaaatctcatacccaagagaccttaaagggattcttgagacgggctcaaaacgagttcggcttaaggatcaagaaaataagaagcgacaacgggacggagttcaagaactcacaaattgaaggcttccttgaggaggagggcatcaagcatgagttctcttctccctacaccccacaacanaatggtgtagtggagaggaagaatagaactctattggacatg

SEQ ID NO: 37522 - DNA, 390 bp, Zea mays
atgactcacagcttcgtctccagcttgttctcgcccaccttttgtccatatcatctttacaaatctattagaaatgcttcgggcgagatcaggaatgtcatccacaattgatggtgatagagtgaaattgggcctattgacaatttttccatgatcacagccagcttttatgaaagctgcagcagtgccccgagaagctacccaggcgcagaagtcaccgtgcccggctataacttcgtcaagctcatcaatttcaccctcaatatgttcgaaggtctttggtaaatcttcagctgacggcgtgaatttctcactgctagctccaactgagtggaagaatattctcagtcgttgaatacatatgttgctaaactccaaacatttgtcttg

SEQ ID NO: 37523 - DNA, 460 bp, Zea mays
  unsure (1)..(460): unsure at all n locations
ctcgaccggatccttaagcgactgagctgcagctgtgacctgagccgtgtttgttttccacaccactttaattaattcatctggccattttcctctgggctgattgaagattaatttcattattcccatcattatgatgccattagctctttcgacaagtccatttgactctggatgcctaaccgatgcaaaatggatcttcgtgctaatttgcccacagaactctntaaaagcttcggcatcaaactgtgttccgttatccacagtaatggccttcggcactccgaagcgacaaacgatattctgccagaaaaatttctgaatggtaaccgaagttattgtggctaaaggcttcgcctcaatccacttggaaaaatattctactggctaccacaacatatttaaatntccttgtgctggtggtagcgggcctaacanatcaaggccccacctttgcaat

SEQ ID NO: 37524 - DNA, 407 bp, Zea mays
  unsure (1)..(407): unsure at all n locations
tatgaagattcttcatcccaacatgagctagttttctgtgttttagccaacccatgttaatcttagcaattaagcaagtgtcgagttcagctctatcaaaatctaccaagtatagctgaccctctaacactcccttaaatgctattgaatcatcacttcttctaaagacagtgacacctacatcagtgaatagacagttgtagcccatttgacataattgagatacggaaagcaaattgtaatctaaagaatctacaagaaagacattggaaatagaatggtcaggagatatagctattttaccaagacctttgaccaaaccttgatttccatccccgaatgtgatagctcgttggggatcttgattnttctcgtaggaggagaacatcttcttctcccctgtcatg

SEQ ID NO: 37525 - DNA, 446 bp, Zea mays
  unsure (1)..(446): unsure at all n locations
agcttctaaagggagaacacatcttgtgactatccaatgttcattttgagaaagacagggtttgtagcgcatgtcaagaagggaagcaagttggcgttcatcatccacacaagaacatcatgacgaccgacaggccgcttgagctactccacatggatctattcggcccgatagcttacataagcatcggtgggagtaagtactgtctagttattgtggatgattattctcgcttcacttgggtgttctttttgcaggataaatctcaaacccaagagacctagaagggattcttgagacgggctcaaaatgagttcggattaaggatcaagataataagaagcgacaacgggacggagttcaagaactatcaaattgaaggctntcttgaggaggacggcatcacgcatgagttctctttctcctacacacctcaacacaatggt

SEQ ID NO: 37526 - DNA, 262 bp, Zea mays
aacaactgcccccagttgaaggcatcaagacctgcttactccaactcggtgaatggccccaagaacgcctcagcacccgcccccaaggtgccctcctccatcagccagcagaacaagacccagtatcaaggaagggcatgagtaaaccacgtcgatgctctggaggatcagcaagctccgggagtagtgctcggtgagttccttattgaatttactcccgctactgtactttttgattcacgagcatcccattcttttatag

SEQ ID NO: 37527 - DNA, 323 bp, Zea mays
  unsure (1)..(323): unsure at all n locations
agctggggaagactctggagaacaacgtgagtctattggcgangccagagtcaacctatattagtgttagcaattaagcaagcattgagtttagctctattaatatcaactaagtatagctgaccctctaatactcccttaaatgctactgaaccattactccttctaaagacagcaacacctatatccgtaaaaagacagctgtagcccattttgcataattgagaaacagaaagcagattgtcatctaaagaatctacaggaaaaacatcggaaatagaatgtcaggagatatagcaattntaccaagtcctttgaccata

SEQ ID NO: 37528 - DNA, 426 bp, Zea mays
  unsure (1)..(426): unsure at all n locations
agcttgtgcttgccacagagtgttccttgtgctcttgttggatttatattcccctcctagttaggagtcaggtgatttttacaatgcgcggattccacctagcaataacctctgttcctacttctacacaagttagtattaattagggcttgacgaacctgaagatccatagttagttagttaacctgacatctttgtttatcctattatattttttggcaaggacctgccatggcatcctttattgtagattgagtagaatatttactactagctngtttgtttacttacttttactatcactaggggtttgtatgaaagatctttcaggatgcagaatgaatntatacagtaggcataggatgaaatctacgcacttcgtgcctccatcgtatcgcactatttcttgcacggagagattaaatg

SEQ ID NO: 37529 - DNA, 437 bp, Zea mays
  unsure (1)..(437): unsure at all n locations
tcacggcctctcanggaagctatccgagggcttgtaccgatctttgagggcgggaaaggggttggccacggtggttgccctcgggaggctctagcgggtcgcggggaggtcgccggagctatgggcgagctcgggggagttaggcgtggtacggaggaggcaacggggaaggcagccgggcactgggacgggctttatagccgtggcgcgggcgtggtcacgggcggctgcaggcgcgcggnggttcgcgcacgggcgtgctctgagcgcgcccccgagtgtcagcccgcgtcgaacatgtgggagctcgcttctgccatggttcaacgacggatttgagcaccttagcgtgcgtatcttggcaaaaccactgtgtacggtctcttccctgctccatatcctacctttntgctgtgagttccaagtcaagatatggt

SEQ ID NO: 37530 - DNA, 471 bp, Zea mays
  unsure (1)..(471): unsure at all n locations
agcttcgncttgatcatactcttgtataccatttacccaattccgaagatacctgttcacatatttcacttggaaaacattgtcaaatcgtgtttttgaggaccttcggaggccaaaggcccccaacactaaggagattcaacaacaagtctaagaccttctgaactgcgggtacattagtgagagccttagtccttattctatttctattcttttggttactaggaaagataacatttggcacatgtgtgttgattgtagagccattaataacataataatttggtatcaatatcttatttctagactgaatgacatacttgatgaattaagtggttctattgttttcttaaaaattgacttgtatagtggataccaccagattcgtatagctttacgtgatgaatgaataattatatctaaaactaagttcggcctttagaagtggttagtcatgtctctttgagtaac

SEQ ID NO: 37531 - DNA, 370 bp, Zea mays
  unsure (1)..(370): unsure at all n locations
acactatanaaactcagctnnttggaaaacaggccaagcgcggaccgttcggcntcttttgctggaccgccgcaacaccaggatgacactcggacagaaccaatgcaaaaatccaagtatgcactacggaccgtccgaaggaaaagcaaggaccgtccgagaccgtgcgcggaccgttcgggctcaggcgcggaccgtccggtaggtgagaaaccgaaaaacccgaaggtaacgggctcggaaaaatgaaatatagcggcctcgcggaccgtccggtgtgcacgaccggaccgtccgcgactggctatatctgacatctgacgacacaataaatgcaatatagccgctgatatagccggtactgctgacc

SEQ ID NO: 37532 - DNA, 443 bp, Zea mays
agcttctaaagggagaacacatgataggtctatctaatgttactttcgaaaaagatagaccttgtgcagcttgtcaagcagggaaacaggtgggaagctctcatcatgccaaaaatgtgatgacaacatcaagacccctggagttacttcatatggacctcttcggacccgtcgcctatctaagcataggaggaagtaagtatggtcttgttatagttgatgatttttcccgcttcacttgggtattctttttgcaggataaatctgaaacccaagggaccctcaagcgcttcctaaggagagctcaaaacgagtttgagctcaaagtgaagaagataaggagcgacaatgggtccgaattcaagaaccttcaagtggaggagtatcttgaggaggaaggaatcaagcacgagttctccactccctacacaccacaacaaaat

SEQ ID NO: 37533 - DNA, 468 bp, Zea mays
  unsure (1)..(468): unsure at all n locations
ttgcacaacacaggatcatagatagtgtcatatcttcatgtatttcacaacgatcaaatggttatcgttttcagggtcagtagaatttgatcgaagtttgtgaagtcggctagccttgatcctatatgtgctctgtgccacatactttttgggtggtgatgacagtccgtctttgttaagataacttctatattggtgtaacgccctaaatctcattntgaaaatatagtaatttttttaaagaaaagatcttgaattagaatatatttttttctctccttagaattcccataacatttgaagtcatatctccttaaataaaagttttataacaaaaattcaataaaaagattcttatataaaattagtctttattgaagtttataagtattaatgtgagaacattnttttaagaggtcatacaatataaactattattcttaacnataatacatgggtgctacatat

SEQ ID NO: 37534 - DNA, 430 bp, Zea mays
  unsure (1)..(430): unsure at all n locations
acctgcggcatgcaagcttgngaaggttcttcatccctacatgtgctaagcggtgatgccacaaccagcccatgctagtcttagctattaagcatgcatctagactggcctcctcttttgcaaaatcaactaaataaagtttgtcgtctaatacacccttgaaagctaatgaaccatcacttcttctaaagacagacacatctacattggtaaatagacaattatatcccatatggcataattgactaacagatagcaaattatatccaagggactcaactaaaaacacattagagatagagtgctcatttgaanatgcaatcttgcctaaacctttcactttgccttggttcccatcaccaaatatgattgaatcttgggaattcttattttgacgtangaggtgaacatcttcttcnntcccgcatat

SEQ ID NO: 37535 - DNA, 485 bp, Zea mays
  unsure (1)..(485): unsure at all n locations
taagtagcataggcaagtaatatgcgaattgactcaagcctagctacgggtgcataagtttcatcgaaatccaaaccttcgacttgtgaatatcctttggccacaagtcgagctttgttccttgtcaccacaccatgctcatcttgcttgttgcggaatatccacttagtacctacaacattntgattatgacgtggaactaaatgccatgcctcattccttgtgaagttgttgagctcctcttgcattgccaccacccaatccggatctcttagtgcatcctctatcctgtatggctcaatagaagacaaaaaagagtaatgttcacaaaaatgtgcaactcaggatctagtggttaccctttgaatgtcaccaagaatggagttgatggngtgatctcgttgaactgcttggtggactcttgggtgtggcagtctttgatccctaatttcttgatcatcttcattatcttcatctcccccttg

SEQ ID NO: 37536 - DNA, 403 bp, Zea mays
  unsure (1)..(403): unsure at all n locations
agcttataacattgactcagacctttatggactanaaggtcattctatctttaagtcgggtagcaataccgaagcttcacgaagaggaaccttcggccattttatacaaacagcttccgccgaagaccgcttcttcctgtaagaccttcggcgacgaagcataggcccaacagtagcccctttcgcggtgctagatcgtttttcgtaacgagctcggtccgcgaaaaaagtctcttatgctttggggagccgaaggtccaaaaaaacacctttcctgagctcgntaccgagaaacgaatcaatttcccagcgcgtagcgggccctccttgcagagttactgtttagtctctgcgggccaccgcacagtgagtacaagcgggtgaccgcctggtgaaaaatcct

SEQ ID NO: 37537 - DNA, 484 bp, Zea mays
tcgcatctctgaactaactcggctgcatcgttcttcgccgtttttctatataatcctgacctgaaaaccttcccgactagtgttctggatgctgcatgtactccacactgtcctgcatggacttcctccagaagttgcttcccggtggatgggagaacgcacttcatgaggacgcctgacgcgccccttctgtataatatctccccaatgagtgtgtagtgagccgactgcctggcaatacgctctgccaagatcttgtcgtctggttcttcttcgttctttatatacttaatgatcggccttctccagtcatcagagtctgactcgggttgatctacgatgttgcactcttctgtttgttccattgagatactcggctgcataatttcttgcacgacaactccgggtgggacctgagttcgaccggatccgagtatggacagtacatcggctgccgtgtccgatctcttttatatgataaact

SEQ ID NO: 37538 - DNA, 445 bp, Zea mays
  unsure (1)..(445): unsure at all n locations
agcttagttaaactaagtggcaagtccatgttggcgttctactgaattctttctaatgtcttagtgagaatttatcaacatttctagttgaacttattggagcgaggttcatctttcatttctttccttttatttctcttatgcttttagggtgggtttgaactacaagttatcttaataaatctccaaacatttttgaaaaattacagcggcttcttactggtgtataattctctgtctcaaaatttggggcttaacaagcgaatagttctctttggaaaaattatcaaatattagggcagagggggtgttctgaactacaactcctttntaacagagggttattctctaaacatatctttgctggctctagatgtataacatgaccttacnatatttaccattatacttccagtattttgcttatttctcaagtctacccaag

SEQ ID NO: 37539 - DNA, 492 bp, Zea mays
  unsure (1)..(492): unsure at all n locations
ctcaagctntatggatcatagcttcgacgctcggttctgagaagacctttctaatgtgttctttntaagatcttcggctacgaagcatacccccaatagtcatgatgctgcatttagttctcatgccatgtttgcatgtagctcctcatatgctcatggtagaaataggcctaggcgccatcatgctgcttcttatgcgcctaggagagcatcaactagaccgactatgctttatcaaatatgtgatgcttcatttgttcttacatgcaaaaattataaagtagttgctagaagtttgggacctaagtgcaagagagacaaaacttgcatctgggttccaaagtcagttgtgactaaccttgtacctaaaacccaagcttaattacctcgcaggtttatgcatccggnggctcaaactggattattgatagcggatcacacaacacatgatgtgggagaagaaaatngttaccttctacgtcaagaacaggg

SEQ ID NO: 37540 - DNA, 469 bp, Zea mays
  unsure (1)..(469): unsure at all n locations
agcaccagagctgcaagcttgaccttcgtataccaccgaagaagaagtatgtcttgggctgcactgcagccaatggacgtaaattatgagacgttacacgaagctaggagccagaagcggaaggctaccaacccaagacctcaggaggaggaactggaccaagaaatcagggacctcgaagctatccaccaacaagttcaaaagaagtgagagaaaatacttcggctcgctgatctctagaggaagattgatgaggccgccaaagaaatgtgtcacctcacataggatgaccaagaccgaaggccccagtacagggagcttcatcaagagaattcacacaatgatgatgaatggtatggttattttcatcatggcaattttgctttcgatgatgcttctcctttggcagcagaattgcaggccaccccatgacccncatcatacaagccacctcagctttctatgtatg

SEQ ID NO: 37541 - DNA, 460 bp, Zea mays
  unsure (1)..(460): unsure at all n locations
taagtcttctgtgataaaatttcaataaaaattataagagattgtattgtttgtttacagggaatagatacatcatagacaaagtacactgtatctatttaatatattgagttattagatacaataatacctttgccttggcaaaaggttggattccagaagacgcaattgcaataacttgaatccgtgaacagtaatggaatactgttcactaattataggcacaggacgcagcctgtgaggaattacaagtatgccccttataaaagcttacaacattgactcagacctttatggactaaaaggtcattctatctctaagtcggttggtaataccgaagcttcacaaagaggaaccttcggccattntatacaaacagctcccgccgaagactgcttcttcctgtaagaccttcggcgacgaagcatatgcccaacaggttacatcataaaaaacaga

SEQ ID NO: 37542 - DNA, 398 bp, Zea mays
  unsure (1)..(398): unsure at all n locations
acgcgcattnccaaaaagatagaccctgtgcagcctgctcagcacgcaaacaagtgggaggagcgcatcacagcaagaatgtgatgaccacttcaagacctctggagctgctgcatatggacctcttcggaccccgcgcctatctaagcataggagggacgaagtatggcccagttattgttgatgactcttcccgcttcacttgggtgttcttcttgcaggataagtctgaaacccaagggaccctcaagcgcttcctcaagagagctcaaaatgagttcgagctccaagtgaagaagataaggagcgacaacggattcgagttcaagaacctctaagtggaggagtctcttgaagaggaagggatcaagcacgagttctccgcttctacacaccac

SEQ ID NO: 37543 - DNA, 439 bp, Zea mays
tatactgcctcagagatggacaagacggtttttggttttaaatcgaaaccatagaaacatgtcattatcgcaatatcataagttgtgagtggatattatatcaacacaattaaacaatagaacatatactttaaatgtatcatatatatatagttacggaggcacagaaccattagctatagaattatatattaatatatattgttttatagagactcagatataaacgtaaaaagttaactgctcgagagggagacatgcatttttttccggaacggttgaatctgcagatttggacagcagtaaatcacgcctggaaatttgctaatacatgtaagtacataacaatgcattcacaacacggaattaaaatggcatgcgtgtatatactagtaggataagaatgataaaagccgagttaaaactttctcttacctcg

SEQ ID NO: 37544 - DNA, 473 bp, Zea mays
  unsure (1)..(473): unsure at all n locations
agctggacattgtctcccgttggaagccaatgccatccttaatgtctgggcgtctcccactatagagcatgctcttagcaaatttaaatttctcattttctaagtcatgctcattaattttagcactaagttgagctatgtgatcattttgttgtttaattaaggctagctgatcatgaatagcatcaacattaatatctctacatctagtgcaaatagtaatatgttcaagggtagatgtagagggtttgcaagtatttaattcaacaatcttagcatgtaaaatggtattctcatctctaagattagaaatagaaacattgcaaacatttaaatctttagccttagcaattaattnttcattctctattntaaggctaaagagagatgcattcaacttgtcaatcttagcaattaaattagcattatcattnntaagattaacaattgaatcatcactaatatctaatttc

SEQ ID NO: 37545 - DNA, 428 bp, Zea mays
tctaaagggagaacacatgataggtttgactaacgtacaattctaataagatagaccttgtgcagcttgtcaagcaggtaaacaagtgggaggagcacatcatagcaagaatgtgatgactacttcaagacctctggagctgctgcatatggacctcttcggacccgtcgcctatctgagcataggaggaagtaagtatggtctagttattgttgatgacttttcccgcttcacttgggtgttctttttgcaggataagtctgaaacccaagggaccctcaagcgcttcctcaggagagctcaaaatgagtttaagctcaacgtgaagaagataaggagcgacaacaggtctgaattcaagaatcttcaagtggagggagtccttgaggaggaggggatcaagcacgagttctctgctcctacacacc

SEQ ID NO: 37546 - DNA, 416 bp, Zea mays
  unsure (1)..(416): unsure at all n locations
agcttctgcgctggatgtatgactctatgccttacataaaacatcttgtcaaaatgtgaccttaagatggtttcactgtctctagaccatgcattntgttactcgcttgcaatataaatcagagtcaatcactgttctaaaaaatcggcgaacacaaatacatcatccccaaatatattattgttagacatgttaccgtcagaattaggcatgtatatatagtctgagaggaccaggacatctaagaggcgtaaactaatcaacttagaatctacttttaaattaagacttctaaaagcaactccaataatcctataaaccactttctaaatcttacatntatgaagtaaacaaaaaatgtttctctaatagttctcaaataacgagcttgtcatgcccctagcgctccgcgcatc

SEQ ID NO: 37547 - DNA, 462 bp, Zea mays
  unsure (1)..(462): unsure at all n locations
tcggtacactacgacttcattatcttcagggttcggacaagtcttttctccttcgtcggccctaacaacggacaagtcccgaaaataccttcctctcatgttgacaagatgattttccttgatacttgatttgccgaaaaccgcgtggcttggccgccaagggcgatcttcggagtcttcaccaccactatccacattataactgtcgctgttgttagtatcttcagacaaaccttctaaaatctctttggtgattttntctgtattggtcttcgacattgctataagaaaccccagattcttctcttcatcgaggctcagcttcatctcggcagcagccttcttatcttcagacatcttcggaaacactaaaaaactgttttcaatgccgaagcttcaaaacttataagctaagcacatattggtgcacaagagctaacaattgagtgagcgggagcagat

SEQ ID NO: 37548 - DNA, 455 bp, Zea mays
  unsure (1)..(455): unsure at all n locations
agcttcggaaaccncatgcttctagccatcttccggcagacagataattctttgttgtctgggaggcagtataggaagtcatcttcgtctgtcccattgaacactagtgcccccttcggatatttcaattctctggcatagtgattaacttcaaaaatctcttcttcggataatttcttccccgaagcgtgtcgcacaatataatcgtatattttggaaggtgcttcgggggcagcagtgtcaatttcttcaaccaaaattggctctgacatctttattttttcggctgcctttgcaatttttgtttcttcggcttccanaggttttaccttggtgggctctgaaggtccagcttcagtttcaaattgtttggtcgaagcttcagcaacaaaggcttcagtagacacttcagaaggttcaccagttttcttttgagtatgctcgaagaattatat

SEQ ID NO: 37549 - DNA, 446 bp, Zea mays
tgagcacattagcctccacactactaaatgtactaaatatgtttattatgacgactgtttgccttggtatttagaatgatatccgccatggatatgatgaatctataattcgtacatttcagatcgttcatggttatcagtaatgaattgccatttccaactagttatggttggagtcaggaacttttgcacgctcctgacttgtgattaaccgcatgtactacatgtacaagttctcctatggtttcagtacgtggtaatccatgaaaaaattcccatgtgtacattacgtatgttcaacctccttggcctacaaagggaagaggttggcccatagacggacagagggacacacaaacaacggatggaccccagacgtgataggactccactctataacccttagcttcacctccaccgcaatacgagacatgggatcctctcct

SEQ ID NO: 37550 - DNA, 389 bp, Zea mays
  unsure (1)..(389): unsure at all n locations
agctngccgcgtcggaaggaagccgagcacatggtatgtcaccgtgtcggtcgctggacatgcatgcgcaggggacctcggccacgcccgccatggctgcgcgccgggaactcagctggaggttcgtgcgcaggggggtcacgtatgggaaggagcaggtcgagcgagctgcgacccaggggcacgtcggtcggggctgagcaccaggctgccacgccacatggagaagcagggcacgactgcgtgcatatatgtgaggcgcaagcttgacggagcgaggataaaagtggcaacgtccactaccggaatcacgttctttaccgagtgtctaagacactcggcaaatgctattttacactcggcaaagaacactcggcanatattntatc

SEQ ID NO: 37551 - DNA, 439 bp, Zea mays
tctaaagggagaacacgtgataggtttgactaacgttcaattctaaaaagatagaccttgtgcagcttgtcaagcaggtaaacaagtgggaggagcacatcacagcaagaatgtgatgaccacttcaagacccctggagctgctgcatatggacctcttcggacccgtcgcctatctgagcataggagggagtaagtatggtctagttattgttgatgacttttcccgcttcacttgggtgttctttttgcaggataagtctgaaacccaagggaccctcaagcgcttcctcaggagagctcacaatgagtttgagctcaaggtgaagaagataaggagcgacaacgggtccgagttcaagaaccttcaagtggaggagttccttgaagaggaagggatcaagcacgagttctccgcttcctacacaccacaacaaaat

SEQ ID NO: 37552 - DNA, 380 bp, Zea mays
  unsure (1)..(380): unsure at all n locations
agcttccacatgcttgccccagtggtctgcttatcatgtctaaatagctctctgataagtcgctccagcgcttttgaggccgaacgacatggaggtatagcagaacgctccgaacggngtgatgaatgctgttttttcctcgtcttcttttgccaagctaatctgatgatacccagagtagcaatccaagaaagacaacacagaacatccggcggttgagtccaccacctggtctattctaggaagtccgaagaatccttcgggcagtgtttgttgagatccgtatagtcgacgcacatgcgccaatccactntattctttnttagtacaagaacagggttagctaaccactcacgatgtaacacctctctaatgaatct

SEQ ID NO: 37553 - DNA, 371 bp, Zea mays
  unsure (1)..(371): unsure at all n locations
ngcanatgtggtgtggctgcagcttgtcttcataacctggtgtgtgcttcatatatacatcctcctcaagaatgccatgaagaaacacattctgaacatcaagttgtcgtagtgtccacccttgtgaaacagctagagagagaataacccgaatagtggctgccttcactactggactgaatgtgtcctcatagtcaatcccgtacctttgcttgaagcctttagcgactaatctagccttgtatctatccagagtaccatctgccttctttntgaccttgtacacccatctacaatcaataatatttttaattccttctggtggaaccaagtgccaagtcttgttcttagccaaggcctcaaattcagca

SEQ ID NO: 37554 - DNA, 270 bp, Zea mays
agcttgagaagactctagatgtcaacatgtgtctatgccgcgatgccagagccagctcatgtctgtcttaacaattaatccagtgtcaagttcagctatattaaaatctaccaagcatagctgaccctccaacactcccttatgagctatcgaatcatcacttcttgtaaagacactgactgctacattagcaaatagacagctgtacccattttgataattgaatacacaaagcgatcgtttgctacgaacaaccgaaaacattgaaat

SEQ ID NO: 37555 - DNA, 472 bp, Zea mays
acactaaaaactcagcttgctgcagctgcctcttgtgcacgccctttgaccatatctcaaaacccgccgcttgcttacctaaaacaacaagggacacagccctgaatacgaagtgactgtagagagcctgtacccgtccaccataatactcttacggatcagccggcttttaacggagggcaggataggcttaacgatagtccaagactctgtttgcagaaatgcttactaataatgggtcctgacaacaccagctgtaattgccacgttcacaaaagtgacctgtatctagaggtctatgtatcctagttcaaacactcgacctatactacccaaattcttaacaacccttcttattcactgcacagctagatgcgaggcagtgaccaagtcttcatgttcgcgaagtacggcgatctgaatcgttatactagctaaggatctcaatacacgaatatgcacactaaccctg

SEQ ID NO: 37556 - DNA, 482 bp, Zea mays
  unsure (1)..(482): unsure at all n locations
agcttcggtagatcacaacttcattgtcttctttagcattaacggccctgtctgcgtcagccctcacaatagacatgtctcgaaaataccttcctctcatattatcaagatgactctgtttgatagttgatttcccgaagactgcatgacttggtcaccagggtcgatcttcaaaatctttgcctccactttctgccgtactgtggattaccttagagtcattagcaaatgtaaagggcatggatgtaatttcacatgggctgcgtcctgtgcctataaatagatgaacagtactcccgtactggtcacgctgacttgtcatttgcttttgtgcatgctcgtatctttgctttctgtcaagccgaaggtaccaaatggtaattaatattgttcttatgttaacttacgattatatattgagaaatatatatatatatatgataatgttatcgntcacattggttctcatgctctacatgctc

SEQ ID NO: 37557 - DNA, 478 bp, Zea mays
  unsure (1)..(478): unsure at all n locations
gactttggacaaactangcatgctatcacatgtactatattttanatcttctaggggggcattcacacccttcaccaactcaggtaggttcagttcccaaatttaatcctaaggcattgctacttatggggtgatcacttcttagcaatatcaagttacaaggatttgttgatctcttaccgaagtttacctttataacattcaaatatatataacattaaatcgtttgttaccaagagtaaggaactggaggggggaaataaaagcattcctatctcctgaagaaaaatataaaatattggtcttagcgagcaatttctcctcacaggcaaaattaaccattatgacatactaatatactatacctcgatcatatagtaaatggcaaaagaatcaacaagatgatttccacacatatgaaacatagaatctaacagcaattacagcataaggttaacgactgacacaggcataacac

SEQ ID NO: 37558 - DNA, 467 bp, Zea mays
agcttctaaagggagaacatgtgtcaggactattcgatgtctggtttgagaaagacagaccttgtgcagtgtgccacgcaagaaagcaggtgggaactactcatcaaaccaagaatgtgatgacaacatcaagtccactagaactccttcatatggatctctttgggcccattgcttatcttagcatcgggggaagtaagtatggttttgttattggtgatgactcttcccgcttcactcgggtatttttttgcagggcaaatcaaacacccaaggtactttaaagcgcttcctaaggagagctcaaaatgagtttgagctcaaggtgaaaaagatcatgagcgacaatagatctgagttcaagaatcttcaagtggaatactatcttgaggatgaaggcatcaagcatgagttcttcgctccctacacaccacagcaatatagtgtactagagagaaagaattgga

SEQ ID NO: 37559 - DNA, 436 bp, Zea mays
  unsure (1)..(436): unsure at all n locations
ttacatgatcacctatttattttcctctatgtgctctcaatnggtatcggagccgttctcttcacttaagggactaaccgcccgaagagatggatcctaagggaaaggggatggtggtcaacgataaggagaaggagttcatcttcaacgagccaagggacgacaagcccactgactctggctcgagtcacaagaagaaggacgggaagaagaggcgcatcaagaagatcgtctactacgacagcgacgaatctttntcttcaccaagagactacgacgacgagaaaaacaaaccggttaattcaaaattntcatttgattattctcgtattcctttcaattccaatgctcattngctttcaattcctcttggtaaacctccacactttgatggagaggactactctntttggagtacanaatgcgtagtcactta

SEQ ID NO: 37560 - DNA, 452 bp, Zea mays
  unsure (1)..(452): unsure at all n locations
agcttaggccagatctacacgatagtgatcctacttcatgagaagtaactgcagaggagatgccatgccattatgccaacatctgcctaaaccctagagtctcaaagaagatgagacaactcgacccctactgtgaagccaaccactattatgactccaactgttccctccatatctcttcctctatctatattttctattatatattatgggacaattacgattttaccatccattttaaactctatgattttactcctacttttaaaatcgagttattgtttgcccctccctctcaacttcgttagtgaaaaacanaattattgatttaaaaaataaaaaatgttaaaagaaaagtgtgaaaggtccgaactaccaaccttatattctntatgggtgcaaccccaacagagggtaaatcacaattacataatataactagggggtaaaga

SEQ ID NO: 37561 - DNA, 482 bp, Zea mays
cacgaatgtcttacagcggcgaggcggtagcctatgagaaactgtggtgctccgagggagccctcgcgcacacaagcggcagagacagcttcgcccgatgatgggacgcgacggtgttggccaggaaggtcacggacgacattgaatcgcagaatcgaccctccgacgaccgcgacggtgcacaccttcttccccctatgcgcgcacttctctaacggcggcagtagcaaggtcggcaatggatcggttgaggattagggcgcacggcgcttcggcttatatcctccccagtgccaggtcacccgcggctgaatccccgcacgagcggcgcgccatttccgcgatctgttgagctcaatcccgtgtagaggataactcgctgacatgggaccccatgtgccagtgacagaggcgaatgatgcaagcgcgagtgagaatagcggcggtggctgacagccgggccccgcgcgcaagtgagtcta

SEQ ID NO: 37562 - DNA, 294 bp, Zea mays
ggagcgcgccagtgtgagcgctgacactatctatgcacgacttatttggcatattgcaaatgtgtgcatctcgatatgcacttctggtactctattttcgaaatgaggattgaaagcttgcctaagtgacaaactcacatagcctatcgaatcctgtcttagctagtatttatcagtaatgatgtgggttcatgaataccatatttgtgggtcataactcgagaaaagggagcactattttacttgcttaattggcgtcaatatagtttgctgcttaatttcttatatgatttt

SEQ ID NO: 37563 - DNA, 341 bp, Zea mays
  unsure (1)..(341): unsure at all n locations
acccctttaatccctatttatggttaagntccctatccagggtcctatttgcaaaatgctataacacacaacttgtttgaaattattacctaatgaatgcactctaggtgtgtcaaacatatgcaatgccaatgcttatgatgtcatgctcaagttttagttatagtaacaccaggggtgttataggagcgtagcccgagcctcggttatgtatcgaacgtacccagggtcattcctcgctctatgtctgaggcggctgtgaaccctttgagggccagccttcgaacccctgatcagtaatgggcgcggagcccgagtggcctgaggcggccgtgaaccct

SEQ ID NO: 37564 - DNA, 405 bp, Zea mays
  unsure (1)..(405): unsure at all n locations
agctngcaatggcattgatagacttgtaatgttcttgaagncaccagattgctcgctgggcctagtctccatcgtggactcgcactgctccgtgggtcgagttcctcacggcacaatcgttggtaactcggctactagcatgttcgttgtgttatgctctacatttttctcggttccacgcgtagggtagagcgtactgtcggggtttgggcaaggcgctggcgaagaacgccgctatgatgttgtggcgctaccgtgctcattggccgaaggtgggagagttatgcgccaaccgctggatccgatcgacacataggattatatctcgtgctcataaaatccatgccaaagatgttatcgtgtaccatttcggtggggccatattctaatctatggcatctgatc

SEQ ID NO: 37565 - DNA, 470 bp, Zea mays
  unsure (1)..(470): unsure at all n locations
gctactaatatgatccttgttctggtgtctctcanggttatcttatacagaagatattgcaaatatacctcaggaatagtgactctacttcagatctacttgctgagataggtcgtgaattgcctaaggtggccatctcttcttctcgagtgatgctctgagagacatctcatttagcatatagttgtagatatgaactacatgatccttttttgccttagaatactccttatatgttcttattccatgttttaaggaaccttcgctcaaaacaaaagataaccaagatgtatcgtatgggtttccaacattgtgttcctccactattacctcttggtaccgtgtgcttgtaagtatggcgtttgatgcatttatgacatatgccatgcttgtcttgtcttctaacattttggtcaccaatacagcacgacgagaacacacggagtttaaacaagacggtgagcaattta

SEQ ID NO: 37566 - DNA, 451 bp, Zea mays
  unsure (1)..(451): unsure at all n locations
agcttctccttgtcgtcatcaattgtgacatataaccactctgacttccagcctgccgcccatttgcttcggtagctgattaccggaaattttgtggttttccggtaggcgaagttatagcaaccgaaattgtcgtgcagtccatcctttctagccttcgtctgataatgcagctcgtggacccggcaaaagctgtccgcatatggttccaccgcttggcttcggagtgcccagatataaacgctaagcctgacgatggcgttaggggtcaactggtgaaaatagataccgaacctcttcagtacctctgcaataatcccatgaagagggaatcttaatccagcctttaaaaagctctcgaaaataacaatttcatccttctatggcttcggngtagtctcttctcctccgaagcgtaatagcttcttctgaatttcactaaaaaagcctg

SEQ ID NO: 37567 - DNA, 452 bp, Zea mays
  unsure (1)..(452): unsure at all n locations
tcctttaggatcagctcccgaataggatggaggtctggaacacacaatcggtccttgaaccatattactccctcttgatcctctcgaaagtctttgcctcttccttctaagatcagctgccgaatcttgttgatgttttcatcatccttctgcccttctttgatctcccgctctaaggtgggctctaactccactgttactccttgcgtactgttcagganactgaggctcagtctgtcgaactctntggctaactcatacggcatcgggtacgaggccaacatattaacttgactcttcctgctcagagcatctgcaacaacattggctttgcctggatggtaatgtatctccaactcatagtctttgatcaattccaaccatcttcgctgcatcatgtttaactctgactgngtgaatatgtacttcagactattatgatctgtgtaaat

SEQ ID NO: 37568 - DNA, 361 bp, Zea mays
  unsure (1)..(361): unsure at all n locations
agctntatcaaagggacgtgaagagtgcctttctcaatggaccaatcaaggaggaggtctatgttgagcaacctcccggctctgaagatagtgagtaccctaaccatgtctataggctctctaaggcgctttatgggctcaagcaagccccaagagcatggtatgaatgccttagagatttccttattgctaatggcttcaaagtcggcaaggccgatcctactttgttcactaaaactcttgataatgatttgttcgtatgccaaatttatgttgatgatattatatttgggtctactaacgaatctacatgtgaagaaattagtaggaatatgacaaagaaattcgagatgtcgatgat

SEQ ID NO: 37569 - DNA, 435 bp, Zea mays
tctaaagggagaacacgtgatagggttcgactaatgtacaattctaaaaagacagaccttgtgcagcttgtcaggcaggtaaacaggtgggaggagcgcatcacagcaagaatgtgatgaccacatcaagacccctggagctgctacatatggacctcttcggacctgtcgcctatctaagcataggaggaagtaagtatggtttagttattgttgatgacttttcccgcttcacttgggtgttctttttgcaggataagtctgaaacccaagggaccctcaagcgcttcctcaggagagctcaaaatgagtttgagctcaaggtgaagaagataatgagcgacaacgggtccgagttcaagaaccttcaagtggagaagtttcttgaggaggaagggatcaagcacgagttcttcgcttcctacacaccacaac

SEQ ID NO: 37570 - DNA, 381 bp, Zea mays
  unsure (1)..(381): unsure at all n locations
agctctagtgattagagagagaganttgttgtgttcatttgagctcttgcacttggatcgcttctttcctttctcattcttcttgtgatcaaactcaattataaccaaggcaagagacaccaattgtgtggtggtccttgcgggaactttgtgttccgtttgattgagaagagaagctcactcggtctaagtgaccgtttgagagagggaaagggtttaaagagaaagaagcgatctcggtctttgtgaccacctcaacggngagtaggtttgcaagaaccgaacctcggtaaaacaaatcatcgtgtctcgctctttattcgttcatgatcttgtttgcgccctctctctcggactcgtttatacttctaacgctaacct

SEQ ID NO: 37571 - DNA, 487 bp, Zea mays
  unsure (1)..(487): unsure at all n locations
taactgagagatcaacaatggtgtctagaccttggaaagcgttcatctcgtcgcatgtcatcggtataattatcaagttgcaattctagttgtagcaaattgttcttggagaagtcattcggataaaatggagggactaaaatctctatttttatttccgtatttggcaatttagggactaaaatagaataaaatggatgaactaaaaattagtctctagaaaccaaacacaccctcatttcagatattcatcagagaaatagagagctcatcacatccactgcagtacaaatcaccatatatgtctaccaaacagcagcttaataactagtgcagccagccaaccgtttttatttcatggcaaaaaaaaacaaaactagaaaacaaaaacagtgcaatgcatgcgtcatccagctaccgcgcgacagaccctgcatcgcttctttcttctttanatcacagggcanactcagcatttanaataaat

SEQ ID NO: 37572 - DNA, 449 bp, Zea mays
agctctggctttgggtcttcggaagttaaaggcaatggggattagaagggcggttcttaaaaccgattcccaggttatttctggtcatattgacaagagttgcaaagcaagagacccgaagcttgagaaatatttagacacagtccgaaggattgaagcttcctttgaagggttttctgtcaaaaacattcctcgaggagaaaatgaacatgctgatttgctagccaagtcagcagcacaggggctgcccttacctttggaagtattttttgaaacaataaaagcaccttcggttgaacttcttgaaagagtagtcctcaatatatctcatgttcatagtgaagattggagaagtgagatcatttctttccttcagggcaactttctttcagatgacgaagcttataacaagagaatagaggcaagagctcgaccatatgttataatag

SEQ ID NO: 37573 - DNA, 398 bp, Zea mays
ctatgggctcatacaatatttaagcatcatgctatgggccatatactattctgcatatggagataagaccgaatgctattaggttcgctaggaaaaatgatttgaatatatgtaactattgtgatttaatgatgaataatattgatgaagtgactaacaagaggctgatggttttaaaggcgattgagaaagacaagcttatagtcaccaaggtctacaataagaaaggctaattcattttaggttggagatccagtatgaaagacaatcttgccattaaagaccatagaccagaagtttggcaaatggtctccaagttggaagggtgttacaaagttacatatgcatttttttgtaaagcatacatgttggaaactttgcaaggtgataagttacta

SEQ ID NO: 37574 - DNA, 396 bp, Zea mays
  unsure (1)..(396): unsure at all n locations
agcttaggaacgaactagtcatcttatattctctgaactcngatcgcaatcttgcacacatcgctcattttatacctttgatcatgacatatctctttcatttggtacaaatgcatatttcttattcttcttgtgccaaagctaagactaatgtgtttccaagagtatttttatgcttactcttataatgaaagggaaatggagtaattggcaacgacaaggcttccactacgactatgtcggtatcatatatcctttgccctactcatgaacttactttcatatctttcttataagaagcctctcgatttctttattcttggcacttaatggcncacggggagaaataattggccacagccatacgaccgccccacaccctgtttctaaaaattt

SEQ ID NO: 37575 - DNA, 427 bp, Zea mays
  unsure (1)..(427): unsure at all n locations
ttcatccttcttcttccaaacagtgctggttatactcatttctaagtgcttggacgaatgaatcccttatccagcaactcttgcaactgcttcttcaactctgccaactcagcgggtggcattcggcagggcctcttggaaattggggccgttcccggttgcaactcgatggcgaattcagtatcccggtccggtggcattcccgacaattcatcaagaaagacatctgcatactcacagaccactgggatctccttcaggggtatctccgtcatatagaaagcacatgactgggaagaaccctgactgggcagaatcacagtgaaattcccgcagaaaggagacataacttccacggtacgactggctacatcaagcacaacttggtgcacggtcatccaatntgctcctagaataatggtcacat

SEQ ID NO: 37576 - DNA, 371 bp, Zea mays
  unsure (1)..(371): unsure at all n locations
agcttctcgttaagggatatggatacagtgtgtcctcggcacaaacacactggttgacaatggactggacaggtgcgccgtctgtaagatggccctggtgtcngggaccataattaagggtacccccaagactcgtaatttcagctggtaacccccatcaacacaaagctgcaaaggcctgatgggcgcgatctaagtcaaggctccgcccgctcaaagacacgatctcgccttgacatgcgctcctcantcgacagggtcgaagtgaccgcagtcacttcgccgctccactgaccgacctgacaggaaaacagcgttgcctgacctgcttcgactgctgtgccactcgacagagtgaggctgacagcagc

SEQ ID NO: 37577 - DNA, 462 bp, Zea mays
tggagaagcacacagccttgaagtcttggctgtttaactgtttgtcgttgtccactgttagttcagacggtactctgaagcggcaaacaatgttttgccaaaagaatatttgggcagtctttgatgttattgtggagacagcccttgcctcgatccatttggtgaagtattcgacagcgacgaaggcgaacttaaggttcccctgagccgtgggcaggggcccgacgatgtccaggccccagcgctggagaggccaagtgtgggcgatcagttttgtaaattgcgaagggctgcctgattgaggagaaaacttctggcaggcttcgcaggaccttgtgacccaatttgcggcgcagatcattgcgggacagtagaaaccttggcggatcaccttagcagcagggcccttgaccctgcgtgagagccgcaggtaccactgtggacttcgcgtacgatctggac

SEQ ID NO: 37578 - DNA, 397 bp, Zea mays
  unsure (1)..(397): unsure at all n locations
agctngcaataggtgaagtgagacttcaagaatatgatgattatgaaggaaccttgtggatgaccaatgaggtttttgatgtgggcgcaaaggtggtggttgataaatcctccacccaagcaaacccatcaacctcaagtcatccaagtcttgaagaaggtcatcaaccccaaaatatgccaaccctggtggaaggtgaacatgtaagtgttgatgatgaagtgcctcttgatcaagtggatgatgaggaggagcaaattaaaagacaaccatcaatgccccatcctcgagtccaccataccatccaaagggatcatcctgtcgacaacatcctgggtagcatcaggagaggggtaacaactcgatctcatttagaaaatttntgtgaaatttactc

SEQ ID NO: 37579 - DNA, 474 bp, Zea mays
  unsure (1)..(474): unsure at all n locations
ctcagcagcagctggcggaggctaacgagcacctgtatatgcatcaccaggagatccaggacatggaggccaacgaggatgtcgacatcgagggaggagaggagcctgcctccagcttggacactgctggctcagggagaccaccttcccccgagtcgagtgttgcctcgttcgctcactaggtcgcagggatagagctagaagtcggtgatggtaggactcctcgaagctagcttagcttttgcacccttggggtactaggctagatagagttgagtcttttgggctattgatgtaatcgcgataaactcttctggaagcatggttgatgaatgatgtcagtcttaatttaagaagaaaagtttatgccatgtgaaatcttttatgaatgtgtaagaatctatcggtttcacctttngactctntcaccacgatngaaccttgaacctcanagttatgttattgaaaatatat

SEQ ID NO: 37580 - DNA, 388 bp, Zea mays
  unsure (1)..(388): unsure at all n locations
agctngagcaaaatgaatagcttcggttgaggatgcattatgcaagcttcggctatggtcaaatatttggcagcaaaacagtgcaatagcaatgaatgctgtggtaacttcacacctacccatttgtttatatagtgccacaggtgggaaggtaaatcgtcaagtcttccgcaccggacaaacagtcgcccgcacccactgaacggtgggccacagagcccgagaaggtgaatcgccaggacgtgcgtaactgctgcatggtggggccacctcacgctcggattattttaatcgtttctcgacaacgagctcagggaaggtggttttcggatcttcgacatcccgaagcctatgagactttntcacggatcaagctcgttacaaaaac

SEQ ID NO: 37581 - DNA, 488 bp, Zea mays
  unsure (1)..(488): unsure at all n locations
cagcaaagctcttttcngccgccagcgccaagtattatatgctctagnggcttcggnggaaggtttggagatcagccaagaaaaatttattgcctattctgtggtgaagataagggccataccaccaggatgtgtcacgttaccatccagaagcagaaggagatagtagaagcaactgcgcaacaaagtcagccgaagcaggtcatgcatactgcttcgtatcattcgccttatattccagaatatgtaggcaatcacctcgcagcttctgtcgcttcggcaagccaaccccaagcatcttggcagtattctccaccaccgccgccgacgcagcgaggaaagcagccagaagggagtcagcacaatcaccttcagagggatttcagagaggagtccgaagctcgcacagtcaacagcactgtgccagagtcaaagcacatttattgatgaatatcctacctcaacagcagctctttcgcattcttaca

SEQ ID NO: 37582 - DNA, 420 bp, Zea mays
  unsure (1)..(420): unsure at all n locations
cgcaagcttgtcttctctctttgttattaaccgcatcatactgtacgtactgtacacacgagcatgctatggaatctgcgcttccacacaactgcacacacgagcatactatggaatctctcagtttgatgcttaaatttcgtttttgttgggcttcaaaataatttttgccctcattntttttcaacacaatatcagtgtcttccaatagaaacaatcccttcatgtattattatcttacttgcatgtcacatccggtattagggcaccaagacccgggcgcgaacataatcaccaggcgtgctggtaccaagtctcacacatatgatgaatcatggcacatgatcgaatatcatatctttactatataataggagttctgtacaaaataaataaataattacattataaggagacaac

SEQ ID NO: 37583 - DNA, 497 bp, Zea mays
  unsure (1)..(497): unsure at all n locations
tattcggtccacctgaggaaaattctgttacgatggatgatgctcgaattgatgacatccctcaagtaacccaacaggaaaatgaattcttggttgcaaccttcacagaaaaggaagtaaaagaagcaattnttcagatggaacataataaagcaccaggtccagatggcttcccaatagagttttatcaaactttttgggaggtcataaaagaggacttaatggctntatttacagaattntataatggatccttacctttatatagtctaaactttgggactattatcttaatacctaagtgtaaggatgtttataaaattcaacaatatagacccatttgtctactaaatgtaagcttcaagatatttactaaagtggcgacaaatagagtcactgaaattgctcanaaagtaattagtccgacacacactgtcttcttgccgagcaggaatatcatggaaggagtgatagttntacatganacaattcatgag

SEQ ID NO: 37584 - DNA, 444 bp, Zea mays
  unsure (1)..(444): unsure at all n locations
agcttatctaanaagtttggtgaattttgtgattattaattactctctaaaattccagaagtatggattntggctattttaaatgtcccaaaattcccaattggaactaaaaatcatgaaactatttttattaaatactatcaaaaattagaagcctagcaaaattggtctggtatttttagcatttttctacagttttctagaaattctttaaccctggtagaaaaagaaaaggaaaaacaatgaacagtgttgggctgaattaggcccaaccagcctacagaaggggaggacccacgctcgcccgcgctcgcggngctgttttacgccgaagccctcaggggtttgaatatctaaggaagaatcctgtgcactatttaactgggtcactgacatttgcgaataagcccttgcacttctatctcttcacagcttgcagtccac

SEQ ID NO: 37585 - DNA, 424 bp, Zea mays
  unsure (1)..(424): unsure at all n locations
tatccattgaagtattntcccaaagctaactaaaaggttaatataaattntgctatggatttgaactattttcttaactaaataatatgatgagatattttacataaatcatacttcattataatttttgtggcatggacaaaggataaatataaataaacatataatttatacttgcatggtcatgctgagagttctgtttggtacatcaaatatatgtttgaaattcagaatcaaacttatgattgaaatgggaaatgaaaatatgaaataaaaatataaaaaagggtgaataaggaaccaaactgggcctcacttctcggcccactccctcgttcccttttctcgccagcccaccacgtcctgcctctagctgcgggacccacatggcggtggtccaactggagaagcgcacgtgcagtat

SEQ ID NO: 37586 - DNA, 477 bp, Zea mays
  unsure (1)..(477): unsure at all n locations
agctntctttgtccagaacaccctatataaaattacatcaaattagtatgttgttactgcatttgcaaataaaaatacagttttgatgccttatctacctccactagatggtgttgcagccttatgatggaatgaatntgcttctggaatgcacaatacttcatgtgcaacaggccccccaaaaatagcaactcctgcaacacatcataagtttattttttaagtaagacgaagcaatccacaagttcatatgtatatgactttgatgaaagtgaaccaatggatttcaaataacaagcatttaagctcaacatgacctgatttatccaaaacaataagaatttgcgaacatataagacatgtaggcatctgccaacaaaattctaacaaagagttaacatattacttgcatgtgagttgaacgtattatttgcatgtgttntattcttccncgcanataaacttcttttcatgtac

SEQ ID NO: 37587 - DNA, 402 bp, Zea mays
  unsure (1)..(402): unsure at all n locations
tcggactcctncctgaaatctcgctggggangggtctgatggctcccttctggctgctggcctcgtgaatatgcaagttgtaatggtggcggaggtggaggctgtggccaaaatgcctgtggctagctagccgaagcaacagaagctgcaggatggttacccacatactctggtatgtagggtgagtgatacgaagcagtgtgcatgacctgcttcggctggttctgctgagctgcggcttctgctatttccttttgtttctgaatggtgacatggcacatccttgtagtatggcccttatcctcaccacagaataagcaataaatttttctaggctgatccccaaacctttctcccaagcccctggcgcctctgcctcttggagctggcggccggaaagag

SEQ ID NO: 37588 - DNA, 374 bp, Zea mays
  unsure (1)..(374): unsure at all n locations
agcttctaaagggagaacacattntatgactaacaaatgttcattntgagaaagacagggtttgtagcgcatgccaagcaggaaagcaagttggagcccatcatccacacaagaacatcatgacgaccgacaggccactagagctcctacacatggacctattcggcccgattgcttacataagcatcggcgggagtaagtactgtctagttattgtggatgattattctcgcttcacttgggtattctttttacaggaaaaatctcaaacccaagagaccttaaagggattcttgagacgggctcaaaatgagttcggcttaaggatcaagaagattagaagcgacaacgggacggagttcaagaattctcaa

SEQ ID NO: 37589 - DNA, 431 bp, Zea mays
  unsure (1)..(431): unsure at all n locations
tctccgccgacgagaccgtcagcgccacccgctgtaccgacctccggctctttggctntaatatctggttctcgtcccttgagtggggacgcgaacgagagccttccggcggcagcgtccgtcttgggaccatcgctgctgctgcagaggtcgctggcgagtcgcccggagtttgttgtcccgcaggctctccgatgtggaggttgttcatacccgcgggagtggaaccagagttccgtttgtaatggcaccttgagtgccggtgtctgttcattgtggctgtcggggcctgaacatgtgtgtatttgggcgtaaagtcgtgtttcttcctcctttcgagcaccagacttgcctgtcggctagctggaccgcttaaccaagtgtgagttgtctcgtgcagaaggtgacgagtgaggtatccgtatcccgga

SEQ ID NO: 37590 - DNA, 389 bp, Zea mays
  unsure (1)..(389): unsure at all n locations
agcttgaggctgtgtatagattaccgccctcttaatgcagtaactatcaagaacaagtatcctctgcctcgtattgatgttctctctgaccagttggtcggtgccaatgtattttccaagatagaccttcgctctggctaccatcagatcaagatacgagcaagtgatattccgaagacggcattctcaaccagatatgggctatatgaattcttggtgatgtcattcgggctgacaaatgcaccagcatanttcatgtatctgatgaattctgttttcttgccggaatcggataagttcatggtggttttcatcgatgacattttggtgtactcaaagaacgaagaagaacatgccgggcatttgcatgtagtgcttcaacgtctgcg

SEQ ID NO: 37591 - DNA, 369 bp, Zea mays
  unsure (1)..(369): unsure at all n locations
ctataggggatagcttccgcgctgattctgatatgatctgcttaatgtgctctctttctttaggatcttcggctacgaagcataccctcaacagataagttggtaaattatgtttttccatgaatgactttgttatgaagaaatgagatgctctagaatcaaataaaactgatgcaggtatggagttaataagaaacataccatacaccatgttggcatccttaggaactgattccgctgtcacatgattgactcttcctctactttggttctgtggagtattgttctgtgcggatccacgagcaggtgtgttctggtcagtcctctggttgctgctcttctggngtgtctgttgattacgccttgggt

SEQ ID NO: 37592 - DNA, 390 bp, Zea mays
  unsure (1)..(390): unsure at all n locations
agctnggatgctcattattactngtaccaaatatttcagntntggggaactttgatgctttggcatgcaggttggggccatcacctggtcatggacattcctctgagatttatggccctggagatggagtaggtggatgccatctatcttgctgttcttatggtggacaccgcggtaaatatcatgcttgccacaaccattcatcggaatgggccaggcacaacatttcacctgaacctggtcctatcagatcttactggtgatctctcgttctgacagtaaatgtttggccgtatggcattttcaacaacttttcatactatttagccctggccatttaaatagtttgctccttaatctaggataacgacaaggactttcttcgatcat

SEQ ID NO: 37593 - DNA, 433 bp, Zea mays
  unsure (1)..(433): unsure at all n locations
tctaaatatttctttaagttcccataaaaagtttgggcatttttggacttacccattattttctaagaatccataactaatatttttaactactttaaatgccctaaaatttcttatttccactaaaaatcacaaaactatttttattaaattctagggaaaataacaagcctaggaaatttggtttcacaattttaggatttttctgtaattttctacaattgttttggctctggagtaaaaagaaaaagaaaaacttatgaatagtactgggctgatttcagcccagtggcccagctcatagggagaaaggcgcccgcgctggcgatgttgcggaaaggtccctgnggttctgggtaactggataagttcttgtactattcctgtgtgccgctgacagaatacagaaagacccttcctcttctatttcttt

SEQ ID NO: 37594 - DNA, 466 bp, Zea mays
  unsure (1)..(466): unsure at all n locations
agctntatcanatggacatgataagtgtctttctcaatggaccaatcaaggaagaggtctatgttgagtaacctcccggctntgaagatagtgagtaccctaaccatgtctataaactctctaaggcgctttatgggctcaagcaagccccaagagcatggtatgaatgccttanagatttccttatcactaatgaattcaaagtcggaaaggccgatcctactctattcactaaaactcttgataatgacttgtttgtatgccaaatttatgttgatgatattatatttgggtctactaacgagtctacatgtgaagaatttagtaggatcatgacacaaaaggtcgagatgtctatgatgggggagttgaagtacttcttgggatttcaagtgaagcaactccaagagggcaccttcattagccaaacgaagtatactcaagacattctatacaagtttgggat

SEQ ID NO: 37595 - DNA, 330 bp, Zea mays
  unsure (1)..(330): unsure at all n locations
agcttatgaagattcttcatcccaacatgggctattcggcgatgccagagccaacccatgttagtcttagcaattaagcaagtgtcgagttcagctctatcaaaatctaccaagtatagctgaccctctaacactcccttaaatgctattgaatcatcacttcttctaaagacagtgacacctacatcagtgaatagacagttgtagcccatttgacataattgggaaacagaaagcaagttgtaatctaaggaatcaacaagaaaaacattggaaatagaatggtcaggagatatagcaattntaccaagtcctttgaccaaaccttga

SEQ ID NO: 37596 - DNA, 459 bp, Zea mays
  unsure (1)..(459): unsure at all n locations
tacttagactgggagatgactgtagaacacaaattaatttttatcttgntcctgagcagcatagggttagacaagccactagtgaatttagagatcttgctatcatttggtaaaatgaacgtgttaacacacgtgctgcaccacaaacatggaatgcgttaaaagaggagatgagagctcgctttgttcccccttcttaacatgatcttcgaaaaaaatgcaacgcttatatcagggagacatgtcggtacaggaatactaccaagagcttcagaaaggtatgctacgatgtgggtagttgaggatccggaggatcaaatggttaggttttatggcggattgaggcaggagatttatgatattgntgattataaagaatatcattctatacaacgcttgttccatctttctatgttggcagaacaagaaatgagggtcgtcaacaacggaggagcaaca

SEQ ID NO: 37597 - DNA, 338 bp, Zea mays
caaaaacacgacgaccaaacgcgtcgacagtgattttctgatctcaatactaataaaaagaaacctgcaatcctattcaagagacacaaaccttatacaggcgcattatattgtgttccgatcgctcattctctggaggataaacatctaccagagttcccctcgatgcctccaatacttctactgccttggaagaactgcgagtgacaatcagtctcagttacaagctaaacaaccaccttaagtgattaatctctttatgcagggaatgctctatcttaatcataaccttagcacactgacaccaaatattaacacggctcacatctgacataaaa

SEQ ID NO: 37598 - DNA, 357 bp, Zea mays
ataagaatctcccaatgcactcatgcatcatgatatatattatggtatacctgtggtctaccctttcatgaacaggcatagtataactcaacgctcgaacccatgttatgccaaattgtacagattgccgaaccattgtcgtacttctcatctcatctctgctaccaggtgactggtatccaaatatcggacagcccaagcatttgcaccatgcgtgtgaaatctgtgcgtcatctgattgagagtgaaattgctctctttaaattaacttcatgttttgacaaaacctattcaacagactataccacatgtgcctttctgtagcctcattctttctataacctaactgttgttatg

SEQ ID NO: 37599 - DNA, 236 bp, Zea mays
tgagtaagtctcacggcctcaccacgaagctatctgagggctttgatctaaccgaggaggacgggagaggggctggccaccgtggttgctcatgggcggcactggcgggtcgcggagaggtcgccggagctaatggctggctccggtaagtcacgcgaagtaccgaggaagcaaccgggaaggcagccaagcactggggcatgctttataacccgggcgccggcgttgtcaccggt

SEQ ID NO: 37600 - DNA, 305 bp, Zea mays
  unsure (1)..(305): unsure at all n locations
gagcacatnttgggacttaccaatgtgtcatttgtgaaagacagggattgtggcgcatgccaagcaaggaaacaagttggtgttcatcatccacacaagaacatcatgacgactgacaggccactggagctacctcacatggatttattcagcgcgatagcttacataagcatcggcgggagtaagtactgtctagttattgtggatgattattctcgcttcacttgagtattctttttgcaggaaatatctcaaacccaagagactttgaaggattcttgagacgggctcacaatgagtttggc

SEQ ID NO: 37601 - DNA, 366 bp, Zea mays
  unsure (1)..(366): unsure at all n locations
ttcttgtgaatgctcttcatccncacatgtgctatacggcgatgtctcagtaagtctatgctagtcttagcaattaagcatgcatctagaccggcctcctcttntgcaaaatcaactaaataaagtttgtcgtctagtgcacccttaacagctaatgaaccatcacttcttctaaagacagacacatctacatttgtgaataaacagttatatcccatattacaaagctgactcacagacaacaagttatatccaagcgactcaactaagaacacattagaaatagagtgctcggatgaaatagcattgttttctaaccctttcaccttgccttggtttcatcaccgaatatattgaatctgggga

SEQ ID NO: 37602 - DNA, 393 bp, Zea mays
acctgagcttagaaagtatatttctatttgcctcttataccgaagctagggtggatcggattctatattattatgttaacatattctcttctcaatcattcttcatgtaaaaccattctcttgcccacacattctgccactttgcttgatacgccaaggccacaaaacatcatccctcttctccgataaagtgaagatattgcaccccgtagttgctggaaggtcttcagttgccttcgtctgataatgcaactcatgaatatggcaaaatgcctccgcatcgggttcaacaccttatctctttacaaccgacaaaaatctctaacctcactaatggcatctggggtaagctcatgaaagtatatctttaatctttctgaacattcactatca

SEQ ID NO: 37603 - DNA, 376 bp, Zea mays
tatgaagattcttcattccaacatgggctagtcggcggtgtcagagccaacccaagttagtcttagcaattaagcatgtgtcgagttcagctctatcaaaatctaccaagtatagctgaccctctaacacacccttaaatgctattgaatcatcacttcttctaaagacagtgacacctacatcagtaaaaagacagctgtagcccatttgacataattgagaaacagaaagcaagttggaatctagtgaatcaacaagaaaaacattggaaatagtatggtcaggtgatatagcaattttacccaatcctttgaccaaaccttgatttccatccccgaatgtgatagctcgttggggatcttgggttttctcata

SEQ ID NO: 37604 - DNA, 356 bp, Zea mays
tcattatactgatgtgtgcggaccaaagaatacgaccagctagggaagataccaatacttcataaccctcactgatgaatgtagtggatatgggtatgtctacttaatgaaacacaaggctgaatccttagaaaaagtgaaagagattcagaatgaattaaaaaatcatcgtggctaaaaattaaacactgcgacagatcgggtggtgatatctgagctgattgacactcatcaaagagatgggatagttccagctacccactgaaccctaaagaatgggggtgacgacgaacgactattggaaggtcgacatgtgacacacgactaccttgcgttgggaaccttaaacaagtttc

SEQ ID NO: 37605 - DNA, 346 bp, Zea mays
  unsure (1)..(346): unsure at all n locations
ctaagctntctcgactgagtcggtgacagagcctcatggacgggtaattgtgcgcataagcggcaaggccgaccgagccgagggactcctacgcctccgggatatggatacctcactcatcaccttccgcgagaagcaactctcgctcgcacaaacatcccagttaccgacaaaaaagtccagatactcgaaacaagaggaaaagagacgcaactttacaacacagcgagggtgtgttctggcctcggcgggcgcaggagacacacgctacaagacaatccgatcctgcaggctcgggtcttgacgctggaagggggcagcagcaccctcggcatcgacgacacct

SEQ ID NO: 37606 - DNA, 298 bp, Zea mays
accaacaccttccatttctctaatttgggctaacttgaaattgctaacttgagttgctaactcaataagatcacccaaaagatgttgattaccttaataagcccatagagaactatatgcctatgcaaatcatatttggaagtggggttgtgaaagtcgcctataaggaagggtgaataagcggaatctgaaaattataaacttaagcacacactacaagccggggtttgcgttataaataaaaccaagtccgaaagagagggcgaaaacaaatcacacgcgaattgcgagagtgaca

SEQ ID NO: 37607 - DNA, 192 bp, Zea mays
gagcgtgcatgctaagactaatgactgcccagtcctttattcacaaagatgcgcagactgatctgacctatgttagcgagattgtagtgcaccatccacaccataatatattcattgctgacttgccagatacatctgcccacttaggcatactcggccggatttctaaccttaacatcgggtgtatggggt

SEQ ID NO: 37608 - DNA, 275 bp, Zea mays
ctccagcgatatagcagggggcttgtattttccggtagcatcagaaacgtcctcgagcggcggcgttgttggtggcactggaaacggtgagcaaaattgagtaaactgcgccctgtataaagcacgtttggatcttatggacctacgtatattcttgcttacaaaccgccaccgctgtatgttcaattaaggcaatacacacttgatagctgtgaccttactgcccctcgattatactgtcactaaccgctagtaatgtggactaaggatgaaaa

SEQ ID NO: 37609 - DNA, 321 bp, Zea mays
  unsure (1)..(321): unsure at all n locations
agctngcaaagttgctgaagatcaacggttattgaggtggaaggattgcagaaagtataataatcccaaaactgttctgtcttcacatataattataagaaagtacctaatcttccttatntaccatgcagtccaacagggttatttataaacaaagaatttggacacaggaaggaagataagtcatttttatctttttctctatgtcatcagccaagctgttaattgcaatgaataatatatgttgcaaaacactttacaagttaaatttcttctcttaaaaccaattgagataagagtagtatcttaaacttcatagaa

SEQ ID NO: 37610 - DNA, 336 bp, Zea mays
  unsure (1)..(336): unsure at all n locations
gacacataaaactcagctcggcacctgcatttcacatcgcacaagcccaatctatcaataccacaacaaanaccgatccaattgtaggaaaatgattctgaatttcctagtgcacaggcaatattgcgctccctccctcctacctcccttgccaaaccacatttgccttttcccctctacggagacattggcaccaaactcgattatttcaagaatcattatcgccaggatggcgaccagcggaggaaggtgctgcgatcgtttacctcaaggccctgcctgtcgagcttcaccctgagcatttcgtccccttccatttacngattcgcggacgga

SEQ ID NO: 37611 - DNA, 216 bp, Zea mays
  unsure (1)..(216): unsure at all n locations
ctagcctctaactgcgagagcgcatgctaagactaacgtctgttcagtcctttaacacaggatgcgngactcttctgacctatgtaaacgatatcgtagtgcaccacacgcaccagaatattctgattgccgatatggccgatacatctacctctcttgggcttactgggctcgaatatcttaccatgaacatcgtgtgggatgtaggtattgaac

SEQ ID NO: 37612 - DNA, 373 bp, Zea mays
  unsure (1)..(373): unsure at all n locations
tnncccagcgcttacaggctcacaacgccaaatggcgaggacctatagcactcctggaacatcgacaaccttcgcaaattttttgtttgacccattcagacctgatttcgcccttgtaattcgccgcaaacaatcttgtaccggcccgcactcttttcctcccggggggtgaggtttttaacgaggcggagccatgtaatatatgtgacaaaaatcccccgcaaaaacatgtgtcgaaaaaagaccacgacgacggtcttcggcattcgaccaattcgaagtcaccgcgaggctaagcgctagccaccctcgcgtgcgacaaatacgcgcagaagtcgcctaagggtgcagccggactaagcacaacaagtgc

SEQ ID NO: 37613 - DNA, 432 bp, Zea mays
agcttctctagctgaccctgatctattattattgcttcagtgctgaatgtcgttttatgtttgtaggaggagaaacgagcacttgttgcctctcgcgacaatcttgacaggctgtaccgtgatgccaataactccttgactatcttggagaggagccaccgcttcaccatgtctgacctagatcatcaccgccatgagctgtaggcatctcaagacgaagatctgcgacttggacgattgttgtcgaccaaggattccaccatcaaggatctgcgcgcttccaagaagctcgtcgcgcaggagctagagtctgcccaactcaccgttaaaactctagaggacaactgcactgtcctgaaagcccagcgcgatagggctatggataaagtcattcgcgctggacggatcctgatgaggagacctagcgtcacg

SEQ ID NO: 37614 - DNA, 344 bp, Zea mays
ggtggcgccctcgggcgtcttgtcagagccgaagtaccaagtctctcacctggaagcctcggagccgaacccttcgggcgtggtagcgtcgcagagactgctgataccgtgccgagtgtagtaaggccacgtcccaagcctcttccagctggtccaatgagtcttctcggctggtctagttgcttcggtcttcgtacgcctttgtcctcggggaaccgtattctatgcccgtgggtaggacggccttggccccatagactataaagaacagcgagaaacccgtggaccggctcggcgtcgtcctcagactccagaccaccgagggtagctctttcatccaccgc

SEQ ID NO: 37615 - DNA, 424 bp, Zea mays
tagcttccttctaatgagtttctgtcaaatatatttctcgaggagaaaatgaacatgctgatttgctagccatgtcaacagcacaggggctgcccttaccttcggaagtatttttcgaaacaataaaagcacctttggttgaacttcttgaaagagcaatcctcaatatatctcatgtttatagtgaagactagagaactgagatcatctctttccttcagggtaactttctgtcagatgacgaagcttataacaagagaatagaggcaagagctcgaccatatgttataatagaaggggagctgcactagcatggggtccgttctccactactcatatgtttatccagagccgaaggtattgaattgatgaaagaaatacacgcacgtctgtgtggatctcacattgtatctaagcctttgct

SEQ ID NO: 37616 - DNA, 471 bp, Zea mays
  unsure (1)..(471): unsure at all n locations
gcttcacatgtctcgtatgattcanaatcaaacgaagttaaaagcccatcttaatgaagcttcttcatgcgaatctcacttatatgacccaaacgacagtgccacatgtatgtaggacttaaatcattaagccgagggcttttagcactaatattacagataggtgcctcatcaagaattaaaatgaataacccattcataatggatgcaaaagccacaaacatgccattcttagagatcatacaaccattgttttcactcgcaaatgaataaccatccttcatcaaacatgaaggagacataatgtttcgactcatactangaactagataacaattatttaactccaaaatatatcctgatgggaggtggagttgcatcgtctcgacagtcaacgcagcaactcttgcattattgcctacccggaaatcaacttcttctcttttcacgcttctacttcttaatattccc

SEQ ID NO: 37617 - DNA, 328 bp, Zea mays
ttatttggtcctgtcattggtagcacaaaacaaagattaaaaggcaacaaacaatgtgaaccctacaactatctctcagggtggtggtggaatacaaattatgaagcgtcttaccccgctcttacaacgttcttaccagcactgcaggtggcaaatggtgaccggtgtgactgtccaacgagcgtgggtgtgattgtaaaagagtacctgttctgctcgagagaaaattggagctatgggaaggctgactaaatatatatatgtggcacacaagtcaataacagatatcaatgctgaataaagtgtccaagtactcgtcctaattgct

SEQ ID NO: 37618 - DNA, 289 bp, Zea mays
  unsure (1)..(289): unsure at all n locations
ctaagcttgctcggcggngacttggtcggtcgctccacctacttcgggtaccctgtccccgagtacctgacagcgcccacggtagggtgatggtgtgcaagaagaacatcctcaaggaagctgtggatcggggatggggagtgtgggaaagcaatctggtggatgggtaccaacatggttgacgcaggtggcaccaaaacggagatcggcgatggaaggggtgtcgtggcaaatgggaagggaacaatggtggtggtaatggatggccttgcggtggtgggaaaggggt

SEQ ID NO: 37619 - DNA, 269 bp, Zea mays
ctagctgcagtgcaaatcttctacatttattctgttcgctagctcgtccttctattgggtaagaaatgcaatcgtctctcgatttgtgtctatctcaccacacttaatgacaattacccgtgttctgcactatttggttacacactacaccgtgtattatacctcccatgtagcctttaatgcgtaaccttgtgactgctattgtgctccctgtgcataaaggaaatctgtcatctccaaacaggtgctgcttctctgatcctcccatg

SEQ ID NO: 37620 - DNA, 161 bp, Zea mays
tctacaggcagacactgttctgctactgaccgacgttcagtttcttatatacaagatttgaagcgcatgtcaggcctggaatcctgaaggagtttatcattcacactcgaacattattactactgacgtgccactcgatcttctatcatggacctactaag

SEQ ID NO: 37621 - DNA, 318 bp, Zea mays
  unsure (1)..(318): unsure at all n locations
ntgtatcgttcatcgngcaacgaccaagacttttgatcttcttctctccgtgtacggcgctgaattcatggacgagacaagttctagttaactgacatatgttacgttgttttccggtttccgacgacagtggttagcataaaaggtagaagcccccgtatggttcagcttgccccccgttgaatgcgtgttagccagctatattcaaacacgtatacagaagcagagcccttcattggtgactgaagacacaggtttcctcctcaaatcaacattcatatttttctaaggttccatttgtttacttttattttaata

SEQ ID NO: 37622 - DNA, 298 bp, Zea mays
atgctagagccaacccatctcagtcttagcaattatgcaagtctcgagtctaactatgttaaaatgaactaacgatatgtgaccctctcatacttcctcatatgctagtgaatcatcacttcttctaatgacagtaacacctacatccgtaaacagacagctgtatcccactttgcataattgagaaactgaaagtgagttgtcatctatagaatctaccagaaaaacatcggaaataaaatggtcaggtgatataacaattataccaaagccccttgcccacaccttgatttccatc

SEQ ID NO: 37623 - DNA, 284 bp, Zea mays
caatgcagagctgcggatgagttctttctatctgtgcaatcacacccatgagatggatccagatacgctccctgtaattattgtcaaatccttttctgttccactttttgaatacataaaaaatgaacttattggatttataatacgatttttgtcttatatgatgcagccacacggctttagatgcaccgccactatatcacgactcatacaagatagcaaatggtggctttcagcttgcaccaaatgccaaaagactctaccttaaacctccactggatacc

SEQ ID NO: 37624 - DNA, 297 bp, Zea mays
gagcatcatctgccaagtttgaaaaattttctcctgcctggacagaagcatgcctagaagttctgcgttatcgactaatgccaattttcaactcctatgtggatgggatatgtaagatagctattattatcacccggctccactttgtaccttctcctgtggtactttgtcaattataaaacattgcttgatgaagtgctgtaaagtgaaagaaaacttaactctttcactacagatgtattgagataccacagtgatcaatatgtgtttatgggtcacacctaccccacaatatga

SEQ ID NO: 37625 - DNA, 367 bp, Zea mays
cagcatatgccaataatatactatttttctcaagcctatctacgggagcataagtgtcaccgaaatccaaaccttcgacttgcgaatatcccttggccacaagtcgagctttgttccttgtcaccacaccatgctcattttgcttgttgcggaagacccacttggttcctacaacattttgattaggacgtggaactaaatgccatacctcgttcctcgtgaagttgttgagctcctcttgcatcgccaccacccaatccgaatcttgaagtgcttccttcaccctgtgtggctcaatagaggaaacataagagtaatgctcacaaaaatgtgcaacacgagatctagtagttacccccttatgtat

SEQ ID NO: 37626 - DNA, 264 bp, Zea mays
  unsure (1)..(264): unsure at all n locations
gaagacttgttccgtccacggagtcgctttatccgagcgcaagttacttatcgcagaatgtgatgagtgaggtatccgtatcccggaggcgtatgagtccctcggctcggtcaaccttggctgcttacgtgtactccgtcgattccaagatccgctttccgaagtagtcaagaagcacgaaagaaatcctgctaaaaaagagatcctttttcgaggaaaaattcgacgcaaagggnggttccccccttttagcccccgagggag

SEQ ID NO: 37627 - DNA, 341 bp, Zea mays
gctcgtaacacgatctccactagccgaatttggatcataaactcaacaatctccaccttaaaataaatttcatcttgtacccaataacttggaatcaattttctgaataataaaaggaataaactgatggtgccaacaaagccactaggcttaaacaattataccaactaagttctagccaaactcaaacgtagctctaggaatatgtttaatcatcatgtcagctggattgaaatgagtactgatctttcattgtctcaatttaccttctccaactatttctcagatataatgatacttaatatccatgtgcctttgtcctttacgaagcatatgatcct

SEQ ID NO: 37628 - DNA, 330 bp, Zea mays
agcttatgaagattcttcatcccatcatgggctatacggcggtgccagagccaacccatgttagtcttaacaattaagcaagtgtcgagttcagctctatcaaaatctactaagtatagctgaccctctaacactcccttaaatgctactgaatcatcacttcttctaaagacagtaacacctatatccgtaaaaagacagttgtagcccattttacataattgagaaatggaaagcaaattgtaatctaaagaatctacaagaaaaacattggaaatagagtggtcaggagatatagcaattttacccaatcctttgaccaaaccttga

SEQ ID NO: 37629 - DNA, 352 bp, Zea mays
ctataaaactcagcttgtgccacctccgtgaggctcctcgagcgaggaatctgattttacttcgccggagagggcagtccacgctcgccggagctctcaaccccgccggagtacgtggaccgggtaaaccactccaccattcttcgattccttgtgcacatagtcgctgcgtgaccccgtgatgctcaccgtgccctcggattgaaccaattctgccgtgggttggccggtatactcgccggcgacgaggacacacgcctgcccgcgtggaccgggcgattccggccatcttcgacgccgagccgtacctctacgtgaccgccagagtattcccgagccgacccaccctttg

SEQ ID NO: 37630 - DNA, 437 bp, Zea mays
  unsure (1)..(437): unsure at all n locations
agcttgtcgataggatccgttgtgatgtactatgatttaatactacaaataagtaggagtttgaatatttntgtcgaataaaagttgctttcttgaaacaaagattcataagacttgtatgaagatagcattcatacatcgatgtgttatgcatgtataatcataaacaaacaccaggcacaatacaaaacatacggtcattttgtgcacaacgagatatttctgcttatcatgccacgaactccacctgacttggctgcactgctcttttttttatcatagttccgtgtagctctactaacggacaagtaattggggcacacgcacaagtttcacggcctaacaaataatcattaatgtgtgaacagaaactaaatgccatacaaatcactgaaacagttttgatagtatatcttttttcacaggatattacttac

SEQ ID NO: 37631 - DNA, 259 bp, Zea mays
  unsure (1)..(259): unsure at all n locations
tgatacttagaagccttgggtaagtttggtatgatttggagaatgtttggnacttaaaccccanaaccctaatcttctagtgatgcgtgccctatgaactacactactgacttcaaaaaccctagtttcctggagtcccgtgaaggaaaattgtattcaagacctaagataatgtaatttcattttctgtgcattttcataagcattacatgagcattcatggctggatatgtgatatatatagaaaacaaacaagaag

SEQ ID NO: 37632 - DNA, 221 bp, Zea mays
  unsure (1)..(221): unsure at all n locations
tgctagcttgcgctgttacctgctgatggncgctatctgctgtgtacgcttcttgctccgcgcacacatgcatggattaaacagaaacaaaaacgttagttttctttctacatgcatggcgccattattatggcaactgagttatgtaacctatctaatgacgacggaaccatcagaccatgcatcttgtatgttattaagttcctagaaagaaacaaaca

SEQ ID NO: 37633 - DNA, 372 bp, Zea mays
gctccttacagttgtgtcaagattccagccacaagctgctgcagctacctccatgccaatatagcccccaccaataaccaccaccttctttgcacttccctacaaaagataagccaagaaaaaatcattccttgcacatatcaaagaggtgatgttgtcaaatgagatggcattaactctggtggatgagaaatgatgacaattactacattaatctaccgaacataccaatgaggatactatagcatcagcatcagcaacatcccgtatgtagtgaactccaggtaatttccctccaattttctcatgtaatcttgaaaaaatggacgtttggtattagaagagcataatgtttatgttcattgtaaccat

SEQ ID NO: 37634 - DNA, 330 bp, Zea mays
  unsure (1)..(330): unsure at all n locations
tcttaccattctataagacagtagtgtagacgtccacatctgccatggtgcacggntctgccaccgtatccacacgcacaccgatcatattttctgtgacgaacaccgacctctccttcgacccaccctgcttgcacacgccatcggcgccgcaatcatcggatccgccccagccgcgccccattccatcctaccatgcccctgctcgcgtatgcctcatcatccccacccaccgccgaaccgcgtgctcctctctagctacgccgcgtcatcccctcatttaccccagaaacccgtcgattcgcatgcgaggaagaggactacagcccc

SEQ ID NO: 37635 - DNA, 153 bp, Zea mays
cttaacgctttttgcaaaaatagaaactgcgcaaacacccttaagaggacatatttttaaaagaacattcttgcaaaacgattccatgctatgctacaaacaaattcaagattctaaccaaaaaaggtataaatgattactaccttactgctg

SEQ ID NO: 37636 - DNA, 479 bp, Zea mays
  unsure (1)..(479): unsure at all n locations
agctcgagagagagccagaaatataaagcgcattataagataaactagcccaagccacaggcagaactgggtgaagacatatccccctcaatcaagcatagcagaaaagaagtcctcagctgctgaaaaacataaataaatctgggtgaatacactaggtattccgcaagcccacccggctcccgtaaagagaaagagacctatatcatacatgcttcatatggtggagttgaagtcactcttcttttcttagagaaaggcagtactattttagggttttcccggagaaatagaaataacacgttgcttaaccaccactgagcttcccgctcccgtggcaccaatttcttttccagaggcacactcacacacacatatttccctggtcactgatgttgtagaaacactatatgtcataccacaccagactcgtccattccagtggacacggactattcgaatanggttgaactctacgt

SEQ ID NO: 37637 - DNA, 350 bp, Zea mays
  unsure (1)..(350): unsure at all n locations
cttaccgcattgaagcatgatcgctntcccttggtcttagtcttgctcggctgtccattgcgactctttagcaccgtcttgaatcgtttgatgatgagggccatctcttcatcattaagaccggccgcctcaatttgcgccaccttgctgggtagcgtttccttgcttcttgttgccttgagagcaatgggttgaggctcatggattggaccattcaacgcgtcgtccacgtaccttgcctccttgatcatcattcgcccactcacaaattttccaagaatttcttcgggcgacatcttgatgtacctaggattntcacgaatattgttcactaagtgaggatcaagaac

SEQ ID NO: 37638 - DNA, 399 bp, Zea mays
tattatgagaaaccgagaagctactggaaggattggataatgggctgcagagctcaatgaattttgtattgattatgtccatagatcttcgattcagccccaaacattggcagacttcattgctgactaaacgccatgggctcaagaagaagaaacgagtaaagatgccgaagcatggacattgttctgtgatgggtcttggggaaccttcagagcacgagcaactgctgtgttggtttcaccttccacagataaaacttgatatgcggcaagacttgatttcagttgacaaacaatatttgctgatacgaagctctgctcctggtcttcgaatttatggccatggcatcatagggccattctaaaactgactccaagttattttgtcatgtcgataaa

SEQ ID NO: 37639 - DNA, 403 bp, Zea mays
cttcatccccacatgtgctaatcggcggtgccacagccagcccatgctagtcttatctattaagcatgcatctagaccggcctcctcttttgcaaaatcaactaaataaagtttgccgtctaatacacccttaaaagctagtgaaccatcacttcttctaaagacagacacatctacatttgtaaatagacagttataccccatgttgcataattgactaacagatagcaaaatatatcccaaggactcaactaaaaacacattggaaattgagtgctcatttgagattgcaattttacctaatccttttaccttgccttgattcccatcaccgaatataattgaatcttgggaatccctattcttgacgtaggaggtgaacattttcttcttccccgcatat

SEQ ID NO: 37640 - DNA, 52 bp, Zea mays
ctttggaccaacggaataacctcccatgtcaaggccaaaatgcccatttttc

SEQ ID NO: 37641 - DNA, 425 bp, Zea mays
  unsure (1)..(425): unsure at all n locations
tcacctgcggcatgcaagcttcagcagaatgacagcaaaagttctctattctcagataggcaggtatgtactaacttatgttgatgatatcattgtaaagagcacaaagcaggataaccacattgctgatttacaagagacctttgctaattttagacaagctggtctaaagctgaatccagaaaaatgtgtcttcggagtaaagaaggggaaatttcttggttgcttattttcaacaaagggaattgaggccaacccaagtaaaatcgaagctatactttgaatggagccaccaagtacaaaaaagggggctcacagattgacaggaaggctggcatctctcaatagatntatatccagatctgcagaaagaaacttaccattcttcgaagtactgaagtcagccgaagtatttcaatggggac

SEQ ID NO: 37642 - DNA, 303 bp, Zea mays
ttctttccatgttgcgctcgaacattccaatccgaggccgcatctgaccgtggtgaccgtcacaagttggtgttcttctgcagtccgaatccaccatgttcaaatccttttccctttcggtcttctccctgattcctaagcaaaacaagagtgcacgggtctccatggtctaaatatgatggacatgaactcaagagtgtaatcaccttatgtgtgagttgacgagcacgagacgcgagtaatgggaccagaaatatggacttgtattggtatatatgcatcagtagtgtggatgtcttcatc

SEQ ID NO: 37643 - DNA, 388 bp, Zea mays
  unsure (1)..(388): unsure at all n locations
catgcaagcttaaagccatggtaagtagcataggccaataaaatgcgaattgactcaagcctagctacgggtgcataagtttcaccgaaatccaaaccttcgacttgggagtatcccttggccacaagtcgagctttgntccttgtcaccacaccatgctcatcttgcttgttgcggaagacccatttggttcctacaacattntggttaggacgtggaactaaatgccatacctcatttctagtgaagttgttgagctcctcttgcattgccaccacccaatccgaatcttgaagtgcttcctctaccctgtgtggctcaatagaggaaacaaaagagtaatgttcacaataatgagcaacacgagatctagtgtgtacccccttat

SEQ ID NO: 37644 - DNA, 330 bp, Zea mays
  unsure (1)..(330): unsure at all n locations
actaagctttcgaaatattcttcgaagctgtaaaaaagttctgtgctttttctatgaggctacacttcatctcgatttgccttgtgccttagcacgattttctttttcccaaaatatgttctgaaggtcaatattgtatccccttcttgttctagatgcattatgctgtatgatgcttatgttatgcaaaaatgatgtgatgatgntatgttatgcgaaatgatatttgtgccgcacatatatatccctgtaataaagcacacacactttttatatcagcgctgacttttcgctgtaagcctcccttaagagcttcttcgccttttactt

SEQ ID NO: 37645 - DNA, 275 bp, Zea mays
tcaacatatagacacaacatatcagactcatccccaccgtaccgatagtatacacacgtgtcagattaattacaacacaaccacctgctgaagaatattatcaaacttttcatgccattgcttaagtgcctgttttatgccatacaatgactttatcaacctgcacaccttgttctcttgaccatgcgaataaacccttctggctgatccatatatatctcctcatacaactcttcatatatgaaagctgtcttaacatccatcttgatgaatga

SEQ ID NO: 37646 - DNA, 405 bp, Zea mays
cttccggcagctgcccgacttgcgtgaataacgatgggcccttggtaccaagaatcttcatgctaagataagctctgtgaagaattgctatcacggcactgagagtgccactaacatatattgcatagtgagggtataccatgtcatctatgataagcacaacttgaccactgcttgtgtggtggataaacgccagggtcactggcatagtgatactgccgagagctcaatctgccttcctcagaagacacagatgggatgtgcgccatcatgcactctatattcgagctattgcatccgtctgatagctttatctgatatgagctcgagtgtgctgtctctatcaacccgagcattatggaccatgtatcctcttgtcgcacaacagataaccatactatcgtt

SEQ ID NO: 37647 - DNA, 408 bp, Zea mays
tgcgaagctctttatacacacatgtgctaagcggcgatgttctcttctgcccatgctagtcttagctattaagcctgcgtctagaccggcctcttcttttgcaaaatcaactaaataaagattggcggctaatacacccttaaaagctagtgaaccatcacttcttctaaagaccgacacctctatttttgtaaatagacacgtatatcccatattgcataattgactaaccgatagcaaattatattcaagagactttatctaaaacacattggagatagagtgcttattacaaaattgcaatttacctaacgcctttagctttgcttgattcccataccggatataatggaaacttgggaatccttactcttgacgtacgatgtgaaccatttactctcccccgtc

SEQ ID NO: 37648 - DNA, 392 bp, Zea mays
  unsure (1)..(392): unsure at all n locations
agcnngactgacgattcctcgaatctcttattatggagcacaggctattcgcgacgcgaagcgaatacgaacaggcttgagcaaactaacatttacatatgcataagaacattacaccatacaaagaaatacataatcaaaacatgcaatacgaaatagagagcgttactacagtcacacgaagaaaaagaaatgcgacagtcgaagctaccgtcgagaagttaacgggtttaggctacacaaatattaactaacacatttaattcgacattatcaaatatacattataactgctatggagttttgattcaatctgccacactaacagttgtcaaataaataactaatctaattagcacgagagaatttaagtacgatacaccaaataacac

SEQ ID NO: 37649 - DNA, 270 bp, Zea mays
  unsure (1)..(270): unsure at all n locations
ntccacagaaggcatgagcaaactgacgggaagattatttatgctcctaccatnngctctaacaaggtacctatgtgctccaacacagaaagatcaaacagaagcgacaggagatgccctggatgcaaggagaagggccatgaaattgattcatgcccccacatgaagaatcaagaccctgcgcgactaacaaatatgacccttcaacaagatgaaaaccaatgccaatgcctttgcaagacaaacatcacatttgctacaattgcccgg

SEQ ID NO: 37650 - DNA, 389 bp, Zea mays
  unsure (1)..(389): unsure at all n locations
agcttgttatagaatgtgatggtggcgtatctttgttacaatctcactatgtggaataggtattgagtcgctttggttntagtgactgtgatcctgctccaacaccttatgaccctagcatgctattgagaaagaatcggagaataacaagggatcaattgacatactcccagatcattggctcgctcatgtaccttgtaagtgcaacaagaccggacatctcatatgctatgagtaagctgagtcggtttgtgtcaaaaccaggagatgatcactggcgtgctcttgagagagtagtgcggtatttgaaaggtactatgacatacgatattcattatactggaaacccaaaagtgctggaggctattgtgatgccactggattctgat

SEQ ID NO: 37651 - DNA, 222 bp, Zea mays
tcgaattagagtatgtgatgtaattgtactttgttatgaacattagacaatgaattgaacttactaactctatatggagctggttttactcttttccttctaacaaaagaatttttaacgaggtagttatttggcacttgtttctgattgctatatgatatcaaaaacaaggcaacacaagttagagggttgaaacattctccctttttcatatctcttctt

SEQ ID NO: 37652 - DNA, 389 bp, Zea mays
  unsure (1)..(389): unsure at all n locations
agcttcttcttcattctgatgaanaccaatccctttgatcacttcatcaaaacgaatgttccaactccgagatgcttgcttcaacccataaatggatttctgaagtttgcatatctttccagcattgatcggatcgacaaaaccctcgggctgtatcatatacacgtcctcatctaagtttccattaaagaaagctgttttgacatccatctgccaaatctcataatcgaaatatgcggcaatagctataatgatccgaatagatttaatcatcgctactggcgagaatgtctcgtcatagtcaactccttgaacttgtcgaaaaccctttgcaacaagtcgagccttatagatgtgaacatttccatccatgtctttcttcttcttat

SEQ ID NO: 37653 - DNA, 335 bp, Zea mays
  unsure (1)..(335): unsure at all n locations
tcataaagaagaaccttcggccatctcacacaatctactttattcaaaagccgcttctttctagaagaccttcggcgccgaagcatagaccccacactaagaggagcatttcattcaggggtagttttgttaagttaaaggaaaagcatttgaaacagggggagaaaatatcaaatcttaaaaatgcttctcaatcatattcacatacctttgattgtttgcaaaaagactttgaaaagattttccaaaagaaattgcaaaaacaaaacaagtggtgcaagcgtggtccanaatgttaaataaaagaaagcaaccatgcatatctattagaagta

SEQ ID NO: 37654 - DNA, 370 bp, Zea mays
cataggaaccactgaaatccataccttctactagtgaatatcctcggacacaagtcgggctatgttccttgtcaccacaccatgctcatcatgcttattgcggaagacccacttggttcttacaacattctggttaggacgtggaacaagatgccatatctcattcctcgtgaaggtgttgaattcctcttgcattgccaacacccaattcaaatcccttaatcgtcttccaccttgcatgactcaatagaagacacaaacgagtaatgttcacacgaatgagccacacgagatcgagtggttacccccttatgaatattgccatgatggagttacggagtgatctcttgatcgctcggtgactcttggt

SEQ ID NO: 37655 - DNA, 402 bp, Zea mays
  unsure (1)..(402): unsure at all n locations
tgtgcgtctcacggtgtcggngaccataattaggggtaccctcattatttctaattctcagctggtaacccccatcagcatatagctgtaaaggcctgatgggtgcgattaantcagggatcagtccgtacgagtgactcgatcacgcctcgcccgagcctaacctcctgcaatggcagccgaccccgagggattttcgtctcgtccgacgcccccctttaacggcggacacatcatcggctcgcccgaggccttgccttcgctaagaagcaaccctgactaaatagcctgaccgaccgaccgagtcgcaagagcatttaacgcacaggtgtgctgacacctttattctgacgcgcgcctcctggcaaaccgaaatgaccggcgtcacttcccacttcactg

SEQ ID NO: 37656 - DNA, 417 bp, Zea mays
  unsure (1)..(417): unsure at all n locations
gcttcttctggacaagtgctgcacttaccgctgtgtgcgaagctgccacatataataacaaaggagcccctggtgttggtggagttaatgttgttaaatctatcaaatattgcttcagttcctcgaaagctttttggtggcttggtccccattgaaagacttcggctgatttcagcacttcaaagaattggtaaattctctctgctgatctggatatgaatctattgagagatgccagcctccctgtcagtctttgggcccccttttttgtatttggtggctccattcgaagtatagcttcgatttacttggatagcttcaattcctttgttgaaccagcatccaaaaaattcccttctttactcgaaaccatnttctggatcagcttaaccacttgctaaactgggaatgttctgc

SEQ ID NO: 37657 - DNA, 360 bp, Zea mays
ggaagctggcctttgtgccatgacgaaagctgatctcgcagatagtcttgcatacaacagtctgaaggttcagaaattatgaattttgaaacttatgaactctggaataagtcttttactttgatgttaatccttttattctttcttgtagggcctgatacttagcaacgccctaagagtgcaaaagaatgctgaagacgagagctacactatagctctcaataaccttcgaacagaggttatcaggctgagaaacgaagcctcagaaaaagacaaaattctactttcattggtggataaagtaaaagaagatgaagcaaattttaaggcttaagctgaaattcaaaagaatgagatcga

SEQ ID NO: 37658 - DNA, 410 bp, Zea mays
tggacgtgaaaagtgcctttctctacggaccaattaatgaagaggtctatgtagagcaacctcccggctttgaagacagtgagtatcctaaccatgtctataggctctctaaagcgctttatgggctcaagcaagccccaagagcatggtatgaatgccttatagatttccttatcactaatggattcaaagtcggaaaggccgatcctacactctttaccaaaacacttgaaaatgatttgtttgtatgccaaatttatcgtgatgatattatatttgggtctactaacgaatctacatgtgaagaagttagtaggatcatgacacagaaattcgagatgtctatgatgggggagttgaagtatttcttatgaattcaagtgaagcaacttcaagagggcaccttcatt

SEQ ID NO: 37659 - DNA, 417 bp, Zea mays
  unsure (1)..(417): unsure at all n locations
tncttagtgagttgttcatcataacccatttactacacattgactctttttataaaataaaatgcaacaagatatctgtaagttacacggactttgagcagagaaactataaatgcagggtcaatcgtaacatggcagttggtagaaataaatggctaataaaattgattaatgatatagatatatgagtgtggcagatattcgaaccttgtcgccttcagtattgtgtggcatgtcatagaatcacgtatatgccaatccatacgcattccatttttaccattagtactaacccatgtatttacttcaacagtatcacccctacagcagaatagaggagcgacttagaacgcataacaatagaacccagatgatgagggatcaacattcagttcanagaaggtaaatgttctagta

SEQ ID NO: 37660 - DNA, 410 bp, Zea mays
  unsure (1)..(410): unsure at all n locations
gagtgcattcttatgatttatgaaactccagctatgtttgttntactgtggctgtttctgttatcctgataaaaatgagcgggtctgttcactggtaggtttcatcaagtaaatggccgaattggctctcccagctatggagacttttgtagagggataaaatttcttactttcagcagaatttcatgatttttggttgagtagtttgtgagatatcgaattntgaaagttaactatgctgcttgctaaaacagattcagtcagttatcttgttagatgttttagaacttatagatggcagaatttaattatccatcgaataccgaaagtgtagaatattttgtgtagatactcatggacgtattgttgatatcacactctataatttaaagatacaaattaacaacaca

SEQ ID NO: 37661 - DNA, 443 bp, Zea mays
  unsure (1)..(443): unsure at all n locations
taaaactaagctntatgtgaactggatatgtcctcttctaacataagctgaacattctaacagctacacactgctctctctacatggtataaaagcctagatacaaaatttggctaaaatgataaataatatgaacaaaaattgacaataaaacataaaaccaacctttcttagcaaccttcctccaaaaaatgaagatcaaaacctcgacccttgtattttatataatctggacctccaaaatcgcctccaatggaagttggctacgagctagcttcctgtcgggggtggggggtatntataatacagaattcataggcggcttgcttaagaaaccgttagtgaaaaacatagcactggcgggtgtcttatggaaccgccagtggaaatcttcttttcactagccgcaccttaactcagccgcatgtggagaccgtttcatg

SEQ ID NO: 37662 - DNA, 410 bp, Zea mays
  unsure (1)..(410): unsure at all n locations
agctnggtgaagaaccgggctcctcgaagctcatccaggagttcatccactactgggttaggaaatttatccttgactgtctttgtgttgagctcacggtagtcaatgcagaagcgccatgtgttgtccgatttcttcacaagcaacactggtgatgagaacgctgaggtacactctcggatgataccttgggatagcatctggtcacactgtcgttcaatctcatctttgagcaactgagggtagcggtatgggtgtaccgccactggtattgtccctggcagaagccggatgcgatgatcatggcggcgaggtggaggaagtccctgtggctcgacaaagaggtcttcataggatagtagcanggtatccaaccgcttgtgtgccatgttcagagcattacagcgggg

SEQ ID NO: 37663 - DNA, 367 bp, Zea mays
  unsure (1)..(367): unsure at all n locations
tctaaagggagaacacattntgggactaacagatgttcattttgagaaagacaggatttgtagcgcatgtcaggcaaggaagcaagttggtgttcatcatccacacaagaacattatgacgactgacaggccactcgagctcctacacatggacctattcggcccaattgcttacataagcatcggcgggagtaagtactgtctagttattgtggatgactattctcgcttcacttgggtggttttttgcaggaaaaatctcatacccaagagaccttaaagggattcttgagacaggctcaaaatgagttcggcttaaggataaaaaagattagaagcgacaacgggacggagttcaaaaactctc

SEQ ID NO: 37664 - DNA, 462 bp, Zea mays
agcttgactcaagtatgcacacattatattttaattccttgttcccgtctcatggacaaggcatcctccctggatccaagtccatagactaacatatatcccgttatcaagatgaatacaatcaattcctgacctcgcgcgagtgctataaaaatcactcgacttctaccgagatcctgattaacaagcagctactcgacctagcatactagtattcatctcagagaggaatcctaagttcatgcaactagaggtttcaagcaactcctacacttaagtgcacattacaatcctacaagcattaagtgtagtaaagtagcatataataatatggttatgcataataccggagcttgccttctattgctggggctgcagagagatcctcaatagcagcctcagaagccttgctctgagcctcctcttggacagatccttgctcagggatgagcacgtactctc

SEQ ID NO: 37665 - DNA, 294 bp, Zea mays
gacctgaagaccatcccgaatagtgttctggaagctgcatgtattccacattgcccagcaaggacctactccacaagttgcttcccagtggaccggaggatgcacttcatgatgacacctgacgcaccccttctatacaatgactcccccatgagtgtgtagtgagccaactgtctggcaatgcgctcggccgagtacttgtcatctggatcttcttcattctttatatacgtgaggaaaggccttctacagtcatcagagtctgacgcgggttgatctataatgatgcactct

SEQ ID NO: 37666 - DNA, 292 bp, Zea mays
ccccctggtgttagaggagctaatgtggttctcacgatgctatgttggcttcattcgccgctggcttatctgctggcctggaacgacggaaagacttgctctgtagtcatcacctctataaatggttaatgtgacttcgctcatatggatatgaatacctggaacgagctatctcctcctgcagatccctgcgagtctttgtcgacccggaggctccagcctcagcataaattggatgatgactgaagctcttgtatacgatgtggttaccccactgatgaccgaaactgcc

SEQ ID NO: 37667 - DNA, 343 bp, Zea mays
acatgtgctaagcggcgatgctccagtcagcccatgctagtcttagctattaagcatgcatctagaccggcctcttcttttgcaaaatctactaaataaaggttgtcgtctaatacacccttaaaagctagtgaaccatcacttcttctaaagacagacacatctacatttgtaaatagacagttatatcccatattgcataattgactcacagatagcagattatatccaagagactcaactaaaaacacattagatatggagtgctcattagaaattgcaattatacctaaaccttttaccttgccttgattcccatcaccgaatataattgaatcttggg

SEQ ID NO: 37668 - DNA, 319 bp, Zea mays
tgtaccggcaaggaaactactcagatttattgtcagccaccggcgaattgaagctaacccagattagaatgaagctatcatgaaaatggaagcttcacgatcacaaaagaagggtcagcgacttaccggatgtatggtagccctgagcacatttatatccaggctgggagaaaaaggattaccattttacaagctactcaagaaggtggacaagattcagtggacttcataagcacaagaagccctatatgcgctgtagaaattcttgacaacctcaccagtactgaaaccaccgcggtgagccacatcaactcaacca

SEQ ID NO: 37669 - DNA, 401 bp, Zea mays
tgccagattttatcaaagcaacaacatttaccggcacattttctttagagcatccctataacatggccatttgcatgctaggggttggacatgatcggacccttcaagaaagctcagggaggctatactcatgtgctggttgccattgacaaattcacaaagtggatagattataagcctattgcctctttaacctcagccaaggcagtggagttcatacaagacataatattcaagtttgggataccaaacagcatcataactgacctgtgatccaacttcactagctctgaattcttcgatttctatgaacaacggaccatccagattaagtacgcgtcagtagcgcattcaatatccaatggccaagtggaaagggccaacagactgatactggaagc

SEQ ID NO: 37670 - DNA, 75 bp, Zea mays
cctaaaacacttgatctatacgcagtgtgcccttcgatgcggtgtggtggctgtctacataatattctaacggtg

SEQ ID NO: 37671 - DNA, 262 bp, Zea mays
  unsure (1)..(262): unsure at all n locations
actacttactgtcctagccgtggaatctccttcctattatttccatganggccccacattctatcgaggagcgcacacgctgaataccttaccactaggattcaataccctaaagactaactcctgaagtttgtatcggatagggcctatacctaatattgtttgcaccactctctggaaaaaacaatcattgacccctcgtatgtgatgatggaggcggcagacatgaatttctacataatagtcaggaacaacaacagct

SEQ ID NO: 37672 - DNA, 468 bp, Zea mays
  unsure (1)..(468): unsure at all n locations
agcttaaagccatggtaagtagcatatgcttgtaatatacgaattgactcaagtctagctacgggtgcataggtttcaccgaaattcaaaccttcgacttgtgaatatcccttggccacaagtcaagctntgttccttgtcaccacaccatgctcatcttgcttattgcggaatacccatttggttcctacaacattttggttaggacgtggaacaagatgccatacctcattcctcgtgaagatgttgagctcctcttgcattgccaacacccaatccgaatctctcaatgtgtcttccacccggtatggctcaatagaagacacaaaagggtaatgctcacaaaaatgtgtgacacgagatcgagtggttaccctcttatgaatatcgccgaggatggagttcacggcgtgatcttgttgtatccttgatggactcttgggtgaggcggtcatggaccctcatcat

SEQ ID NO: 37673 - DNA, 306 bp, Zea mays
  unsure (1)..(306): unsure at all n locations
ctatcaaatggacgtganaagtgccttcctcagtggaccattctatgaagaggtctatgttgagcaacctcccggctttgaagatagtgagtaccctaatcacgtgtataaactctctaaggcgctttatgggctcaagcaagccccaagagcatggtatgaatgcctaagagatttccttatcactaatgacttcaaagtcggcaaagccgatcctactctctttactaaaactattgcaaaagatttgtttatatgccaaatttattgtgatgatatcacatttgggtctactaacaaatctac

SEQ ID NO: 37674 - DNA, 442 bp, Zea mays
  unsure (1)..(442): unsure at all n locations
agctttccttgngaggatcgcacgcgactcttctggagacgacagccccccagcatgcttgaaggcatatatagtctttaaggtgacattatattttgcgctcaagattacacagattattgactgaagaaaggtgggagcattttgatcgtgcatgtttcctattaacactgcaccacacctagggccttgtttggtattcgcatcccacatggattggaagggactaaaaaaatttaagaagaattttgacttcttgtgtatttaaacccatctaatccagtccaatccatatggattggcactaaaatgaacaagccctagaggatattcgaaccaatgcaacccacccaaatgaaatagtggggtatgtgtcattttgatatcacaatagtggaaccacaatnnctcatacactgatgcanntgtgctactccactca

SEQ ID NO: 37675 - DNA, 376 bp, Zea mays
tgtccatgccaggttacatttcctggtcgggcccgccggtttgcgggaaatgttttttcgaactggtttcgataaattacgttcaaaatattaaaatatatatataaataaaaacatgataaaaaagtagatatgtttctgagtattatgatatgttccatattttttttattttttaaaaaaagtaaacaacttttttctgttaaaacagctaatttaattgagaaaacaccacttttcagtccggaaatccgaaattcgtttttttaaaatctttacataaaaatttgccgagatacaacgaatttcgtgcgacgtagaatttatgctgagaagccaaatctcgaaattttgttaaaaaaaagattgaaaactc

SEQ ID NO: 37676 - DNA, 338 bp, Zea mays
  unsure (1)..(338): unsure at all n locations
agctntacccaaacatttngaacaattgtcatcttgagccaaagagtataaaccctagacccctaaaggcactagacttccaagcaagggatcagtggataagttaatcaagtagccaaatcttgattctaatctttaaccaaagttaagtacacactaaaacctataaaatgcagaagggaaacattacaaaaaggcccctcaaagaccccatatccactccttaagtagagagcacactagagctctctaatcttctctaagtccaaatgtaaccctaatctagagatcagacgtgttcacttagtaaatggcgccaaaaccacttggtctgaata

SEQ ID NO: 37677 - DNA, 354 bp, Zea mays
  unsure (1)..(354): unsure at all n locations
cgaagccgaagttgcaaagagttcgaacttgcttattgtcattgaaggaacttcaagataaatgtctgaacttcggcaaccgttgcgtgcaacgactgaagcaggtcttcaactcaattggagccagttctgaaaagtttaaacctttagctgaagacctgctaggcatcttcgatcatattgaaggtgaagttgatgctcttgatgaagtcatagctgggcatggtgacttctgcgctctgctagcttctcgtggcatagctgttgcttttatgaaggctggntccacgcacgagaatattgtaaacaggccgaacttcagctatcaccagggacttgatgacatccccggct

SEQ ID NO: 37678 - DNA, 459 bp, Zea mays
  unsure (1)..(459): unsure at all n locations
agcttcggcatctttattcgtttcttcctcctgagcccctggcgtccagtcaacaatgaagtctgccaacgcttgggactgaatcgaagatctatggacataatcaatacaaaattcattgagctctgcaacccattntccaatccttccagtagcttctcggtttctcataatatccttcaaaggttgtgaagaaggaacaattatgttgtaagctngaaaataatgccgaagcttcctggaggccatcaaaacagcatacagtactttctccaattctgtataatttttctttgataagctaagaacttcggatacaaaatatattggggcctgcttcttgccttggccttcaagcttctcctggacaagtgctgcacttaccgctgagtgcgaagctgccacatataataacaaaggagcccctggcgttggtggagttagtggttgtagttctat

SEQ ID NO: 37679 - DNA, 431 bp, Zea mays
cttgtgccggggtggccggtctcctagtgcccggtaatggttttcttctctcctgccttgcgtgccactgtgctgggtggtcgggcagggaagatgcccttttaaccgtagatcttttattgtgcggtcacgattaaatccctgagtcactacgcgaggatctggtgatcgaccgcacctattcaccgtggcgtataatgcctcgggccgttgattttgatccaagggcgggtagtccacaccacgttaatgaagtctcaatctaatccgcactgctcgatcgtgatccaacagctcggacccgaagataccccttctgtcgcaagatttactgaagagcgcctcagttattagataactaactcccggtgcacacaacagagcactgagtcttagaattatatgaccatagcccctgttcttattattat

SEQ ID NO: 37680 - DNA, 474 bp, Zea mays
gcttatttgaacgccatacggatataggcatatatttgttggcgttttcaaaatagtagtacagtaatggatttggtgtgtgactgtgtgagtgtgactgtgtgttatgcaatgctggtgaattggtgatctggtgtgctgtctggtggataagacaggtgatctggcgtgtgagtgtgtgtgtgtgtgttatgcaatgtgagactgtgagtgtgtgtgtgttatgcagaatggcgtgtgagtgtggacaggacaggtgatctgaacttctgaaggtctgattgctgagtgcagactgaactgaagtgctgagtgtgtgtgtgcagcaagataacaagcttatggtctttatactcttatggctatggtcttatggaggtatggacttatggttctgtgtgtgtgtgctgtgcaacaagctattattgttatggatgattgatgctgcctgctggatgttcttttttgaatatg

SEQ ID NO: 37681 - DNA, 405 bp, Zea mays
  unsure (1)..(405): unsure at all n locations
tagtggctgtagttgcagtcatcactagaactcgactagtgtgatattggtttctttggntntattctttggtggcgataggaaatcataaaagaaatgcacacatatcagtctgatgcttactgaaaaaggttgatatgaagcatgagctgtatggcgtcagcagcaaagcaaaagtagcaaaacaatgttcaatgttccatattgtatattgaaacattaacgctggcacttgcttttgtacgtctctagtggtctggtttattattattgttggtattattatttcatcaatattataaaatgagtgattcacctctggtctgttttatatcttcaaaatgtaagtatggaagtngcatgctcccaantgcttggttttttcatatattgatgaatggatat

SEQ ID NO: 37682 - DNA, 350 bp, Zea mays
  unsure (1)..(350): unsure at all n locations
gcttcagaggacaactgcgccgttctgattgtctctcgtgacaaggctatggacaaagccattcacgcggtgcggatcttgatgaggaggcccagcgtagtggttcctgatgacattgtcgccgatgtcaaggctgcacctgatgcctcgagtcaccctttttcctcgattgctcctgcaaaaaacattgccagcagagacgtttcgatgcagtgatatcctacgaaacactgaatgtactatgaattctatgtgcgtgtgatggctgtgttcgaatattttgtggatagggcactataatgtgtccttggtgctgacaagtataacattatgttntcctggagtactga

SEQ ID NO: 37683 - DNA, 376 bp, Zea mays
  unsure (1)..(376): unsure at all n locations
tatgaagattcttcatcccaacgtgggctagtcggcgatgttattttctacccatgttagtcttagcaattaagcatgtgtcgagttcagctctatcaaaatctaccaagtatagctgaccctctaacacacccttaaatgctattgaatcatcacttcttctaaagacagtgacacctacatcagtaaagagacagttgtagtccatttgacataattgagatacagaaagcaaattgtaatctaaagaatctacaagaaaaacattggaaatagtatggtcaggtgatatagcaattntacccaatcctttgaccaaaccttgatttccatccctgaatgtgatagnctcgtggggatcttgggtttctcatat

SEQ ID NO: 37684 - DNA, 399 bp, Zea mays
  unsure (1)..(399): unsure at all n locations
agctntggagtgcttgagcagtttaactctattcttatctcaagctatcaatcttacatttactattntttaagaatggcccacagatgaatgagttgttatatcactaacttcatattcatcactagcaagaacttctgttgtagggaataaggattaactcttgtggaaatcaagcaaaaggcctacaactatgggatatccaaaggagggtaaacattaaatcttaagtgcacattgcttttaattagtatattcctttatgtctttgtagccacataggaaaaatgaagcacttgagaatgaacttaaaagattttaccttgcctttgaaaagatccaattatatggtagatcgcaagtttatatctttatatgtgacaatatacatgctttaaa

SEQ ID NO: 37685 - DNA, 350 bp, Zea mays
  unsure (1)..(350): unsure at all n locations
tccgcgtggtagcagaaaatgaaaccgacttaaagatgaatttgctatttatacctcggnggattactatagaattattatcaaatgtaaagggcatgaatgtaattttgtatgggctgtgtcccgtgcctataaataggtgaacagtacccccgtactgttcacgctgatttggcatttacttttgcgtcacacttgtactttcattcccttccaagttgaaggtacatttgtaattcgatattatttctatttctctgcaataataataaattgataataagatataattatctatgtaatccttccgattctttatgattcggtcttcgtcatcatatgctatggtt

SEQ ID NO: 37686 - DNA, 392 bp, Zea mays
  unsure (1)..(392): unsure at all n locations
agctntacactaagcacctgtccaacacttaacacatctatcagtcctttaattgagttgtcatccaagccaccaaaacccacaagaaacttttaatatccccctttttggtgattgatgacaacacaattaaagcttacacaagattaagatttaaagcacaattttgaaactttggcctcatatgccaaatatcacatacttatgctaagtgtgaagaattactacaccttatcatccatggggtgcaaagtgtcaataatcttcatccttcgacagcttgttggactcatcttcatcctttgtatcaacattgtcagntatcttcggtgttttgctggtacccttagcaactcttcttctcttcttcccaacttcgacattggctcttt

SEQ ID NO: 37687 - DNA, 373 bp, Zea mays
  unsure (1)..(373): unsure at all n locations
ntaccaaatggacgtgaagagtgccttactcaatggaccaatcttatatgaggtctatgttgagcaacctcccggctttgaagatagtgagtaccctaactatgtatataaactctctaaggcgctttatgggctcaagcaagccccaagagcatggtatgaatgcctaagagactttcttatcactaatggcttcaaagtccgaaaggccgatcctactctatttactaaaacacttgcaaatgatttgtttgtatgccaaatttatgttgatgatattatatttgggtctactaacgaatctacatgtgagggaattagtaggatcatgacacagaaattcgagatgtctatgatgtgggagttgaagtac

SEQ ID NO: 37688 - DNA, 385 bp, Zea mays
  unsure (1)..(385): unsure at all n locations
tcttaagtcacctgcggcatgcagcttgacttacaccaaaccgcacccgtaccatatcacattctatggcttaacaatagtggtaaggtcaaggtaaccaagctggtacgaattaattntgctattggttcatatcgtgatgttgttgactgtgatgttgtgcctatggatgcttgtaatattctgctaggtagaccatgacaatttgattcatattgtatgcatcatggtagatcaaatcaatattctctcatacaccatgataagaaaattattttgcttcccatgtcccctgaggctattgtgcgtgatgatgttgctaaagctaccaaagctaatactgagaacaacaagaatattaaagctattggtaataacaaagatg

SEQ ID NO: 37689 - DNA, 335 bp, Zea mays
tatcttatcttctttctaacggatctgaccttgtctcattttttattctgagcgctccgcaatcatcgtagagatttctggactttctatattaacaagatttgttaaatctgatttaaaggggctgttagcaatatccttattgtttgggttgtcatagtgaaaaaaagggtttagggctttgcaaaaaataaaagaaaataaagaaaaggaaaaaaaaggaaaagaagaagaaagaagggggctgaatctctaaatttgttgtttctctttgagatgtgctagttgttctttttcagtgactacctttgtgtctaggctcacgtctctatcat

SEQ ID NO: 37690 - DNA, 316 bp, Zea mays
  unsure (1)..(316): unsure at all n locations
acaaggggccgccaccccgagtactgaaaatcatgcaatctgagaactcgccacaatctatcaaatcagacggcgatttgagttcattcaacaactctncgggattgtgtggatacaacggacacagttgcacctgaggaacaatgcaaaatggaaacttcaataacgcattcaacttcatatccattacataccttcgggttgtatgggcgtctcataaaatgcgaatgccacctatttccattattctttactcatgagtttcagatgtgtgcattcactatataaaaactaacccctactatacacacaagta

SEQ ID NO: 37691 - DNA, 344 bp, Zea mays
  unsure (1)..(344): unsure at all n locations
acccatgctagncttagcgagtaagcatgcatctagaccggcctcctcttttgcaaaatcaactaaataaaggatgccgcctagtacacccttaaatgctagtgaaccatcacttcttctaaagacagacacatctatatttgtgaaaagacaattatatcccatattgcataattgactaacagataacaaattatatccaagagactcaactaaaaacacattagatatagagtgctcggatgagatagcaattttacctaacccttttaccttgccttgattccatcaccgaatttattgaatcttggaatccctgttttgaagaagaagtgacatcttct

SEQ ID NO: 37692 - DNA, 307 bp, Zea mays
cattgaacattgatatgacgtcctttgcatatgggtctgtctattttcactgcaaatatgtgaactttgtttacgtaatatctagtgaagagattaccaatactctctgttggaatcctcttataactggatacaaatttgtaatccttttatctagatcagtataaatcgcgagacgcatcagcttgctcataaaatattatttgaaaatatgaatacatatgtaaagctttacaagctgccatatattaatattatttttcgctctttaatcacctaaatcttattttgccgggcacttgacgat

SEQ ID NO: 37693 - DNA, 401 bp, Zea mays
  unsure (1)..(401): unsure at all n locations
gtcacctgcggcatgcaagcttgtgaaagttcttcatccnctcatgttctaagcggngatttcacatccagcccatgctcttcttaacaattaagcatgatatctataccggcctcctcntttgcaaaatcagcttagtaaagattttcgtctaatacacccttaaaaactagtgaaccatcacttcttctaatgaccgacacatctacatttgtgaatagacaattatatcccatattgcataattgactaacagattaccaattatattcaagagactcaactataaacacattatatatagagtgctcggatgaaatagcaattatacctaaccctcttaccttgccttggattccatcaccgaatattattgaatcctgggaatccttgttttgacg

SEQ ID NO: 37694 - DNA, 411 bp, Zea mays
  unsure (1)..(411): unsure at all n locations
tatcacctatcagctagcacattatagagggaggtttttgaacttaagcttactttactctgccatccttttccagcatcttcgctagggaaatcaacactgagcagcttatgagctgagtatccaagacgcttttccagaaagggaatgattgctttggagcatcccatgtgtatatntttcccatttggttccccagatttgttccacaacacaacaacagaatttacaattgattgggtagtaattaacacatcataagacagaaggtgtgaaaatgaggacactgtacaaaaaatagtgccctaaaactacgtgaaaaaagattcataatgttcaagcactgtgtgcacacaaagctagttacctgatccatantatatctcaatattttacatgctccacaataca

SEQ ID NO: 37695 - DNA, 418 bp, Zea mays
  unsure (1)..(418): unsure at all n locations
agcttgccttgattcttatcaccaaatattattgaatcttgggaatccttattcttgacgtaggaggtgaacatcttcttctcccccgtcatatggtttgtgcatccgctgtcgataatccagcttgaacccccggatgcataaacctgcaaggcaaatttatgcttgggtcttaagtacccaactcatgttgggtcctacaaggttagtgcatatatccttagggacccaaatgcaagttttgtctcccttgcattntgcccctaacttcctagcaactattttcttatcctttctacagatatcaaaggaagcatttaaagcatgataaatngtagagggttcattcattactttcctacgaaccataacaacatttctcctatgcatattatgaacaacatttcttctaccaaca

SEQ ID NO: 37696 - DNA, 356 bp, Zea mays
  unsure (1)..(356): unsure at all n locations
tctnagggagaacacgtgataggtctaacctatgttctattctaaaaagatagaccttgtgcagctcgtcaagcagggaaacaggtgggaggagcgcatcacagcaagaatgtgatgaccacttcaagacccctggagctgctgcatatggacctcttcggacccgtcgcctatctaagcatagggggaagtaagtatggtttagttattgttgatgatttttcccgcttcacttgggtgttctttttgcaggataagtctgaaacccaagggaccctcaaacgcttcctcaggagagctcaaaatgagtttgagctcaaagtgaanaagataagaagcgacaacgggtccgaatt

SEQ ID NO: 37697 - DNA, 299 bp, Zea mays
agcttgtgagctatataacccacactcctttctctcaccggaatagtaaccgcggcggaagatatgacggcggtgcttaccggcggtgatctatcttcagcgaagtgtcctcggaggtcgaggaggtcctatcgaacatgttgatgggctgatggcggtcgaaggtggttggagtcgctctggccgcgtgtgggggtggaagagctcgtcggcgacgaggagtccggcctaaacacggcggtaaagttcaatttgtcggttcgaggaagtttaccatgtgacacagaagctatgcgcac

SEQ ID NO: 37698 - DNA, 381 bp, Zea mays
  unsure (1)..(381): unsure at all n locations
tgttggatggcgatgatattctatctagccataatgaatatgctgcagcggnagatcagttcttttccaatctgattggaactgtggacagggaccggactattgatttagaggctcttggtttatctaaccatgacttttctaagctcaatgctcctttttctaagaaagaggtgtgggagaccatcaatgggttaccaccagataaggctcctgngccagacggctntacaagaagaatttaccgtgtttgctggcatataattaagaaggatatcatgatatagttcctgttataggtagacgactatatgacgactaggagtcgactaggctcgactaatcgagcaaatcgatgactaatcgcgattaatcacctta

SEQ ID NO: 37699 - DNA, 428 bp, Zea mays
  unsure (1)..(428): unsure at all n locations
agcttntanagactacgattgcatcatctgttgtttctggaatcacctttttcccagcaaacaggagaagcttgctctctgtctccccaatgtagcccaatttcttcatcataaccatggcgtctgccgtcacagtagattcaccaaattcaatgtggctgggtttcattgggctcagaatagtgtagtcctcttcatcttcattctcatttcctccttcagctccgacctattcagcttcagcaatcgaggtaccttcggtaacagcctcctctggcacaacaagacccgattgcctcatcacttatgatattgaagctgtttcggtcacttcggcctcgtccctctcacgagacacccaaacggtggatcgtactctggccatttcagggtttacgctcttataagacgaagctgaccacatgtga

SEQ ID NO: 37700 - DNA, 383 bp, Zea mays
tctaaagggagaacacgagataggtttgactaacgtgcaattcttataagatagaccttgtgcagcttgtcaagcaggtaaacaagtgggaggagcacatcacagcaagaatgtgatgaccacttcgagacctctggagctgctgcatatggacctcttcggacccgtcgcctatctgagcataggaggaagtaagtatggcctagttattgttgatgacttttcccgcttcacttgggtgttctttttgcaggataagtctgaaacccaagggaccctcaagcgcttactcatgagagctctaaatgagtttgagctcaaggtgaagaagataaggagcgacaacgggttccaattcaagaatcttcaagtggaggagtttc

SEQ ID NO: 37701 - DNA, 453 bp, Zea mays
  unsure (1)..(453): unsure at all n locations
agcttatccttccacaagatgatgaaacatatgacatgatcattgagtatctattgaaggatccatatggagatttgacataatctcccatacttgaagatttgatctatgatcaatttggcttgtgcatttgtcctatatggtcatttcattgttgttgtaataaagtatagacatacaaactcatattatgagatgtatgatactctccagaccattgttgggtcatgtgagttgtgcgaactcatcagattgagttgccataccgttattgtaaagttgtttctataatgtgatgttgaataaaatgtttgtatagtaccaagttgcatcacaaattcttatttagaattttctttatttatagatccatcatgatgttaactcgacggaggaggaattatgccttgtgaatagttgtaccacanactctatactcaaggatatcaaata

SEQ ID NO: 37702 - DNA, 403 bp, Zea mays
  unsure (1)..(403): unsure at all n locations
tgaagccatggtaagtagcataggcaagtaatatacgaattgtctcaagcctagatatgggtgcgtaggtttcactgaaatccaaacctttgacttgtgaataacccttggccacaagtcgggctttgttccttatcaccacaccatgctcatcttgcttgttgccgaatacccacttggtacctacaacattttgattaggacgtggaactaaattccatacctcattcctcatgaagttgtttagctcctcttgcattgccaacacccaatccgaatctcttaatgcatcttccaccctgtatggctcaatagaagacacacaagagtaatgttcacagaaatgagcgactcgagatcgagtggttacccccttatgaatattgncggggatggagttcac

SEQ ID NO: 37703 - DNA, 258 bp, Zea mays
  unsure (1)..(258): unsure at all n locations
tctattaaaatcaactaagtattgctgaccctctaatactcccttagaagctactgaatcatcacttattcctaagacagtaacacactatatgccgaataaagacaactcgaggcccattttacataattgagaaactgaaagcaagttatagtctaaagaatctacaagataaacatctgaaatagattggtcaggagatatagcaattttaccaagtcctttgaccaaaccttgatttccatcccngaatgtgat

SEQ ID NO: 37704 - DNA, 405 bp, Zea mays
tatgaagactcttcattccaacatgggctagtcggaggtgtttatttctttccaagttaggcttagcaactaagcaagtatcgagttcaactctatcaaaatctaccaagcatagctgaccctctaacactcccttaaatgctattgaatcatcacttcttctaaagactgttacacctacatcagtaaatagacagttgtagcccatttgacataattgggataccgaaagcaaactgtaatctaaagaatctacaagaaaaacattggacacagtatggccaagcgatatactcattttacccaatcctttgaccacaccttgatttccattcccgaatgtgatagctcgttgtggatcttggttattctcatatgaggagaacatctttttctcccctgtca

SEQ ID NO: 37705 - DNA, 480 bp, Zea mays
  unsure (1)..(480): unsure at all n locations
agctntatatggcagaaagtgtagaacttctctgtattgngatcagactggtgaaaggaagttctttgggcctgaattattcaagaggcagaagaacaagtctgtatgatccgggagaacttgaggatagcacagactcggcagaagagctatgctgataatcgaagaagaccactggagtttgaagagggtgaccacgtgtacctcaaggtatcaccacttcatggaatgagaagattcaaagttaaaggcaagctatcccctcactttattggacccttcagaatctttaggcgagttggggagatggcctaccagcttgaactaccagatcatctgtctgatatacatgatgtattccacgtgtctcaactcaagaagtgtctctgtgttcccgaggaacaattgccaatggaagagctcagtctgcaaagtgatataacttacatagtattctatcaagatcattgacaccttgac

SEQ ID NO: 37706 - DNA, 357 bp, Zea mays
  unsure (1)..(357): unsure at all n locations
ngcagggaagtggatcaaggaactgccatatgtagtctggatcctattaactcagccgagccgagctctatatggaaacaccccattcttcatggtgtatgggtcacaggcagtactaccatctgatctgatctttggggcgcccagattaacctttgaaagcatcgccgaagcagaagcaaccagggttgaggacatcgatgtgctggaggaggaacgactaaatgtggtaatttattcgggcaaatacctgcagaccttgaggcgctaccacgacaaagcggtccggcatcgatcctttgcagtgggagacctggtcctccggcgaattctaatgggggagggatggcacaaact

SEQ ID NO: 37707 - DNA, 218 bp, Zea mays
gccctacagtgcgaccctctgctgaagaaatcactactttggttgcctcgctcggcgagattcctgatgatgaaccgcaggtctattttgaagtgcctgcgaaccctattgatgccgacataaatgacatgcttgatctgttatctgaagattcattcgatgccgctcctaatggtaccgtgggagtgggccccttccaaaggtgatcaaccttggat

SEQ ID NO: 37708 - DNA, 306 bp, Zea mays
  unsure (1)..(306): unsure at all n locations
tgaagctggcctctgcgctatgacaaaggacgatcttgcttattttctatcatataatagnctgaaggtatgaaaattgtatatttgggaatttataatttttgaattattcttttattcttatactaattcttttcatatagggcttaatacttagcaacgctttgagagcgcaaaagaatgctgaagacgagagctataatattgctttcaacaacctacgaacagaggttattaagctgaggaacaaagctttggaaaaagatagtggattagataaaggaagacgaagctacttctaaagct

SEQ ID NO: 37709 - DNA, 427 bp, Zea mays
atcttaactcaccgcagcatgcaacttgctatagagtctcagatattgtattcaatggggataagaaaggcgagcctcacaactgattcccaagttatttctggccatgttcacaaatgttgcaaagcaagagatccgaagctcgaataatatttggatacagttcgaagacttgaagcctccgtcgaagggttctctgttaagaatattccacgaggagaaaatgaacacgcttatctactagccaagtcagcgacacaggggctgccattaccttcagaagtgttctttgaaacaataaaagcaccttcggttgaccttcttgaaagagcagtgctcaatatatctcctgtctatagcgaagattggagaactgagatcatgtctcttcttcacggcaatctcctttcagatgacgaagcttatc

SEQ ID NO: 37710 - DNA, 369 bp, Zea mays
  unsure (1)..(369): unsure at all n locations
actcagctgaagcttcacggcttggagatcataaaattattttattattttgacttatgactaagattgaaactcttccagaattgatcaaggaaaagatgcttcagtgcaatcactaagtgctgatttaaccgaagctcaaaaattcaatgaatatatagaagcagagaaattactcacggaacaaaagattgcaagtcaagataaatatattccagaatccagagattagatggataagattatgaccaatcatgtcgatggcgtctcacgacttcaacatgaactcaacaaagaattaaggtgtgctcatttataaagaggagcatangggtcgtaccatcatgatcctccccaacaattattact

SEQ ID NO: 37711 - DNA, 451 bp, Zea mays
  unsure (1)..(451): unsure at all n locations
ggatcttaagcacctgagctgcagcttattgaacaaacccccctattctttacactgnggtgtttactaattttaaacagtgttactactaagctagtgtctccactattnttcttaaccctggtctaacaatatttctatttttccttctaatattaagtttttagcagttttcttatttaattcaaaactctagaaaaggatacaggaactatgggttttactatttttatctgatagttcatatttcccaaagtctagcaaaattggtttgacaatttttggatgattattcttcaagttatgcatttattaagttctctgccatatctaaaagaaaataatatcacaaatggaaaagaatacaggtttgcgctaaggcccctatgttttctctccctcttctctcacaaaacagtcctcggtctactattggcatgagtcactgaca

SEQ ID NO: 37712 - DNA, 422 bp, Zea mays
  unsure (1)..(422): unsure at all n locations
ggtctacccctaaccatcgattctagcctggctgctctctctacacccgccctacagtttgcttccaggtaagtctttgcaatatgctaaacaagaaatctatcttctactacaactaatgccatcaacatatttctgagcttccggctacaggtagagcacatctttcacatgcatcttttagtgttagtgattcaatgatttctgtttgcgggacccacttttgtgttctaaaaacattattattttgattaataatggactgaanatctgttgtaaaaatttcatacacaagtatgatgatgtaacattcacttgtaagtatatgttttcctttcccttctttcatcgcaatatgtgtgttctaatactgacctactctttttatgtattcacaaattcacagaaactcgtttgatata

SEQ ID NO: 37713 - DNA, 448 bp, Zea mays
  unsure (1)..(448): unsure at all n locations
gcttngataattttgtnttcctcttcttattgagagcttctagcggatccacaattatttggcgaggagacaaattcaatggagaattataatttcagaatgattatattcagtgtgtcaaatttacttccaacctcaatggagtggcttggattctgggcaatgtgtatgccctatactctcacttggccaaacttcagtttattcaataactctcctcttttcatatgaaagataattntggttaccttttagttggtgattntaatctcatcataaatctttcagacagaaatagactaggtgaaaatttgcagatattctatagtcaataatgcaatttgtgatcttggtttggaaaattacctttcttcgttctaagtcacctatccaatatattatcccctactcacgctggatgagtttgcctccctctggatcatacttt

SEQ ID NO: 37714 - DNA, 373 bp, Zea mays
  unsure (1)..(373): unsure at all n locations
tctaaagggagagcacattntaagattaacaaatgttcattttgagaaagacaggacttgtagagcatgtcaggcggcgaagcaagttggagtccatcatccacacaagaacatcatgacgaccgacaggccgcttgagctactccacatggatcttttcggcccgattgcttacataagcatcggcgggagtaagtattgtcttgtaatagcggatgattattctcgcttcacttgggtattctttttacaggaaaaatctcaaacccaagagaccttaaagggattcttgagacgggctcaaaatgagttcggcttaaggatcaagacaataagaagcgacaacgggacggagttcaagaactcacaaatt

SEQ ID NO: 37715 - DNA, 244 bp, Zea mays
atcagaattgttatgcaacttgtgggtaaagattagccaccactgcggagtgtaaaactgatatatcagccatgctaatgtgcatgagcatctctaaccctcacataattaatttatagaattaaaacttaacccgctatgcattgcactgtgggaactattagtaatcgtgagcatctattaaacctgggtggggtatacctatacatagtattgctcataaagttttgaccgacttgttcaa

SEQ ID NO: 37716 - DNA, 419 bp, Zea mays
  unsure (1)..(419): unsure at all n locations
ctaagcttgcgccagtacanattcagaagggagaaagcagcttcattagatcatccgaagcctatgctcttatgtgaggacatagcagagcacatagtgctggtaggctctcaactatccgaagagcaggaaaaaaccttgataaggtttttgttcaataacaaagatgtttttgcatggtcagccaatgatctatgcggagttaatagggatgttattgagcactcgctcaatgtcgatccatccttcagacccacaaagcaaaggcttctgaaaatgtcagatgataaagccgaatgtgctcgcaacgaagtcaaaagactcctcagtgcaggaagtatcagagaagtgaagtacccacaatggctggctaacactgctatggtaaaaaaggcccatggcaagtggcgaatgtgcat

SEQ ID NO: 37717 - DNA, 363 bp, Zea mays
  unsure (1)..(363): unsure at all n locations
agcttctaaagaaagagcacattntatgactaaccaatgttcattntgaganaaacagggttagtagcgcatgtcaagcatganagcaagttggtgcccaacatccacacaagaacatcatgacgaccgacaggccgcttgagctactccacatggatttattcggcccgatagcttacataagcatcgacgggagtaaggattgtcttgtaattatggatgattattctcgcttcacttgngtattattcttgcaggaaaaatctcacacccaagagaccttaaagggattcttgagatgagctcaaaatgaagttggcttatatgggacaatgggacgcgagtcaagaattcacaaattga

SEQ ID NO: 37718 - DNA, 350 bp, Zea mays
  unsure (1)..(350): unsure at all n locations
cgtgcattctcttagtaacttgctgggcaggcgttctctcttatctgatactaaatcatccggttttctccnccttttcctacgatggggagtacgagtagagtccataccctgcagaggtatctccactctctccggtgcatttgccgcaggaatatgcgacttcgacactcctcttatatcagtaaaggcatctggtagattatttgctaagttttgcaggtgtattattcgttgaacttcaagttcggtttctctattgcgtgggtcaagcgattggatgctagtagcactccatcctatttctcggcattctctattattaagggtacatcctccccctaatgacg

SEQ ID NO: 37719 - DNA, 306 bp, Zea mays
aaagtttaatgccaaaaaggcactttctactgccttgctttttgaaagatgtcaaacagcagatttcatatttttcctaagttcttaataacaaaacattaattatcccaaggtttcgggtatttttgccttgggggtatatttctagggttttctaaggtttccttgttttcttaaaataaaaggtattccaattattttgtactaaaccagagtataatagatttttctagtgaactatactgaataagtggactaaccaaaatatgggtgcctcttggttccttatttaaatcacctttccta

SEQ ID NO: 37720 - DNA, 434 bp, Zea mays
atcctcttagtcacctgcggcatgcaagcttgaattgctttcctgttggaaacctatgtcatccttaatgccagagcgtctcccattatagagcatacttctagcacaattaaacttctcattttcaatttcatgctcattaattttagcagctaatttagctatgtgattatgttattgtttaattagagcaagatgatcatttatagcttctacattaacatctctacatctagtgcatatagaaacatgctcaatagtagatgtagaaggtttgcaaacatttaatttatctatcttagattttaacatggcattttcatttctaagacaggaaatagaatcattgcacacatttaaatctttaaccttagagaataagctagcatcttcatttctaaagctagaaattggatcattcaattcatcaatct

SEQ ID NO: 37721 - DNA, 289 bp, Zea mays
aaaaggagcccgcaaaaatgaaaaatgcttctttgccaaagaagcaaagaatcattacagtgacagaagccatcgaagggacaccaccacgagcttcggctctgatggcgccaactgttgagagcacaacatgcaccgaagctgcacctgcggaagccacagctcccgaagctgtcgctggcgaagatattcatttaaagtgcacgattgccgatattgataagatactggaaaacatggccgcagaagaagctgctgcagccaccgaaagaactatgaccccagaacc

SEQ ID NO: 37722 - DNA, 375 bp, Zea mays
  unsure (1)..(375): unsure at all n locations
agctngaaggactgcttcggcaggagagcttcttatcgtgatgactcgttcggtccacggagtcgccttgcccgagcgcaagttacttatcgcagaaagggacgagtgaggtatccgtatcccggaggcgtatgagtccctcggctcggtcagccttggctgcttacgtgtacctcgtcgtttccaggatccgctttccgaagtagtcaagaagcacgaaagaaatcctgctaaaaagagatcctttttcgaggaataattcgacgcagagggggtctccctccttttagcccccgagggagggtcgggctttgtcgatgctatgtcgaccctttcttgacaactaaactttgcgtatgttcgatgtatatgaac

SEQ ID NO: 37723 - DNA, 440 bp, Zea mays
  unsure (1)..(440): unsure at all n locations
acctatgaatctcagcttaggattcagcttacaagcaacaagcctttntctgatgatggagcctanatgtttgctgcaccaacatgaagttatcttgaatagaacgtcctttgattaaggcactttgatttggagagaccatcttgtcaagtttgctggccaatctgttggctaaaattttggtaatcaattttccgaaactatgcaccaggcttattgaacgaaaatcctttacatagacaacctcttccttctttgggatcaaggagataaaagcagtattgagcttcgaaattaccaaactttctactccaaatggctgaaactgaagccatgatatcaggtttgattatgctccagcagactttatagaagcgttcagtgaaaccatctggccccggagctttatctgagggtagaagcataatagntttccacac

SEQ ID NO: 37724 - DNA, 437 bp, Zea mays
  unsure (1)..(437): unsure at all n locations
gaacaaccgaggcatgctctacttttcttgaagaatatgtcaaggatttgaggattgccattaagtaaaaacataagatgatattctacaccttcttcaatagcctctaccacaccttctctaaatgttacatcacatgttatgatcaagcctcacttcacattcagaggtgcagagaatgcttcgaagatgggcactagattatgtcatgtccctatattgatggcttgattattaacaaggatgattgacttcgctttacatgctccatgaaaggacacttacttagatcttgtccccatataacacaaagaggcataaggctagaagacataatattcactaaccatgtatcaagcaatacacaatgatagtngatatcttctacatatggagaacgcctatgctacacatgccgaatgaagggacatcaatgc

SEQ ID NO: 37725 - DNA, 421 bp, Zea mays
  unsure (1)..(421): unsure at all n locations
agcttcgacgaaggcaagtccatccttcccttgatttatatattacctattatttctaccactacctaagccgggatatcatggtgggatatttgcattgttagtagagagatatcccgcattaacatatatcttttggacacaaaatgtggattgggagaaagggcaatatgtttcttcaaataaggtttcttttaaaaaggggtgtgcgatgaagggtattcaccctcatcaccttgggagtgggatgatcagggactccctggtttatgggagggcctaatgtgttggctcagctggtttatgcgtgagcagaaagattgtcctctcatataaagaccaggttgtcatctntcactaactgtactcctaaatagaacaaccactcgagactgtgtggatagtcactcaatccgaactc

SEQ ID NO: 37726 - DNA, 376 bp, Zea mays
tatgatggctcgtggagaaccttcagcgcatgtgcaactactggtttaatttcaccataaaaaataagaacctgctatgcagctaggctggaattcaagtgcacaaacaacattgcagaatatgaagcagtcctattggggtttcgaaagcttgaggccatgggaataaaagagcaatacttaaatctgactcccaagtaatcacaggtcaggttgacaaaagcagcatgccaagggatccgaagcttgaaaaatatattgacataagtcgaaggatggaagcctcattctaaggattcttagtaaaaaaatctcccaagagaggataatgaacaagcagacttgctagccaaattagtcgtacaggggctctcac

SEQ ID NO: 37727 - DNA, 370 bp, Zea mays
  unsure (1)..(370): unsure at all n locations
agcttcatactaaaggtgtcctgatcagtgtgtattatggatgtgcaaaacactggcttggtactgtacatggactgcggatagagcggtgctcgaaatatctcctcattggtgaggatagcctaaggaggcattggagttgacattgatgtatcatccttcttgtataaccactgacatgtctactatgtntatgggttcatgatgctggtctttctgagactcatcattgtcaccatatgtgtaaatatcgacagaacatatgtcttgcttaatgcggagaactaccactggcgatggacttcattcttctgtgctgcttccactgcggtgtatggttacctctactccatatgtnattaccacatga

SEQ ID NO: 37728 - DNA, 141 bp, Zea mays
ctcacaatcacaccacatacgaccggaactacaggtatatcctgggagctaatgaggactactgcatttatgtggggctcatgacgtttccaaaggaaccagtctgcatctggtaataatatgcaagcgaacccttgcgcg

SEQ ID NO: 37729 - DNA, 445 bp, Zea mays
  unsure (1)..(445): unsure at all n locations
agcttgtgaaggttcttcatccncacatgttctaagcggcgatgccacagccagcccatgctagtcttagctattaagcatgcatctagactggcctcttcttttgcaaaatcaactaaataaagtttgccgtctaatacacccttgaaagctagtgaaccatcacttcttctaaagacagacacatctacatttgtaaatagacagttataccccatgttgcataattgactaacagatagcaaattatatccaagagactctactaaaaacacattagagatagagtgctcattagaaattgcaattttacctaacccttttaccttgccttgattcccatcaccaaatataattgaatcttgggaatccttattcttgacgtaggaggtgaacatcttcttctcccccgtcatatggtttgtgcatctgctatcaataaatc

SEQ ID NO: 37730 - DNA, 333 bp, Zea mays
  unsure (1)..(333): unsure at all n locations
cgacatagttgtgagtgggtntatgtgagagagacaaataaccagctcatagagagcacttggtcctttgaacgaaccaagagggaaacacccttgtgtgggtgctctaacgaggtcatagaagtgctgactctctaatacctcgataaaccatcaaggtgttcctgatcttttctttactttgagcatttaaattcgaacaatatcactcaagtatttacttactgaaattgccatgctagtatatgattggaactaacagggaaattgtctcaacatttcctataatcgaatttggtgtttgacgtacaacacanaccatgtggactaact

SEQ ID NO: 37731 - DNA, 426 bp, Zea mays
  unsure (1)..(426): unsure at all n locations
agcttacaacataattgttccttcttcgctttctctgaaggatatcatgaggaaccgagaagctactggaaggattagaaaatgggctgcagagctcaatgaattttgtattgaatatgttcatagatcttcgattcagtcccaggcgttagcagacttcattgctgactggacgccaggggctcatgaggaagaaacaaataaagacgccgaagcatggatagtgttttgcgatgggtcttggggaaccttcggagcgggagcggctgctgtgttggtttcaccttccaaagataaaacttgctaagcagcanaacttgattntagttgcacaaataacattgtcgagtacgaagccctgcttctgggtcttcggaagctaaaagcaatgggaatcagaagggccatacttaaaactgattccca

SEQ ID NO: 37732 - DNA, 280 bp, Zea mays
tatgaagattcttcatcccaacataggctagtcggcggtgccatatccaacccatgttagtcttagcaattaagcaagtgtcgagttcagctctatcaaaatctaccaagtatagctaaccctctaacactcccttaaatgctattgaatcatcacttcttctaaagacagtgacacctacatcagtgaatagacaagtgtagcccatttgacataattgagatacataaagcaaattgtaatctaaaaaatctacaagaaaaacattggaaatagaatg

SEQ ID NO: 37733 - DNA, 337 bp, Zea mays
  unsure (1)..(337): unsure at all n locations
agctntaaccatcctctgtggtaagccttacacttcacatgagctcccacctttgatgagttcatgcacattattccccacaactttntgagcgatgaacgtatgtgagctcacccttgctgtctcacccccccacaggtcaagaacaggtaccccacgatgaggcacatggaggatgttgtgtggtgttcgtgaaaggtctatgccatcgtctcccagtcaactttgggttgctagatcgctgtcttcatatgatgtaattatttaactattttgtacagaactccgctatatattaatgttgtgacattngtttctgtaccatgagtcatcatat

SEQ ID NO: 37734 - DNA, 102 bp, Zea mays
attgtatcgcatgccaagcacggaagcaagttggaacccatcatccacacaagaacatcatgacgaccgacatgccgcttgagctactccacatggatctat

SEQ ID NO: 37735 - DNA, 432 bp, Zea mays
  unsure (1)..(432): unsure at all n locations
agcttctaaagggagatcacgtgatangtttgactaacgtacaattcgaaanagatagaccgtgtgcagcttgtcaggcaggtaaacaggtgggaggagcgcatcacagcaagaatgtgatgaccacatcaagacccctcgagctgctacatatggacctcttcggacccgtcgcctatctaagcataggaggaagtaagtatgggttagttattgttgatgacttttctcgcttcacttgggtgttctttctgcaggataagtctgaaacccaagggaccctcaagcgcttcctaaggagagctcaaaatgagtttgagctcaaggtgaagaagataaggagcgacaatgggtccgaattcaagaaccttcaagtggaagagttcttgaggaggangggatcaagcacgagttctccgctccctacacacc

SEQ ID NO: 37736 - DNA, 328 bp, Zea mays
  unsure (1)..(328): unsure at all n locations
acacattttcaccatttctgaagagaatatgtctcaagacaaaaaagttgttgctgaaacgaagctgagcgaagaggagaagctccttgacgagaagactgctggatttattgaatcaatagcaaagacaaacacagaaaagattactaaggagattctagaaggcttatctgaagatactaatgacagcgacagttatgatgcggaaagtgggggcgaagactccaaagatcggccctggcaaccaagtcatgcagttttcggaaaatcaactattaaacagagtcatcttgataatatgagaggaanggtatttcgagatatgtct

SEQ ID NO: 37737 - DNA, 458 bp, Zea mays
agcttaagcatatctatttgtgtaagtcacatattgagctgctcatgaggatgacttatgaagaagataccaatgcacatgaatatcaaaaccttcaagtggcatcaatatctacagagaaatgtccaggccaatattattccttcaattggtattcactaagtggtttctagatcaatcatacaattgatatcctttgagtggtacaagacttcaagtgatccacaaccttaagtgatcatcaactcaagagatcaactctctcctaaaataagttcatgcaagtgatgtcaaggatttttatcatgcatatggtgtccatcacaaacttattgagtactctcaagttgatataatattcacaagtacattttcccagaccttataacaccctttatggttattatgacaagggggagagatgaacaaaatatgtaatgtcaatcggacaaaatatg

SEQ ID NO: 37738 - DNA, 372 bp, Zea mays
cttccttatcgtcatcaaccttgacatagaaccattccgatttccaccctgctgcccatttgcttcgggagctgatcacaggatacttcgtagttttccgataagcaaaattatagcaaccaaaattctcatgtaatccatcctttctagcctttgtctgatagtgcagttcgtgaactcggcaaaagctgtccgcaaacggttccaccgcctggcttcggagtgcccaaatataaacattaagcctaacgatagcgttaggggttagctggtgaaaatagattccaaaattcttcaatatctctgcaataatcccatgaagggggaatcttaatccagcctttatgaagctcttaaaaataacaatatcat

SEQ ID NO: 37739 - DNA, 469 bp, Zea mays
acgacatgcttctgtgatatagttgactgatataagaaagcaagaggctcagttctatgcccacaaattgaaatatccaaagggggcgttgattctcaacggcagcggagaagaagacttcttgtattgtctcccagacagcaaggagatctgtgtctgtcgggagatggcaagaagcttcagattcccaacactataagacgggctctcagtgttgtcaaaagatgaattggccgacagcttatcgtacaacagcttataggtgagaaaataaacttttgtgtgcttaaaaatttgtgtgcttattatctaataccacattctttttgcacggccttattcttatcaatgccctcagagcgcagataagcgatgaagacgaaggatgtaccatggcgttgaataaccttcgttccgaagtgattgagctaacgaatgaatgtcttgagaaagataacatataaactca

SEQ ID NO: 37740 - DNA, 412 bp, Zea mays
  unsure (1)..(412): unsure at all n locations
gagctaaatattcttgattctaggaatttcttttgatgtcttgcatacatagcacattaatataccttggatcatgtctcttttacatgctatgactaatgtgttttcaagtgaatttcaaaccaagtcatagattgaaagggatttggagtcttcggcgaagacacaggcttccactccactccatcaagtattcacccttcgccgtcgctccgagcatctctccatctttggtataatcttcactcatattccgtttgccaaaggggagaaagtagtttgtaagggcttatatttcactcaagtatctgtttttggcgattcatgccaaagggggagaanaaattagtctaaagcaaaagcaaaaggaccgaccacaccaccaccaatttcaaaaatatgttcaaatgat

SEQ ID NO: 37741 - DNA, 465 bp, Zea mays
agcttagagaaatccgggataatcagcggtaatatccagccagtccaaggaaacttcgaacctgatgcacagtggttggcggtttccactctagaatatccttgactttgccgggatcaaccgcaatcccatttgcaaatagtacatgtcctagaaattggatttcctccagccaaaacgtgcacttgctgaatttagcatatagttgatgttctcttaagcgtgttaatatgatccgtagatgctgagcatgctcctcttcattcttggaatataccaagatatcatcaatgaagaccaccacaaatttgtccaactcaggcataaataccgagttcatcagatatgtgaagtgggcaggagcattcgttaatccgaaagacataaccaaatattcgaataattcgtaccgcgtagtaaatgcggtcttgggtatatctttgggtcggatacagatctgatgat

SEQ ID NO: 37742 - DNA, 386 bp, Zea mays
tggacgtgaaaagtgccttcctcaatggaccaatcattgaagaggtctatgttgagcaacctcccggctttgaagacagtatcctaaccatgtttataggctctctaaggcgctttatgggctcaagcaagtcccaagagcatggtatgaatgcctaagagatttccttattgctaatggcttcaaagtcggcaaggccgatcctacactctttactaaaactcttgaaaatgacttgtttgtatgccaaatttatgttgatgatattatatttgggtctactaacgagtctacatgtgaagagtttagtaggatcatgacacacaaattcgagatgtcgatgatgggggagttgaagtattttctaggattccaagtcaagcaac

SEQ ID NO: 37743 - DNA, 420 bp, Zea mays
  unsure (1)..(420): unsure at all n locations
agcttaaccaccatatatatctgctaccattggcgtctgatataactagctgggcgcgcgtagagtgttctatctgctgacatgagctaggagattctgcaacagctagctagcgtgcgaggccccgtttcaatctcacgggataaactttagcttcctgctaaactttagctatatgaattgaagtgctaaagtttagcttaaattatcaccattagctctcatgtttagattataaatgactaaaagtagctaaaaataagctgctaaagtttatctcgcgagattggaacaggcctgcctttagttaaaacccttgaggttntgataggcgcgcgaaagctgttgttgctacgtatatacgtctagcagtgagtgacgcgcagcagtcacttcttcacactgtntacacacgaattt

SEQ ID NO: 37744 - DNA, 336 bp, Zea mays
gattacttggctgcttatatctctaaagatggctctagagctaggcgcctttacaaatcgacggttataagcggctctagatccagacccctctaacaatctatttaaagcatgataaacatcataacaccaccaacatttatagtacgaatgtggaaatcatgttgctgggtgcaacgaacatatatatgatagtagacggtaatcatatccgaatctataatattcatacccgtggactcatacatgctggaataactactttactcaagccctcgctcatgatgaatgatactagccttgcctccgagcccctgatcgtgacttataacaccc

SEQ ID NO: 37745 - DNA, 408 bp, Zea mays
  unsure (1)..(408): unsure at all n locations
gtcacctgcggcatgcaagcttgttggcgtttcggacccagcgggttcttgttcttacgnagtaaattgncgctgcgtgcctctgcctatatgggttgccgcaagatggaacacaaggggaaagcacggctcgtgttatctcgcaccaggggggtgtgctcgtagtangggttacaagcgttcgcgagagagagagtgagcctgttcgttggctcgtccctctgtgcgaccctctcgcatgaatgccctggacctcccttttatagatgcaaggagagggtccacgtgtacaatgggggtgtagctatgcgctaacgtgtctggcagagaggtgcctgagccctgtgtacatgccaacgtggctgtcggagaggtgctagagctctgtgtacgcgataacgtggtcgt

SEQ ID NO: 37746 - DNA, 354 bp, Zea mays
aagcttacctggcacccgttctatcactgccagatattcatcctgtatttgtcgtcttctgggatgcctcaaggcaaggcttatggtgtgtgctaatgcagaacgagaaagtcattgcttacgcatcacgcctactcaagccgcacgagcagaattaccccacccatgatctggaattggcagccatagtgcatgccttaaagatatggaggcattacctaatcggaaataaatgccatattttcaccgatcacaagagtctgaggtacatattcactcaacctgatctcaacctccggcagcgaagatgggtagagcagatcaaggattatgacctcgaaattcactatcacc

SEQ ID NO: 37747 - DNA, 363 bp, Zea mays
  unsure (1)..(363): unsure at all n locations
gagctttatattatggtcgtgaaaagngcctttctcaatggaccaatcaaagaagaagtctatgttgagcaacctcccggctttgaagacagtgagtatcctaaccatgtgtgtagactctctaaggcgctttgtgggctcaagcaagccccaagagcatggtatgaatacctaagagattttcttattgctaatggattcaaagtcgaaaaagtcgatcctacactctttactataacacttgaaaatgatttatttgtatgccaaaattatgttgatgatatcatatatgggtctactaacgaatctacttgtgaagagtgtagtaggatcatgacacacaaattctagatgcctatgatg

SEQ ID NO: 37748 - DNA, 354 bp, Zea mays
aatactcacgctcgtgaagggtcttcatacacacatgtgcttatcggtgatgtctcagccagcccatgcaagtcttagtcattaagcatgcatctataccggcctcttcttttgcaaaaacgactaaataaagatggccgtctaatacacccttaaaagctagtgaaccatcacttcttctatagacagacacagttatatttgttaacagacagtcatatcccatattgcgccaattgactaacacagagctaatgatatccttgtgactcttctaaaaacacatcagagatagagtgcctcttagaaatatgcaatttacctaacccttttaccttgccttgatgcccatca

SEQ ID NO: 37749 - DNA, 442 bp, Zea mays
  unsure (1)..(442): unsure at all n locations
agctngcgaggagtatagtggcctttgctgttggctccctctatcatcactttgagtagagttatgaattgacctgacgtgcctcggatgaaatcttcctccgaagcccctggtcatttcagagaacctgaatgcttcctcccttctttggcggaagtcattgtcagctcgaatatactcatccatcttctggagcagcttctccaaagtttgtggtggcttcctggcaaagtattgcgctgaaggtcctggtcgaagtcccttaatcatggcctcaatgacaatttcattgggcactgttggcgcctgtgccctcagacgcagaaaccttcggacatacgcctgaaggtattcttcgtggtcctgggtacactggaataaagcttgagcggtaactggcttcgtctgaaacccttggaagctggttatcaacatatccttc

SEQ ID NO: 37750 - DNA, 479 bp, Zea mays
  unsure (1)..(479): unsure at all n locations
catgccagtatgccatgtgcttgaccagtagtgttagtgtcaactcctctctgcttctttctgttaggctgcagcgccgaagccattataacatatgacgctttttcttcctggcttctttgtaatttgcatgtcagcttcaagccaacagataaaatatgctatagagatgtttttcttttgtttcatgtgtgcatttgtgtttatgcccgtcggaagagaaatgggctaaaaaatgcagaaactttctaatggcgagtgaacttaccttactgatttgtgaactactgaagagcaatggtgctgataacgtgttagaaaccctttgataccgagtgtagtccaaaggcttcttaactcataaacacatgagacacaaagatatgcgaggaactagtattctcattcatctgttctgttcactggntacaataaatggtagtgtcatcctctatatatagtgcaaaagtagggtttcg

SEQ ID NO: 37751 - DNA, 437 bp, Zea mays
  unsure (1)..(437): unsure at all n locations
agcttctaaagggagaacacgtgatatgctttactaacgnacaatttgaataagatagaccttgtgcagcttgtccagcaagtaaacacgtgggaggagcgcatcacagcacgaatgtgatgaccacatcaagacccctggagttgctacatatggacctcttcggacccgtcgcctatctaagcataggaggaagtcagtatggtctagttattgttgatgacttttcccgcttcacttgggtattcttttcgcaggataagtctgaaacccaagggaccctcacgcgcttccaaaggagagctcataatgagtttgaactcaaagtgaagatgattagaagcgacagcgggtccgagttcaagagacttcacgtggaagagtttcttgaggaggaatggatcacacacgaattctacgctcctacacaccacaac

SEQ ID NO: 37752 - DNA, 343 bp, Zea mays
atcatatgccctatacaccagcgggacgatatgaatggccttcacaccacagtcgtgattctgtatggcttcgttccacatggtgatctccatctccaataatctgtacatcacgatgatctccatctccatgatataggtatgccatcctccaggtgatgagtccttcaagacctatctaacgcatgctggccaacaaactacatatacgctttggatcatcacatgttgacacgcacgtcattacattaaatttggacaatacatgtggctccagccatattgccctggtcacgacacgcaggtcgtgaataagtttgtaacatgcatcacatacacataa

SEQ ID NO: 37753 - DNA, 453 bp, Zea mays
  unsure (1)..(453): unsure at all n locations
agcttggctgtcttatgcggntagcaaatttttatntaattcctaaatttaacttggtcaaaaagtctaagtgccatgtgtgtgttgaatcaaaacaacccgcaagcctcacaaggctgctgaggcgaggagtttggcacctctagaacttgttcattctgatctgtgcgagatgaatggaattttgaccaaaggtggtaaaagatactttctcacttttatagatgactccactagattttgttatgtgtatctcttaaaaacaaaagatgaagcgttcaattattttaaggcctataaagctgaagtaagagaaccaacttgagaggaaaataaaacgtttaaggtccgaccgaagtagagaatatttctctaatgtgttcgatgagttctgcgtggaacatggtattattcatgagaggacaccgccattctcaccacaatccaatggga

SEQ ID NO: 37754 - DNA, 381 bp, Zea mays
  unsure (1)..(381): unsure at all n locations
ctgagatctagaatatttagttcattcctcaacatgcaaaagcgggtcttatcaagaggcttagtgaaaatatccgctaattgatcttccgacctcactccttctaaaatgatatctcctttagcaacatgatctctaaggaagtgatgacggatatcaatgtgcttggtgcgagagtgttgtacaggattattagcaattttaacagcactctcattgtcacacaacaaaggtaccttttctagaactacgccatagtctagaagaagttgttcattataaaatttgtgtgaacaagcacctgcggcaatgtattccgcttcnggcagtgacaaggcaacactattntgcttttttgatgtgcatgaaactagtgatcta

SEQ ID NO: 37755 - DNA, 381 bp, Zea mays
  unsure (1)..(381): unsure at all n locations
agcttgttcttcatctctgtcgntgtcgtcttacgccttccttttctcccaaagaggatctgtcgacgcttgctgttcctactcggtctgtggcaagggatagagcgtggacgctgatcgatggcggtggcagcgatccgaagcagaagggtacccaatccacgtgcggactcgccttccatggagactgcagacgccacaacgcggacgcgaatcgagggcggtggcgacaatctggggcagaggggtacctatcgcagatgcagattgatggccggtgcatcgaggggggaggaatgtgcccacagtgtggggcttgatgtggtccaatacngcagctacggtttcatatgaggccgacgcctttatcttcatatcaag

SEQ ID NO: 37756 - DNA, 328 bp, Zea mays
taagccttacacttccacttgatcatgacaagcactgatgtatttgtgtgtgctctctacgaggctctctcttgcgctagttaggttctaatcgctcgattatggctctgctaatcacctcactatgcaaatgtgccttgcaatctctagcaatgaataccaagtggttacgaaggcaagacactaaataagggtggtggtgcgggtatcaatagccacccaccaaaaaaaactagccattactgttctacacattttgcgagcacactagatcaggccgatgcgccatcgggccttccagtaacgttaaccaatggatggttctgac

SEQ ID NO: 37757 - DNA, 321 bp, Zea mays
  unsure (1)..(321): unsure at all n locations
agctngccagatctcccacgtcgaaaggctttctgcgcccgaatccaccaccagcaaagcccacacatcgttcctagctgtgctccgccaccgctagatgaagctccatcgtcgattgcgcctcacccaaggtgaatttcctcgccagacttctccttctccctccaccgttttctctgttccatcaattagccgtcggtgatcatcggtgatggcacctcgccgtcgttccaagacccccggccaaatgcaaccgccacgtgcccttcttcgcatgtgtggagtcgccagctccagccatggtgctcgcgccgagcgagt

SEQ ID NO: 37758 - DNA, 403 bp, Zea mays
  unsure (1)..(403): unsure at all n locations
aactgacctagctagatatttctcaatcgaactcttctatcacgccattttattggttcggtctggtatttaatgatgtgctctatggcctaaagtctggtcccttgtatggggtcttttgttacttggcaatcggcttcatcctccgtcgaatctaaggttcttattgaatccattcttgcttcttccggtgttattgcttcatcaccgaacagaagcttgaatggagtaaaccctgttgaccttgatgtagtggtgttgtggctccaaaccacttntattaactcgtctggccactttcctttcgacttgatgagattgactcattacttctgtattatgattccattgcctttctacaaccatttactctggtgctcctgatgcaaggattttggccatt

SEQ ID NO: 37759 - DNA, 332 bp, Zea mays
agctcgcttctgccatggatcaacggccgtttatagcgccatagcgtgcgtatcttggcgaggtcactgtgtacggtcgcttctctgctccaaatcctatcttttcgctgtgagttccaagtcaagatatggtcggggtagggagatagagaggggagaagtttgctgtgtcagccaagcccgaaccgagacaaaaggggtgtcaagtcgcgtctagcgccctacggtaggtgtcatctctcttcacggcgttctaagagtaatttggcgccattctgtcaattgggtctaagggttttgaaaaggggattaatgtgaacacgtggagtctt

SEQ ID NO: 37760 - DNA, 61 bp, Zea mays
gtctgcataacccttctgacgagcttgtgctttcttcatattatgaataattttctgaacc

SEQ ID NO: 37761 - DNA, 408 bp, Zea mays
  unsure (1)..(408): unsure at all n locations
agcttggtgccaatggagaagcagaaatccttgaagtcttggctgtcaaattgcttgccattgtcaactgtgagttcngacgggactccgaagcggcaaataatgttttgccagaagaatttctgggcagtcttcgatgttatcatggatacagccctcgcctcgatccatttggtaaaatactcgaaggcgacgaaggtgaacttgaggttcccctgngccgtgggtaggggcccgacaatgtccagaccccagcgctgaagaggccacgtgtgggcgattagctcgtgaattgtgaagggcttcccgagcgtggagaaaatttctggcaggcttcgcaggaccttgtgacccgatttgcggcgcagatcatggtgggccagtagaaaccttgacggattacctttg

SEQ ID NO: 37762 - DNA, 399 bp, Zea mays
agcttgctgaattcatgagaggtcatccccttgtgttcgctcactcttctgaccccatggatgtggaagattggttgtgtaccatggagcgggagttgcacaccgctcagtgtgacgatagggagaaagttctgtatggtccctgtctgttgagaggagcacccagtcttggtgggagttctatctcgccacccatgccaaccctgacaccatcacctgtgaggaattcagagacaatttccgccaataccatgtccccgcaggcctgatgtcagtgaacaaggaggagttcctggcgctcaagcaaggtcctatgtccgtcagtgagtaccgagacaaagttttgcagctgtcccgctatgctcctaaagttgtcaacaccgacgccaagcggtagta

SEQ ID NO: 37763 - DNA, 461 bp, Zea mays
  unsure (1)..(461): unsure at all n locations
ttaagtcacctgcggcatgcaagctgggncattttattgctaactgtcccgataatgatagtgaccaggagcaaggaaaaaatgggaatagagagaacaagaaggtttacaagcaagccaatggcgatacacaccttggaaaggagtgggattctgattgctcttcgtacgacttcgacgacgaaggactcgccgccactgtcttcaacaaatcggctctcttccccaacgagcatcacacttgcctcatggcaagggaaaagaaggtaatcactcgtaatgctaatacttatgattcttctagtaatgatgaatctagtgaggatgaaattgattactctagtttattcaagggattggatataactaagatagctaagattaatgagttgattgatgccttatatgaatatgatagaatcttagagaaacaagatgaccttttatatgaagaacatgat

SEQ ID NO: 37764 - DNA, 357 bp, Zea mays
agctcggccaaacaatgaaataataccctaatcattcctctcaggtgggatttcattaaggaattctgaaatctataactctgaatgttagaccttgagctcaagatcaagcgtgtacaccttgatccctaactcagatcctaatggtcccattgacaaaaacatgcataactaacctctctgtcttgtgccagaagatggcatccggacaagtgccttgacacgtaaaccagagatcttttcctgtgtgcgaaatgagaaaaatagattctccctcttatgtctaatcagcagcaaactgctacctcacactaaacaaaatgaacctggagaagaatctctcatgggacatggcat

SEQ ID NO: 37765 - DNA, 444 bp, Zea mays
  unsure (1)..(444): unsure at all n locations
agcgtgtgaagggtcttcattccaacaagtgctantctgcgatgccagagccagcccatgttagtcttagcgattaagcaagtgtcgagttcagctctatcaaaatctacaaagtatagctgaccctctaacactcccttaaatgctattgaatcatcacttcttctaaagacaggaacacctatatgcgtaaaaagacggttgtagcccattntacataattgagaaacggaaagcaaattgtaatctaaagaatctacaagacaaacattggaaatggaatggtcaggagatatagcaattttacccaatcctttgaccaaaccttgatttccatccccgaatgtgatcgctctttanggatcttggtttttctcataggaggagaacattttcttctcccttgtcatgtggtttgtgcacccgctatcgatgatccaactt

SEQ ID NO: 37766 - DNA, 371 bp, Zea mays
gctttctaaagctctctatgggcttaagcaatctccacgcgcttggtatgaaaggcttagggatttcttgctttccaaagacttcaaaaatgggaaggttgacactactctattcactaaaagaattggcaaagacttatctgtttgtcaaatctatgttgatgatattatttttggatctactaaccaattattttgtgaggaattcggaaaaatgatgtccaaagaatttgaaatgtctatgataggagaattgagcttctttcttggccttcaaatcaaacaattgaaagatggaatttttataagtcaatcaaaatatttgaaggacatgctcaagaagtttggtttataaaatgcaaagcctatca

SEQ ID NO: 37767 - DNA, 346 bp, Zea mays
  unsure (1)..(346): unsure at all n locations
ctcgacccgcgatacttaagtcacctgccgcatgcagcttctaagggagaacacagcttatgactatacaatcgtcattntgagaaagacaggatttgtagcgcatgccaagcatggaaacaaggtggctctcatcatccacataagaacataatgacgaccgataggccactggagctcctacacatggatctattcngcccgatcgcttacataagcatcggcgggagtaagtactggctagttattgtggatgattattctcgcttcacttgggtattctttttacaggaaaattctcanacccaagagactttaaagggattcttgagacgggctcaaaatg

SEQ ID NO: 37768 - DNA, 456 bp, Zea mays
  unsure (1)..(456): unsure at all n locations
agcttatgaagattcttcatcccaacatgtgctatacggcgatgccagagccagcccatgttagttttagcgattaagcatgcatctagatcgacattctcttttgagaaatcaactaaatagagcttgccgtctaatacacccttaaaagctaatgaaccatcacttctaaagacatatacatcaatatttgtaaataaacaattatagcccatatgacataattgacttacagacaacatattgtacccaagcaattctactagaaacacatttgaaattgaatgctcggcattgatgtctattttgcccaaacccttgaccttgcattggttcccatctacaaagatgatagtgtcttgggaatccttattcttggcgtaggaggtgaatcattttttctccnccgacatgtggtttgtgcatccactatcaatgatccagctatgcccccga

SEQ ID NO: 37769 - DNA, 245 bp, Zea mays
tagcgcatgctgaacacgaaagcaagtttgaatccatcatccacacaagaatataatgacgactgacaggcgcgcttgaactacaccacatggatctattccgaccgagccaatacataagcatcagcgggaggtagaactgcctagccactgcggaagactaatcacactacacgtgggtgtgcttcgtgcaggaaaaacctcacacccaaaagactttagagagaattctaaggggctcaaaa

SEQ ID NO: 37770 - DNA, 113 bp, Zea mays
cctctatgcaatgaccgaatccttacctgcgcagctgcttgcactggaccactaactgctacacttttttctctatgacgaggcacctggctcatcgcaaacaacaataactg

SEQ ID NO: 37771 - DNA, 424 bp, Zea mays
  unsure (1)..(424): unsure at all n locations
agcttgagtatgtgcttcaatagaggattgatgatgctcaaatggttgataagggcatgaagcatattcaagagtaaacggaagccggtaaagccacttgttttataaaggatgacccangagtgttatggttcaaagatcgtataatggtgcctaaggatgctgagctctgccagcagacgccgcgacgatttcaccaccaccatcaacagctgcgcaaaaacgcgccacggtccagcgatgtcccattcgcactgaaagtcgcctagaggggggtgaatagggcgaatctgaaattaaaatcttaagcacaactacaagccgngttagctgtagatatatgaacgagtccgagagagagggtgaaaaacaaattgcaagcaaataaagagtgagacttaaggatttgtttaccgaggttcgg

SEQ ID NO: 37772 - DNA, 471 bp, Zea mays
  unsure (1)..(471): unsure at all n locations
agcttggttcccgaagaaatgggaaatatcttaacacaaccaagcaaaaatggctagtcctcaagaaaaggcagaaatgggttcaacaccactatccaaaagttagagccaaaatggagcaaaagctggagcaaaagaactaaaagcaacactagtccctctataaagaggcaaatggctcaacacaaccagcaagaactccccttgacaagaataactccccccctaaaaaagcaactccccctaaagtacttaaaacctcaaagtaaagcatgcatcctaaaaggtgttggtcacttgttctcaaatgttgtgaatcaagaacaaagtaacacaattggtaaagatcaaggaccttcgtncttcgaaggcattgcctctctcggattaatgatcatcggacggaggtcatgaagacatgccttcatatgttataataataagaatcacgagaacaaccaatgaatacag

SEQ ID NO: 37773 - DNA, 438 bp, Zea mays
  unsure (1)..(438): unsure at all n locations
agcttctaaagggagaacacgtgataggtttgactaatgttcaattcgaaaaagatagaccttgtgcagcttgtcaagcagggaaacaggtgggaggctctcatcacaccaaaaatgtgatgacgacatcaagacccttggagatgctgcatatggacctcttcggacccgtagcctatctgagcataagaggaagtaagtatggcttagttattgttgatgacttttcccgcttcacttgggtgttctttntgcaggaaaagtccgaaaccaaagggaccctcaaacgcttcctcaggagagctcaaaatgagtttgagctcanagtgaagaagataaggagcgacaacggatccgagttcaagaaccttcaagtggaggagttccttgaagaggaagggatcaagcacgagttcttcgcttcctacacaccacaac

SEQ ID NO: 37774 - DNA, 393 bp, Zea mays
agcttaacgctataagagcgagcgagggtccattgggatgacctgtttgcctggtggtcgcgctgatccatgtacggagcacaattgctctgagtgcgaaatgcatccgcaccgcggcatatatgtcacatgcccttgcggatggctgctctggaattggctatgggtcgatcaaaatcaaaaaaaaggggggaaacgaagttactatacgcataaattaataatacacttgtatataaaaaaaattactatactagatcagatccgaacacatatagcaagggaagagaacgggtgcaaggacgtacctgagtggtgctcgtcgacggcgaaagacctcggactgtgcacctactgacgtaaggagcgcggcgtaatctagtggtctggatg

SEQ ID NO: 37775 - DNA, 425 bp, Zea mays
  unsure (1)..(425): unsure at all n locations
agcttaactntcagaaacttgaatagagtaacctgcatgggtcaatgacacacaaaaactgactcccaaaaagccacacgtgggaactgaggtaactctgcctcggagctgagactacacaaatacaaaagaaacacaacaccatggcaccgacacgacagaagcacatgatcaaagagcgagcacagtagcaagagggaaaacctgccaacagtataccatgatcccaccaccccaaaaaaataaacacaggcacaagtacatatacgcagaggaaaaacaaaccatacgagctgactgtggtaagtcctttagtaggaaaacaccaaatcagggaacaacaacattgttaacccacgaaaagtgcatccaaagaaatagatcaaaagtgttccatagcaaatgttgtgatgttatctctactg

SEQ ID NO: 37776 - DNA, 426 bp, Zea mays
  unsure (1)..(426): unsure at all n locations
agcttttgaagaaagtttgaatggccgtggggatgtctgtgccttcttaggtgctaagggaattgtggccattttggagaagtcaggttgcgatcatgtaaaagctttggcgcaaaccgaagctgctttatctattgaagatacaaaagacccctcggccgaagcaagcttagttggcggaaattttgttaccgatatctgggaaaatggtggccgagggatggcccactatattataaagaaaagcgaacaagatactcatgatgctatggaagtaacaaaggcagctgaaaagaccgaattcgagaggcagataggtattggctaatggcttttaactttatgttttatttntacgacttcaaatttatctacgttttctatcgcagccgaactatctcctcccctggagtccttcgaaccact

SEQ ID NO: 37777 - DNA, 286 bp, Zea mays
acttcggacctgatgaacaatggtcgggggttttcactccaaaatgtacttgactttgctggggtctaccgccatccctatggcagatagaacatgttccataaattgaatgtactccggccaacacacgcacttgctgaacttggcgtacaaatgatgttcccttatgcgcgttaatacgatccgtaaatgttgggcgcgctcctcttcatacttggaatatatcgaaatgtcatcaatgaagaccaccacaaacttgtctagcttgggcatgaacacctagttc

SEQ ID NO: 37778 - DNA, 312 bp, Zea mays
gtctcatattcctgaaattgtatacaacaatgcgaatactgtgaaggaacatctgccccctggtctaaatacttggcctcaaggagaaatgcatctctcttctggggggcaatattttgggaccttgtgcatggagtacaatcaccatgccttgctttaatcttatgaacaagtatacttcatgttaacaatatcgcttcatccatgataaatatggattagctgagtctatacacatgggctaaaaatggacataaaaattaatctacttgtaacctattgaatgaataatacctacaacattggaggctg

SEQ ID NO: 37779 - DNA, 404 bp, Zea mays
  unsure (1)..(404): unsure at all n locations
agcttcggatccttatccttacgacttttatatacatgacccggcacaacctgcgaatcacatgtgagtatgggccttctcgattccattgctgttaactttctaagacctanaaccaatgcttcatactcaactacgttatctgtgccactaagatcaaccttggctgcataaccaattttgtctttgtaaagtgagaccaacacagctgatcgctctgctacgaacgctaccaaaatccatagccgaacagtgtacatgcttcggcatctttagtttgttattcctcctgaggccgtgccgtccaatcaacaatgacatctgctaatgcctgagagtgggttgagatctatgaacatattgcatgaccaattcgatgagtctgcagccattttcaatcttca

SEQ ID NO: 37780 - DNA, 469 bp, Zea mays
  unsure (1)..(469): unsure at all n locations
agcttgaatgttcaaaatcaagaacttcaagtgcaacttgaaaattgcaagaacatcaatgcccccactttagtatttgaatctaagtctagctctaataataattcctgcaagcattgtgccaaatatcatgcttcttgttgtctaactaaccatgcaaggaaggatagcccacaggtgaaggtcaaagaaattttgaaaagatgctctagcaatgatgggttaaagaaagttgaacccaagtacaagtcccttaagcccaacaatggtagaagggggcttgggttcaactcatccaaggaaaaccctagcacagtgcataaggggtggagatcccccaagttcatagagggaaccactctatatgatgccttggggaggatccactcctcanatgacaagtcatctcaggtaaaggttaacttgagttcacaaagagaaaatgaatgaagtgtgatctcaagtgaca

SEQ ID NO: 37781 - DNA, 298 bp, Zea mays
agcttatgcaacatcgcttgatatgttgtggacgtatccaacgaagacctgaagaggcgccagtgtatattggaataattacgcgtcccgagaatgtgaagagaggtataggtctgccaactttgacgtggacatatgctgtgaagagagacctgaaggagtggaatattgataaagagctcgtcgcacatatgaaggtgtggaagagtgcaattcacgtgccataaccctgatttatagtttcgcttttactccttaatggattgaccttttcttgtgcccaatttagatcttgctg

SEQ ID NO: 37782 - DNA, 347 bp, Zea mays
  unsure (1)..(347): unsure at all n locations
agcttcagcaactggcactgtatctcttcaatcgctggaccacaatcaggagactgtctctcttcgggaggcccgaagccagaaaaggaaggctgtcaacccgacaccaccagaggacgagatagatcaagaaatcagagacatggagatgcttcatcaacaggtgcagaggaagaaagaanagatggccaagctagctgaactgcaaaggcagatagacgaagcctctgaagaagttcgtcatcttgcccaggatgagcagcaccgaaggcctcagcatcaagatcttcatcaggagggtgttcccaacgaagatgacttggatgacaatttcatcatgggaattt

SEQ ID NO: 37783 - DNA, 448 bp, Zea mays
  unsure (1)..(448): unsure at all n locations
agcttaatgcccttnaaagattgtctaattttgttaagggcaaggctgccatggttcaggataatgagggttacattttataccctgcaaactatcctaaacataagattaggaagattcatgctagaaaaccccacaatatttctcatcatgcatttatgtataaaaatgaggcttctagctctaggcataccactcacattaaaatgcctaagaagaaaattcctgctgcatcaaatgagcataatatttcatttaagacttttgatgcatcatatgtcttaactaacaaatcaggcaaagtaattgccaaatatgttggggcaaacacaaaagctccaaaacttgtgtttgggtacctaagaacaagggcctaaaattgtttggaggtttatgcatccggtggctcaaagtggataatcgatagcgggtgcacanaccacatgac

SEQ ID NO: 37784 - DNA, 249 bp, Zea mays
gcttgatgtccagctactggcccttggctttactcgtggtgttaatgagcatggcatatacactcgaggcaagggagaagcatgcctgatcttgggcgtatatgttgatgatatgatcatcacaggtggcgatacaagagctgtggcgaagttcaaggtgcacatgcagaagatctttaagatgagtgatcttgggctcctctcctattacttggggctcgagatcacccatggagcacaacggatcat

SEQ ID NO: 37785 - DNA, 448 bp, Zea mays
  unsure (1)..(448): unsure at all n locations
agctntaccctaaatagggattaaaggcgtattacttaacccaagttaagacaacctaaaagctctatggtaaaagtcataaaatgaccccaaaaataaagttgaatcacatttatacccctgtgataccataaaccctaattggaaccctggaaaaccctataaccaaaccctaggggcttatgtgcaaaattagcccacttttgggttaaagtgccaaaaacaagccaaataagtattttaagtcatttggttcacaaatatgtggacttgaaagccaaaccctaagttttggacttaaatgcaaaatggacctcatttgagttctattctaagtctgaaaatcagagaattggctccactatggggctttgtaactgtcaaagcataagagttttgccctangttaccacatcacagttgaagaccaatcatagaagaacaactt

SEQ ID NO: 37786 - DNA, 420 bp, Zea mays
  unsure (1)..(420): unsure at all n locations
agcttgctatangccttcttctttttctccatagcatgaaccttgctagaacactaccccacttaaaaagaatgagggtagaactcttgaatcttggggatttgaactccttgaagtacctcataacaagggtgttaccgggccttcttctactgttgctgcttgagcaagctgcggagaaatgactgacacagggttgattatgggacaaccttcttctcatattctcttcgctatcttcttttctcttctcacttttcactgcctctttctttctctttgctcttcccattggaggattctatcaaagagtatgaccatcatacagaggaggaaaccgaagactatgaaccatgcacaacagtcttcaacccaagaatcaccaagcattgtgatcttangggcgaaggagtggaaaat

SEQ ID NO: 37787 - DNA, 460 bp, Zea mays
  unsure (1)..(460): unsure at all n locations
agcttgcactcatagctcttttgaatacctctgatcatatctcctttatatgctatgactaatgtgttttcaagtcgatttcaaaccaagtcatatgtatattgaaaggaaattggagtcttctgcgaagacaaaggcttccactccgtaactcatgcttcgccatcactccgagcaactctctattctttgggggagaaatgagcatcaaggaaaagaacttcatccttgggggagagagtaaaagctcaaatacaaaaggacttcgtctttggtataatcttaactcatttatttattaccaaaggggaagattgcacttcaagggctctaatgattccgtttttggcgattcatgccaaaaagggggagaaatgagcccaaagcaaaaggaccgcaccaccaccaccaaattcaaaaacttagtgctttccaaaagtctntatcatttggtatccta

SEQ ID NO: 37788 - DNA, 453 bp, Zea mays
  unsure (1)..(453): unsure at all n locations
agctnttattccccccatatagtctgaggtcccaacagaatccgcagtgcggaaccggtaaatccggccggcatgtgcggaggacagantccgcgcgcgcgagttagctcccaggcttacggtgttgaagacgagactgacagtgggggccaccagtcagcgaaacgagaatgaaggagcgcgcgcggaattggctgcacgcgggccccacctgtcggttacatgacgcagcgcgcgcccaacactatcgagatgggccgacggggaaaagagaagtggtcaggtgggccgaattgtgcaggagcggcccangttagtgtttttcctttattcttttcctgctttcttattccaaatttctatttctatttccaaattcaactcagattntaggtttaaaattcaaaataaatttgaagtcaaaactccattatgaatgtgacaatatcttat

SEQ ID NO: 37789 - DNA, 327 bp, Zea mays
  unsure (1)..(327): unsure at all n locations
atttattntaatcaataaagcaaactacatctacattagtccatatttattcataaaaattagaatgtgcagaccgtcagtgaaaccattttatttaatagagaataattctatgaacattttgcaatttgaatcactaaatttggagttcatatgcaaaagttatgaaataaccaagttgggaattcaaaatatgaaattagggctacttctgtgaatatttaaaagtccagggctaaatctgcaagattacaggggtctgcgcgcgaaaaccaatgacgacgggttgatttcaagcaacccagggtctctttaagaaaactaccg

SEQ ID NO: 37790 - DNA, 368 bp, Zea mays
agctggctcctcgctttgctcggtgtgtcttcctcgggtactcccttgaccacaaagagtatcggtgtcttgacctcgccactcatcatttcttgatctttcgttacgtcaccttcggcgagacggatttccccttctcgactacctcccaaccccccactacatcccttcctgacttagaatttctccaggatcctgactctgtggcgccttctggtcagtcgccgtttggttttcctcctgcaggtccccttacactgtttcagccggtggccccggtgcccttcgtggctcctgcgcccccagactcccttcgtgcttacccgccgcccctcgccgactcgtgagccaccccgtcgccaccaact

SEQ ID NO: 37791 - DNA, 436 bp, Zea mays
  unsure (1)..(436): unsure at all n locations
agcttcagaggacaactgcgccgttctgaatgctcagcgtgacaaggctatggacaaagccattcacgcggtgcggatcttgatgaggaggcccancgtagtggttcctgatgacattgtcgccgatgtcaaggctgcacctgatgcctcgagtcaccctttntcctcgattgctcctgcaaaaaacattgccagcagagacgtttcgatgcagtgatatcctacgaaacactgaatgtactatgaattctatgtgcgtgtgatggttgtgttcgaatattttgtggatagggcactagaatgtgtccttggtgctgacaagtataacattatgttttcctggagtcctgattgttatgttgttagggtataacagtcatcctgaacaattgtgaaagtaaatgtggcgtgctggttatggaactttttctgactt

SEQ ID NO: 37792 - DNA, 426 bp, Zea mays
agcttcaccgggatctgaccccatcacggtctctcctccccctcggtggaccaggattgctcttgtgcatgctgccaagcaacaccgccaggctcctcttcggcgcgtcctttttccttttttatcgcacatcccgcatgtgcgttttttttacttttcccttttttgcacgggatgaagtaactctgtgtgagttttttcgtacgatggtattcgttggtaataaatgaatgttcgacagtaataatcaagtatttcttctgtaataaacgtacgatctttcagtaacaaaccttacgttcggaaacaagcttgacttttgtctgtagttttcgaaaaaactgtcagtaataattggacgtttcttgagtaacaaaccatacgttctttgtagtactttgaaaaaccgtgggtaatatccgaacg

SEQ ID NO: 37793 - DNA, 302 bp, Zea mays
  unsure (1)..(302): unsure at all n locations
gctcacttgtttggcttgaataagcatgtggtaaaggcgtctaaatgatccattttctggctgtgcaaatgcaagcaaatcaactgaaatttggaacgtcaaactgacctctctaggttttgtaaatttcacagaaaataaccctgttataccatcacggcagggcgcttactcgatttcttaacaaaaccctcgtgactttgaaacaggtcaattctcgtatgcaaatgaaacgatattttttcngcattctttaataaacttaaaaaatacgaacctctttattaaggaatcactgattt

SEQ ID NO: 37794 - DNA, 475 bp, Zea mays
  unsure (1)..(475): unsure at all n locations
agcttctaaagggagaacacattttgggactaacaaatgttctatttgagaaagacagggtttgtagcgcatgccaagtangaaagcaagttggcacccaccatccacacaagaacatcatgacgaccgacaggccgcttgagctactccacatggatttattcggcccgattgcttacataaacatcggcgggagtaagtattgtcttgtaattgtggatgactattctcgcttcacttgggtattcttttcgcaggaaaatctcaaactgaagagactttaaagggattcttgacacgagctcaaaatgagttcagattaaggatcaagaagataagaagaggcaacgggacggagttcaagaactctcaaattgaaggttntcttgaggaggagggcatcaagcataagttctcttctccctacacaccccaacanaatggtgtagtggagaggaaaaatagaactctactg

SEQ ID NO: 37795 - DNA, 455 bp, Zea mays
agctttatcaaatggacgtgaaaagtgcctttctcaatggaccaatcaaggaagaggtctatgttgagcaacctcccggctttgaagatagtgagtatcctcaccacgtctataaactctctaaggcgctttatgggctcaagcaagccccaagagcatggtatgaatgccttagagatttccttattgctaatggcttcaaagtcggaaaggccgatcctactttattcactaaaactcttgaaaataacctgtttgtatgccaagtttatgttgatgatattatatttgggtctactaacgagtctacatgtgaagaatttagtaggatcatgacacaaaagttcgagatgtctatgatgggggagttgaagtacttcttgggatttcaagtaaagcaactccaagagggcaccttcattagccaaacgaagtatactcaagacattctaaac

SEQ ID NO: 37796 - DNA, 383 bp, Zea mays
  unsure (1)..(383): unsure at all n locations
agcttgcccgatcttgaaccgaggacccgcgccactggaatagcgcaatcgtactcaccggagttcggaaccccgccggagcacatggaccgagtaaacctctgcaccatttctcaattcgttgcacgcatggcctctacatcaccccgtggcaatcgtactcaccgtgctctactgccgccggtaagcctcgccgctgtaatctttgccgtgggtactatttaagccagccagggagcgcgggttatatttcggctaagttcagggggttntgtgcaatgttagtgactcgtgcaaatagtagaccgaggactgttttgtgagagaaaaaggagagaaaatccaaggggttctgtagggcccaaatttgtatagggaaaaaa

SEQ ID NO: 37797 - DNA, 450 bp, Zea mays
  unsure (1)..(450): unsure at all n locations
agctttttcggcggcatgacgaaggtgatgcttgccgaaggtattcaaagctcaagaaatggaagtgagttcaccggaggtgggcgccaatgttggggacttgttctcaaatgctatgaatcaagaacaaggcaacataaaatgttaaatatcaaagcccttcgtcctttgaatcattattccccttcggatataatgaatctaggacgaaggtcatgaaggacataccttcatgatcatgatgaagaaatggacaatattcatccaaagtataaggagtaacataatttatatgaacatgattatcaacctatttttatttatatcactttgtgtgaacaataataaatgtaagtgtaccttcgacttgaaggaagtagaatacacgtgtgactcanaagtaaatgccaagtcagcgtgtccagtacgagaatactgttcacctattta

SEQ ID NO: 37798 - DNA, 461 bp, Zea mays
  unsure (1)..(461): unsure at all n locations
agcttcttgtagaagggataacacagtgcgctgcttggcacgggcgcactgttagccagcagacccagcaggcgcgccgcctgctggatgaccttgacgccacctgccagcggatgggacgagacgcattaaatgctgagagggcacgtcgcccatcagcgcagtggcaggcggcgcgtcctctcctcaataaatacaggggttgcacggctntatgtcaggctcggcccaatggcttatgtcatgggccacaagcagcgggtctccgcctgagcgggaagtgaagggcaaggcctaaacacgtgtcagcaccggacccctacttatgccagggtcctcctcgttccgggaccttgcagaggttcggaccttactcggaggctccggacttatacgtataggggtctggtgtccttctgtggaggtccggaccccacgatacatactgggatgtgtagtct

SEQ ID NO: 37799 - DNA, 363 bp, Zea mays
  unsure (1)..(363): unsure at all n locations
gctttaaaggttaatcttcacctataagaaagattaggaatgctcaaggcaaaggtatggaacaaattacttcaattgatagttgatcaatagtagctccttccaagtgacattctttcaattggtaataatatattctatggaaaggaatgccaatatgaaggttaaattccttttggcttaaatttgtaaattagtgcatattgtgaattcacttgctcatgtgcattaacttaaaaggaatttaatttatgcctttacgcctcataaatgatgaattgtttgccattcatatatagatatcatcattcattaaatacttncttgtactactaataccacctttcaaagtgttntatcgac

SEQ ID NO: 37800 - DNA, 468 bp, Zea mays
agcttgtgaaggttcttcatccccacatgtgctaagcggcgatgccacagccagcccatgctagtcttagctattaagcatgcatctagaccggcctcttcttttgcaaaatcaactaaataaagtttgccgtctaatacacccttaaaagctagtgaaccatcacttcttctaaagacagacacatctacatttgtaaatagacagttataccccatgttgcataattgactaacagatagcaaattatatcccaaagactcaactaaaaacacattagaaattgagtgctcattagaaattgcaattttacctaacccttttaccttgccttgattcccatcaccgaatataattgaatcttgggaatccttattcttgacgtaggaggtgaacatcttcttctcccccgtcatatgggttgtgcatccgctatcaataatccagcttgaaccccggatgcataaa

SEQ ID NO: 37801 - DNA, 467 bp, Zea mays
  unsure (1)..(467): unsure at all n locations
gtcacctgcggcatgcaagcttagtgcaagcgtgtggaatggaaagactacatttctttgtgtatgtatggcttgagtgaagggcaaggtggaacggagggaaaacgggaggatgcgcgcggcgacnggcggcaaggctgttcagccttgcgtctgggctgaaaacaaggtgttcgccatggcgcacgggccgaaaacggaggctcgggcaccaacctcaaaataagctaagttcaagcatgtggaaagacaccgaacatacagtgtatgtctttggtgaagggcacagtggaacggagggaaaactacacggaggcacgcggcgacgggcggcatggctgttcggccttgctgttgggctgaaaacgaggcgttcgccatgtcgcgcgggcccaaaacaactgttcggccacggcctctaaaataagctaagttcaagcgcgtataaagacacccaaactaatgtg

SEQ ID NO: 37802 - DNA, 464 bp, Zea mays
agcttagagggtggatagtcggactcctcgcatctagcttatcttttgcacccttggggtactaggctagatagagttgagtcattttggaacaatttgatgtaaccgtgttaaactctcttgggagcttaattgatggatgcttttatcagtctaaatttggaaggaaaaatttatgcctcgtaaaaatcccttttgttgaagtcggagtctatcatgctgttttaactttgtcctcgtgataaaaatcttgaaatttggaattgtggtgttaagtaagcatgtggtttttcagatggccgggaggcagcgtcgtggccagaacgagcgcgttccttcaccgtcaccaccaccttccactctgcaggagctcatggctcagcagaatgagatcctgaggcagctggctcaacgtcagccaccacctcagcattatggtggtggggaccaccaacgtcaccccg

SEQ ID NO: 37803 - DNA, 475 bp, Zea mays
  unsure (1)..(475): unsure at all n locations
agctttaatgcacaatttctcgccctttgtcataaatcccaaaaaaggataaaaagaatataaaggatagaaattatgattaagagagatatgaacacactatcatgaaaggggtccttatatggcacaaaggtaatggataagtgtcataagtgatgtacctttgcgttttacctttttaagggggtgttccaaacttgtgttggacttacaattcattngcaagctcttgttggcataattgtggcataggtccaagatatcaaatgaagattgtcatactaactgaaagataaatcttgatacctggagtctagatgtcacctagcattttcttatcacaacaagaggcaacataaaaattgcacaagtatggattatgcaactagtgatcatgtatganaaatatcaatttgaaaacaccaattgatacaatttgatagataaatagatcactaatagcatattacactaa

SEQ ID NO: 37804 - DNA, 399 bp, Zea mays
  unsure (1)..(399): unsure at all n locations
agcttctagtggaggaacgatatattnttatttactcatttttatccacaaaattcttattttcttctcttttctaaattctacaattccttttggattttaaattccacttttgactttaatatttttcttgtcacatttattattttattttgtcaccatgtgcacacaaaagaaaatcccagcatgatgcaaaattttaatggcatatattctttttattaattatttgcttttgaatatggtgttcacatgggatgatgcataaagatcaaactcacataaatagaaattgtttcactattggtattatttctagcaaattacaaagtgggtgttacaaatcctacccccttaaaaataatctcgtcctcgagaattgtaagaaaaaggattata

SEQ ID NO: 37805 - DNA, 459 bp, Zea mays
  unsure (1)..(459): unsure at all n locations
agctntatcaaatggacgtgaaaagtgcctttctctatggaccaatcaagaaggaggtctatgttgagcaacctctcggctttgaagatagtgagtacccaaaccatgtgtataaactctgtaaggcgctttatgagctcaagcaagccccaagagcatggtatgaatgcctaagagattttcttatcactaatggcttcaaagtgggagtcggtaaagctgatcctacactctttactaaaaccattgcaaatgatttgtttgtatgccaaatttatgttgatgatataatatttgggtctactaacaaatctacttgtgaagagtttagtatgattatgattcaaaaattcgagatgtctatgatgggggagttgaagtatttcttatgatttcaagtcaaacaacttcaagagggcaccttcattagccaaatgaagtacactcaagtcatactca

SEQ ID NO: 37806 - DNA, 464 bp, Zea mays
  unsure (1)..(464): unsure at all n locations
agctngaagctacattaggcattaatttgttcttggttcttggcgtcggaagatccacaattctcggccgcaatactgtcagtgatggtaatttgtgatagaaatatgaagatcttgtagagacctattgtatcctctctactcctgatgatttcttcgtatgagagcagtaatatctgttgttgaagatggatcctggcggacaccactcctattttcattcttgccaagcagttatcatcatttgcttcatcaaaagctagttatatggtgattttcccagataaaatgaattcttggccatgtctgttctattccaaagcttctctttntgctgaacaataaagagatcgaaataatgctatatagaacaaattgtgttataatatgaggagaaatgtttgccttgctggcagcatcacaatttattactattgttataattctctctcaaatataatcct

SEQ ID NO: 37807 - DNA, 234 bp, Zea mays
ctcactacggaaaattgtgcccatgattcacttctggtacccaagagaactctttattatcactattcaatgcatatgtataaatttgaagggaccctaatagtcaccctactcctgttatcccgtataccttgtatacccctgattcactagggttgatatgctatagccttacttggttttgagactgatatataattatatccatgttcccagtatcattgtaatatattt

SEQ ID NO: 37808 - DNA, 447 bp, Zea mays
  unsure (1)..(447): unsure at all n locations
tgcaagcttgaaggccaagtcaaaaagcaagcccctatatactttgtatccgaagttcttagtttatcaaagaaaaattatacagaattggagaaggtgctgtatgctgttttgatggcctccaggaagcttcggcactatnttcaagcatacaatataattgtcccttcttcacaaccattgaaggatattatgagaaatagagaagctactggaagggttggaaaatgggctgtggaactcaatgaattttgcattgattatgtgcatagatcttcgattcagtcccaagcgttagcagacttcattgctgactggacgccaggggcttatgaagaagaaacgagtaaagatgccgaagtttggacagtattttgcgatggttctttgggaaccttcngagcaagagcagttgctgtgttggtccaccttcaaagtaaaacttgt

SEQ ID NO: 37809 - DNA, 452 bp, Zea mays
  unsure (1)..(452): unsure at all n locations
agctntgattgtngcattcaagtcgttgcatagtgcttatgagtgtaaaaaggtntttttcaaactacatcgaattatcttgatcttgtttccggagactttcgggaacccttgaaacgtttcttcgagtattaaaatatgaatttttagttttgctaatattaatttaatacctaaaatttcgtatttgcgaaaacaacaaaatcttggaaactcgataatatatatacgttcctctcgtcgagcctgttccagatctcgtgtccttttcgcgggatcattaaaatatctttcctcgcaaacgacatgctgctccgttggctatccccatctatccctgtctacccctccgacgtctatctcatcgccttggacccgcgggtcagctttggtcgtttcctctaatttatccaatcgtgctaccactcatgcgactcagtctncgtcttaca

SEQ ID NO: 37810 - DNA, 412 bp, Zea mays
  unsure (1)..(412): unsure at all n locations
agctntgggcacacacttgaagttcagcccatcttatcacccgcagacagatggtcaaacagagagaaccaaccagattcttgaagacatgttgagggcttgtgctttgcaagacaagataggttgggacaagaggctaccgtatgcagaattctcttacaacaacagctatcaagccagtctgaagatgtcaccattcgaagcgctttacgggaggaatngcagaactccattgcattgggaccaactcggcgaaaggcaggtgttcggtccagatattttgcttgaagccaaagagaacatcacaatggtccgagagaatctgaaggcagcgcagcccagatagcgaagctatgctgacacccgaagaagagaactaagctttgaagtatgagactatgtctacttaaag

SEQ ID NO: 37811 - DNA, 449 bp, Zea mays
agcttctaaagggagaacacgtgataggtctaactaatgtatattttcaaaaagatagaccttgtgcagcttgtcgagcaggtaaacaggtgggaagctctcatcatgccaaaaatgtgatgacaacatcaagacccctggagttacttcatatggacctcttcggacccgtcgcctatctaagcataggaggaagtaagtatggtcttgttatagttgatgatttttcccgcttcacttgggtattctttttgcagtataaatctaaaacccaagggaccctcaagcgcttcctaaggagagcccaaaacgagtttgagctcaaagtgaagaagataaggagcgacaatgggtccgagttcaagaaccttcaagtggaggagtatcttgaggaggaaggaatcaagcacgagttctccgctccctacacaccacaacaaaatggtgtg

SEQ ID NO: 37812 - DNA, 505 bp, Zea mays
  unsure (1)..(505): unsure at all n locations
catgcaagcttcacattaagntcttgcttatcattggtcatactgttctaaaatggcaagacaagcctcgtatttaattactgccattttaagcttcggcgtactggcaataaagccttctagttgccatgaagctacgaagattcttcttcttcaatatggagctcgattgctacttttcatttgtgctcatcgtaaattttcacattataaaccgtcgagtgtctttgtcgtccagcatcctgctggatatttcaaagcgcttactcaacagcatactctgcacataaataaccttcagtagaaatgtcttcattattaaaaacaataaaagtcatgagaaaagtggttcaccttgaaattggaataaaataaactaccatcgatatgttggcggcgggagcgggaatatcctgttccagcttcggaaaaccgatgctcttttatagagtaccgatattttatctcctgctgggtcccgatccagctaatttgtatcgtgata

SEQ ID NO: 37813 - DNA, 468 bp, Zea mays
  unsure (1)..(468): unsure at all n locations
ggatccttaagtcacctgaggcatgcaagcttctaagggagaacacgtgataggtcttacttacgttcaattcgaaaaagatagaccttgtgcagcttgtcaagcaagtaaacaagtgggaggagcgcatcacaacaagaatgtgatgaccacttcaagacccctggagctgctgcatatggacctcttcggacccgtcgcctatctgagcataggagggagtaagtatggtctagttattgttgatgacttttcccgcttcacttgggtgttctttttgcaggataagtctgaaacccaagggaccctcaagcgcttcctcaggagagctcaaaatgagtttgagctcaaagtgaagaagataaggagcgacaacgggtccgagttcaagaaccttcaagtggaggagttcctttgagaggaagggatcaaacacgagttcttcgctccctacacaccacancaaaa

SEQ ID NO: 37814 - DNA, 314 bp, Zea mays
ccaaggatttcacatgatcgcagcctctactgtccaaaatagtggcagataccctatcacccgagaaggcacatatgtcttcgcggccattcaacacttcctcataagcttcggcttcggggctggtccattcaattgggccctccgggtcgacctgtatgaatattttcttgcttgaatacgcgccaacgatggcgaaactaggttttattttcttaacacactctatagactttatataacacctttccttggatgcacgaagatcttcaacatttttctctaaatgagttgttcattgatcatagatctct

SEQ ID NO: 37815 - DNA, 341 bp, Zea mays
  unsure (1)..(341): unsure at all n locations
tctggcgtccttatctatttcattgattagatcgcatatggtgacgagttacattatgtgtgaaggagttgggaagttgtgacctatctccatacactattgataggcaaatcataatcataaattggaaaaaatgcttgtagcacgtttcactttctatctatccttaccaccccttatgggcagacaccacatgtaaatagcatgttagtgtttcccgtgtgaaacctataacctaacttttaatgctagtgactcaatntctatttatcctgtgagatctatctttctgaggaccaaggccattaaagtagaggtacccctgctctgtctatatccta

SEQ ID NO: 37816 - DNA, 460 bp, Zea mays
gcaagctttaaatagtttaggatgatgcatattctatgctatattaaatataataacattacattgttgaccggtcatagatataaattttacgctcttcatcctaaattaaaatttattttatctttttaatagatttatactatatgttctatatatatatctagttcataatcattcactagccgggtaccatgagtagctaccggtgtttatatgatttgcatcgtcgatcacattcacggacaacgacgacgggacagagttagctcgtgggccatgaccccacaccttatcaccaataattcacagctttgcatcggagcccactcggcctctggcttccttttttggagactttcgtagcagcatcatgtgtggtttgccctcattgtcagcattgcgatacagccatgtttgaaagccatttctacttatgtgagaaatcaaactctagcct

SEQ ID NO: 37817 - DNA, 317 bp, Zea mays
  unsure (1)..(317): unsure at all n locations
gagcttctaaagggagaacacatcttatgactttctaatgttcattntgagaaagacaagatttgtagcgcatgccaagtatgaaagccagttggttctcatcatccgcataagaacataatgacgaccgacaggccactggagctcctacacatggatctattcggcccgatcgcttacataagcatcggcgggaggaagaactgtctagttattgtggatgaatattctcgcttcacttgggtattctttttgcaggaaaaatctctaacccaagagaccttaaaaggattcttaagacgggctcaaaatgagtt

SEQ ID NO: 37818 - DNA, 357 bp, Zea mays
cgacccgggatactctaagctacctgcggcatgcaagcttctaaagggagaacacgtgatatgtcttaccaatgttcatttcgaagaagatagaccttgtgcagcttgtcaagcaaggaaacaggtgggaagctctcatcacaccaaaaatgtgatgacaacatcaagacccctggagctgctacatatggacctcttcggacccgtcgcctatctgagcataagaggaagtaagtatggtctagttatacgtgatgactattcccgcttcacttgggtgttctttttgcaggataagtctgaaacccaagggaccctcaagcgcttcctcaggagagctcataatgagattgagct

SEQ ID NO: 37819 - DNA, 444 bp, Zea mays
  unsure (1)..(444): unsure at all n locations
agcttctaaagggagagcacattntatgacttacaaatgttcattttgagaaagacaggatgtgtagcgcatgccaagccgggaagcaagttggcactcatcatccacacaaaaacatcatgacaagtgacaggccactggagctcctacacatggacctattcggcccgatcgcttacataagcatcggcgggagtaagtactgtctagttattgtggatgattattctcgcttcacttgggtgttctttttgcaggaaaaatctcatacccaagagaccttaaagggattctcgagacgggctcaaaatgagttcggcttaaggatcaagaaaattataagcgacaacgggacggagttcaagaactctaaaattgaaagctttcttgaggaggagggcatcaagcatgagttctcttctccctacaccccacaacaaaatg

SEQ ID NO: 37820 - DNA, 470 bp, Zea mays
agcttgacaatgaggaaatggcgctcgtcatctagatcttccaccaaatcctcaagcaaaggagagggaaagactacaagtcccgctccaagaaagtttgctacaagtgtggtaagctgcgagcacctagaggggggggggtgaataggtgatcctgcgaaaacttagacttatagccacaaaaacttgttaagtgttagcacaattattgccaagtggctagagaggagtctcaacaacacacagtaccacaagagatcaaacacagagagaacacagtggtttaacccgtggttcggccaagaccaacgcttgcctactccacgttgtggcgtcccaacggacgagggttgcaatcaacccctctcaagcggtccatagaccaacttgaataccacggtgtgttgctttgcctttcaatattcccgttgcgaggaatctccacaacttggagtctctccccttacact

SEQ ID NO: 37821 - DNA, 418 bp, Zea mays
agcttgtggaggttcttcatccccacatgtgctaagcggcgatgccacaaccagcccatgcaagtcttagccattaagcatgcatctagaccggcctcttcttttgtaaaatcaactaagtaaagtttgtcgtctagtacacccttaaaagctagtgaaccatcacatcttctaaagacagacacatctacatttgtaaataaacaattatatcccatattacataattgactgacagatagtaaattatatccaagagactcaactaaaaacacattagagatagagtgctcattagatattgcaatcttgcctaaacctttcaccttgccttggttcccatcaccgaatatgattgaatcttgggaatccttattcttgacgtaggaggtgaacatcttcttctcccctgtcatat

SEQ ID NO: 37822 - DNA, 388 bp, Zea mays
ctcaaagaatagcatgctattattgtgacacacgccgatcttctcatatgtcatcccaagaccagccaacatcttctttgcgaaggacataatctctggcaacttatgattctcccggagaacctcgcccataagatggacgatgtcgttgtaagcactgtttgaaatgatgtgctccgactttatcgccattatgcttgtgagaggcccaagaactgacatctgagtgtgctcgtgcagtctcacttctcccgccgcgagtagccggaagaatatctgagcatcgcgcggaagcttgcccggctcctcaacgatcaatttaaactccctaccaagatcatgcgacatatgcgccatactataatgaacagcatcaagctccacctcc

SEQ ID NO: 37823 - DNA, 249 bp, Zea mays
ggaaaacgctctgtaagaagaaaacaaaagctctaccttgcccagatctgaatatccaaaggggccttatattcacgacagcggaaaaaggatttttgtattgtctccagacagcacgggatatttgctgccggaagagacataacttcgattccaacattaaaatgggctttagtctatcagagagaattggcacacttacatataacactaaaggtgaaacaattttgatcttaaaacgaatgtatt

SEQ ID NO: 37824 - DNA, 408 bp, Zea mays
gcgtgcgagcttgtgataacactacaagaatattgcattatcactgctcgagcacgtacataacttcttttcacacacttctatccaaacactggtgggatatttcattcctaccagctccttttgattggctccctccatgtccacgttgggcgacatctacctctcttcacattattgcccacacgtatgatgcctttatacaccggtgcctctatgggtttccattggacatgtccaaaccaactcaaccggtgttagataagcttttctttaatcataccaaccagtgttaaatatatatgtagaaaaaattaatctataaagcgtagcttgtgataaaatatcctctaacctacactctctagagaatgtctttaaatataatagacgaaaactcaacctata

SEQ ID NO: 37825 - DNA, 411 bp, Zea mays
taaagacaacaacttcatcattctttggctccagaatcacttcctcgctagcaaaacgaattagtttactctcagcctccccaaagtagcccaatttcttcatcataaccatatcgtctgctgtcacagtagacttaccaaattcaagggggctaggtttcgctgggctcaagatagtgtaatcctcttcatcttcattatcactccctccaactgcgatctgttcagctttagcaatcgaggtaccttcggcaacagcctcctctggcacaacaacacctgattgcttcatcacttctgagatgggcgctgtttcggcaacttgggcttcgtctccctcatgagacactctagcagtggatcgtactctgaccatttcagtgtttacgcttttttgaacaaagttgatct

SEQ ID NO: 37826 - DNA, 437 bp, Zea mays
agcttaaagccatggtaagtagcatatgcttatttatgcgaatggactcaagcctagctacgggtgcataggttacaccgaaatccaaaccttcgacttgggagtatcccttggccacaagtcgagctttgttccttgtcaccacaccatgctcgtcttgcttgttgcggaaaacccatttggttcctacaacattttggttaggacgtggaactaaatgccatacctcatttctagtgaaattgttgagctcctcttgcatcgccaccacccaatccgaatcttggagtgcttcctctaccctgtgtggttcaatagaggaaacaaacgagtaatgttcacataaatgtgcaacacgagatcgagtagttacccccttattaatgtcgccgaggatggagtcgacagggtgatctccttggattgcttggaggact

SEQ ID NO: 37827 - DNA, 502 bp, Zea mays
  unsure (1)..(502): unsure at all n locations
ctcgacccgngatccttaagtcacctgcggcatgcaagcttatgacaaattacacagacgtttatgctcttttgcaagtatatttatgatactttctggaagttgtcaaatgaacacaggaatcacatttacacaaggaaatatttgtatcttatggtcttctacactctaccagatgaatcatcatctccgacatccaccgttcattttttcgacattgatgtctcattccattgcggggctgcagctatgattttgttccttgaaccaggaggccgtcctcgcttacgtccagataggttagccaatcgaaccctattatcctcgacagttaaacacgtacggctgttgtgaccatcagctatgccacatttctggcatttcctgttcatcttgttagctccttttngcacccaatttaaaacttggtgctcactacttttgattgttcttcccttaggcttggccttatctggtcttggctaagttacaccttncatat

SEQ ID NO: 37828 - DNA, 346 bp, Zea mays
agcttgatgttgctatggctctcttgttggaagtcaatgccatccttaatgctagggcgtctcccattataaagcatactacgagcaaatttaaaattttcattctctagttcatgctcgataattgtagcatttaatttggctatgtgatcattttgttctttaatcatagcaaggtgatcattcataacatcaatattaacatctctacatctagtgcacatagtgacatgctcaacagtagatgtagaaacattgctagcattcatttctttaaccttagcaattaaactagcgttctcagttctaagacaagagaatgaattattgcaaatattaagctctt

SEQ ID NO: 37829 - DNA, 460 bp, Zea mays
  unsure (1)..(460): unsure at all n locations
agctngacattgtctcccttttggaagccaatgccatccttaatgcttgggcatctcccattatagagcatactacgagcaaatttaaatttttcattctctaattcatgcttggcaattttagcatctaattttgctatatgatcattttgttgtttaatcatagcaatgtgatcatggatagcatcaacattaacatctctacatctagtgcaaatagatacatgactaacagtagatgtagagggtttgcaagcattcagttcatcaatcttagcatgtaacatgatattttcatttctaagattggaaacaatatcattgcaaacatttaaattcttagccttagcaattaatttttcattctcaattntaaggctagagagtgatgcatttaacttgtcaatcttagtaatcaaactagcatttatcattctaagactagcaatngaatcatcac

SEQ ID NO: 37830 - DNA, 435 bp, Zea mays
  unsure (1)..(435): unsure at all n locations
agcttaatgcctctaagaaattatactaattttttaatggtaaagctcccatggtttaggatagtgagggttacattttatatcatgcaaactatcccgaacacaaaattaagaagattcatgctaggaaacctcacaatgtttctcatcatgcattcatgtataaaaatgaggcttctagctctaggcatactactcatattaaaatgcctaaaacgaaaattcctaatgcatcaaacgagcataatgtttcatttaagatgtttgatgcttcctatgttttaactaacaaatcangcaaagtggttgccaaatatgttggggggcaaacacaagagtccaaagactttgtgttgggtacccaaggtgctagtttctaatgtgaaaggacccaataccatntgggtacctaagaacaagggcctaaattgttta

SEQ ID NO: 37831 - DNA, 453 bp, Zea mays
  unsure (1)..(453): unsure at all n locations
agctntagttgattcagagtcccttgctggattatccccaggtttaacttttccatttcttgacataaagtgttttcggaggtctttgctataagacagtggcaggaagtcttacgactcaatgcatctgccaccacattggccttgcctgggtgataatggatttccagttcatagtctttaatgagctcaagccatcgtctttgcctcatattcaactctgactgggtaaagatgtacttcaaacttttatgatctgtatatatgtgacagatattacccagcagataatgacgccaaatctttatggcatgaaccacagcagctagctccagatcatgagttggatagtgcttctcatgccggcgcaactgccttgaagcatacgcaatcactcggccctcttgcatcagtacacagccgagcccactgccagaggcatcacaatataca

SEQ ID NO: 37832 - DNA, 232 bp, Zea mays
agcccgttagagagaaagagagaagggggggagaagacggaggcaaccggaacagggagggaaaaaagggaaagcattaagtgaccgcggcaccgcccacgcccagggacgaaacgggaacagcccaacgggcaacaaggggcaactgatgcaacgcagggacaacgaaaagagaggccacagaaggcgagcgaccgcgcacaaggagcccaggaaagaacaggagaggcgg

SEQ ID NO: 37833 - DNA, 451 bp, Zea mays
  unsure (1)..(451): unsure at all n locations
tcgacccggatccttaagtcacctgcggcatgcaagctntatcaaatggacgtgataagtgccttcctcaacggaccaatcaaggaagaagtctatgttgagcaacctcccggctttgaagacagtgagtatcctaaccatgtctataagctctctaaggcgctttatgggctcaagcaagccccaagagcatggtatgaatgccttagagatttccttatcgctaatggcttcaaagtcggcaaggccgaacctacactcttcacgataactcttgtcaatgatttgtttgtatgccaaatttatgttgatgatatcatatttgggtctactaacgaatctacttgtgaggaatttagtaggatcatgacacagaaattcgagatgtctatgatgggggagttgaagtattttttaggaatccaagtaaagcaacttcaagagggcacct

SEQ ID NO: 37834 - DNA, 424 bp, Zea mays
gcttcgtcccaggagaaaacctctctcttatggcaagggacacacaggatgaagacggattcagagaaaataagagtaaacgccgaagctatggccatataggaaagcttctgcttacaacgaaatagcggaatgatgattatggccgaaggaagaaaagactacttactcccttataatctgtattacgatcatgtgtaaacattaaggacataactatacttttacctgagctgcatcccgtgcctataaatagatgaacagtaacaccgtactgctcacgctgaatagtattcattctctcgcatcctcgccttcgaacaagccgaatgtatcaatgtaatattaatattggagatattcatatatgtcttatggaatgaaagaacaaatgaattattatgatgtggctactcacattatt

SEQ ID NO: 37835 - DNA, 395 bp, Zea mays
  unsure (1)..(395): unsure at all n locations
cgctgcgcgcgtgcaagcttatgtggacgatgtggtgatctatacataatactcagaacatgcattaaagattataggtagtcttcaatagtctgcagcgatatcaatggaagctcaatcctgaaaaatgtgtcttcggagtaccagctggaaaattgctccgatttattgtcagccatcgaggaattgaagctaacccacaacagatcgaggctatcatgaggatggaagcaccgctgtcacagaagaaagtacaaagacttactggatgcatggcagctctaagcagattcatatctaggttggaggaaaagggcctgccgttctacaaagtgctcaacaaggtggacaaatttcagtggacctcacacgctcaggaagccttanatgcgctg

SEQ ID NO: 37836 - DNA, 381 bp, Zea mays
gcagccggcgcgcgctagctgattcagagtccgccgccggctttttccaagaaaacgtgaaccgattcaagacttgatgtgatgaaagaggacaatgcattctgacaaaaccaagaagactggatatctacaagcatatgccatcacactgtccctgcccgcgtgatacccacatggcagaaactagaacatcacgaactgcaacacacccctactccttctatgcatcaataacaaggtaaaggtgctcggaagagattgatcatctcgcttcattgacgaaagaaccgggaggctgggacatctgcacgttatggactagaccgcatcacttcacttccacacattagaaggttagagatatctagccgacacaacatg

SEQ ID NO: 37837 - DNA, 451 bp, Zea mays
  unsure (1)..(451): unsure at all n locations
agctntatcaaatggacgtgaaaagtgctcncttcattggaccaatcaaggaggaggtctatgttgagcaacctcccggctntgaagatagtgagtatcctaactatgtatataaactctctaaggcgctttatgggctcaagcaagccccaagagcatggtatgaatgcctaagagatttccttatcactaatggtttcaaagtcggaaaagccgatcctactttatttactaaaactcttgataatgatttgtttgtatgccaaatttatgttgatgatattatatttgggtctactaacgaatatacatgtgaggaatttagtaggatcatgacacagaaattcnagatgtctatgatgggggagttgaagtacttcttatgatttcaagtgaagcaactccaagaaggcaccttcattagccaaacgaagtatattcaagacattct

SEQ ID NO: 37838 - DNA, 397 bp, Zea mays
gacctctgagtcacctgcggcagtgcaagctgacggctgaatcctttactgtcttctataatactagaacataaggcgcccttgcgggcgccctacaattttataaaagactcctgcattattacttggctaatatgtaccacaaagttaaggcttatatgcgctccttcaacaatcacatattctttctgctcttcctagaatataattattaattaacatgtccaggatgcgccttgtacccttctactgccatttgtttgttgccaatcaattcagctctaggaggtaaatcaagtacttgttgctgatgtcttacctagttggctaggtttgccatctcatgaatatcaaagtatttttaactcttatttcattaactcttggaagatgtatt

SEQ ID NO: 37839 - DNA, 334 bp, Zea mays
  unsure (1)..(334): unsure at all n locations
agcttccaccgatatcgccgcatactgttgaataatagctgcaaatcttcaatgaagttttctgagttttctatcttgattaccacgtcatccacataagcttgtacacgcttgccccagtgatcggctaagcatgtctgaatggctttctggtaagtcgctccagtgtttttgaggccaaacgacatggaggtatagcaaaaagccccaaacggggtgatgaatgcnagtttttcctcatcttcttttgccaggctgatctgatggtacccagagtagcaatccaagaaggacaacacagaacacccggcggtcgagtctaccacctagtcta

SEQ ID NO: 37840 - DNA, 334 bp, Zea mays
  unsure (1)..(334): unsure at all n locations
tacagaagtttaaacaaacagggcattaacctttgccaaacaaataagggtcaaacatgcgcatagagaagcatgaagcacaaaggataagcaagcaccttgagccctgtgaagacaaaccatcacaggctatgaacattggatcgtgcttgtctgcttgatatgttggggaggggaatggccacgtgggcgagtggcggagggcacaacagcggggcaggaatcacgatcaacagggcgaggaggctggcaacgacngcgaatcaagcctgtagtggccgcagcaacagcgcctggagcggcggtcggcaaacggcggagggcacaagacagg

SEQ ID NO: 37841 - DNA, 349 bp, Zea mays
gcttggcgtccacttgtatagccctactcctttcctatgccgacgctgctcactgactctccatcatctccccacgccagcaacaatgaggcaaggacgtcgtaccttttctgtgggccgccatccctctcctctcctgttactggtggtcgatgccccttgttccagcagcaagcaactcccttcccttgccatggatgtaaactaccttcccctgcttcctactactcccatggataagctcacccttttgctgcccgccctcaagacctagccgctaccgctttctcctgcacgtggccagcgcaacgtgcgctgcttgcccgcaacagcgtggtcagcgcaagct

SEQ ID NO: 37842 - DNA, 323 bp, Zea mays
ttgaacaagtccatgagacgcctacctgttaactttgaacaagtccatgaaacttgagagatatttgctgcaagtacgaaaacctgtcaggtcaaccacttgaaagcatgacctgaggtcctagggaccatgtgtgcttcaactatttcaacatctcgaaacaggatccaatcatataactacactgtgctggagctgtaaaactgcacttttacgcaagatatggtatcatggccaggaaaggatttgtgtttacagtgccagtagaaggatgcacacactgctgcctttaccgagaagcgtatctcttccatcccctttat

SEQ ID NO: 37843 - DNA, 237 bp, Zea mays
gatccgtagtattaacgtatgagatctctatatctcccttgtgttggcgatccctataaacatgataccgaatggctatgtgcttaatgcggctatgctcgacgggattgtccgccattttgatggcactctcattttcacatagcagaaggactcttgttaatttgtaaccgtaaacccgcaaggattgtcttattctaagcaatcgcgcgcaacaatggcccgctgcaatatact

SEQ ID NO: 37844 - DNA, 263 bp, Zea mays
gcacataaaaactaactgccaagaccccatcagggctgtgattatatgaccacgtgggggggtacatgagcaaaatcattcccactttgttgggatctctcagaagtgatactagatgtctatggctttgtggctgggtcacatgattgccccatcggatacactctcattgcacataaagaggaccttctcaattgtgccgagtcataaacctgctatcttatcattgtgccaaagaggtgctcataactccctaaggggga

SEQ ID NO: 37845 - DNA, 374 bp, Zea mays
tgacgcactatacaattacgtatattatcttttctgcttgtgaaataagagaccgagttggttagaaatggttccagtttcggtctatttaaatagcctaccccaagtagcgcatttaccgagttatgaaacggaaaaatccgaggtttactgttcggactacatttcgtttagataattttcgagactattttgggcaacacgaaaccgtactaaatatcggatacattatttgagacaacactgggtgagtcaaaatcggataaaaatttatctgatatccaaaacacagttgattttattatcgtacagagtgggctcaggaacaaatgggatcataacctcgcacactattttgcgcgatttgatttatt

SEQ ID NO: 37846 - DNA, 411 bp, Zea mays
  unsure (1)..(411): unsure at all n locations
agcttatgaagattcttcatcccaacatgggctattctgtgatgccatagccaacccatgttagtcttagcaattaagcaagtgtcgagttcagctctatcaaaatctaccaagtatagctgaccctctaacactcccttaaatgctattgaatcatcacttcttctaaagacagtgacacctacatcagtgaatagacagttgtagcccatttgacataattgagatacaaaaagcaaatggtaatctaatgaatcgacaagaaaaacatttgaaatggaatggtcaggtgaaataacacatttacccaaacctttgaccaaaccttgatttccattcctgaatgtgatggctctttggggatcttgggtnttctcatatgaagagaacatccttttcttcccaatcatg

SEQ ID NO: 37847 - DNA, 381 bp, Zea mays
tataataagagaatagaggcaaaagcccgtccatatgtgataatagaaggggagttatataaacgtggagtttgttctccattgctcaaatgtttatccagagctgaaggtatagaattgatgaaggaaatacacgtaggcctgtgtggttctcacatcggatctagacctttgctaggaaaagtttttcgtcaaggattttattggccgaaggcagcttcggatgcagcagaattagtccaaaaatgcgaaggctatcaaaaatgtgcaagagatcaaaaacagccttcgtctttgactcaattaatacagcccacttggccgttgcaaaggtggggccttgatttgctaggcccacttccacctgcacaaggaaatcta

SEQ ID NO: 37848 - DNA, 438 bp, Zea mays
  unsure (1)..(438): unsure at all n locations
agctngtgaacagtacaaattcacaagggagatagcattcttctgtatatcagccgaagcctatgctcttatgtgaggacatagcacaacagaacgtgctgttaggctctcaattatccgaagagcaggagaaaaccttgataacgtttttgttcaacaacaaagatgtttttgcatggtcagctaatgatctctgcggagtaaataaggatgtgattgaacattcgcttaatgttgatccatcctttagagccacaaaacagaagcttcggaaaatgtcatatgataaggccgaacgtgctcgtaacaaaatcaaaagactcctcattgcaggagtcatcacagaagtaaagtacccacaatggctagctaataccgttatggtaaaaaaggctaatggcaagtggccaatgtgtattgatattacagatcttaaca

SEQ ID NO: 37849 - DNA, 372 bp, Zea mays
acacctcatgctgcatcttggggcatgccggatgcatacttattttggagagatgagcctcatccaaaagggtgttcttgagatcctgctccttacgaaggaccactctgcttttgaaccataacacacccttctgatcctggcggaaacaattatacttctcaaccttctgatggagatacttcttgataatttgtactcccttgtcactgagctgggccatgataatctggtcttgcagagctggctcaacagccatgtgagacacagaagcctaaggaatcactttaatttgcatcttgctcaactcatcagacaaggtgttaacaccagaatccatcagaatacagtggcactgcaacttccgactca

SEQ ID NO: 37850 - DNA, 337 bp, Zea mays
  unsure (1)..(337): unsure at all n locations
tcaagcttctcatgtggggacttaatgggaattctcaatttcagaattctgaaattcagaccttgagctaaagatcagggatgttcaccttgatccctaactcgaatcctaatggccccattgacaaaattgtgtctaactaacccctctatcgtgtgccaaaagatggcattgggacgcgagccctatacacgacaaaaccttggatttgcctcgggtttgggcagggagacagaccagatttcctggctccatatctctgcaaccagtaggcaaaatcctatgacccccacacaagaatggtatcttgtanggaggagaagatgttttgtgcact

SEQ ID NO: 37851 - DNA, 374 bp, Zea mays
tgtgaccacatgtacattttgtctaacaccatacagacgcgaggtaaggcacgtgcccggggagaatgaatcagctccaaaacagctgtagcatccttgccaaaggcttaggttgctgcctaggaacagcttgtccagattgtcctcctccgggaataggctccaaagtagacgaacacggacgtggcgaggcagccgccgctccacgagggcgccggatgtccatgcacgcggccgggtccttggcctcgtaagcgtggaggaggggctgctgcagcaggccccgtagcgcggccggcgagccgtcgggagggccgcgcgacgccgcctcaccatctgctaggcacgcacctaaagcagaaacgaacagaatg

SEQ ID NO: 37852 - DNA, 446 bp, Zea mays
  unsure (1)..(446): unsure at all n locations
agcttaatgtgtaatgacaaatttgatggagatggaaccaataaatcaccagctttttaccgtaccctgtcctatctcattctcctgtctcgtcttcgtttatacgcacgtaagcatgcataccggtgaaaatgcacggtccaagtattgaacaaattttgtataagtttgttccaagcagtgtgtttgatttggcacacatcataaatattgctgcaacgaagtgtaagtaacccttctgtttctgatcactccccagattatttattcgcattccttgaagcgtgccaattattttcattttcttaatacaaataacatcttttgaaagaaaaaaacaatatacactaccaanaaactgcactttagttctagtggggaaccnctgtagtcacggttttctaacctgggctatcantcatggactannaagatgtatgttttag

SEQ ID NO: 37853 - DNA, 372 bp, Zea mays
tcggcattacaaaccgacttaaagatagaatgaccttttagtccataaaggtctgagtcaatgttgtaagtttttataaggggcatacttgtaattcctcacaggctgcgtcctgtgcctataaatagtgaacagtattccgttcctgttcaggctttcaattaattgcaatcgcatctctcggaattctactctttgccaaggcaaaggtattattgtattcaatggtttaatatattaagaaaatacaatgtaattcatctatgatgtacttattccttttataccttttattttatgtcattttataatttttactgaaattttattacgaagattcgagcttcgtaattatgcttttatcaaccttca

SEQ ID NO: 37854 - DNA, 468 bp, Zea mays
  unsure (1)..(468): unsure at all n locations
ttaagtcacctgcngcatgcaagcttgtgtcacatacgtcggacctattctatgtgcataanaggagaacaaagagcacgtcagacctatctacctcactgcgtgggaaagggaaaaaataagcacttggtgtgatgaaatcagcgtcaactgtgttcagagagtgtctatggagttgccaaatccaaagagaaaatggatttggatagcacgtaactatatttaacaagtttatttagagaactatnggagagacatttttctattcgcttcttcacattaagattcaaggagttgtttagagaattattagagttgatcatcaataagatacttgtgtccattcaagatatatactcttcttaatgtatgttcacctacgtgtaaaatgaatggttgagaccttcaacaatntcaaatgaganagtactacaaaacggtttattacttttcgagatcgtaaacttt

SEQ ID NO: 37855 - DNA, 378 bp, Zea mays
tctaaagggagaacacgtgataggtctatctcttgttcaattcgaaaaagatagaccttgtgcagcttgtcaagcagggaaacaagtgggaggagcgcatcacagcaagaatgtgatgaccacttcaagacccctggagctgctgcatatggacctcttcggacccgtcgcctatctaagcatagggggaagtaagtatggtttagttattgttgatgatttttcccgcttcacttgggtgttctttttgcaggataagtctgaaacccaagggaccctcaaacgcttcctcaagagagctcaaaatgagtttgagctcaaagtgaaaaagataagaagcgacaacgggtccgagttcaagaaccttcaagtggagga

SEQ ID NO: 37856 - DNA, 311 bp, Zea mays
tgatacaaatatcttacactgaatcaagaaaatcttgatgatgatgtgagagggaccacattggaccatgcgattaaaaatatgtcaattggtgatgtgacaccaatggatgtggcagaagatgatgattattcaactagagcgatgtgttttgatggtaatttgagggcacagagtgtgatatttgacaccttgttattattctttaaagacaggatgcattcacattatgctatgttgtcaacttctgccgaagcatattacattgaatgatacctatatatgatcaaatgtggtcttattattacata

SEQ ID NO: 37857 - DNA, 326 bp, Zea mays
ctcgctagggagatattcatatgcttcctgctgttttatatgtggtgcatcatatggactatggctttcgttgctatgaattaattggcatctattgtgttcattaataaacagtcatgtggataatgaagcatgtgggtaatggcgttaatggcgctttaagaccgctttcaattggtatcttagatgaaattagtatcttcatggtgaatagtgggaagttgatattcctgcgatatatccactattgcgaatggtgtttaactctgattatatgcatttgtgcattataacgtcatggcttgaatcttgtgtcattgcttcct

SEQ ID NO: 37858 - DNA, 161 bp, Zea mays
tttggtgcttccggcagcacgagttttgactaggcgcacaatatatatgccactcgaaccttctgacattaataataggggttgatcttcaatacaatttaacaataagactataggagactgttaaaagtttggctcaaaaaccgtggttacactattca

SEQ ID NO: 37859 - DNA, 371 bp, Zea mays
ttgacaaaacttgtctacagggcagatctttcattttatacaactctttcaacaatttatactactgaagcacatgcagtgtaccctgtgaaggttcagaacgagatggattttgtaaaactgataagggctatggctttaggagatccatttcttatggaattggtctgatctaggattgcctctcttttttaattcgtcaggttggcgatagaaaacaaaacaacgagataatgtttggttcgtctttgtcctcccttcttccatatgaggatgaggataatctagtgttactcgatctcagtttacatgtacaatcagataatacaggcttactttgttgaactaaaaaacgaaattccgaaattcat

SEQ ID NO: 37860 - DNA, 369 bp, Zea mays
tgcataccatacccgggtgagtggagtatacgaagccgacgggctggttgcaatacattgtctcggctagagtgccgcgaaggaaggcattcttagcgtctagctggtggaccgcctaatctcgggagagggcgaggaagtgggcggtacgaacggtggtaggcttgacgatagggttgaaggtctcgtcgtattccactctgggtcgctgagtgatgcctcgaagggcccaacgggccttgtcccgatccaggaagccgttgaccttgagcttgtgaaggaagatccacttttcggtgaccacgttggtgttaggaggacatgacaccaaatcccaagtgtggttggctagtaaggccacatactcca

SEQ ID NO: 37861 - DNA, 257 bp, Zea mays
  unsure (1)..(257): unsure at all n locations
agcttatgcccgagacgcactacgggtaaacttatatctaaacgctacgtgctctagttccaattggttctaacaaaagaattagctacatgcacaaatgtaaacgtgaccacttttagtagattaacattgaatgagatagatgattagttatacaaattaactaacgtaaccaatttccaaattgagactcctatcttattaatataaacacgtgattagcgcgcataggacacggggggggggggggtnttttt

SEQ ID NO: 37862 - DNA, 381 bp, Zea mays
tgtggtccatgatgcccgctggtatgtaatgtcctttgaatgctgccttgaattctccccattccaccatgtggtcaactggctacatagcgaggaagtgatcccaccatgtccgcgcgggtccacgaagctgttgggtggcaaaacgaactttggccacatctaaacaaactccattaagcagtgggaatttggattccaccactctgagccatacatcagcatcaaggggatcctctgccacagtgaacgatggcggctgagtgctgaggaactcctgataagtggccgctgctaagggacgctgatggtgatcaccaccaccatagtgctgaggtggtggctgacgctgagccaactgtcacagaatctcattctact

SEQ ID NO: 37863 - DNA, 424 bp, Zea mays
  unsure (1)..(424): unsure at all n locations
gcagcttccctggcacagatatngctacactctattcttttcttgttcangcttcgtcctggccgtgcctcatattcataattctggatccgaaaatgcctgttcacataatccacttcgaaaacattggcaaatcatggttttgaggaccttctgaggaacaaagcctccaacaactcccatgcctcaagataacgaggggtacattttgtaccctaccggctatccccagaacaaaattatgagaattcactctangaagtctcactctggccctaatcattgctttatgtataacggtgagacatctagctctatgcaaccaacccgtgctaagatgcctaagaagaaaactcctaatgcatcagatgatcatgacatctcatttcaaactattgatgcatcttatngtttaactaacaaa

SEQ ID NO: 37864 - DNA, 379 bp, Zea mays
tgtgcaaagtccactcgaactaatcttctgagattcccgacctcgctgtaacatgacacccgaaggtccaacacaacaagcaatgaatgaattcagaattattgcacagcatatcagtacaagggacctggttcaagaatttttggctttcaaagtttttcctagtttgaaagaatgggaaatgtcgaagctgaagggggagaagaaagaaggtgaacttgtacgtttaccttactatttcaagtttaagaaatactttaaagtgccttgccaagagtggctagacacaattgaagtaatgtgtaatgaaatacttggcaattattccaaaaaagaagatcaattaatgactgcggccttctgcacccgtccgaagcga

SEQ ID NO: 37865 - DNA, 390 bp, Zea mays
  unsure (1)..(390): unsure at all n locations
cacctgcngcatgcaagcttcgcaacttaccggactcaagacgactgttgaatattttgaaggtacacagcggtgagtcgatggacggagtgtccgctgtggcgttccactgtgacgacacgacgttgcgggatttcggctgtggtatagttcaatcggtcggcatggttagcaatccgaggctaaagttatgccgaaacaaaagttagaccggtatgaactgacccgacgaatgctggccacggttggattcttcacggcggctacaatgaccacacccagggaaatccggtgatcttggtcgatggtggaagacaagggatggctagtgagtctgtagctcagtaactgggatgcgaagatcagtgcacggtcaatttgacgatgggg

SEQ ID NO: 37866 - DNA, 380 bp, Zea mays
tagcccacaatctgaagctcaactaatggtgattaatctcgaatacctagctgcggaaaaattctgagaaaacttttgtattaacctttataaagaatattgtaacttaagaatcaaattctactctgtaaatttgtccataccttataatatatttttacctttccatcgatgtatgaaatgctttgatgtggacgaagcttgtattttttgagccgaaggcgaaaaacacctcacattcttttcgtacacaacgaagcatgaatctgcttttgaagctatatgcttagagccgaagcaactgtctgtatctgtataatatgatgatgatgatgatgatcctatgtatgtctaaatgaatgcttatgaatgcaatgtat

SEQ ID NO: 37867 - DNA, 462 bp, Zea mays
  unsure (1)..(462): unsure at all n locations
acctgcggcatgcaagcttgtgaagccaatcacgagtctgttgaagaatgacttctttttcaattggtcttctaagtgtaatgaagcctttgagcaattgaagacactattgaccactgctccggtattggctcaaccggacatcactaaaccttttgacgtatattgtgatgcatctggcagtgggctcggctgtgtactgatgcaagagggccgagtaattgcgtatgcttcaaggcagttgcgccgacatgaggagcactatccaactcatgatctggagctagctgctgtggttcatgccctaaagaattggcgtcactatctgctgggtaatatctgtcacatatatacagatcataaaagtttgaagtacatcttcacccactcagagttaaatatgaggcanagacgatggcttgagctcattaaagactatgaactggagatccattatcaccc

SEQ ID NO: 37868 - DNA, 377 bp, Zea mays
tgcattgcatgtttaaatttcttgtattgcatctagggcttgtctaacctagttgagataaccgccaacaaagcgagtgaaaaagcttaactcgggtcaaacttgacaagtcttatttttaagcttttagcacttaaattcttacttgttatgcaattgttggttcttgaaatatgcatgaggtactgcacttagggggagtattcaacactcaaatcactcatgaaaatccctagtgcaagccaaaatgcaaatttcaccatttgcctattttctctaaaaattatctagcctatggcaaaatattttgaaaagtatatgagggtgccaatacctgtcccaacaagtgttattttgtgtgattataagttgggatt

SEQ ID NO: 37869 - DNA, 415 bp, Zea mays
  unsure (1)..(415): unsure at all n locations
agctgtaactcttgtgctgctggaatttctgtgttctgttnatcatttagctcaaataattggtagtgggtcacgatacttgttttggttcgggatttctatggatgctttcgtctatcttatctatgctgttgaggctgcttctacatgtggttgtagggtaagtttggcaattaaaatcctgtatttaaaactggggacaggtcagaatgtcattccggttgtgtttatgcaaaatgaaacgcgggctggttttgtcctcctacatgcggaaggaaaggtctgctggctatggagagatctgttgaagggtgcagatttgttcacattcgttggttgtgatttgttacatggatattcttatgtcaactatggtggtgtgaagatagccacctgattaattacaagcttgatg

SEQ ID NO: 37870 - DNA, 378 bp, Zea mays
ttaaaacctaaaaggccaagcaagtgttcttgcgctcacgctaaaagttgggtgagtaaaagcagttggcaagagagcgtaccaaataaactcgggatgagctcttatttatacgcccagagcgttgaaactggagggtcccgcttgtcaaagactgttgctattctagcaaagagaaggtgttttttcggaccttcggcttaaggccttcgtccatatcgcaatatgaatttatcattacaacaaattaatattgcgaggggctactgttgggggccttcggcttccgaaggtcctcaaaaacatgatttgacaatattttctaagtatgcaagcaggtatcttcggaatcaagttgcgggtatactgaagcatggt

SEQ ID NO: 37871 - DNA, 317 bp, Zea mays
ccaacccatgttacttttagcaattaagcgagtggcgagttcagctctatcaaaatctactaagtatagctgaccctctaacactcccttaaatgctactgaatcattacttcttctaaagacagtaacacctatatctgtaaaaagacagttggagcccattctacataattgagaaacataaaggtaattgtaatctaaagaatctacaagaaaaacattggaaatagaatggtcaggagatatagcgaatttacccaatcctttgaccaaaccttgatatccatccccgaatgtgatagctctttggggatcat

SEQ ID NO: 37872 - DNA, 372 bp, Zea mays
taccgcatttgaagcatgatcgctttcccttggtcttagtcttgcttggctgtcccttgcgaccctttagtgccgtcttgaatcttttgatgatgagggccatctcttcatcattaagaccggccgcctcaatttgcgccaccttgctgggtagcgcctccttgctccttgttgccttgagagcaatgggttgaggctcatggattgggccattcaacgcgtcgtccacgtaccttgcctctttgatcatcattcgcccgcttacaaattttccaagaatttcttcgggcgacatcttgatgtacctaggattttcacgaatattgtttaccaagtgaggatcaagaacggtaaatgaccttagcattaggc

SEQ ID NO: 37873 - DNA, 279 bp, Zea mays
aacatcagtccctctgatctaagccgacgaggccacttacatgatcaagttccacggactaactccaacgtgaggcacagaaccaatacaataaagcatataaccatacattaatggagtatttaatttattacaacatcatcggagtttatccaaaagaatgatcattgttcggaatgcaacggaatataactaacgggtaaataaactgatggatggggaagcctggtcatcaattctatgctcctcctcggcgaggaaggtccactcgactgtcac

SEQ ID NO: 37874 - DNA, 369 bp, Zea mays
  unsure (1)..(369): unsure at all n locations
tagggaaaattaagcgtccatgatgtccctatagctagcctggnggttggggggtccttctgaagtaaaaaatcatcttaattaaaggtggaaaaagcaaactggtgatggtcgcgactgcacttgatggagacagtcacgactcgcgggcgtattagcgtattttgcgcagcgtgacgatgaacatccaaataataatgtccacaccatgtaaattcgatgacgatcggtgtaaaagtaagaaaaaggattagtcatgttacatacttacatggtaaaaataatataatacttgattcgaggactatgactagcaccgcgctcgcgtagctcccacgcggggcgacaccggcggctcccaagcccacc

SEQ ID NO: 37875 - DNA, 424 bp, Zea mays
  unsure (1)..(424): unsure at all n locations
gcttcatatcatctccttctgctacaaagctctctagcacattntggtacccatcgcttgatgggtccgttaaggttagtaaacaaagatctaggaacccaagtgttctttgtgctagcgcttggtaaactcgttacttttctagcacaagttgcaattttgggttgcctagttacatatgaatcaaatgaccagttaggagtggggttgttaccaatgggacaatccttgcattgatgtccccttttccggcatgtgtagcataagccgttttgaagtcttgaagatttcttctttccttggttgttgcttgctacatggttagtaaaaactatcttttctaaccctatgcctctctgtttcanatggcgacaagaattgatcaagtgtcccttctttgagcacttataacagagtctatcat

SEQ ID NO: 37876 - DNA, 378 bp, Zea mays
tgccaatacttgtcaaagcaacagtatatgtctttcacagcagctacagaccataccagtaacttggccttttgcatgctggggattggatatgattggacctttcaagaaagctcaaggaggatacacccatgtactggtggcaattgacaaattcactaaatggatagagttccagcccattgcctctttaacctctgctaaagccgtggaattcatacaaagcataatattcagatttgggataccaaacagtatcatcactgacttgggatccaacttcaccagttcagaattctttgacttctgcgagcaaaaaagcattcagatcaagtatgcatctgtagcccacccgagagccaacgggcaggttgagcg

SEQ ID NO: 37877 - DNA, 401 bp, Zea mays
  unsure (1)..(401): unsure at all n locations
agcttccacagcaatccaacacacagtggagtggtgtttacgctccggcggcctgaaccactctaaatcctcgcgtgctcctgagttcatcgttcacctaccaacaggcaaaacgcttaagccccctcctcatcttaggattttgggcgggtacactccgccacccggccggataattccctcttcgacatttggcgcgccaggtatgggcttggcattaagtttttgcttgttttctcgctcagcatgatggtgcaaatcgttgagcaccgcgccgagacttcggtggattntgtggtggaggaagaaactgtttcttccacaccacaaggttccaaccgccctgtgccgggcactgctgctgtgcacgctgcatggcagcatacaactgcacagacatc

SEQ ID NO: 37878 - DNA, 376 bp, Zea mays
tcaaaaggtgacatcttcaaactggactggtagctattattataagagaactcagcataaggtagactcttatcccaacttcctccatgctgaagggcacaagctctcaacatatcttccaaaacttgattagtcctttcagtctgtccatcagtctgagggtgataagttatactaaaattcaacttggtattcatgttctcatgaaagcttctccaaaaccttgaggtaaactgtgaacgtcgattggacacgatcttctttggtactccatgtaaacacacaatccgagccatatataactctgccaattgagagcctttataagtagtcttgaccagaatgaaatgagccactttagtcaatctatccacaa

SEQ ID NO: 37879 - DNA, 464 bp, Zea mays
agcttatgaagattcttcatcccatcatgggctatgtcgacgatgcagaggcaacccatattggttttagcaatcaggcaactatcaagtttagcattgttatttatgaaatcaaccaaataaagttgaccctttaacacccccttgaaagcaactaaatcatcacttctaaaaatgctaacaccaacatttgtaaacaaactgttgtagcccatctgacataattgagaaacatgaagcagaatgtagcctaaggactctacaagaaatacattacaaatcaaatggtcaagagatatagcaattttacccaatcctttaaccaaaccttgatttccatccctgaatgtgattgccttttaaggatcatcatttttctcatatgaggacaacatcttcttctcccctgtcatatagtttcttcatcagttgtcgactatccaacttgttcatctagatgcata

SEQ ID NO: 37880 - DNA, 372 bp, Zea mays
tgacgactgccagttcgacctctgttagctgtcctacgtggtcacatgctccgttgtgtatgacaagctccagcgcagccgccgcttagacacggtccagagcggccgaaccgcgctgtcccatcatcaagcaggggaacctcatggtcgtcgccaacgttggcgactctcaggttgttctgggtaccgcatccgacgatggtgccgtcacgccgtctagctcatcgtccacgtgaagcccaacctacctggtaagtcgctattgaccggccatgaattcttgtgcgctgggacgacgaccgttgctgacgttgtgtgagtgtcctcaaacatgatgtatgtagaggagtaactcatccggtggtgcaacaa

SEQ ID NO: 37881 - DNA, 328 bp, Zea mays
  unsure (1)..(328): unsure at all n locations
actgagccgtaggggctggtcgaagccccttgatcatggcctcaatgacgatttcattgggcactgtaggcgctcgtgctctgtaggtacaggaacctttggacatacgcctgaaggtaatcctcatggtcttgtgtgcactgaaacaaatcctagacactgactggcttcatgtgaaagccttggaagctagcgattaacatatccttgagctntcgccatgatccgattgcccctggccagagagaatagtaccatgtttgtgcgacacgtttgactgccctgacgaaagatttcgacatgactgcagcgctgcccccataagaag

SEQ ID NO: 37882 - DNA, 324 bp, Zea mays
gccctcggacccgactttgacttaccggaggcccgagatcgacctcaccggacttcaatcttccgccgccgcgcgtggaccaagctatccagtgagtctccgaccaattccttgcgctcatagcttctctggcatcccgtggacctccctgacccatttgattgaactatctcgccgtgaccaggccggtctcctcgccgccgacgagcatccccgcctgcgcgcgtggaccgaccgactccggccatctacgacggcgttccgcacaccgttgtgatccccgcgacctacccttcgtcctcgaccacttcaccggagcaatct

SEQ ID NO: 37883 - DNA, 436 bp, Zea mays
  unsure (1)..(436): unsure at all n locations
cagctgcagctaatgcccctanagattgctaattttgtttatggaatgctcccaagctcaggataacgagggttacattntataccctgctggttatcccgagcacaagattaggagaattcactctaagaagtctcactctggctctcatcatgcttttatgtataagagcgaggcatctagttctaggcaatccactcatgttaaattgcctaaaaagaanactcctattgcatcaaatgagcctattatttcatttaagactnttgatgcttcatatgttttaactaacaaatcaggcaaaatagttgccaaatatgttggggccaaacacaagggctcaaagactctgtgttgggtacccaaggtgcttgtttctaatgtcaaaggactcaagactcgttgggtacctaagaacaanggcataaacttattt

SEQ ID NO: 37884 - DNA, 383 bp, Zea mays
ttatgatatgtacatgaacataaagagtgctagtttagctcatggagtctatcaaatataaatacggtgactctaatgccagacatgagttgtatgtcattgaatgttatcataactataagatggttgacaatcgctctattgttgagcaatatcatgagatgtaacttataattggcgagctccagtaacttggacatatcatgcttgatccatttatggtaggggcatcattgacaaattacctccaacttggaggaattttgacatggctctaaaacacatgaagacatatctaatgaaaatctgttagcctctctagatgttgaagaaaatacatagacaaaggatggtgcatccaaggcacatgaggcacaatctaa

SEQ ID NO: 37885 - DNA, 428 bp, Zea mays
  unsure (1)..(428): unsure at all n locations
tatattcccaaataattgggtcactcatgtacttagctagcgttacgaggcctgacatctcgtttgctgtgagcaaacttacttgggttgtttcaaatccgggagatgatcactggcgtgctcttgagagagttctgcgctatctaaaaggtattatgagtttaggcatncattatacggggtacccaatagttctggagggctattgtgatgcaaattggatatctgatgctgatgagatatatgccacaagtggatatgtgctttcacttggaggtggcgctgtttcatggaagtcttgcaagcagaccatcttaacgaggtcgactatggaagcatgactcacaacattatatactgcgtcagntgatgctgagtggcttcgagaactgtgataatcagaatgtgatcatcaagaataacagttc

SEQ ID NO: 37886 - DNA, 383 bp, Zea mays
  unsure (1)..(383): unsure at all n locations
ttgagaatgcaacaagatcttgaagataattatcttgaagttataattgagggtttagaagtaaaataaaagatgaagtagctgctcttgaaaagaaggatttcgagcttcatacaacagagggtttattggcagaagctaaagctaaaattgcaaagttaaatacggagcttctctcgaagtcagaaagcttcgaacaggagaagcagaagttaaatgccaaatttaagaccgaggtcgagaaaagttcgaatctgcaaaaatcattgacagagcttcaaaacaaatgtatggagttcagtagccgatgtgtacaacggctgaagcagatcttnnattctgttggagccagctgtgaaaaatttagtccttcgactgaagac

SEQ ID NO: 37887 - DNA, 454 bp, Zea mays
  unsure (1)..(454): unsure at all n locations
agcttaattggcatgccgtgcctgggcctggtcttatgcactagtgccgtgccggcacgacacgactattaaacgggccaaacggaccgtgccctaatcgtgccgtgcctggccgtgctcgagccgtgctgggccaagccgcccattttgccatgtatagccaaagctactttatctattgaagatacaaaagatccctcggccaaagcaagcttaattggcgggaaattctttactgacatctgggagaatggcggccgagggataacgcacgagatgataaaaaagagcgaaaaagattctcatgattcataagaagcgacgaaggcagctgagaaagcggcggaacttgagaggcggataggtattgcttaataactntntaactctatttactaattttgcgacttccgacttaattacgtgttatatcgcagctgaactatctccttct

SEQ ID NO: 37888 - DNA, 375 bp, Zea mays
tgtgaagattcttcatcccaacatgggctattctgcgatgccagagccaacccatgttagtcttagcaattaagcaagtatcgagttcagctctattgaaatcagctaagtatagctgaccctctaacactcccttaaaagctactgaatcatcacttcttctaaagacagtaacacctgtatccgtaaaaagacagttgtaacccattttacataattgagaaacaaaaagcaagttgtaatctaatgaatctacaagaaaaacattggaaatagaatggtcaggtgatatagcaattttacccaatcctttgaccaaaccttgatttccatcctcgaatgtgattgctctttggggatcttggtttttctcgt

SEQ ID NO: 37889 - DNA, 393 bp, Zea mays
  unsure (1)..(393): unsure at all n locations
agcttgagaactaagcaagcgtgggtgagcaattatctattaaattgagcaaacaaagcaagtggcacaaacagcgtaccaaatgtggtcagggtgagttcttatttatacgctcggcgcgctccaaattggagggtcccgtctgtcattgactgttgctattctagcaaagggaaggtgtttttcggaccttcagcttaaggcctttgtccatgtcgcagtctgaattcgttatcttaaacaaattaatactgcgaggggctactgttgggggccttcgtcctccgaaggtcatcaaaaacataatttaataatgtcttccacgtatggtttatggacaggtatcttcngactcgggatgaagttgtacacaatatggaaagcacggtcaga

SEQ ID NO: 37890 - DNA, 381 bp, Zea mays
tgtgttgggatacataaagataatcgaaatttattaagggaggaaaaggtgtcacccactacaatgagcaccatcatggcgaccaactctccaatcgctatctgatactttgattgtgctactaactagactaaagaggaaccatatcaacagtccaaaagcgcaggtaggtagcctatatagtggtttcgttgcccctttgtttgtaaagtatgtagtgaaattcatttcggtttatatatatgccgtgctttgtttgggctttttacttctccatctcaaaccggctcgccggtggactgcaggttcaaaggttgggcctgcttggcacactacagtgcagcagccaaacggaaaagtggtacaggcttgctagcactg

SEQ ID NO: 37891 - DNA, 490 bp, Zea mays
  unsure (1)..(490): unsure at all n locations
gcgatcccttagncacctgcggcatgcaagcttcgtcatctgagaagaaattgccctggagaaaagtctttatctncagtctccaatcttcgctataaacaggagatatattgagcactgctctttcaagaaggtcaactgaagatgcttttattgtttcaaagaaaacttccgaatgtaatggcagcccctgtgccgctgacttggctagtaaatccgcgtgttcattttctcctcgtggaatattcttaacagaaaacccttcgaaggaggcttcaagtcttcgaactgtatccaaatatttttcaagcttctgatctcttgctttgcaacttttgtcaacatggccagaaataacttgggaatcacatttgaggacgacccttcttatccccattgctttcaacttccgaagacccacangcaaagcttcgtattcacgcaatatatttgtacaactaanatcaagtttactgcggacatgtctgac

SEQ ID NO: 37892 - DNA, 391 bp, Zea mays
cacacttgaaactaagcttctactcagcaatgtttttgtgcaactttatttttcttgctgcgtagcaagttttaactttggagggtgcgaccaacacagtggctgctcctgccccgaaggttccccaagaaccgtcgcagaatactgtccaaacttcggcatctttactcgcttcttcttcctgagcccctggcgtccagccagcaatgaagtctgctaacgcttgggactgaatctaagatctatgcacataatcaatgcagaactcattgagttccgcagcccattttccaacccttccagtagcttctctatttctcataatatctttcaatggttgtgaagaagggacaattatattgtatgcttgaaaatagtgccaaagcttcct

SEQ ID NO: 37893 - DNA, 308 bp, Zea mays
  unsure (1)..(308): unsure at all n locations
acattcaanggctcaacaatagtggtaatgtcaatgtcaccaagcttggtccaattaattttgctattggctcatatcgtgatgttgttgactgtgatgttgagcctatggatgcttgtaatattctgctaggtagaccatggcaatttgattcagattgtatgcatcatggtagatcaaatcaatattctctcatataccatgataagaaaattattttgcttcccatgttccctgaggctattgtgcgtgatgatgttgctaaagctaccaaagctacaactgagaacaacaataatattaaagtt

SEQ ID NO: 37894 - DNA, 379 bp, Zea mays
tcggccttcggaggccgaaggttgttattattgaagctgcccaaaaatgccagagagccttcggcgttatctgttcttttattggaacgagagatttggtacaagagcatattgccttcagggtatggccacttgcggagaaatgggaaatgccacaagaaaccattaaagaggccgacgaaggtggacttatcaggttaaagtacacctttaagtttggagataaattcgttgagccagatgatgactggttaaaaagtattgaaaatttaagtgatgaattgcttggggcttattcgaaggccgaagatactgcactgtcagcagccttcggaggccgaaaaaagaaaaggctgaatcgggtgtttgatgcaatccg

SEQ ID NO: 37895 - DNA, 464 bp, Zea mays
  unsure (1)..(464): unsure at all n locations
agcttaggcacattggtcgtcataatgggcttctgtctatgtgtcaagaccttgactctcttcgccttcggcgcactagatgatgttgaagcagcaattttcctttttcccccttgcctttggacatgaaagcagtaatcagggtaaacaaacccaataacatcgaaaaccctgttcagcctctttttccctcgagtgtcgaaagcaactgtcatggctntgtcttctgtcctcgagtaggctccgagtagctcatcactcattgcctctgtagtgtctagccagtcatcatttggctcatcaaattgacttctgtaccgaaaggtatacctgagataaaccaagccactttggctggagccagcggcagcttccttcggcatttcccattcacttgcaagaagccatactntgtaagcaatgtgctcttgaactaaatctctcgtgccaatgtaggtgcatat

SEQ ID NO: 37896 - DNA, 376 bp, Zea mays
  unsure (1)..(376): unsure at all n locations
tctcacaattctctttttgatcgttgtgatatgtcttgagctcctcaaaagacacttgggggtttttatacaattccttcaaggtcttaaatttttctttttctttgtgcatgtagtcatcggcctcgcctaacattctaacaagatcatcatatgaatagccatcatcatcaacatcatcaacatcatcatcatcatcatttatatcatttaaatcggtgatgatttttaccttagcatctccctttgccatgagacaatgaggggatgagaaaagtgaaggagcttccttgatggcnnttccgacattaagcttggatggggtgtcnncatcatcatcatccgagctatcatccgaatctcattcaactaggta

SEQ ID NO: 37897 - DNA, 372 bp, Zea mays
acctgcacatcattgcattaagaagaatatgcatttatctatcaatgtacttgtgtacagtcacagtggctgaacatagacaacaaccatgagctactatgggacggtaccatgtgtgcagacactagccgaggtgctgagattcgagatttgtgtgaacaagctggtaaaggtcccctttcaatggcccaacgagaaggtttttctgcaacctgatccgtaggattttgtgtcatttaaagaaatgcgggttcgttaacgctttgattgatttaccatttgttttttacacattctatgttacatccttgattatcttgatatttcctataaataatagaactcatcatgtaaagcccttcatgctactat

SEQ ID NO: 37898 - DNA, 262 bp, Zea mays
caggaaaaaaactagctagcctgtgcaaagatgttttgtcctcgcgaacttttttggacccgaaacaacaccaaatatcaatctgcatctgcactgcaatggctgacagttaatggctgatggcaacgccactactacccaatggaactaccgctgatgcagctccgactataacctaccaattcatcattcctgaggatctgacgtgcacatcacagtttgggttgctatctcacattaacaccctcttgactcttttatt

SEQ ID NO: 37899 - DNA, 400 bp, Zea mays
  unsure (1)..(400): unsure at all n locations
agcttgagctgtgtgagagcacaaatatcttagtccttctcactacgccncatgcccacacttatatagttcaaggagggcatgtacaanggtttctgatctccccacactgtggactctaaggacacaatggaatcgatggaacaacttgctctgcccatgctcccatgtanactcttncgtaccgccacttgacacaccgtatatatatccgttgttcttcggtgctgcaggcgagaaatcttcttgtataagggatgagcacactgcactgcgcagcacgggcacactgtctccacaatggactggacatgtgcgccgtctgcaaggcggccctggcgcccgctgccatcggaatggacaggacgcaatcaatgccgtgtgggcacatcatctgtca

SEQ ID NO: 37900 - DNA, 377 bp, Zea mays
tattaatcatacgtgacagcattactcgttgtcctttagctcccatgcacgttttaaacgcattgaaaacccactcgaatgtatctagagttttgtatcccaacaacgtgaagccaaatacagtgcactgcagatggtggttacaaccaacaaacattcctaggggtttatcataaagataaatgcatcaccaatgtcaatgtaatccgcctgctgtctagtatgggaccaaaaatgctcaaaatctttccttctttgtccagctcgaagtcagagaaaaattgtgggttatcttttttacacaatgcaaaaaaagagaggagcttagacacatcattggcatttctttctcgttgtctcactttcttcatgtgaac

SEQ ID NO: 37901 - DNA, 408 bp, Zea mays
tgcaagcttgagcacacatgtgactttatctctttttctctcgcagacagacgggcagactgaaagaactaatccagtcctacaagatatgctgagagcctgtgcgttgcaagacaagtccagatgggacaaaatgttgccttatgcagaattctcctacaataatagctaccaggccagcttgaagatgtcaccatttcacgcgctctatgggcggagttgtatgactccgctgcactgggaccagcctggagagagacaggtgtttggtcccgacatcatacttgaagccgaagagaatatcataatggttcgggagaacctgaagatagcacaatcaatgcagcgaatctatgcggacagaatgagaagagaactgagttctgaagtgggagactacgtctatct

SEQ ID NO: 37902 - DNA, 369 bp, Zea mays
tcatcgagaagcaaccttggccaaatcgttttatcaaccgaccgtatcgcaggcgcattcaatgcgagtatcgcctgacaccttatcctgacacgcccgcctcagtcggcaaggtcgaagtgaccgcagtcacttcgccctttcactgaccgatctgacccaggaaaacagcgccgctcaccccgctctgactgctgtgcaagccacccgagcaaggctaacaatagcaagttcagccccgggcgcaacaggaagctccgcctcgcccgatcttaggcctcggcctcggtaggaggtctccgcctcgcccaaccccaagactcagcctcagcttcgggcgcagcaagaagctccgcctcgcccgacctt

SEQ ID NO: 37903 - DNA, 467 bp, Zea mays
  unsure (1)..(467): unsure at all n locations
agcttatgaagaacttcatcccacatgggcttgtcgacgatgcagaggcaacccatattggttttagcaatcacgcaactatcaagtttaacattgttatttatgaaatcaaccaaataaaagtgaccctttaacacccccttgaaagccactaaatcatcacttctaaaaatgctaacaccaacatttgtaaacaaactggtgtagcccatctgacataatngagaaacatgaagcagaatgtagcctaaggactctacaagaaatacattacanatcacatggtcaagagatatagcaattttacccaatcctttaaccaaaccttgatttccatccctgaatgtgactgccttttaaggatcatcatttntctcatatgaggacaacatcctcttctcccctgtcatatagtttctttatcagttgtcgactattcaacttgtcatctagatgcataaacctac

SEQ ID NO: 37904 - DNA, 371 bp, Zea mays
tacttagcttgacgactggcaggtcgatctctgtttgtcttcctacgcgggcacatgcctcggtgggtatgacaagctccagcgcagccgccgcttatacacggtccaaagcggccgaaccgagctgttccatcatcaagcaggggaacctcatggtcgtcgccaacgttggcgactctcaagttgttctgggtaccgcatccgaccatggtgccgtcacgccgtctagctcattggccacgtgaagcccaacctacctggtaagtcgctattgaccggccatgaattcttgtgcgctgggacgaccaccgttgctgacgttgtgtgagtggcctcaaacatgatgtatgtagaggagtaacttattcggg

SEQ ID NO: 37905 - DNA, 369 bp, Zea mays
  unsure (1)..(369): unsure at all n locations
gcttataaaggagagctcactttatgattaacaaatgttcattttgagaaagacaggatttgtagcgcatgccaagcangaaagcanagtggtgctcaccatccacacaagaacatcatgacgactgacaggccactggagctcctacacatggacctattcggcccgatagcttacataagcatcgacgggagtaagtactgtctagttattgtggatgattattctcgcttcacttgggtgttctttttgcaggaaaaatctcacacccaagagaccttaaagggattcttgagacgggctcaaaatgagttcggcttaaggatcaaaaagataaaagcgacaacgggacggagttcaagaactcac

SEQ ID NO: 37906 - DNA, 343 bp, Zea mays
ttgcctcgggcagacgaatatattttttgtttacaagcaatgggagtggagagatggcgacagtagcgtgtacccttcgtggcaagaggttggacggtggtgtatctgtgctctcggttggcgtgaacccagtctggtcttaagaaacccggtggcgagttgacatatgcaaaggttaagtgctacatatgtcatgtgattggaaatccccaactgggtattaatcgaatcagatcgccggtattcttcggatatgaagacttggtcactgccctacacgtagaatcccagtgaactgaaagggttgataaaatacagctatgttaggccaagtgcttgaact

SEQ ID NO: 37907 - DNA, 418 bp, Zea mays
tcacggtctcaccaggatatctcctgtggcttgaatcgaatggagggggactggagaggggttggccactgcggtggttcttggtcggcactggcgggctgcggggaggtcgccggatgcaacggctggctcgggcgagtccggcgaggtacggaggaggtaacggggaaggcaaccgagcgcttggggcgggtttatatgcgcggacgcggccggggcgtctgttctaccgtttggcgcgacgcgggcacgcggggcgcgcgcgcgggcgtgctctggcgagctcagagcgcgtcgaacacgtggcgcgttgcttctgcccgtgttcttcgctctgctgagcggccaggcgtacgaatcttgccctaccgcctgtgggagatctcttccctgcacctagagctacctagttcatgtg

SEQ ID NO: 37908 - DNA, 378 bp, Zea mays
tttccttgatgatctggaaactttcctctttctttggagcccacacaaacttattgtcctttttgataagttcggtcataggttttgctatgctggagaatcccttgataaagcggcggtgataccctgccattcccagaaagcttcgtacttcactgacgttggatggctgtttccaatttgaaacggcttctaccttggatgggtccacttctattccttctgcagtcaaaatgtgccccaggaaggctatcttctctaaccagaactcacacttgctgagtttagcataaagttgatgtgctctaagtcttccgaggacgattcggaggtgacgttcgtggtccttgtgactcttggaatagatgaagatgtcgt

SEQ ID NO: 37909 - DNA, 465 bp, Zea mays
  unsure (1)..(465): unsure at all n locations
agcttcgaaatagtgatatacacacacgatgatttgatctctggagcaaggtagagtcctcaagacttgttcagcaagactacaaagggaaaagacagtagtgcccttagtcagtcttgtaactcatatgtataggcttgaggacatgattgtaatttcaacaaagatgtaccacacaactattaatagaggaataatgtcatgcanttggtacgctnttttctcagagagaactgactcgttctacctacgaagttgttcacgttttctaccttcgtattggtgcttgtaaaaaccgaaggtacaattgtaatcattgatcatataacgaaatgaagtaaagtaatgtatgaccaagatgagttactcattttatatttatattttacatattcaattcctgtcatcttttacaanctcatactcttacattctccctttaattaatctcttcaagaagagtta

SEQ ID NO: 37910 - DNA, 381 bp, Zea mays
tcgtcttaaccattcgcaacctgactcctttgtgcctgttccgaaggtgcctgttcacatattacacttggaaaatattatcaaattatgtttcttgtggaccttcgggagccgaaggcccccaacagtagcccctcgcaatatcaatttattaagataaattcatattgcgacatggacgaaggctttaagccgaaggttcgaaaaaacaccttcctcttgctagaatagcaacagtcattgaccagcggggccctccagttttcgacatactgggtgtataaatacgagcccaccgcgagtttatttggcacgcccttttgccacctgctttttactcacccagcttttagcctgtgcacccagcatctgctcggtctt

SEQ ID NO: 37911 - DNA, 437 bp, Zea mays
  unsure (1)..(437): unsure at all n locations
agcttgcacacatagctcatttgaataccttttatatatctcttttatatgctaagactaaagtgtnttcaagtttatttcaaaccaagtcataagtatattgaaagggaattggagtcttctgcgaagacaaaggcttccactccgtaactcatacttcgccaccactccgagcaactctcttctctttgggggagaaatgagcatcaaggaaaacgactttatccttgggggagagagtaaaagctcatacgcaaaaagacttcgtctttggtataatcctaacttacttatttatgaccaaaggggaagaaagtacttcaagggctctaatgattccgtttttggcgattcatgccaaanagggggagaaatgagcccaaagcaaaaggaccgcaccatcaccaatttcgaaaacttaagtattgaatattttc

SEQ ID NO: 37912 - DNA, 380 bp, Zea mays
tgacgggcggtccaagcctgatcgctggcgctcggatagtcccgctagtggcggctcctgcagctccgctgggagtgtctcctctggcccctccttccgcgacgtggtgctgctttcccggccttctccggctggtcggactcccaagtctgggcctcgggtgtctctatgcagggagcttcaggacgtggttctccagtcatcggtcgtgggggacctacgaagtgcgccgctgatggttggcagacagtggagtcccggcgttccaagcggccgcgtctgaaggctagcaggttccagcgacctgcacctgccaatctttccggcaggtgcttcaactgcctctccccaagtcacctggtccgagactgccgttcaaa

SEQ ID NO: 37913 - DNA, 382 bp, Zea mays
agttcggacgggggactctcgaagccggcataaccaatggttttgccacgaagaaatttctcgtgtcagtcctcttgactgttatatgttggataccacgccctcactctctgataccatattggtgaaaatacctcgacacgcgactgaaacggtgaactctgagcgttctccctgagcccgtgggcacggtggcccgacatatgtccagtgcctccatcgcctgtgagaggcacactgtgtgggtcgattatgtttcagtgaatatgcgaaggggcttctttgatcgatgagaaaacttatggcaggcttcacaggaccttgtgacccgatttgcagcgcacatcattgcgggccagtagaaaccttgacggatcacctt

SEQ ID NO: 37914 - DNA, 374 bp, Zea mays
agaaggagatggtatgaaccttttttgttcttgagggagttaattcaattcttatcaactcaagctatcaatcttcaaatgatctacatattcaagattgacccaaggttacttcaatttattgtattcaaaactcatatcatctccggaagatattaatgttgtaggaaataaagaatcatcatgtgcggaatatcaaagcctacaacatggaggagaatcaaaggatggtaacatttatattcttaagtgcaattatcttaaattgtcgtgtgtcttgtgtagtcacatagaaatagaaagcacttaagcatgttttaaaattatgtcatcattctttgaagaaattcctctcatatggtagattgtgtatt

SEQ ID NO: 37915 - DNA, 460 bp, Zea mays
  unsure (1)..(460): unsure at all n locations
agcttagaagagggtcattatgctgcttacatcaaagttaggaccaacaccttccatttctctaatttggtctaacttgaaattgctaacttgagttgctaactcaataggatcacccaaaagatgttgattacctcaataggcccatagagaactatatgcctatgcaaatcatatttggaagtggggttgtgaaagtcgcctagagggaggggtgaataggcggaatctgaaaattataaacttaagcacacactacaagccggggttagcgttagaaataaaaccaagtccgaaagagagggcgaaaacaaatcacaagcaaatagcgagagtgacacggtgaattgttttaccgaggttcggccctcgaaggcctagtcctcgttgaggtagtcacaaagaccggatctctttcaaccctttccctctctcanacggtcacctagaccgagtgagc

SEQ ID NO: 37916 - DNA, 377 bp, Zea mays
  unsure (1)..(377): unsure at all n locations
tgcgcatgagcgaggcaatggaaaataatgcactcatgtcaaagcgactagcaaggaggtcggtgtagacatgattgaagtcattgtctcatcgatagagtcaagcagcaaggaggtcggtgtagacatgattgaagtcatcgatagaaccaattgtggccatgtacacagttgggcgctagctccacttatgggcttgagatttcccaagggcgagtggatgtgttacctactgatgggagtgacatggaagtggatatactttgttgttgtcttcccctttccctctcacctcttgcactttcttgcccatttatttgagattcanggtctgtttgctttacatgtggattcttgaaaatcaattctaaaaaact

SEQ ID NO: 37917 - DNA, 301 bp, Zea mays
  unsure (1)..(301): unsure at all n locations
gctttcatccttcttcttcactattgtgctggacatcctcaagggcaagtacttgggcgaataaatnccttatccagcaactcctgccagtgcttcttcaattctgccaactcagcgggtggcattcggtagggcctcttggaaattggtgtcgttcccggttgcaactcgatggcaaattcaatatcccggtctggtggcattcctggcaattcatcaggaaagacatccgcatactcacagaccactgggattgtcttcaaaggtaactccgtcatagagaaagcacatgactgagttg

SEQ ID NO: 37918 - DNA, 376 bp, Zea mays
tctcttggacaagtgctgcacttttgttgtttgcgaagctgccacatataacaacagaggagcccctggcgttggtggagttagtgttgttaggtctatcaaatattgcttcagctctttgaaggctttctgctggactatccccattgaaaaacttcggctgacttcagtacttcgaaaaatggtaaatttctttctgctgatctagatatgaatctgttgagagatgccagtcttcgtgtcaatctttgagcccccttctttgtacttggtggttccattcgaaggatagcttcgattttatttggattagcctcaatcccttttgttgaaactaggaaaccaagaaatttccctttcttcactccgaagacac

SEQ ID NO: 37919 - DNA, 380 bp, Zea mays
  unsure (1)..(380): unsure at all n locations
taagcacctgagctgcagcttgccctagtccaccatcattccattttagtcctacggaagtggtagttcgggtgtggctggtcgttctcatagatgttgtcgctcatttgatggaagtggtagtcacagtgatggttctcaaaggacggaagtggtagtctccgtgatggttctcgaagtcggtgacctacttctacctctagcaatcgaacatgcaagtggtagacatctcttatacgattgcattgcgcattttaaataatagttagagaaccaagaggacaaaggcactaacttgtggagttcgatcgacgtggagtatggctccaccgaanactcctgtcgcagtctgaactatcgggccactctgtggggcaagt

SEQ ID NO: 37920 - DNA, 355 bp, Zea mays
tgtgaaggttcttcatccccacatgtgcttatcggcgatgccacaaccagcccatgctagtcttagctattaggcatgcatctagaccggcctcttcttttgcaaaatcaactaaataaagtttgccgtctaatacacccttaaaagctaatgaaccatcgcttcttctaaagacagacacatctacgtttgtaaataaacagatataccccatgttgcataattgactaacagatagcaaattatattccaaggactcaactaaaaacacattagaaattgagggctcatttgatattgcaattttacctaatccttttaccttgccttgattcccctccccgaatataattga

SEQ ID NO: 37921 - DNA, 374 bp, Zea mays
ggctactactctgaccacaaggggtatcggtgtctggacctcgccttccaccgcatcatcatatctctgcacgtcgactttgacgaggatgtgtttccccttgctggcccctccccacccaccgatctccactccctcctcgagtccgatcaggactgcccctccttccatgtgccccgccttgcaccgtgacccgcacaccgtgcgggctcgacgtcgtggctcgcgcctactcccgcgccacgcgcgggcccgtcgaacacgcccgcgcctagcgctgccccgccgacctctcccgcaccatgtgcggacccgtcgacgcccacatttgcttcgcgacccacacttgttaccgacgcgtcgcacgtcatacc

SEQ ID NO: 37922 - DNA, 377 bp, Zea mays
taatgcccctaagaaattgtctaattttgtttatggtaaggctcccatggttcaggataacgagggttacattttatatcccgtcggttatcccgaacacaaaattaggagaattcattctaggaagtctcactctggctctgatcatgctttcatgtataagagtgaggcatctagctctaggcaatcaacccatgttaaattgcttaaaaagaaatctcttattgcattaaatgaacctaatatttcatttaagacttttgatgcttcttatgtgctcactaacaaatcaggcaaaatagtggccaaatatgttgggggcaaacacaagaggtcaaagacttgtgtttgggtacccatggtgcttgtttctaatg

SEQ ID NO: 37923 - DNA, 399 bp, Zea mays
tctgagactgtatctgtgtcctcacagaccaccaaggtgaaatacttggaagccgcaaaaacacaactagcgcaacaaatttctgctgacaaaactggcgctgtcgcccccgaagcatcttccgaagccctcgattatattttacgtcatgctgtagggaaaaaattgattgaaaaagaaaagctagaggcccaattttacgcccaatagactgaaatatccaaagggggcgttgatattcaacaggagtggagaagaagactttttgtattgactccctgacagcaaggagatctctgtctgtcgggagatgagcaagagcttcggattcccaacactataaaacgggctctcggtgttatcaaaagacgagctaaccgatagcttggcgtacaatag

SEQ ID NO: 37924 - DNA, 370 bp, Zea mays
ctttaaccccgaaacgcgatactcctttctttggtgaaactttcaggtagacatagtcttcttcatgaaaatacaacggcattcgccgtttgtctgcataacccttctgacgagcttgtgctttcttcatattatgaataattttctaaaccttttcttcggcctccttcaccatatcaggcctaaagaagtacctttccccaggttcagaccaatttagcggagtacgacatcttcgtccatataaagcttcaaagggtgtcatcttgatactttcttgatagctattattatacgaaaactccgccaagggcaaacattcatcccgtttttgtgagaagtccagaacacatgcccgcagcatatcttc

SEQ ID NO: 37925 - DNA, 443 bp, Zea mays
  unsure (1)..(443): unsure at all n locations
agcttctaagggagaacacgtgataggttttactaacgtgcaattcgaaaaagatagaccttgtgcagcttgtcaagcaggtaaacaagtgggaggaacgcatcacaacaagaatgtgatgaccacatcaagacccctggagctgctacatatggacctcttcggacctgtcgcctatctaagcataggaggaagtaagtatggtctagttattattgatgacttttcccgcttcacttgggtattctttttgcaggataagtctgaaacccaagggaccctcaagagctttctaaggagagctcaaaacgagtttgagctcaaggtgaagaagataaggagcgacaatgggtccgagttcaagaaccttcaagtggaagagtttcttgaggaggaagggatcaagcacgagttctccgctccctacacaccacaacanaatg

SEQ ID NO: 37926 - DNA, 376 bp, Zea mays
tgttcatttcctttgatagggaccaaaaaatccatgacaagtcagtaatgaattctagaattcaaaggccaatttgaggagggctcacgaccgctctagcaaaaaatagagcaagggatagtcgatgatgggcacagtagcagccaggacttagacgcgagaaccattaagggcatcatcagcttgtgttcgactcctaggaaggtctgactcatagtttatcatgaagagaattagtgagtcattggttccggtcaaatggaatcgacaactatatgagtcggtgtctgggtgaaagtgcattcatcccttttatgagttttggtgatttggataacaacacatttaaaggtctaacaagtttgctaagtgttga

SEQ ID NO: 37927 - DNA, 347 bp, Zea mays
actggtggaccacaatgaagttgtagatagcccagtatgtatcggagtgtgacacctgtcatatgataaaggcaagccacttgaagtcagctggagctttgcaaccactattcgtaccttcgtggaagtgggacgacatcatcatggatttcattgtgggtctgcccaacacctctcgtcatcatgattcgatttgggttattgtggaccgattgacgaaagtggcacattttcttcctgtgcacaccacgaataaggctcataagtatgcagaattgtatattgaccgaatcgtgtgtttgcacggattacctcgaaccatttgttctgaccgaggagcccaattt

SEQ ID NO: 37928 - DNA, 374 bp, Zea mays
tctaaagggagagcacattttaggattaacaaatgttcattttgagaaagacaggatttgtagcgcatgccaggcagggaagcaagttggagtccatcacccacacaagaacatcatgacgaccgacaggccgcttgaactactccacatggatctattcggcccgatcacttacataagcatcggcgggagtaagtattgtcttgtaatagtggatgattattctcgcttcacttgggtattctttttacaggaaaaatctcaaacccaagggaccttaaagggattcttgagacgggctcaaaatgagttcagcttaaggatcaagaaaataagaagcgacaacggaacggagttcaagaactcacaaattg

SEQ ID NO: 37929 - DNA, 455 bp, Zea mays
  unsure (1)..(455): unsure at all n locations
agcttgagntttgagggccctatattgcatatgaccagtgactctctcaattaaggactttgccacccagatttgtctaggtctactcttatttggtggacctaggaatgtaaccttaatctttccatttgcaacctttcttagaacatagtgagcattgaaagcaaatggtctngagtgcttangcaagggagttggtggtttagctttgcagttgtgggcaaaatgaaccttcattccacattcaaaacatttgataggcttgtgagtctgctctggcttgtattgagtgatagctntctttngcacanaagcattgtatccaataccactcttgttgtttatcataacagtgttcataagcagctcattttggaggtattgacccttgttgaacttcgcacacttgttgcaagatgttcattntcactctnntagttcttgacctcattctt

SEQ ID NO: 37930 - DNA, 329 bp, Zea mays
gaagaaggagatttcttatctgttataaccccggctcccgcagaagaggaaattgattactctgcggagaaagatgctatataagggatcaagcgttaggctgcgaaaaacattcattaatatcaagccaaaacaattaaatggggcgatataaagggtgggctaaagaacattaaaccaggacaattggggcttccgagagtggccaacccagatacagtaggcaagctatcgttgaaatgggaaggaccttttttggtggtatcttcgacaagacccggcttttatatattgaaggatatggacgaccacgacattcctagatcatg

SEQ ID NO: 37931 - DNA, 481 bp, Zea mays
  unsure (1)..(481): unsure at all n locations
agcttctaaagcgaaaacacgtgataggtcttatctatgttactttctaaaaagatagacctcgtgcagcttgtcaagcagggaaacaggtgggaagctctcatcatgccaaaaatgtgatgacaacatcaagacccctggagttactccatatggacctcttcggacccgtcgcctatctgagcataagaggaagtaagtatggtcttgttatagttgattatttttcccgcttcacttgggtattctntttgcaggataaatctgaaacccaagggaccctcaagcgcttcctaaggagagcccaaaacgagtttgagctcaaagtgaagaagataaggagcgacaatgggtccgaattcaagaatcttcaagtagaggagtatctcgaggaggaaggaatcaagcacgaattctccgctctctacacaccacagcaaaatggtgtgatatagaggaagaacacgacgcttatatacat

SEQ ID NO: 37932 - DNA, 381 bp, Zea mays
tgtcgtcgcgacaactccattctaccccgtcgtcctcttcatcgggggagagtggaatcatcccccatctccgacgatgaaccaaccgtgcctggggaagaacctcctcagtgggaagctcgccgacgaaggaaccgacgccgtaatgcccggccacctcatgaagccgaagaacgagacccagcgtagcctatatcacgagatgagatctcggaggtgggagaaactccagatgaacaagtcttcagggaaaggaggaattcccgccgacgtgatcatcggcaagctcaagagcaagcagagtaggaggcaagacaacatcgagagaaccctctcctcagacgaaatctgaaccccgacttcgcccgagccatgaacaca

SEQ ID NO: 37933 - DNA, 383 bp, Zea mays
  unsure (1)..(383): unsure at all n locations
agcttcggatcatttctcttcggcttcgtcattctgtttataacanagcgttataaggtaaatttaagtttcaaggaaaaggtaagcacaaggtatgagtttattaccggtttgaggtgacttcgagcttcgtcaccagccaagcttcgtccacccttcgcctaaatttgagttacaaatctgttcccaatgcttcgggctaggccggggatgtcattcaagtctgctggtgataagctgaagttcggcctgtttacaatattcccgtgcgtgcaaccagccttcataaaagcaacagctgtgccacgagaagctagcagagcgcagaagtcaccatgcccagctattacttcatcaagagcatcaacttcgccttcaatatg

SEQ ID NO: 37934 - DNA, 381 bp, Zea mays
taccaatgatgaggcatgtgaccagttaataggttctcgatcatcaggcctacatcgataaggtccttaatcgactcagacggagacactacaccgagactcttctcgtgcaagtcacccgcccggtctcagctttatcatttcaacccaaagtttggtacctgacagaggtacatcttgtccgatgttgaacccatcatggccatgatggattcaccatcaagttttatttttgaaaacatcccatccactgtgaagcatcatcttttgttcaaaaacaaaatattttgtttttctaaagcaaggctaagcattagaaaaaaccctttcattaaacaggtgatcaaggaaaagtaatcaatttcccaaggaaggaaatgc

SEQ ID NO: 37935 - DNA, 477 bp, Zea mays
  unsure (1)..(477): unsure at all n locations
agcgacgcagcatgcaagcntggtagttcttatacctactgtgcttatctgttatgtcacacccagcccatgctagtcttagctattaagcatgcatctagaccggcctcctcttatgcaaaatcaactaaataaagtttgccgtctaatacacccttaaaagctagagaaccatcacttcttctaaagacagatacatctacatttgtgaaaagacaattatatcccatattgcatagttggctaacagatagcaaattgtagccaagagactcaactaaaaacacattagagatagagtgctcattagaaatggcaattntacctaacccttttaccttgccttgattcccatcaccgaatataattgaatcttgggaatctttattcccgacataggaggtgaacatcttcttctccccgtctatggtttggcattcgctgtcgataatcaacttgaacccccagatgcataaa

SEQ ID NO: 37936 - DNA, 378 bp, Zea mays
tctagatatgtcgaggtgacaaatgatgaggttgttttggtagttacgaaggttgcagctaagcaacttcgtcggttgcccatcattcctcggctttcaaggctgttcctcaacaaggaaatagctctgcatatgacgtggccaaagaatggtgtacgtctcgtcactgatccagacataatggtccatccgtcggacggtgatgcgtggaaggcatttgacgagtttgatcccgaatttgcaaatgaccctaggagtgtacggcttggtctatcgacggatggattcacacctttcaataccagtgcaagcccttactcatgttggcctgtcttcattgtgccatataatcttcctcctgagttggtcaataaagaa

SEQ ID NO: 37937 - DNA, 444 bp, Zea mays
  unsure (1)..(444): unsure at all n locations
agcttcagcttcatctatattatggatgacctttatattctttcatacttccttggctctcctggcagcttattgactcccatatacagcaatgggtccatgctccgaaggtatcttaatgcaaagatatgttgggtggagtattgcttcgaaggcattgaccgtccctcgaccaacgattgcattgtatggatactccatatcaacaatgtcgaagacaacctgctctgtccttgtgttgtgaatgtagccgaaggtgaccggcatggttatcttgtcgagtgccacaatctgtcttcctccgaaaccacaaagagggtgtgttgcatcatgtatcttgtcatccggctcttgcattngtctaaaagcctttgagaaaatgatatcttgtgcactgcctgtgtccaccacgacattgtggaccaaaaatcccttgatgacaca

SEQ ID NO: 37938 - DNA, 371 bp, Zea mays
tgaactgacctgcagaaggctggccacggttatgttttcactgtggcgcgggaagtagatttggggaagaaagaaattatggcgctatggtggctaatctgaagcaagggcgagtgctctggcttcttgacgacctggcagagttctttaatgcttcaatttatagagcttaacggcggtggcacccaatttgaaagaagtgtgcttgcggccgaagagattgactgagtcactgcggtgttctaccgcggcattcactggttgaggagctacgacagtcactagtgagctattacggcttgcagcgatggggtgaaagagtcacggcgtggcgcgatcaccgcgaatgacgtataccttgacgacggcgc

SEQ ID NO: 37939 - DNA, 462 bp, Zea mays
  unsure (1)..(462): unsure at all n locations
agcttgcacgacttaagcctgtgaacaaaatatatgtttcttgtggcaaacaacgaaactattacatggtatttgaaaaatgtcctttattacacagaaaataaaactgaatgaaaaagactgctatcaaggtaggatatttgtcaatagatgtgcttctactctggcacagtgctgttgactgtgcgagcttcggactgttctctgaagtccctttggtgtggagcatattggctcccttctggctgtaggccctgttgcagaggtggtggaggccgacgctgttgacaagaaacttgatgttgaatctccaaagcaacagaaactgcagggtggttgcctacatattctggaatgtaaggcgaatgataccaatcagtgtgcatgacctgctgtggctgagcccgttgtgccgcagcttcngctatcttcttctgttcttgatgggacatggcacatcct

SEQ ID NO: 37940 - DNA, 378 bp, Zea mays
tgacattgtctccatgttggaagccaatgccatccttaatgccagggcgtctcccattataaagcatgctacgagcaaatttaaaatttttcattttctagttcatgctcgacaattttagcatctagtttagctatatgatcattttgttgtttaatcatagcaatgtgatcatggatagcatcaacattaatatctctacatctcatgcaaatggaaacatgatcaacagtggatgtagagggtttgcaagcatttaattcatcaatcttagcatgtaacatggcattctcatttataagattggaaatagaaactttgcaaacatctaaatctttagccttagaaattaatttatcattctcaattttaatgcta

SEQ ID NO: 37941 - DNA, 454 bp, Zea mays
  unsure (1)..(454): unsure at all n locations
ttggatataatgaagattgctttcttatttcttgatagactattacatgaagctgctgaaaaagtgctaaaggaagattaaagttttgtatgcttgaaaatgtaatgcttacgtatggctgtcgccttgtgttaaaaacaaacatcaagtatttgtatgtacattaatgtaatatatttctttgcgatgcatgaaatcttcgtacgtaccgtntttgagcctttgcaaaaaaacaccttcccttcttttcatgcttcgcaaagaaaaggattttccttatgccactgttgacgaaggttagcttgatttaattcaatatatctaccgaagacacgtcttatgcttataaaatcttctccatactccgattgattttagggagagcaactnttctttgttctccagatcttttagcgatgcaaatgatgtatgatcgatgctatcaatatatgtg

SEQ ID NO: 37942 - DNA, 372 bp, Zea mays
tgtcaccagcatatccttgagcttttgctcttaagtaatggtccctggccgaagagaagaataccatgtttgggccacattccgaactgccatgatgaaggacttggccatgacagctgcattgcctccatatgaagatatagttgcttcataactcatcaaaaactgcttcgggtctgaatgcccatcatacatgggaagctgaggtggcttgtatgatgggggccatgggatagcctgcagttctgctgccaagggagaagcatcatcaaaagtaaaggtatcatgattaaaatcatcataccatccatcattgttgaacaagccttcttgatgaagctctctatgttgggggccttcgatcttgctcgt

SEQ ID NO: 37943 - DNA, 465 bp, Zea mays
  unsure (1)..(465): unsure at all n locations
agcttgcctgcctgcctacattgcttttggatgtaattaactcaagnagtaacaggaccacccggttatgctatccacattcttcacgactggaagcagtatctgacaactacagtgtgcaatcatgcgttaagatgtcttgcttctgagctacagctaatgttcatcacttcttacttgcttatggacaccataattatatttccgcacgaggaaacaccatttccattaaatcataacggaaatacagatgttcgggcatagagatagaaaaaaaccagaaccacctgaaaatggctagatcttatctagaaaaaaaaagtacagcatagtattcagttgcatgatacagtaggttttattctccttcaatcacaatgctatcttctttcaagattttaaatagtggtctttttctttacaccactagcacacttagggggggggatctgtgttaagatccct

SEQ ID NO: 37944 - DNA, 387 bp, Zea mays
aaacctcagcttcaacaggtggctgcatgtggcttattcttctttttgaaaccagcacctctaggaccaccagaactggatagacaagtggctgcatgttccaatccaaaactggagaatacccagaatttggatcaccagatgtacccagaattggacatgatatttatctaacactgtcatcctgcaagacagtagcaaagaggttctgaaaactgaaaataagttgccatgtagaaacacctgacagcaacagtgatgaactgaagctagctgaaaatatgtggtttctgaaaactgaagataagttgtcaagtctagagaaagtacttgaatacattacatcacacacaagtttagagaaagtgcttcaatacattacatcat

SEQ ID NO: 37945 - DNA, 302 bp, Zea mays
ctgacgctgagtatggatgacacggctattttttctgtgaccatcacgaacaaggattgttggccaaagactgacgttctcttcgaagaggagggtggagccaaagtgctttctaaaatataccttatctcctgctgtcatcagatcaggatacgggcgagtgtcatcccagagacggctaccaacacccgatatgggttgtatgaattattgatgatgacattcgtgctgacgaaagcaccagcagatttcaagaaactgaggaatcctgtactcaggcctgaattggacgcattcgaaat

SEQ ID NO: 37946 - DNA, 374 bp, Zea mays
tcctgggttcgcgtacgccgcgccgtcgtttatgttcttgggaaacggcggcgacggggcgcagtgctccgtgtgcctcggcgcggtgcaggccggcgagatggtgcggcggctgcccctgtgcaagcacctgtaccacgtggagtgcatcgacatgtggctggcgtcgcacgcgacgtgcccgctctgccgatctgacgtcgaaccgccggggatagcgtcgtcgacggagccgccggagactctgccagtgtaattcgtcgttaaatcgtagcttgtcaactgtgtaatactagctaatacaattgtgtatatacatcaagactttgttgggccatatcatcttcttttcagtgttctacctatttccattg

SEQ ID NO: 37947 - DNA, 451 bp, Zea mays
  unsure (1)..(451): unsure at all n locations
agcttctcctggacaagcgctgctcttactgtttagtgcgaagctgccacatataataacaaaggagcccctggcattggtggagtcaatgttgttagatctattaaatactgttttagctcttcaaaggccttctgttggattggtccccattgaaagacttcggctgacttcagtacttcgaagaatggtaagtttctctctgctgatctggatatgaatctattgagagatgccaatcttcctgtcaatctttgagcccccttctttgtagttggtggctccatccgaagtatagcttcaattttacttggattagcttcaatcccctttgttgaaaccaagcatccaagaaatttccccttcttcactccgaagacgcatntntctggatntaactttaagccagcttgcctganactggcgaaggtctcctgcagatcagcaatat

SEQ ID NO: 37948 - DNA, 373 bp, Zea mays
tgaagccatggtaagtagcataggtaagttatatgcgaattgactcaagcctagctacgggtgcatagatttcaccaaagtccaaaccttcgacttgtgaatatcccttggctacaagtcaggctttgttccttgtcaccacaccatgctcatcttgtttgttgcggaagacccacttggttcctacaacattttggttaggacgtggaactagatgccatacctcattcctcgtgaagttgttgagttcctcttgcattgccaacacccaatccgaatcccttaatgcgtcttccaccctgtatggctcaatagaagacacaaaagagtaatgctcacaaaaatgtgcggcacgagatcgagtggttacccc

SEQ ID NO: 37949 - DNA, 52 bp, Zea mays
gtcccggaccttaagcactgagctgcacctgggtgcctagagtgtcttcttt

SEQ ID NO: 37950 - DNA, 477 bp, Zea mays
  unsure (1)..(477): unsure at all n locations
agcttgaaattgactgataatgtcctcatttttgacttgctagtaaaattgtctttcaataaaaataaccaagcatccatttaaattnttttgtctcatcttgcttcttagcttattttttataaagttcattgaagaaaagattctttcaacaccggcagttgtaacatgaagaactagcaccaatttgagaagcttgtaaacaatgtcataccaaagaatcttatctgttttgacaagcatcatagataactctgctaggcttctcaaatttttgaagttttcatctcttctctaggcttctcaaatttatttttgagccttatacaataaaatatttgaggtaactgactcacggattgatgttttaggtgtcaaaaataaattatatttctcctcagcttcacaatgagcactatcaacaacaccaacccttaagcaatctagctntaacattccaatttctaaacccctcat

SEQ ID NO: 37951 - DNA, 383 bp, Zea mays
tgccaaaagagttatgcagacaagcgacgtttacccttgtactttcaagttgaagattatgtctacctgaaagtctcaccaatgaagggtgtatcacgtttcggggtaaaagggaagcttgcaccctggtacattggtcctttttccagttcttgaacaatgtggaccagtagtatacctgctccaattacccgaaaccttgtctgtagtgcataatgtgttccacgtgtctcaattgaagaagtgtcttcgggttcccgatcgaaccattgaagtaacggatgttgccttagaaccagacttgacatattcagaataccctattcgagtcttggatcaaaaggacagaactacccgaaggaaaactctcaagttttacaaga

SEQ ID NO: 37952 - DNA, 440 bp, Zea mays
  unsure (1)..(440): unsure at all n locations
gcttcccttaaccccgaaacgagagatacctcttcattgtttacactntcaaataaacataatccccgaccaaaaagtataagggttgtcgtcgcttgtctgcataacctttctgacgagcttgggctttcttcaggttatgaattattctgtgaactttttcttcggtctcttttaccatatctggcctgaagaaactcctttcgcctggttcaaaccagtttaacggagtgcggcaccgtcggccatacaaagcttcgaagggtgccatcttaatgctttcttgatagctattattatatgagaactccgcttatggtaagcaatcatcccattttcgtgggaattccaaagcacaagcctatagcatgtcctcaagtatttgattcaccctctcaatctgcccacttggttgcggatgatatgccgaactatggagc

SEQ ID NO: 37953 - DNA, 383 bp, Zea mays
tatgaaattgataggagggtcaagtcttgttcctttggactagtcaacacaaagtgaataagatcaagaataaaggctttggttcacaacaatcgaccttggcaatactagtacaacgaacaatgtctattcatgagaaaaataagaacataacaaaacacaagccctaacaagagagacaatggataattgtgaattcttgggtgtgatcacccctagatgcattctaatgagctctaagacgatatacgattcaatagaccaagacacgatgtcgcaacaccctcacagtctctatatgccgagttgttttgattattcctattggtcctgcatgaaatttaacattaaaccaaaaccatctgttagattataaaatttgg

SEQ ID NO: 37954 - DNA, 449 bp, Zea mays
  unsure (1)..(449): unsure at all n locations
tgcagctttaaaggaagccattcacgactttctatgtcatttttagaaaacaggnattgtgcgcatgccaagcacgaaagcaagttgggactcatcatccacacaagaacatcatgactagtgacaggccactggagctcctacacatggacctattcggcccgatcgcttacataagcatcggcgggagtaagtactgtctagctatggaggatgattattctcgcttcacttgggtgttctttttgcaggaaaaatctcatacccaagagaccttaaagggattcttgagacgggctcaaaatgagttcagcttaaggatcaagaaaataagaagtgacaacgggacggagttcaagaactctcaaattgaaggcttccttgatgaggagggcattaagcatgagttctcttctccctacactccacaacaaaatggtgttgtggag

SEQ ID NO: 37955 - DNA, 384 bp, Zea mays
ctgagctgaccagctgctagcagtggtattcttacagacatggatttttcaaaaccacggagctgatatagtctacataaaagacctcaaagagtcacagcaagttaaggaaaataaagataacacactgttatgaaatgagcaagtccgtgattttgcatgacaaacctgtcgtagaaagttctctagggtgccaagttttcccatagccatcgccatttgtcccatgtaatttgcaacattgccagaaggtccagcatggcccagggatccagatgctatagtttctgcaagcgactgttgtaatgcttccatcccttgagaaagagcatcttcagcttgttgggaggactgctgcaggttggatataccaacaagctgctg

SEQ ID NO: 37956 - DNA, 497 bp, Zea mays
  unsure (1)..(497): unsure at all n locations
gatccctaagncgaccgaggcatcaagcttaaatggtgacatcttagactggctgttacatttttataagagaactcagcatatgggagactcttgtcccaactgcctccatgcttaagggcacaagcattcaacatatcctcaagtacttggttagtcctttcagtttggccatcagtttgaggacgataggccgaactgaagttcaacttcgtattcatgttctcatgaaggctcttccaaaatcttgaggtaaattgtgatccacgatcagaaacaatcttcttcggtacaccatgtaagcacacaattcgagccatatacaactctagcaactgagaacccttgtaagtggacttgaccagaatgaagtgagctactttggtcagtctatccacgattacccatatggaatcataacccttaggggtgtgagggcaatccggtaatgaaatccataccaatttcttcccactttcattcgtgtacttttaatg

SEQ ID NO: 37957 - DNA, 379 bp, Zea mays
tggcctcttgaaggttacgataaggtcactgaatgtacttaatctgtcattatcatgtattaagggttttacctaattatcaagtagtttaagtaaaggatgcatgcatgctcgacctaaacaaccttatttcaactcagagggaatagggaaaaactcccatcccttatagtagcctgtagggctaactcaaatagccacctagctacccctctattattctaaggcttcacgtcctaggtctacccttatcatcctgacgatctatccaacatttgtttctaacaagttttacttttgaaaaggatggtatttacagttgattgattctactgtggtggtacgagctccgataccagttgtggccgaaccgcccgaa

SEQ ID NO: 37958 - DNA, 456 bp, Zea mays
  unsure (1)..(456): unsure at all n locations
gcttcacgacttaagcctgtgaagaaaatatattctctttgtggcaaacaaccaaactattacatggaatttgaaaaatgtcctttattacacagaaaataaaactgaatgaaaaatactgctatcaaggtaagatatttgtcaatagatgtgctcccactctggcacagtgctgttgactgagccagcttccgactgttctctgaagtcccttcggtgtggagcatataggctcccttctggctgatggccctgttgcaccggtggtggaggcggacgctgttgacacgaagcttgaggttgactcncccaaacaacataaactgcacggtggttgcctacatattctggaatgtaaggcgaatgatacaaagcattgtgcatgacctgcttcggctgagcctgtcgtgccgcaacttcggctatttcctttngcttctggatggttacactgca

SEQ ID NO: 37959 - DNA, 378 bp, Zea mays
tgacattgtctccatgttggaagccaatgctttttcttttgccagggcgtctcccattataaagcatgctacgagcaaatttaaaatttttcattctctagttcatgctcgacaattttagcatctagtttagctatatgagcattttgtggtttaatcatagcaatgtgatcatggatagcatcaacattaatatctctacatttcatgcaaatggaaacatgatcaacagtggatgtagagggtttgcaagcatttaattcatcaatcttagcatgtaacatggcattctcatttataagattggaaatagaaactttgcaaacatctaaatctttagccttagaaattaatttatcattctcaattgtaatgcta

SEQ ID NO: 37960 - DNA, 363 bp, Zea mays
  unsure (1)..(363): unsure at all n locations
ctcaacggtcctcatgctcttgctcatttctgagaatataccagaatatcatcgatgaacaccactacaaacttgtcgaggtagtccatgaacacactgttcatcacgtacatgaagcaagctggcgcattcgtcaatccgaatgacataaccatgaactcatataatccatactcggggatgaatgctgtcatcggcatatcagcaggtcggattctgagctgatggcaactncacctcacatctatctttgggaacacactggctcctctcaactgatcaaataaatcttcaatactgggcagggggtacttgttcttgacagtgactctatacaaagcttttgaatcgatgcacatcctc

SEQ ID NO: 37961 - DNA, 377 bp, Zea mays
agcttgtgaagattcttcatcccaacattttcttttctgtggtgccatagccaacccatgttagtcttagcaatcaagcaagtgttcaggtcacctctatcaaaatctaccaagaatagctgaccctctaacactcccttaaatgctattgaatcatcacttcttctaaagacagtgacacctacattattgaatatacagttgtagcccatttgacataattgagatacggaaagcgaattgtaatctaaagaatctacaacaaaaacattggaaatggaatggtcacgtgatatatcaattttacccaatcctttgaccaaaccttgatttccatccccgaatgtgatagctccttgggaatcttggtttttctc

SEQ ID NO: 37962 - DNA, 447 bp, Zea mays
  unsure (1)..(447): unsure at all n locations
gcttctaaagggagagcacattnttgacatacttatgttcttttgagaaagacaggattngtagcgcatgccaagccgggaagcaagttggcacccatcatccacacaagaacatcatgactagtgacaggccactggagcttctacacatggatctattcggcccgatcgcttacataagcatcggcgggagtaagtactgtctagttattggggatgattattctcgcttcacttgggtattctttttacaggaaaaatctcaaacccaagagaccttaaagggattcttgagacgggctcaaaatgagttcggcttaaggatcaagaaaataagaagcgacaatgggacggagttcaagaattctcanatcgaaggcttccttgaggaggagggaatcaagcatgagttctctttctcctacacaccacaaacaaatggtgtag

SEQ ID NO: 37963 - DNA, 377 bp, Zea mays
tctctttttgccgaacaacgaagataccgttttaatgctttatagaacaaattggtatataatatgaggagaaatgtttgccctgctggcagcatcacaaattattaactattgttataaattctctctcaaaattataatacctaaaaatgttgcacaaattgatacccaatttcataacagtatgagtaattgggtaaaccatgggcaatgataaaacgagttggactatacatttctgcacataaaaatctttgcttgacaatattgggctgatgccgtgcactttactaccattatatacacacatattttttcatatgtgcttgaaagcacaatgcaaccagtgaatgtccttgtgagcgctaaacctgatg

SEQ ID NO: 37964 - DNA, 345 bp, Zea mays
  unsure (1)..(345): unsure at all n locations
agcctcaacatgcaaagccggttttatcaagtggaatagtgaaaataatcgctgattgatcttctgacatcactccttctaaactgatgtcttctttagcaacatgatctctaaggaagtgatgacggatatcaatgttcttggtacgagagcgntggacaggattattaacaattttaacaggactctcattgtcacgcattcaaggtacctttttagaactacgccatagtctaagaagagtctgtttcatatataagacttgtgtgcaacacacaccgcgcaatgattccgcttcgggtgacagacacattattttcttttggtgtcatgaactatgatctc

SEQ ID NO: 37965 - DNA, 366 bp, Zea mays
  unsure (1)..(366): unsure at all n locations
tgagttntgagggccctatatcgcatatgaccagtgactctctcaatcaaggactttgcaacccagatttgtctaggtctactcttgtttggtggacctaggaatgtaactttgacctttccatttgcaacctttcttagaacataatgagcattgaaagcaaatggtcttgagtgcttacgcaagggagttggtggtttggctttgcagttgtgggcaaaatgaccttcatttccacactcaaagcatttgataggcttgtgagtctgcttaggcttgtattgagtagtagctttcttttgcacaaaagcattgtatccaataccaatcttgttgttttcatgacagtgttcataagcagctcat

SEQ ID NO: 37966 - DNA, 426 bp, Zea mays
  unsure (1)..(426): unsure at all n locations
gagctgcnagcttatggacccgtggcatataatctgaatttaccttataaaagggctgccattcacagtgtgttccatgtatctcagctgaagaagtgtgttcgattgccgactgagatcatagcatagccagaattggagatagaaccagatctatcgtaccaagagtacccttccaagattctggattgcaaagaaagatcaactcgagctaaatcgatcaagatgtacaaggtccagtggagtaatcactcagaggaagaagctacttgggaaaccgaggaattcttgagatccaacttccccgattgcctacctaaggaagctggtatgtaatcacacccaacccttcctcctgcccttcgaatctaaaatttagaagtatagtcttaaatcagaatgatgaaatcatgaaacataatttac

SEQ ID NO: 37967 - DNA, 374 bp, Zea mays
tgttttgggctcgacttctttcttcatccatatttgatgatagactgaataatagtccaatagactcatgagctctaaggtggctgcgacgtccataagggagtctattcttggcaaagcgtactcatacttcggacatgccttattgagatctgtaaagtcaatgcacattgaaagggaaataggcttaatcatttcctatattcgattttggtggttgacatccatcacaaaccatgtggactaattagtttgccaagatgtcttttatctcaggtacataaggttcaacataaaccaataaagaaattaagttagggattcaacaaagtttgaagcaaagacttgagggtgtgctgccagtggtgcaccgg

SEQ ID NO: 37968 - DNA, 389 bp, Zea mays
acctcaagcacctgcagcatgcagctgtgaaagaaaaaaactgtggactttattttatcatacacacttgagaggggtgagtgccatcctcgtctattgagatgccacaacgtggattatgcgagcattttccgcttgaccgaactaggggctaaaatcattgcgtcacttgtctaagatactttacattattgcgattctactctttctagtactttactctacatacaatattgctctaagattaatactcgcctaatgagagcaattaagtgaagaagttctctcctctcaccctcttcattcggacttggtttttgttctcactaattcaatattaaaccaagtttgtgtgttaagctatttatacaggatcacctattcacccc

SEQ ID NO: 37969 - DNA, 366 bp, Zea mays
taaagccatggtaagtagcataggcacgtttatacgaattgattcaagcctagctacgggtgcataggtttcaccaaaatccaaaccttcgacttgggagtatcccttggccacaagtcgagctttgttccttgtcaccacaccatgctcatcttgcttgttgcggaagacccatttggttcctacaacattttgattaggacgtggaactaaatgccatacctcattcctagtgaagttgttgagctcctcttgcatcgccaccacccaatccgaatcttgtagtgcttcctctaccctgtgtggctcaatagaggaaacaaaagagtaatgctcacaaaaatgtgcaacacgagatctagtggt

SEQ ID NO: 37970 - DNA, 371 bp, Zea mays
  unsure (1)..(371): unsure at all n locations
ttgaaaggtgacattttgatgcttttttgttaattgacgntgcatgagaactctgcatatggtaaactgcattcccaatttctgccaaaggaccttattgaatctttatgtttgcccatctgactaaaggtggtaagtagtgctgaaatctaacttagagcccatagcttgttgtagactcatacagaattttgaggtgaaatgggttcctctatctgatactattcttcgtggtatgccatgtactctgaataattcattgagatacaactgggcaagagtggctcttgaaagtctcctagaggggggtgaatatgccacacctgaaatttataaactttaaacacgcactaatgtatgggttagcgcta

SEQ ID NO: 37971 - DNA, 368 bp, Zea mays
  unsure (1)..(368): unsure at all n locations
gcatgcaagcttcatgagcggnagctttcngtattacgttttaacaggntntgccgacagcgtttcttcctgagagaccttcggcgacaaagcatggtcccaacagcaggcggcgctgtttttctgtcaggtcagtcagtggagcggcgaagtgactgcggtcacttccgccttgtcgactgaggagcgtgcctcacgataaggtgtcagacgatccttgcattgaatgcttctgcgatacggtcggttggcgtggcgatctggccaaggttgcttctctgcgaagcttgcccgagctgggcctcgggcgagtctaaggtgtgcccgttgcctgatgggaccctcatgctagacgtgattccttctgg

SEQ ID NO: 37972 - DNA, 452 bp, Zea mays
  unsure (1)..(452): unsure at all n locations
acctgctgcatgcaagctcgcgaacaatataaattcagaagggagaatgcattcttatgcttatcaatcgaagcccatgcttttatgtgaggacatatcagagcagaaggtgctgttgggctctcaattatccgaagaacaagagaaaaccttgataaggtttttgttcaacaacaaagatgtttntgcatggtcagccaatgatctctgcggagttaataaggatgttattgagcactcgctcaatgttgatccatccttcagacccagaaagcagaggcttcggaaaatgtcatatgataaggccgaaggtgctcgtaacgaagtcaaaagactcctcagtgcaggagttatcagagaagtaaagtacccagaatggctagctaacactgttatggtaaaaaaggccaatggcangtggcgaatgtgtatcgattttacagatcttaaca

SEQ ID NO: 37973 - DNA, 384 bp, Zea mays
tgatggcccctccacgtccgaagctcaacctgtcgtattcaaggcgacggaggagaagaaggaggagtctacaccgagtagacaaccaatcgacgcctcaaagctcgacaacgaggaaatggcgcttgtcatcaagagcttccgccaaatcctcaagcaaaggagggggaaagactacaaaccccgctccaagaaggtttgctacaaatgtggtaagcccggtcactttatagcaaaatgtcctatttctagtgacagtgacaggggcgacgacaaaaaggggagaagaaaggagaagaagaggtactacaagaagaagggcggcgatgcccatgtttgtcgcgagtgggactccgacgaaagctctagcgactccttcgacga

SEQ ID NO: 37974 - DNA, 468 bp, Zea mays
  unsure (1)..(468): unsure at all n locations
agcttagctcaacaagaatgtatcactatgagcataatatgtctatgcttgccatagcatcatcatgtacacatggaacaaactacaaagagcatagtcacattctaacaattatacacatgaagctcaaaatgttttatgatacatgatgagatgtagtgcagatatgttacaaaaatccaaaagaaaagcaaaaactacagagaagaaccaaaaatactactatacaactaaaaatgtttccctcctctaaaaaaggaagcacacacctaactccacttgcaagtggagcaaaagtgtcttgatcaagaggtttggtgaggatgtcaataagatgtcattaggtgtcaacatggcataggttgatgtccnctttcttataacgatctcttaggaaatgaaaatgtagtgcttagttttggaatttagtactagaatcttagcaacacttatgtcacgctatcacaa

SEQ ID NO: 37975 - DNA, 380 bp, Zea mays
cggaaatagtgccgaagcttcctggaggccttttatacagcatacaataccttctccaactctggataatttttctttgataaactaagaacctcggaaacaaaatatattggagcctgcctcttgacttgaccatcaagcttctcctggacaagcgctgcacttaccgctgagtgcgaagctgccacatataataataaaggagcccctggcattggtggagtcaatgttgttagatctatcaaatactgtttcagttcttcgaaagccttctgctggattggtccccattgaaagacttcggctgacttcagcacttcgaagaatggtaagtttctctctgctgatctggatatgaatctattgagagatgccaatct

SEQ ID NO: 37976 - DNA, 416 bp, Zea mays
  unsure (1)..(416): unsure at all n locations
agctctaccctgtantctggactataagttgtgttctgtttgttgtccttatgcagnttgaccatttccagcatttgcgtaatgaggactctatggagaagcctcgtagtgagaccctggccattcacctcggaagtgaatatgggtctagctaacccgggctagaagggaatcgcgactcatgggtaaagatgcgccacctcttgcgagtgtaaaactgatatatcagccgtgctcacggttatgagcggcctgtactcctcacatgataattgaacttgaagatggaaataaatcgagatccgatgatctgccaatgatttgcttaagtggtttcacttaagtgtttctttactcttatacctntcgttaatgggaatactttggattacacttattagtaagacaggtgttgt

SEQ ID NO: 37977 - DNA, 375 bp, Zea mays
tgtgaagattcttcattccaacatgggctattttatatgccagagtcaacccatattagtcttagcaattaaacaagtgttgagttcagttgtgttctcattaaaattaactagatatatctgaccctctaacactcccttaaatgctattgaatcatcacttcttctaaagacagtaacacctacatctgtaatcagacagttgtaccccattttgcataattgagaaacagaaagcaaattgtaatctaaagaatctacaagaaaaacatttgaaatggattggtcaggggatatagcaattttacccaaacctttgaccaattcttgatttccatccctgaatgtgatagctctttgaggatcttgattttt

SEQ ID NO: 37978 - DNA, 447 bp, Zea mays
  unsure (1)..(447): unsure at all n locations
agcttcactagagggggaagcggttgtgggtgtggttatattgagaatggctcaactggcagtcctggttgcgtgcgtcggcagacagcttgttcgctgcggcttgctgcggctgcaatccggctgcggctgcggcttctacagtatttttctctctatggattgcagctgcagcaatccaaacagctgcaacagtgtcggcttgtagccagccgaacacgcccagagttgtgggctccgaccagtggctgagttcgggcgaaggttcatggagtgcgggggagtgacaccgagggctgggcggcctttataggcatggatgcgagtggatggagtcatagtcgaccatggcgtggaggcgcgcgtgcgcgtggcttggccgcgctctattgtgcctgcctgcatccaacacgtgacccatttnttgttgcccgtctntacgctcgt

SEQ ID NO: 37979 - DNA, 376 bp, Zea mays
tcagcaaaggcaggggtgtcacaggaacctacactctgcgaactacaccgggctaaattggccagccatcgcgcgagcacggcggaccgccacggccgagcaccggcgatgccaaaattggccgagcaaagagcagaactagggaaattaagcgcgggcaaaggtatctcacctcggagtggagctcggggaggcttggcgcggtctccggcgagctatatggtcgggaatgcgggcgcgggtctccgacgacgtctggcggcaaaggcagagcgcaagagagggcgttgttgtgcgaaatgaggcgggggagcgagtgcgggcactggcggggctctaaaaagggagctgggcgcgtgggcgggcatcgtggctg

SEQ ID NO: 37980 - DNA, 465 bp, Zea mays
  unsure (1)..(465): unsure at all n locations
agcttctcatctacgaaaaggctgtctgagatgcccatgtctgataagcccatcagtataaacaaagaagaggaccttgaccattgccaccaggaatcatctaagaaacctagttgcagagttgagcaagatgatcatggttactcatgtgatgaagaggctgttaaaaagccgggttgtatggatagccacgatgcccaaggttcagatatctctgctgcaactattgcttctgttggagatggctctaatggtttaagcatgccacagcctaataattctgaacctactggttgtactgtcgccaatggggttatagacaaagatatcagctctccactagatgaaataagatctgagaagactgacgatantttgggtactatattcttcttatnttctggccatctcccctgaatcaccttgtctactgatgatccattagttttaagggcctgattttat

SEQ ID NO: 37981 - DNA, 365 bp, Zea mays
tcatcagcaatttctttccctttctcggactctgtttttgcggccccttcggcggcggtggtagcttcttctgcagccatgtctagcagtattttgtcaatgtgttcaattgtgctctccaggttcaaatcttcagctgaggcagcttcggcagctacggtctccgaaggtgcaatttcaatatctgtctcctctgcagccgctggtgttttctgggctgaagctcttggcggcgtcttgtcaattacctctgtcacagtgataattctttgtttctttgccttgattgttttcttcgatttttcgggctccttgtccttctgaaaaaactttgtcagttgagggcccagtggacttagcttcgc

SEQ ID NO: 37982 - DNA, 354 bp, Zea mays
agcttcaactccatctatattatggattgccttgtgttcagtccagcttccttcggcccttctggcagcttcctgactcccatgaatagcaataggcccttggtccgaatgtatcttcatgcagagataagctgggtgaagaattgcttcaaaagcatttatggtaccacgaccaatgatggcgttgtaggggtattccatgtcaacaatatcaaacacacattgctcagtccttgtgttattaacaaatccgaaggttaccggcatggtaatcttcccgagtgccacaatctgccgccctccgaagccacaaagagggtgcgtagcattatgaatcttgtcttcatgctcttg

SEQ ID NO: 37983 - DNA, 390 bp, Zea mays
atagaatactcgcgcttctaaagggagaacacgtgataggtttttctatcgtacaattcgaaaaagatagaccttgtgcagcttgtcaagcaggtaaacaggtgggaggagcgcatcacagcaagaatgtgatgaccacttcaagacccctggagctgctgcatatggacctcttcggacccgtcgcctatctgagcatatggggaagtaagtatggtctagttattgtcgatgacttttcccgcttcacttgggtgttctttttgcaggataagtgtgaaacccaagggaccctcaagcgcttccttaggagagctcaaaatgagtttgagctcaaggtgaacaagataaggagcgacaacgggtccgagttcaagaatctttaagtgg

SEQ ID NO: 37984 - DNA, 408 bp, Zea mays
  unsure (1)..(408): unsure at all n locations
gctgcaccccggnacattggtcctttcccttttcttgaacaatgnggaccagtaacataccgactccagttacccaaaacattgtctgctgtgcacaatgtgttccacgtatctcaattgaagaagtgtctttgggttccagatcgaaccgttgaagtgacaaatgttgccttagaaccatacttgacatatttcgaacatcctattcgagtcttgaatcaaaaggacatgattacccgaaggagaactctcaagttttataggaaacagtggaaccaacacactgaagatgaagctacttgggaaactcaagactttttagataagaatttcccaggctttttagtttcgtataagttgtaaggtatgtacactctgtgtaataaaagaataaaccccataccaccc

SEQ ID NO: 37985 - DNA, 375 bp, Zea mays
tatgaggattcttcatcccaacatgggctattcagcggtgccagagccaacccatgttagtcttagcaattaagcatgtgtcgagttcagctctatcaaaatctaccaagtataactgaccctctaacacacccttaaatgctattgaatcatcacttcttctaaagacagtgacacctatattagtgaaaagacagttgtagcccattttgcataattgagaaacggaaagcaaattgtaatctaatgaatctacaagaaaaacattggaaatagaatggtccggagatatagcaattttacccaatcctttgaccaaaccttgatttccatccccgaatgtgatcgctctttggggatcttggtttttctcat

SEQ ID NO: 37986 - DNA, 303 bp, Zea mays
aacctacctgagataaccaccaacaaagcgagtgtaaaggcttaactctggctcaaacttgacaagttctagcttttaagctcttggtacttaaaattcatttactatgcaattgttggtctttgagatatgtatgtggtactgcgcttaaggggagtattcacaattcaattcatacatgaaacctctagtgcaatacccaaatgcaaaatctcaccatttgcctatattctctacaaactatctagcctatggcacaatattttataaatatgagtgaatatgtgaaggtaccaataccta

SEQ ID NO: 37987 - DNA, 374 bp, Zea mays
tgttgatcttccgtgagcccttgatcattatttcaaagctcacaaaattcccgattacttcctcgggagtcattagtgtatatcttggattaccacgaattaattgtacttgagtagggttaaagaaaataagagatcttagaataaccttaaccacctcgtggtcatcccacttttggctcccgaggttgcacacttgattcaccaaggtcttgagccggttgtacatatcttgtggctcctccccttggcgaagatggaagcgaccgagctccccctcgatcgtttcccgcttgatgatcttggtgagttcatcaccctcgtgcgcggttttgagcacgtcccaaacttccttggtgctctttaatccttgc

SEQ ID NO: 37988 - DNA, 415 bp, Zea mays
  unsure (1)..(415): unsure at all n locations
agcttaccgactcgggctcgggccttatactataagatgggaagaagaagaagacaaggcgcattaaggagatcgtctactacgacgacagtgatgagtccacttcttcccacaaggacaacgatgacaacgactacgacaaacgatagacggctaactcgaacttttctttcgattattcgcgtattcctcaaagtgcaaatgctcatttattatctatcccacttggtaaacctcctcattntgatggagaggactatggattttggagtcacaaaatgcgtagtcacttgttctctctccatcctagtatatgcgagaatgtagagagtggaatgcactctgatagtacggatagtcccatgttcattaatgagcaaattcataagagtgcacaagctactactgttcttct

SEQ ID NO: 37989 - DNA, 367 bp, Zea mays
tcagataatttggcatgggattattagcactgaattcacgagaacataaacttcagataatttgactaaatcggttatcaggggaagacacacagagcagcaatacatattttcagctaggaaaaaacaacagctacacccgcgcacagtatccaaaatgtaagctttgcacatataaacgaacacatatggtagctgtgatgttcgatcaacaagaacaaacaagataattagtactcaccccacataaggcttgctggcaaactcacgatctcgaatagcgttaagatgaaagaaggccccgagtacactgtatagctccatgagcctccctttcccaaacaaacttgggaaattgagcaaacct

SEQ ID NO: 37990 - DNA, 386 bp, Zea mays
  unsure (1)..(386): unsure at all n locations
atcctcaaacaaaggagggggaaagactacatgtcccgctccaagaagggttgctacaaatgtggtaagcccggtcattntattgctaaatgtcctatatctagtgacagtgatcgatgcgacgacaagaaggggagaagaaaggagaagataatgtactacaagaagaaaggcggcgatgcccatgtctgtcgggaatgggattccgatgagagctcaagcgactcctccgacgacgaggacgccgccaacatcgccgtcaccaagggacttctcttccncaacgtcggccacaaatgcctcatggcaaaggacggcaaacagaaaaaggtaaatctaactcctccactaaatatgaatcttctagtgatgataatgctagtgat

SEQ ID NO: 37991 - DNA, 369 bp, Zea mays
tgtaacaaaccttgtaacaatcctttatttactaacagaaaatatcttgtgttagcatcaccttgtaacaaacctttagtcttggctctttgataccattttacctcctcttctcctagtaattatgcaagtctactttgcaagtattgttttaagtcaagctcttgcgctgacaaaacgaatacttctgcttttttatccaacacatccaaactgttcaaaattcctttcttttcttttttgtacgccccacttacattttttgcccagcctgttaagtgctgcctaagcttcctaattttagcttgtcgattctccatacgtgactgaccccagactcgcatgaccaaacttctttaaccatatcgt

SEQ ID NO: 37992 - DNA, 399 bp, Zea mays
  unsure (1)..(399): unsure at all n locations
agcttgtgttacaagaaggaaagtgggagctttgtngtatctccgatctcgtatgcggatgacatattattgcatgggaatgacattcctatgctggagtccgtcaaggcttcactgaanaagaacttttctatgaaggacttatgggaagcagcatatattgtgggcatcaggatctatagagataggtcgaagaggcttatatgattaagtcaagatacgtacattgacaaggttttgaaacggttcaacatggaacactccaagaaagggttcatacctatgtcacatggtaaacaacttatccagatgcaatgtcatgcgacngctaatgagcgggagcgcatgtgttaggtaccatacgccttacaaatgggatcaatcatgtatgccatgata

SEQ ID NO: 37993 - DNA, 473 bp, Zea mays
  unsure (1)..(473): unsure at all n locations
tgcaagcttatgtcagtgatacgtaaaccaaggggaattgtattnttttttacacgccggatgttatcctaacgtttgatggtttgccaacaacttcattctcattgaggcaagctcaatgtatcgaccgatcctcttgatagtggcgatcacacaatatcactctatccacacattatacatttgattatgcgaggtgctggccttagcataacggaggtattggatgtggcctgcattaatcatgctatggtccatgactaagggtacgcctctattaatggttaatggaggtgatcaccataatatattcatctgctctaatactagtattaaattctatgtacccactagtcgggctttatgctagtgttactggtaggatattgagccgatggtttccttttgcctaactttcactcaaaaaatggatggcattttttatatacaaatccatgtagtctctgacccct

SEQ ID NO: 37994 - DNA, 375 bp, Zea mays
  unsure (1)..(375): unsure at all n locations
tcaganaacgaaaccttcgtgttccagaatttattttgagaacaactatcaaaagctgaaatataagagcttacagagtatgccaaatcttgtggatacaaacctgtggcactcctcttcggaggcgttgatgacgaaaaattagattgtattccagatcaaacaggagccaaaattatcagtactctgtccaatagtatcggcttcccgaagctagaaacatacatcatccgctaccgacgacaacatgttgttggtagcttattttattctaacttcaaggtgatactcggcccttaactctattgtgtctaataataaaaacatgtgtgacgaacgttgttttcgcgcacagtatgctgatgagcaaagcct

SEQ ID NO: 37995 - DNA, 468 bp, Zea mays
  unsure (1)..(468): unsure at all n locations
agcctggctgccaatggatacgaagnggnttactacatctttggttattactatatatcaagtatccagtagcgtcgtgttgttgctaacatccctggccgtcgttttcaggacgtgaggctgtgcaagttgagcccataattgaggccttgcctaacctgcaacagtaaggcagctattatgttaattaattaattgtacgtactacctcatgcatgcattgagtgattaattaattagtaatttgaattttcaggtacatctattgctcatcggcaggagtgtacctgaaatctgacattcttccgcactgtgaggtggtaatatataaataatgtcgttgttagtgtatactattatgaataaataataatggtatggtatgaataaataatcatcaattcaatcaggttgacgcggtggacctcaagagccgtcacaatggcaagctggagacggagagcctgc

SEQ ID NO: 37996 - DNA, 376 bp, Zea mays
tcggtagattacaacttcgttgtcttcggtagcttgaacgactctgtctacgtcagccctcacaatagacatatctcgaaaacaccttcctctcatattatcaagatgactctatttgatagtcgatttcccaaagactgcatgacttggtcgccagggccgatcttcacagttttcgcctccactttccacatcatagctgtcgctatcatcagtatcttcagacaagccttctagtatctctttagtaatcttctctgtatttgtttttgctattgactcaacaaatccagcagtcttctcctcaaggagcttctcctcttcgctcagctttgtctcaacaacaacttttttgtcttgacacatcttttcttcg

SEQ ID NO: 37997 - DNA, 441 bp, Zea mays
agcttatctaaaagttttatggattttcggtgttattatttcttttctaaaattctaggagtataagttgtggctattttaaataccatataattccatgtttggactacaaatcatgctactatttttattaaatactatacaaaattatgaacctagcaaaattgatcttgcatttttagcatttttcttcaattttctatgaattctctaatcctggtagaaaaagaaggaaaaacatgaatagtactaggccgaaattggcccaagacagcccaagaacaggtaaacacgttcgcgtgcgcgcgcccgcgcggcgattttgcaccgaagccttcaggggttcaaataactagggaagaattctgcgcactatttgactgggtcactgacgtttgcaattaagccctcacgcttctatgtcttcacaggccgcagtcc

SEQ ID NO: 37998 - DNA, 381 bp, Zea mays
  unsure (1)..(381): unsure at all n locations
tccagactgggcgcaaataatagagagacacatgtgttattacgcaaaaattcatgagactcaggattcccacagacaggactgcaggttcatatgctaaaagagcaggggctttttaagaaaagggacgcancgaaggggtatggtgaattctaagccgctcggattagatccaacggcccggatcggaccccgaatcggtacggaattgcgtccatcggatcaaaatccgaccatcaggattttatgagctctaaactgctcgccacccaccgatcgacgatcaacggtccgtattcatctgacgaagagaggccctgggatcaaatctccttcgtcggtcggagatccaacgatgctcaaggcgtcttccccatccga

SEQ ID NO: 37999 - DNA, 426 bp, Zea mays
  unsure (1)..(426): unsure at all n locations
agctttacaaaaagtcttttatcactctntttggtggtcngaagctcaagttatgaatgtttcaaatatgaagactgaatctgtccacttctggacagcaaagtctgttaaagatgtttatccttagttaaatattgaatcaccttgagatgtttataaaagatatgtagacaattttattatctttccacaaagtctaagatcactttgttttgatgtctgaatccttagttgtgtaaattttgaagttacaagtctgaatctgtccaaatctggacagagctgctgtgattgcacgtcttgaccttgctaagtgttgaatcatgctgaagtgaaaataccaaagttgtagagccccttgtaagctttccagaaagtcttaatctgctattctcggactaataattgaagagttatgattaaaac

SEQ ID NO: 38000 - DNA, 404 bp, Zea mays
  unsure (1)..(404): unsure at all n locations
agctnggtatacaacgggcaaacatgtattttcttatgtaccttcctcaaatgttcctcatgctcttgctcattctgagaatatactagaatatcatcgatgaacaccactacaaacttgtcgaggcagtccatgaacacactgtgcatcaagaacatgagagaagctggcgcanttcgcaatccgaatgacataaccatgaactcatataatccatgcctggtgatgaatgctgtcttctgtatatctgcaagtaggatcctgagctgatggtaacttcacctcatatctatcgtagggaacacactggctcctatcaactgatcaaataaaactacaattctgggcaggaggtacttgatcttgacagagactctatccagagcgctgtaatcgatgcacat

SEQ ID NO: 38001 - DNA, 376 bp, Zea mays
tgtgaagatacttcatcccaacatgttctattctgcggaggcataaccaacccatgtgagtcttaacaatcaggcaagtgttcaattcagctctatcgaaatctaccaagtatggctgaccctctaacactcccttaaatgctatggaatcatcacttctgctaaagacagggactcctacatcagcgaatatactgtagtggcccatttgacataattgagagacggaaagcatatcgtaatctaaggactctacaagaaaaacattggaaatggaatggtcatgtgatatatccatgttacccgatcctttgaccgaaccgtgatttccatccccgaatgtgatagctcgataggaatcttggtttgtctcgta

SEQ ID NO: 38002 - DNA, 455 bp, Zea mays
  unsure (1)..(455): unsure at all n locations
gcttactcaaagagattatcagttattgattgctttacatctagctacacatacaggatgatactcaatgtagtgtgggtgtgcctaactgaaactccctagtgcagagctagcgcttttttttcttactcaaagagaatatcagttattgacttgcagaaactatcgattatttttaaaactatcgaagactcatttgtcgattatttctaaaacaatgtagtctggtttacctgttatgtttcaaactcatgttggctagcccagttgacatggacatcacctgaagcaaatatagatgagaaaggagtggatttcgagggggggcaactggtcacactatcactataccatggctccatgctatgacgtacacatgaccaagtcagagaagcataatttaacatanaaatggcaataatgtccaaatcctgaccgataatctgatacactta

SEQ ID NO: 38003 - DNA, 379 bp, Zea mays
tctaaagggagaacacgtgataggtttgactaacgtgcaattcaaaaaagatagaccttgtgcagcttgtcaagcaggtaaacaagtgggaggagcgcatcacagcaagaatgtgatgaccacatcaagacccctggagctgctacatatggacctcttcggacccgtcgcctatctgagcataggaggaagtaagtatggactagttattgttgatgacttttcccgcttcacttgggtattctttttgcaggataagtctgaaacccaagggaccctcaagcgcttcctaaggagagctcaaaatgagtttgagctcaaggtgaagaatataatgagagacaacgggtccgaattcaagaatcttcaagtggaggag

SEQ ID NO: 38004 - DNA, 423 bp, Zea mays
  unsure (1)..(423): unsure at all n locations
agcntttatagtccgaggaagatattattggtttcttcttcaccagaagatgtagatggcatagcacatagtatgactgttcacgactgccagcacccaccagagtaagcaagggtgctttaatacgttcataaacctaaaacataagagctaaaagagattagatggatcttccaccaaaggctgatgagataaatcaaacaccaaaataagacaaaaaataacccataaacatgagaaatccaaagaaataaagtatccatggacttcagaaaaaaaaaatcaactacattaacagcattatctacagccaacagactttcgaaatggcacattcatcgtatctattgcatatcgtaacataaatgtgagaaggctacaactcatctaaagacccaatttgtggttcttgtggtgtcatgt

SEQ ID NO: 38005 - DNA, 376 bp, Zea mays
tgtctattataataccagaccacctttctttttatggaatattttttttagcgcggaagtattcactcttgctttttcttccaccacgatgttgtaaccattgcgtctggagaaggagaacaagacgactagacccatgagtctcacgactaccacgagttttaaagcacacagtcaaccattcggcattcctatagagttatggtcatctgtgttgttggcgtctacaagagttgtctactagtggtgactttttagaacatttttggttgtgcacacattactatttgctatcgataaagtattgcacttttgatatatacactgtgtgaccaagctatacatgtgatttcaatacatatgtatactgagcata

SEQ ID NO: 38006 - DNA, 416 bp, Zea mays
tgcaagctggcacctacagtttcctttaataatatttttgttcagctcgagatctttgtctcttgaaggcaaacaatggatgcgccagtggacaaaattgtatgccttacgctttctctcttagcgtggtcgtttaacccccatacattccaagaaaaatagagcatttcagattcataaggtaataaaaaccactctagttgagacagtacgaagccaccaatcatatctcagccaggaaccctgctgcagcgaactaacaggaaataatgctttcagacaaggattcgccgagccaatagattgcccagacccaaacgacaaactgaaaaaacagagatacaaaggcatgccagggaccctatagcactgtccagacgcactaaaaccagcagagattaaacagcgaacaaagg

SEQ ID NO: 38007 - DNA, 377 bp, Zea mays
ttatcaaatggacgtgaaaagtgccttccttatctgtccgatcaaggaagaggtctatgttgagcaacctcccgactttgaagatagtgagtaccctaaccatgtgtacaaactctctaaggcgctttatgggctcaagcaagccccaagagcatggtatgaatgccttagagatttccttatcactaatggattcaaagtcggaaaggccgatcctactttattcactaaaacatttgaaaatgacttgttcgtatgccaaatttatgttgatgatattatatttgggtctactaacgagtctacatgtgaagaatttagtaggatcatgacacaaaaattcgagatgttgatgatgggggagttgaagtacttct

SEQ ID NO: 38008 - DNA, 414 bp, Zea mays
  unsure (1)..(414): unsure at all n locations
agctgtaactctcgcgagacctttcttcttctctttctaaccatgggagattcattattgtatgtgatattctatgcatgtttaatctacttgatctcttgtatggtgtattgttggtttcctaatttcaatggatggatgtatgtatgtgtgcactctcatagaaaacgatccggttgaagagcccgatgaactcgcaggagaagcccctgagcagcagtcggttggtggaggcaagtgtcctttgacctatctctgtcctattcattatttaattcacctcccgctttacacatttatgcctaaggattgactagctnttgttatccatgttcttgattacctatttgtggttgattatttattgttagctttatgctattgctcanactctaatcaatgaacatgatgaga

SEQ ID NO: 38009 - DNA, 368 bp, Zea mays
tggtgccaatggagaagcaaaaattcttgttgtcttggctatcaaactgcttgtcgttgtcaactgttagttcggacggtactccgaagcgacaaacaatgttttgccaaaaaaaattttgtgcagtctttgatgttattgtggaaacagccctcgcctcgatccatttggtaaagtattcgacagcgacgaaggtgaacttgaggttcccctgagccgtgggcaggggcccgacgatgtccaggccccagcgctggagaggccatgtgtgggcgatcagttttgtgaattgcgaggggctgcctgatcgaggagaaaacttctggcaggcttcgcaggaccttgcaacccgatttgcggcgcagatc

SEQ ID NO: 38010 - DNA, 451 bp, Zea mays
  unsure (1)..(451): unsure at all n locations
acttggaacatgaaatctgtgctctttttatcataaagtgtgaaggggcaaaggctgagtatacttgtgcaaaatgttttttgaaagaaaaggatagtggagatattcacgcactggagtcatccactgttcttggggcacaggagttacaaaaaactaagctaagtgatcatattgagcaaagactttcacagaggcttgagcangacangcaacagagggcgagcgcctctggaaaagttgctgaagaggtatttatcacacactcataaaccaatgttttcaagtcgtccgattaatcgtggttagtcgcgattaatcgtccaagccggtttggaccaatcacgattaatcgcccaagtcgtccgactaatcgcgaataatcgccctagtcggtcagctagaacgatcaacaagtcgtccgacttgaaaacattgcacactaatgaca

SEQ ID NO: 38011 - DNA, 433 bp, Zea mays
  unsure (1)..(433): unsure at all n locations
agcttcatcccacttgaactctntttctttctctagtatagagggaagaggtttcactaacttggaaaaaccttcactaaatcttctatagtatcctgccaatccaagaaaacttctgattttggacgcctcctttggttgcttccaatccagtatctcacttatctttcctgggtccactntaattccaccatcggtaacgatatgccctaagaaagcaacttcctttaaccaaaaatcacacttcgagaacttcgcatacagttggttgtcataaagcttttgtaggactagccttagatgatcttcatgtgtttcttcattcgaagaatatatcagtatgtcgtcaatgaatacgaccacaaactgatccagatattccatgaatactttattcatcaagtccatanagtatgctggtgcattagtcagt

SEQ ID NO: 38012 - DNA, 368 bp, Zea mays
tgacaataaggagatggcgctcatcatctttttcttccatcaaatcttcaagcaaagaaggggggaaagattacaaaccccgctccaagagggtgtgctacaagtgtggtaagcccggtcattttattgcaaaatgtccaatgtctagtgatagtgacaggggcgaaggcaagaaggggaagaagagagaaaagaagaggtactacaagaagaagggcggcgatgcccacgtgtgtcgggaatgggacaccgatgtgagctccactgactcctccgacgaggatgccgccaacatcgccgtcaacaaaggccttctcttccccaacgtcggccacaagtgcttcatggcaaaagacgacaaatagaag

SEQ ID NO: 38013 - DNA, 420 bp, Zea mays
  unsure (1)..(420): unsure at all n locations
agctntgtgcagcagcttcatcagtctccgcttatgcttcgattattgaccttcggcatcgtcatcctgtacacaacaaagcagtataaggtaaaaagtaatttcacgagaaggtaagcaacaggtacaagtttaatatcggcttaagatgacttcgagcttcgtcaccagctaagtcctgcccacccttcgtccaaatttgtgttataaatctattctcaatacttcgggctagactggggatatcagctacgtccgctggtgatagactgaagttcggcctgtttacaatctttccatgagtgcaaccagccttcataaaaggtacagctgtgccgcaagaagccagcacggcacagaagtcaccatgcccagctataactttgtcaagcgcctcaacttcgctctcaatatgttcta

SEQ ID NO: 38014 - DNA, 462 bp, Zea mays
  unsure (1)..(462): unsure at all n locations
agcttggctggaccacacgagagcatccccacccttatcacattcagtggtttaacaacagcggtaagttcaaggtaacaaaaacagcaagggtgcatntttctattggctcttaccatgactttgctaatttcgatgtggtgactatggatgcttgctctcttttactgggacgtctttgggagtttgatactgatgctattcaccatggtagatctaataaatatactttcatgcataagggaaataaaattgtgtagcttcctatgactcccactgaaattgtccattttgaacatgagaaaaagactaatgccaagcaaaaaggtgttttgaactctgaaaatcagcaacctattaagttaaaaactcctactttgctagccactaaatctgatcttaatgagttacatgcctctgttggacttttgtatgccttcgtgtgcaaaaatgctttctatt

SEQ ID NO: 38015 - DNA, 381 bp, Zea mays
  unsure (1)..(381): unsure at all n locations
agcttgaggcggntgaggtatgagctcatgtgtatgtggacgttgaacgttgaacgtacaacattntttcaggtacgttgttttcttctatgtcactgtgtgtgtgtgtgtgttagcagctgggactgggactcatgctcggggcgacctgacctacctctgtttattctgtgcacaactcgcagaaatccttctagtacctcttttcgcgccaaattgtccggtgacgtcgacggtccacgctttgttntgtttaatccatccagtttccagtggatgcctaatntaattcngaacacgtggtctggtctggtttcggcgaaactgatggccaagcaacttgcagctcctcttgccatcttgtggaattcgccattcatg

SEQ ID NO: 38016 - DNA, 452 bp, Zea mays
  unsure (1)..(452): unsure at all n locations
cgtgaccgtgatactctnagtgcacctgtgcgcatgcgagctgtgattcgaggactgaacattgctatgttactaggcatcaagagactaatggtatacggagattctttggttgtcataaaccagataaacaaagaatgggactgttcgagtgattcaatgggaaagtactgcaccgccgtccggaaactagaagataaattcgaaggtctggaatntcaccatgtagaaagagatcaaaacacggcagctgatgtattgtccaagctaggatccagtcgaactcaggtcccacctggagtctttgtacaagaaataccacacccaagcatctcgctggatcaagcagaagaatgtaataccgtgagccaatcagagtcagattctgatgactggagaaggccgatcatcatatatataaagaatgaagagaaaccagatgacaaaaatgc

SEQ ID NO: 38017 - DNA, 428 bp, Zea mays
agcttttcacaatgtttaatacaaagaaatctatttctctctaagaatattctctgcaacttcgttcagcaatttgttgacaacttcgttgatgatggattcagccataccttcatttttggatcagctaggggatcgaacggttccgacggtggagataattcagctgaagaagggaaaattaattagtccgaagccacaaaaacaaaataccgaagctaaaacccaaaaataatacctatacacttttcgcgctctgcagcttctttagctcgccttgcttctgctcgggcgtcatgggtgtctttttcacttttctttataatttcatgggccatctctcggccaccattcacccagacatcattgtaaaatttctcgcccatcaaggatgctttagctgaaagacccttcgtatcgtctatgga

SEQ ID NO: 38018 - DNA, 363 bp, Zea mays
ggaatcgcccaacacaaataaattggactaactagctagctctacattatgagatctacaggtgtcaaacgttcacaacaaaccaataaaaagaccaagaaagggttcaaataaaaggagcaaaagacaaccgaagtgctccctggtctggtgtaccggactgtctggtgtgccaccggacagtgtccggtgcacgagggaaccaaactctgaactgctcaccttcgggaactctgggagccgctccgctataattcaccggactgtccgatgtagcaccggactgttcggtgtgccagcggagcaacgactacttcgcgccaacggtccgctgcagagagcagataatgcgctaccgtgagc

SEQ ID NO: 38019 - DNA, 437 bp, Zea mays
agcttcttgaccaaatctgagctcacctcattatttcttcttccaccatccaacataacacgtgcacgccgattctcgatggctaagaaagtctggaacaacatatggcagtgctgcttctctgatgattcacgctgcgcactaagaacacgctgcaccatgatgcttcgaaggttcaccgtagcatcaagccccaatcatagcatcatcattagcaacaacatcactggtgtcatcatcgacattctcaccgtcggaagcactaatgtactcatcattcatagcaatgtatgttcgctgactcgggcaatccttcttcacgtgaccaatcccatgaccacggtggcaaacaatacccgaataacgaccactggaacgtgctgctcgtgctggtgaattctgtttcttggccggtacctgcataggaagcttaccaa

SEQ ID NO: 38020 - DNA, 438 bp, Zea mays
  unsure (1)..(438): unsure at all n locations
agctnggaanaatctggaatgaatcttctgttataaccagccagtccaaagaaacttcggacttgatgcaccgtagttggtggtttccattccaaaatatccttgactttgctgggatcaactgcaatccctttggcagacgatatgtgtcctaaaaattggatctcctccagccaaaacgcacatttactaaatttggcatataattggtgctcccttaggcgcgttaatacgatccacaaatgccgagcatgctcctcttcattcttggaatagatcaaaatatcatcaatgaataccaccacaaatttatccaactcaggcatgaataccgagttcataagatatgtgaagtgggcaggagcatttgttagtccgaaagacataaccagatattcaaataatccataccgtgtagtaaatgcggcctttggtata

SEQ ID NO: 38021 - DNA, 396 bp, Zea mays
  unsure (1)..(396): unsure at all n locations
agctggtcattntattgctaactgtcccgataatgatagggatcaggatcaagggaacaagagggagaagaagaagaactataagaaggcaaagggcgaggcacatcttggcaaggagtgggattcggatttctcctcgtccgactccgacaatgaaggactcgccgccaccgccttcaacaagtcattcctcttccccaacgagcgtcacacatgccttatggcaagggagaagaaggtatgtactcgaaactctacttatgcttcttcaagtgaggacgaatctagtgatgaggatgaaatagattattcatgtttatttaagggcctagatagaaccaaggtagataaaattaatgaattgattgatgccttgaatgataagaataggctttt

SEQ ID NO: 38022 - DNA, 451 bp, Zea mays
  unsure (1)..(451): unsure at all n locations
agcttactaatatcctcctcatcatcactagagtcatcatcacaaggggaggtatatttacgagtatctttagaatataccttcctttgccatcaagcaggtgtggttgacttttggaaagagggaagacttgttgaaggcgattgtagcgaggccttcattatcagagtcagaggagctataatccgagtctcacttcttgccgatgtgggcttcacctttcttcttcttgtagaacttcttctttctcgccttcttccatttcttctcttttttcagtcatcactatctttatctagatagttagcaataaaatgactagtattaccacacttgaatcagacatgcttccccattggtttgggtgcattggtctttngcccttgaatacttgcttaaatcttctaatagcaagcgccatctcgtcatcatttaggcccagccgcttgac

SEQ ID NO: 38023 - DNA, 415 bp, Zea mays
agcttctcctgtccggaataatctatggtattccggatagtcgatttaaaatagttgtagatgaacttatgcacctgtgaaatgatcaactaggcaaacttgttagtccacaaggtttgtgatggtcgtcaaacaccaaaatcgattataggaaatgttgagactatttccctttcagctacaatttgacctttttgagactgtcggagagtctccgaccaggtggtgaaatgcacccaccctaatcctaagatgaggagggagcttatggattgcttgattagctagaggaactcgagaacacaagggttagagtggttcgggccaccagagcgtaataccctacatccacttagagttgtattgcatgtgagtctcagtcctcagagaagcctgagttggaactatcctctac

SEQ ID NO: 38024 - DNA, 451 bp, Zea mays
agcttctaaagggagaacacattctaggattaacaaatgttcattttgagaaagacaggatttgtagcgcatgtcaagccgggaagcaagttggaactcaacatccacacaagaacatcatgacgaccgacaggccgcttgaactactccacatggatctattcggcccgattgcttacataagcatcggcgggagtaagtattgtcttgtaatagtggatgattattctcgcttcacttgggtgttctttttgcaggagaaatctcaaacccaagagaccttaaagggattcttgagacgagctcaaaatgagttcggattaaggatcaagaaaattagaagcgacaacgggaaggagttcaagaactctcatattgaaggcttcctagaggaggaggatatcaagcatgagttctcttctccctacactccacaacaaaatggagtagt

SEQ ID NO: 38025 - DNA, 449 bp, Zea mays
atggatgtgaagagtgccttcctcaatggatcaatcaaggaggaggtctatgttgagcaacttcctggctttgaagatagtgagtatcctaatcacgtatataaactctctaaggcgctttatgggctcaagcaagccccaagaacatggtatgaatgcctaagagattttcttatcgctaatggcttcaaagtcagaaaggccgatcctactctatttactaaaacacttgcaaatgatttgtttgtatgccaaatttaagctgatgatattatatttgggtctactaacgaatctacatgtgaggaatttagtaggatcatgacacaaaaattcgagatgtctatgatgggggagttgaagtacttcttgggatttcaagtgaagcaactccagagggcacctttcttagccacacgaagtatattcaagacattctaaacaagttt

SEQ ID NO: 38026 - DNA, 388 bp, Zea mays
  unsure (1)..(388): unsure at all n locations
agcttcggctccgtctatgttgtggattgcctttgaatctgtccaactcccttcggcccttctggcagcttcttgacttccatgaatgacanatggcccttgtttcgaaggtatcttcatgcacaagtatgctggacgaagtattgctttgaaggcattaagtgtccctcgacttatgattgcattgtacgggtattccatgtcgacaatgtcaaagacaacttgctcagttcttgtgttgtggacataaccgaaggtaacagacattatgattttgccaagtgccacaatctgtcatcctccgaagccacaaagagggtgtgtagcatcatgaatcttgtcctctggttcttgcatctgcttgaaggcctttgcaaatataatgtct

SEQ ID NO: 38027 - DNA, 305 bp, Zea mays
actggagtgctttgactcttatatgcttgttaccgaacactgccatttcttaggatctcttggacctatggggtaggacccacacacgctttctctgcgccactctgatcttgttggttgatgttgatcgcattgtcttcattggggatagcggctaacccccttaacaagagcgttgatatgcacatggtgaagatgttgtcgactctgatctttactgatttggaggagttggagaatgcccaatggacatgtgtaagaggatagaatagtgagaaaaggttagtatataaagattatagaca

SEQ ID NO: 38028 - DNA, 399 bp, Zea mays
  unsure (1)..(399): unsure at all n locations
agcctgngtcttatcgctgagacatgatattttttattactaaataaaaatatataaccttgcatcatgcagaagttttgagtgttcatttaaatgttgaattgaaatctggatttatgaatagaaaataagaaaaagataaacctgcgtcgtgggccaaatttcttcattcgaccaggaagcaatctcacgtcggcccatctctctccttcccttctctttttttctccgcgtatcgatgacacgtgggccctacgagtcatgcaaactcgccactcagccgaatcatgcgtgctttgtgctctggcgccgataggtggggccgggttgtctgccgctcggccaggacttccacattcccatgttgcgtcccggtgcgcatagaccgccaggtgagcc

SEQ ID NO: 38029 - DNA, 458 bp, Zea mays
  unsure (1)..(458): unsure at all n locations
agctntatcaaatggacgtgaaaagtgccttcctcaatggaccaatcaaggaagaggtctatgttgagcaacctcccggctntgaagatagtgagtaccctaaccatgtctataaactctctaaggcgctttatgggctcaagcaagccccaagagcatgatatgaatgccttagagatttccttatcgctaatggcttcaaagtcggaaaggccgatcctactctatttactaaaactcttgaaaatgacttgtttgtatgccaaatttatgttgatgatattatatttgggtctactaacgagtttacatgtgaagaatttagtaggatcatgacacaaaagttcgagatgtctatgatgggggagttgaagtacttcttgggatttcaagtgaagcaactccaagagggcaccttcattagccaaacgaagtatactcaagacattctaaacaag

SEQ ID NO: 38030 - DNA, 430 bp, Zea mays
  unsure (1)..(430): unsure at all n locations
agcttcttcctattctcctttgagggtggagatacctggagagcagcttgacgagcttttacctcgtttggttcctttttccttgtgatccgcgtccatctttccatagaagaggtggtcagcggagtccttcgggtagtcggatcttctgctcccggctggtgggaggtagtcttcgctcggagcgctggagggtgcgttatttctggctttgctccgactttccagtagagtgttggggaaggcttcctctccggtggatctgcgatgcgatgtaaagntccttcttcgtctgccacgaacgaaatggtaccgaagcaaaatactgattcacggaagaagatgatcttgtgctggaaagtgatagcccacgagctagcttggatcagtgacacaacccctacctggcgtgcaactggccgtgcccctc

SEQ ID NO: 38031 - DNA, 426 bp, Zea mays
  unsure (1)..(426): unsure at all n locations
agcttgngcacagtccacttgaactattcttttgttaaacccgacctcggcgcacatgacaccagtatgtctaacccaacaagcgttggatgaattcataattattgcagaacatatcagtacaagagacctagctcaggagtttttggctttcagagtttttcctagtttaaaagaatgggaaatgccgaagctagagggggagaaaaaagaatgagaacttgtacgggtaccttactatttcaagtttaagaaatactttaaaacaccttgccaagagtggctggatacaattgaagtaatgtgcaatgaaatactcggcaattactccaaaaaagaagatcagttgatgactgcggccttcggcacccgtccgaagcgaagattgaatcgagtgctggacgccttgggtcttgaatactctga

SEQ ID NO: 38032 - DNA, 408 bp, Zea mays
agcttacaagagacatcctaaggcacctatactctgaactcacgcattctgatcatagttcttgagatttgagcactttcgagttgtaaactcttcgcgctgtgttgtgtgctcacttcttcatgtgtgtgcgtgattttgctgcgaacttgagtcttgtgtgcgttgctttccctcccttactcttgtgcttctttgtgatagctattttaagggcgagagactccaaattgtggagattcctcgcaaccgggaaagatactctaaaggaaaatattgtggtattcaagttgatcattggatcacttgaaagggtttgagtgcaacactcgtcgattgggacaccacaacgtggaagtaagcaagtgttacttggccgaaccaccggataaaaatcgtgtgtctcgt

SEQ ID NO: 38033 - DNA, 449 bp, Zea mays
agcttgctgcttgcccgagaccgtgaacctttcatatgctgaactaatagaagatgttgcatccagtcactgcgaactaatagaaaattgcttgtccgtgatcagttactccaacaggacacagtgtgcagtaccaaatattagtttgacctcttctttttttttggatttttcattcattttgtttaactaatcatagtggttcattctggcattaccacaggcaacatttgcataacgagggagactgaattcctggaaaagcaaagtggctgaagaggtgaatgctatagcctgttaggccgctcgaagatagttaaagcggtctgaggctgaagcttagtcaatgctaaacatggatttatctcacaatttgtagcttgaccttccagtaaaactattggttcagacattatttgtagcggtcatggaaaatatgcgtgactcgt

SEQ ID NO: 38034 - DNA, 429 bp, Zea mays
agcttgggaagattcttcattccaacatgtgctattcggcgatgccagagccagcccatgttagtcttagcaattaagcaagtgtcgagttcagctctatcaaaatctactaagtatagctgaccctctaacactcccttaaatgctattgaatcatcacttcttctaaagacagtgacacctgtatccgtaaaaagacagttgtagcccattttacatagttgcgaaactgaaagcaagttgtaatctaaagagtctacaagaaaaacatttgaaatggaatggtcaggcgatatagctattctacccaatcctttgaccaaaccttgatttccatccccgaatgtgataggtcgttggggatctttggttttctcataggaggagaacatcttcttctcccctgtcatggtggttgtgcacccgcta

SEQ ID NO: 38035 - DNA, 433 bp, Zea mays
  unsure (1)..(433): unsure at all n locations
acttggaacttaatcaagaataccactcatgcggagtttgtttcagaccatacatagtcttgtccagcttacaatgatacttggacttagaaggaaggatctacaaattaaggagattgtttcatataaaatcttcctctagaacgctatgaaaaaatgtgttttgcacatctagctgacgaagactccaatcctaagaaagcaacagagagtatcgaacgaagtatggcaaatttaacaagagggctaaatgtgccatcatagtcaatatcataacattgcttaaaacccttgacaaccaacagagctttatgccgattgatggatccatctaccttctttntagtttcaatacccatttgtaatcaatcagatcacgtccactaacaggaggaaccaaatgacacattntttgcattagtgctgaaaattc

SEQ ID NO: 38036 - DNA, 454 bp, Zea mays
agctctgccaaataggacgcataattatacctttgatatcttctcgtgctgataggtcattcttcacataaaaccattctgtcatccaatccccgggccatctcttccgaaaggttggtacaggacagcttgccccggaccgagagacgaaactgtagcagccaaagatattatggtactgttctttgccccaaggcttcgtttcatataataattcgggtatattacagaagcttcttgcatcaggcttcagaccttggcttctcgcggcccacacgaagatatttagccttataattgcctcgggagtaagttgatgaagatagacttcgaagactttcaacacctccacgacgaagctactcaagggaaatcgtagcccagctttcagaaagcttcggtatactacaacttcattctcttcagggtgtggacaagtcttctcttcttcatc

SEQ ID NO: 38037 - DNA, 430 bp, Zea mays
  unsure (1)..(430): unsure at all n locations
agcttccttgtgcacaacttcggagcgacagcaagcttcgtcatgatcatgctcctcattgtgtacgcttttatcatgaatccgaagatacctgtccataaaccatacttggaaagcattgttaaattatgtttttgagaacctttggaggacgaaggcccccaacagtagcccctcatagtattaatttgtttaagataacgaattcagactacgacatggacgaaggccttaagccgaaggtccaaaaaaacaccttccctttgctagaatagcaatagtcaatgacagacgggaccctccaatttggagcgcgtcgatcgtataaataagaactcaccctgaccacatttggtacgctacttgtgccacttgttgtgtttgctcaattntttttagctcttgctcaccaacacttgcttagtttctc

SEQ ID NO: 38038 - DNA, 377 bp, Zea mays
  unsure (1)..(377): unsure at all n locations
agctntanggtaaaagtcataaaatgaccccttttataaagttgaatcacatttatacccctgggataccagaaaccctaattggaaccctggaaaaccctaaaaccaaaccctaggggcttatgtgcaaaattagtccacttttgggctaaagtgcaaaaaccaagctaaataagtgttttaagtcaattggttcacaaatatgtggacttgaaagccaaaccctaagttttggactaatttgcaaaaaggaccttgattntgattcctaggctaagtctgaaatcagggttataagcccaactctggggctgtgtagctttcaaaataatgagaattcgtgttaagtgaccacatcaatgttgatgacctaacat

SEQ ID NO: 38039 - DNA, 429 bp, Zea mays
  unsure (1)..(429): unsure at all n locations
agggagaacacattnatgactaaccaagtcattttgagaaagacaggattgtagcgcatgccaagcagggaagcaagttggcactcatcatccacataagaacataatgacgaccgacagaccactggagctcctgcacatggatctattcggcccgatcgcttacataagcatcggcgggagtaagtactgtctagttattgtggatgattattctcgcttcacttgggtattctttttacaggaaaaatctcaaacccaagagaccttaaagggattcttgagacgggctcaaaatgagttcggcttaaggatcaagaaaataagaagcgacaacggaacggagttcaagaactctcaaattgaaggcttccttgaggaggagggcatcaagcatgaagttctcttctcctacactccacaacaaaa

SEQ ID NO: 38040 - DNA, 458 bp, Zea mays
  unsure (1)..(458): unsure at all n locations
agctngagtgggacggaagggcgatgtgacgaatgatgagatgatcacgaagctatgcgcagataagcttcaacatgacagcagaaaaggggaaccgacttaaagatgaaaagccaaattagaccctgaagaattactatagagttattgataaatgtaaagggcattaatgtaattttacacgggctgcgtcccgtgtctataaatagatgaacagtactcccgtactgttcacactgacttggcattcgcttttcgcatcacgcctgtacctttacttttcatcaattcgaaggtacatttataatttgtcattatgaatttgataatgcaaataaaaataagttgatgataatatctttattattatttgtatttcatacatgtattcctccttattatctatcgagggcacgaaggtcttttccttcataaccttcgtccagaattcattatat

SEQ ID NO: 38041 - DNA, 392 bp, Zea mays
  unsure (1)..(392): unsure at all n locations
agcttaggaatgagctaaacatcttatatcttcgggactttgattgaaacattgcacacatagctcatttatatacctttgatcatgtctgtttcatttagtacagatgcatatttcttattcttcttgtgccaacgctaagactaatgtgtttccaagtgaatttttgtccttagtcttagattgaaagggaaatggagtattcggcaaaggcaaggcttccactacaactctatcgatatcattttccctttgccctactcataaactttcactcgcattctttaaaagaaggagaaaatattatgcctctcaagtttcttcgttttttgccattaataccaaatggggagaattagtatgcccaaagcanaaggaccgcaccaccaccc

SEQ ID NO: 38042 - DNA, 343 bp, Zea mays
  unsure (1)..(343): unsure at all n locations
agcttcaatggtcgaaaccgctagaaccctatcttttatgtgacgcggctggcgcaccggacagtctctggtgcgcccatcgacaacagcctgccccaacggttgaattggtggttgttcntccttcatcaacctctcctatatatatattctttccattatatctctcactactttntctttattctctgtattctcctccattcttcttcatatcatttcctttcttatcatttagtcatttctttatctatctttcttcttctctcatcatattttattacttactacctccgtgtatttcaatatcattttctgctctctctatttattttttcacttt

SEQ ID NO: 38043 - DNA, 456 bp, Zea mays
  unsure (1)..(456): unsure at all n locations
agcttatagaaggtatccttgtagagtatgttgatgttcttacctccattcatgaagaccttggtcaccataatgtttntatcatggacttgaccattaggggtaagcatcttgccttgaagacatgttcaagttcctcattcctatctaaggcgattgccctctcaaactatccgatgtggaaggtaatagcaagtgttgtgacattgacttcatgcaatgttagcttatggttcctcttgcccttataagccttgnggccaccaaagataattggattttattttttcacatattatttgcttcatgtcatattgtcatcaagcacccaaaaggagaagattgaaggaaaacaatatttgctaatgtttttagataaagttcanagtatgcccttatccaatttaactttggatttgggtgtctcatgatcaacattactagttcaataatagt

SEQ ID NO: 38044 - DNA, 414 bp, Zea mays
  unsure (1)..(414): unsure at all n locations
agcttgccttcgcttcagtttatcatccgcagtccaatggggtcgnggaacgcgccaatgggaaaatcttcacagctgtcaagaagatgctccttgatgaaaaaaagggcaaatggaccgatttgttacctgaggcagtctgggcactaaacacgaccgagtgcagagcgactgggtttactcccttccgccttctatacggatcggaggccatgaccccgcaagaaataaagcatgggtccccgcgaacagttccgtcagccgtccccgatgtggacgagccaacttcaaaggatctcattgacggagaccgagtcttcgccctacaggctctaaacaaataccaagcccagaccaaagcatggcgcgaccacgcagtcatcccgagggagtttagcgaaggggacctcgtac

SEQ ID NO: 38045 - DNA, 440 bp, Zea mays
agcttggaggggttgattgagagtcccttgcttggtgctccttcctccttctcatctttgccttgaaggtagcgacttgtggcatgtttgtgggggcattgccttgatgcaagtcctccacatgctttgaatccttaaccatcatctcatggctaaggaacttcccaagcgcctccttgggagtcaacacctcgtacctaggattttcacgcaataatgtaaaaagagtagcattacgtgaaactagggaccttagcatgagtttaacgacttcatggtcgattcatttggtgctcccaaggttatagctttggttcactaatgtcttgagtcggttgtacatttcttgtggcccttctcctttgttgatggcaaacctcctgagctcttctttgatgagctccaatcttgtaatcttagtgaccctgtcaccttcgtgt

SEQ ID NO: 38046 - DNA, 461 bp, Zea mays
  unsure (1)..(461): unsure at all n locations
agctngttgatcaaatccttgccgaggatgacattgtatggttagaccatgtccattatgtcaaaggttatctgtttcgtcctcgcattaggagcggttccaaaggacagaggaaatgttatttttgaaagggaaatgtgctcttgggccatttctatattgttttggtgattaaatgcacaacacattatgtttagactaacatgagaaatgagtataggtacatgaagcaaattgagcttgaaaaaagacataatacaaatctatatgggaccaagtaaaaaaggtaaggtccgaacacttagtcaattatttttggtactaaacatatttgtttaagtactagggactntatgaactcaagacaagaacgaagcataagggattctaaatatagaagagaaaagtggactgcaccgggttgcaccggacagtctggtgcatgtnttgaccaactgtct

SEQ ID NO: 38047 - DNA, 457 bp, Zea mays
  unsure (1)..(457): unsure at all n locations
agctggctcacactcttaagcaaaattgttcccctaacatagagctacaaagttgatgtggtgccctaaggtaaatttttactatcttgaaagttgcacagctctaaagttgagccctcaacactgaatttcagacttagctttagaacacaaatagggtccttttgcaaataggtccaaaattcagggtttaacttgcaaactcacatatttgtgacccaagtgacttaagatagttattcaacttggtttttgcactttagtccaaaaatggactaattntgcacataggtccctagggtttggttttagggtttttcagggttccaattagggtttctggtatcccaggggtataaatgtgatccaactttatttttggggatattntataactatttccctaaagcctttaggttttctcattntgggttaggtcttacccctttaatcccta

SEQ ID NO: 38048 - DNA, 455 bp, Zea mays
  unsure (1)..(455): unsure at all n locations
agcnttgtcttttgtgtatggacgacgtgcggttttatgctatggacagggagttgtagcgtcaccaaggtgccagtgtcagaatgcctggtcccgaggttaagctgcgccaaaaccgtgtcaaatgaatttggtttgagttcaaactttcccagaatgtgttcaaggtaatttggcacgactttgatatttgggtcttctggctttgagtttggaaaaacagagaacacagatgatctttgagaagaggtctgaaattcagaaattcacgaatctgaatttctctaagggttcattgatcaagggctgatttggggatttatttgagttattttggctaagccttctcaatctttcttgttgcttaataaatatactttaacttatatatttggctcaactcannaatttaaactnttcatcctctttttcatattntcttaaatcttggtcat

SEQ ID NO: 38049 - DNA, 416 bp, Zea mays
  unsure (1)..(416): unsure at all n locations
agcttgtgaagccaatcacaagtctattgaagaatgatactaaattcaattggtcttcaaaatgtaatgaagcttttgaacaattgaaggtattattaaccactgctccggtattggctcaaccggatattaataagccctttgatgtgtattgtgatgcatcangcagtggtctcggctgcatattaatgcaggaaggccaagtaatagcgtatgcttcaaggcagttgcgccggcatgaggagcattatcctactcatgatctggagctagctgcagtggttcatgccctgaagatttggcgtcattatctgctgggtaatatctgtcacatttatacagatcataaaagtttgaagtatatctttacccagtcagagctcaatatgagacaaaggagatggctcgagctgatc

SEQ ID NO: 38050 - DNA, 463 bp, Zea mays
agcttcttagttcaaccctggagtgaagtactgaagtgagcctctattaagttacgatggcaaattgaaagaaagaactaaagaaaaagaagccacgaaccttcaggtaacaacaagttgaaaagacttaacagcacaagaacaagacatgttgtagtaaaaaaacaaaatttggataccgacgtatgttgcatgtgttgttgacttgttgaggatattgtcacatgatcaatttattctgatgtagtgatgtgatacttgagagcagtgataaagtaattgcatcaagacaaacactaaagaatatgccatgctactagctattcgtatttcacaacggttaaatccaaagttttatcatttaaaatagggtggttagaaccaacattctgattcttcaaaaaacagggtatctagaagtaatatccttcatttaaaacatactccagtatttagaaacaat

SEQ ID NO: 38051 - DNA, 453 bp, Zea mays
  unsure (1)..(453): unsure at all n locations
agctntctcaacatttcttgctgcttattaatcatacttcaattnttatagttggctcaagtcataattctaaatttttcttacccttttccttattttctggaattttgctcatagggctcacttagggttttattagggttgcacattcttaccctttttaaaagacttaattgtttgatcatgaaacttttgagtatatacttggtgaattctttattacttaagttaatttgatgctcatgcttactttggttcacatgaaataatggttcttggtttggcatttgagagaaaccctatgtgacactggggtgtcacacctaaaactacaacctataactataagtaaatcaacatctcttcttgcttgcttttggccggctcttggacgagcttgcaaaaaggtagataaacaaaccaacaaacgagatgacagacacaagtgacaag

SEQ ID NO: 38052 - DNA, 404 bp, Zea mays
agcttgtctttggctcatcctatttcttcatccataattggtgatagcccgagtagcagtccaataagctcatgagttccgaagaagctgctgcatctacaagggagtctattcttggtaaagggaactcatctttcgggcatgccttgttgagatctgtgaagtcaatacacgttctccatttcccattagccttcttcaccatgacagtgttagctagccattctggatatgttacttctctgatgacaccagcactgagaagtctctttacttcattccgagcaccttcggctttatcctcagacattttccgaagtctttggtttcttggcctgaaagatggatccacattgagtgaatgatcaatgacatctccgttaacaccacagagatcgttagct

SEQ ID NO: 38053 - DNA, 405 bp, Zea mays
agcttgacaacgaggaaatggcgctcatcatttagagcttccaccaaatcctcaagcaaaggagagggaaggactacaagtcccgctccaagaaagtgtgttacaagtgtggtaagcccagtcactttattgcaaaatgtccaatatcaagtgacagtgacaggggcgacgacaagaagggaaagaggagagaaaagaagagatactacaagaagaagggcggcgatgcccatgtgtgccgcgagtggaactccgatgagagctcctccgactcctcccccgacgaggacgtcgccaacttcgtcatcaccaaaggactcctcttcctcaacgtcggccacaagtgcctcatggcaaaggacggcaaaaggaagaaggtaaatcaagatcctcactaaatgcatc

SEQ ID NO: 38054 - DNA, 452 bp, Zea mays
  unsure (1)..(452): unsure at all n locations
agctntaccaaatggaagtgaagagtgcatttcttattggaccaatcaaggaagaggtctatgttgagcaacctcccgactttgaagatagtgagtatcctaaccatgtatataaactctctaaggcgctttatgggctcaagcaagccccaagagcatggtatgaatgcctaagagatttcctaatcactaatggcttcaaagtcggaaaggccgatcctactctctttactaaaacacttgaaaatgatttgtttgtatgccaaatttatgttgatgatattatatttgggtctactaacgaatctacatgtgaagagtttagtaggatcgtgacacacaaatttgagatgtcaatgatggnggagttgaagtacttcttatgaattcaagtgaagcaacctcaagagggcaccttcattagccaaacgaagtatattcaagacattcta

SEQ ID NO: 38055 - DNA, 377 bp, Zea mays
agctggcccgagcttgaaccgaggaccctctctcccgaaatagcgcaatcatgctcgccggagttcggaaccccgccggagcacgtggaccgggtgagtcgccgcaccattttccaattcactgcacgcatagcctctacgtcaccctgtggagctcctcatgccgtttaattgaactataccgccgtggtttggtcggagcaggagccaccgacaacctccgccgcctgcgctcatggccaggatcgctccgaccacctctgacgccgacccgcacaccgatgtgaccgccgtgacatcccctacgtcactgacgaccccaccggagctctactgccgctggtaagcctcgccgctgtaatctatgccacgggtac

SEQ ID NO: 38056 - DNA, 395 bp, Zea mays
  unsure (1)..(395): unsure at all n locations
agcttgaaagactaactgggctntccatttctaactaatctagcgacctacggtcacattgctttgataccacttctgtcacacccggttccaaagggcagagccgggtgcatagcatattttttgcaggatctatttccacacatatgttgacgtcacaagtgtaatatatcaaaagaacaatgcataaaagcgtaaataatgattatattaacatattacacttcgaacagacaatatgtcttaacctttattcatcgaagtacagcgaaacaaggacatccatccacaggaagatgaccggnggtatcactagactagcatccatggagttcagcatcatatcttcatctgcaaacttctgatcaaaattaagcaagggtgagctcacttat

SEQ ID NO: 38057 - DNA, 442 bp, Zea mays
  unsure (1)..(442): unsure at all n locations
agcttgaagccatggtaagtagcataggccattaatatacgaattgactcaagcctagctacgggtgcataggtttctccgaaatccaaaccttcgacttgtgaatatcccttggccacaagtcgggctttgttccttgtcaccacaccatgctcatcttgcttgttgcggaagacccatttggtgcctacaacattntggttaggacgtggaactaaatgccataccttatttctagtgaagttgttgagctcctcttgcatcgccaccacccaatccgaatcttgaagtgcttcctctatcctgtgtggctcaatagaggaaacaaaagagtaatgctcacaaaaatgtgcaacacgagatctagtggttacccncttatgaatatcgtcgaggatggtgtcgacggggtgatctcgttggattgcttggtggactcttg

SEQ ID NO: 38058 - DNA, 460 bp, Zea mays
  unsure (1)..(460): unsure at all n locations
agcttatcccgagactntatcctaaagacaaaatcctaactgatttctattcccacgccgttnttactccggtttgcatggcttgctttgttacgtatttccagccgcatactctttattgcatcaataacctttttacttgtcttcattttttcagatgcgtgctgcactttgtcttcgtacatccctgcatcaccattctgcaaaaaatcaaaaatcaatatcaacagtatgcttcactagtctacccaacgacgcttggcttttctactctagttcaggattagactataggctttgatggagtgtctcatgctcggatagttatgactctntagacaccatctatcagagtgacgattaccgctgctccaactacatagacaatgttaaccagtcaggtcaccagggctccacctatagttgatgtatctttagcacctgaaccgacgccttctat

SEQ ID NO: 38059 - DNA, 451 bp, Zea mays
  unsure (1)..(451): unsure at all n locations
agctgtaagaacaanaaaaagaagatagaacactcttcggcttaactggacaacatcgaaagcaagtgcagaactccaattgtagcatgaagaagaagacccatagagacagacaaaggcaaaacttgcagcggacaaaacgagcaacaagaaagacgacactactagaagcactagttgtggtgaccgaaatcattagttaataattgatctcagtctacgtaaaactagatcgactaaagtttaacttggtgaaacaaaattggcaagagagtatcaagtgttctctttgtaattntattgaaaccatacaacatttattcttgaattgtcaccttacgagctttgtttgaaataccgtacacaacacttttgaaaattcaatcaaccattagcttctctaatttggttggttcttgactatataactagcttaaatcttaagctcaaa

SEQ ID NO: 38060 - DNA, 435 bp, Zea mays
  unsure (1)..(435): unsure at all n locations
agcttctacagggagaacacgtgataggtctatcttatgttactttcgaaaaagatagaccttgtgcagcttgtcaagcaggaaaacaggtgggaagctctcatcataccaaaaatgtgatgaccacatcaagaccgttggagatgcttcacatggacctcttcggacccgtcgcctatctaagcataggaggaagtaagtatggtcttgttataagtgatgatttttcccgcttcacttgggtattctttttgcaggataaatctgaaacccaagggaccctcaagcgcttcctaaggagagctcaaaatgagtttgagctcaaggtgaagaagataaggagcgacaacgggtctgaattcaagaaccttcaagtggaggagtatcttgaggangaagggatcaagcacgagttcttcgctccctacacaccac

SEQ ID NO: 38061 - DNA, 362 bp, Zea mays
  unsure (1)..(362): unsure at all n locations
gcttctaaagggagagcacaatgatgggacttacctttgttcatttngngaaagacagggtgtgtagcgcatgtcaagcacggaagcaagttggtgtcaatcattcacacaagaacatcatgacgaccaacaggccgctggagttactccacatggacctattcggcccaattgcttacataagcatccgtgggagtaagtatcgtcttgttattggggatgattattctcgcttcacttgggtgtgtcgtttgcaagacaaatctttaacccaagagatcttaaagtgattcttgagacgggctcaaaatgagttccgcttgaggatcaagaaaataaaaagcgacaacgggacggagttc

SEQ ID NO: 38062 - DNA, 401 bp, Zea mays
  unsure (1)..(401): unsure at all n locations
agctnggtgccgatggagaagtagaagtcccttgtttcatggctgtcaaactgtttgccattgtcgactatgagctcggacgggactccgaatcggcaaacaatattttgccagaagaacttctgggcagtcttcaacgttattgtggatactgcccttgcctcgatccacttggtaaaatactcgaaggtgacgaacgtgaacttgaggttcccttgagtcgtgggtagtggcccgaaaatatctagccnccagcgttgaagtggccatgtgtgggcaatcagctttgtgaattgcgaagggttgcctgaacggngagaaaacttctggcaggcttcgcacgacctcgtgactcgattcatggcgcagattatatcgggccgggtagaacctttgacgga

SEQ ID NO: 38063 - DNA, 414 bp, Zea mays
agcttaattcgaaagaggtccctcgttgtgttgtttatagaatgatcaaagaccacacacaacatggggacaattggattttacaatgttttttgttcttgcaagcaattctcttctgtttccttcgagtagtttgaatatattagggagtgattttgctccagtacaagttttggagacaacgcagcggtatgactggtgtcagacaatttatgatgatctcaagatgaaggcagagaagtttaggagtggtcgttgcaagatagcagccacacccactatccagggatgtgtactttttctaattgtaagttatttctactcagtaatatatatgtttatttgatacttagacgttcttgagatgatgcatattggctatagatctttctatgtaccaagaaatttgtttta

SEQ ID NO: 38064 - DNA, 454 bp, Zea mays
  unsure (1)..(454): unsure at all n locations
agctggtgtatattagatccgtcagaattttttggagaaatatcaatttgcctctttcttggacgcacctttcattcagtcataggtactagagcacctttcattcagtctttgtccaaattggacgcacctctttcttggacacacctttctttcttggatgcacctttcattcagtctgcaaaaaatatactagaatcgataacgtgaatgctatgtaaaaaatagtttatacttgcacaaacacactatttttccctctaacttgcaatagagccgtaaatctttgtatttataagaaagaaaagaatgtccgaagtacaagccttcctgtaaagggaggatgagacccaccaaataacaaaattacatctatgctactaacaaanaaacgcaaaccctagacacacagtatgcctaanaataatccagaggactccaaaccaaacaaaca

SEQ ID NO: 38065 - DNA, 438 bp, Zea mays
agcttctaaagggagaacacgtgatatgtctaaccaatggtactttcgaaaaagatagaccttgtgcagcttgtcaagcaggtaaacaagtgggaggagcgcatcacagcaagaatgtgatgaccacatcaagacccctggagctgctacatatggacctcttcggacccgtcgcctatctaagcataggaggaagtaagtatggtctagttattgttgatgacttttcccgcttcacttgggtgttctttttgcaggataagtctaaaacccaagggaccctcaagcacttcctaaggagagctcaaaatgagtttgagctcaaggtgaagaagataaggagcgacaacgggtccgagttcaagaaccttcaagtggaggaagttcttgaggatgaagggatcaagcacgagttctccgctccctacacaccacaac

SEQ ID NO: 38066 - DNA, 456 bp, Zea mays
agcttcagctagctcattgcctccttgcaaggagtgtggagatggctactaggccggctctcgtgttcgtttgctgctgcctcttgctggcgtacgccgcggcagcgcgtgtgctcgacgagggcgagccttttggccgcctgaagaatgctgcgcgccgtctccgcgatggcgagcctttcggcggccggaaggaccccgccgacccggaccactctcccggttcgaggcccacgagccacgacttccagtttcttcgtattctctcaactgacacgacgttgtgtgcgctctttccttgcaggctcacacgggactccgccctgcccgccgtccatcggcacctcgccgaccacgccaaccacacccggcggcgggagctactacccgccttcgccagacatcggcacttccccgaccacaccgacagctccaggcggtagcggcgggtacgat

SEQ ID NO: 38067 - DNA, 454 bp, Zea mays
  unsure (1)..(454): unsure at all n locations
agctggggaagggtcttcatccgcacatgagctaagcttctatgccacagccagcccatgccagtcttagcaattaagcatgcatctagaccggcctcctcttttgcaaaatcaactaaataaagtttgccgtctaatacacccttaaatgctagtgaaccatcacttcttctaaagacagacacatctacatttgtaaaaagacaattatatcccatattgcatagttgactaacagatagcaaattgtaaccaagagactcaactaaaacacattagagatagagtgctcattggaaattgcaattttacctaacccttttaccttgccttgattcccatcaccgaatataattgaatcttgggaatccttattcttgacgtaggaggtgaacatcttcttctccnccgtcatatggtttgtgcatccgctgtcgataatccagcttgaacc

SEQ ID NO: 38068 - DNA, 438 bp, Zea mays
agcttaggacatggcctactgaccacagtgtgttgggcatacggttggagtttgagcaaaaccatatcgcccacttgaaatgtgcgttcagtcctcagacgatcgaccttcagcttcatacggttctgggctgctgcaagctgctccctcaacatcacggtaaactgagccctttctgctaacagctgtgccacatcaacggcagcatcagaaggaatatgaggtgctgctgcaaacggagggtcataaccatacaacactttgaaaggagaacaagctagggaagtgtggtatgtggtattgtaccaaaattccgccaaaggcaaccaattcttccatttcgtaggttgggcatgaactgcacaccgcaggtacatctccacacattggttaacccgctcactttgaccgtccgtctgtgggtgatatgtcgtactc

SEQ ID NO: 38069 - DNA, 424 bp, Zea mays
  unsure (1)..(424): unsure at all n locations
agcttctgaatagtggtaccacatatantttcactaatgaatacattntcagtaatgaccattagctttctcatacctgcatttcagtgatgaatatcttagtatcaatatcagccttctctcttttgttttgggtgaaagcttagtttttttgctctttattgagtcatacggcatatactaaattgtaaatttggttctaccgtgagatgtgtggtttaccttgcttaaatggttatagttgctgatatgtatttttaatgacatttttcttttttatggcagttctagacttcgaggggtcgagttatgtcttctcaatgagttttatgtacttgttctatcaaagagtgagatgaatcattatctagatctatgaactcgtcatgtttaatacactggaaatgtattcttttgcaactta

SEQ ID NO: 38070 - DNA, 447 bp, Zea mays
  unsure (1)..(447): unsure at all n locations
ttaagtcacctgcggcatgcaagctngtaacccctactacaagcaccccggtgcttgttttataagcctcatcctccctcttgtgtttcatcttgcattaacccatccgggcagggacacgcagcataaaattcactagtcggttgagggtcctcgcgggtccaaaacaccgacaagattacatcaattacacataatatcgccgaagctcatccgcattctaagatctgggtatgtcgttgccgtccatatcctttaatctgtaagaaccgggtcttgacgaagatactactagaaaaggaccttcccattttagctgtagcttgcccactgtatctatgttggctatccttcgaagcaccaataggcctgacttgatattcttcaatcgaacttttctatcacgccattttattatttccgcctgatacttattgatgtactcta

SEQ ID NO: 38071 - DNA, 436 bp, Zea mays
agcttctaaagggagaacacgtgatatgttttactaacgtgcatttcgaaaaagatagaccttgtgcagcttgtcaagcaggtaaacaagtgggaggagcgcatcacagcaagaacgtgatgaccacttcaaaacccctggagctgctgcatatggacctcttcggacccgtcgcctatctgagcataggagggagtaagtatggtttagttattgttgatgacttttcccgcttcacttgggtattctttttgcaggataagtctgaaacccaaggaaccctcaagcgcttcctcaggagagctcaaaatgagtttgagctcaaggtgaaaaagataaggagcgacaacgggtccgagttcaagaaccttcaagtggaggagttccttgaggaggaagggatcaagcacgagttctccgctccctacacaccaca

SEQ ID NO: 38072 - DNA, 448 bp, Zea mays
  unsure (1)..(448): unsure at all n locations
agctntgcattccctttggaacgactttcgagcagataacttacactgcgctcccttaggaacgactttntattacttcgaaaaagttacggctcgttccttaggacaagttttcgataatccgaaggttctccgtgcctccataaattcttgtgcttcggcaactcaagcctatggaggagatatattttcattatgataataagctaaactgttacaagaatttgaaaaacgataaaaaaacacttaaacttcccataattgttctttactacgaagaaagtaaaactgaacgtgaaagtgcaaaaagttgctgtggaggtaggatattntgtcagtaaatgtgctttgactctggcacagtgctattgactgtgcgagcttcggattcttctctgaagtccctctggnggtgagaaatagtggctccttctggcttgagagctcg

SEQ ID NO: 38073 - DNA, 373 bp, Zea mays
  unsure (1)..(373): unsure at all n locations
agcttgtgcaaagcccgctggaactaatcttctgagaaacccgacctcgctgcaacatgacacccgaaggtccaacacaacaagcaatgagtgaattcagaattattgcagagcatatcagcacaagggacttggttcaagagtttttagctctcaaagtttttcccagtttgaaagaatgggaaatgccgaagctacagggggaaaagaaagaaggtgaacttgtacgtttaccttactatttcaagtttaaaaagtactttaaaacaccttgccaagagtggctagatacaattgaagtaatgtgcaatgaaatacttggcaattattccaaanaagaagatcaattgatgaccgcagccttcggcacccg

SEQ ID NO: 38074 - DNA, 296 bp, Zea mays
agcttgaagccaaggagggccgcatatgctgattatatgcaaagagactcaagcacacctaccgtggcgtaggttggaccgaacaacgaaccttgtacttgcgagcatccttctgccgcaagcctagctttgttccttgtatcacacaatgctcatcttgctggaagcgaaatagacacttcgcacctacaacactgtggttaggacatgtataaaaatgccataactcatgcctagagaagttggagagctcctcttgcaacagcaccaccccacactaatcatggaggggtacc

SEQ ID NO: 38075 - DNA, 451 bp, Zea mays
  unsure (1)..(451): unsure at all n locations
agctntntgcatcaggcttcagaccttggcttctcacggcccacacgaagttattcagccttataattgcctcgggggtaagttggtgaagatagacttcgaagattttcaacacctccacgacgaagttgctcaagggaaatcgcagcccagctttcaaaaagctccggtacactacgacttcattctcttcagggtgtggacaagtcttctccccttcgtcggccctcacaatggacaaatcccggaaatacctccctctcatgttgacaagatgattctctttgatagttgatttaccataaactgagtggcttggtcgccagggacgatcttcggagtcttcaccaccactgtccacatcataaatgtcgctgtcaccagtatcctcagacaaaccttctagaatctccttggtgattnttntcgtgttggtcttcgacatcgctat

SEQ ID NO: 38076 - DNA, 411 bp, Zea mays
agcttctgacttgtgggcctgccgaggtgtcttgtgcacaccggacatgtactgttcgatgtccggtgcaccagtatgggcaagtctgacgtctgcgcgcgctgcgcgcgcatttaatgctgcgcatggagccgttggcgacgcatagagccgttgctccgctggcacaccggacagtccggtgcacaccggacagtccggtgaattatagcggagcggctgtcgtgaaaacccgaggatgacgagttccggaggccgcggttcgttggcgcaccggacatgttcggtgcacaccggacagtccggtgaattatagcgtgccggcctccgcgaattcccgagggcgaagggttgaagtcgaagtcctctggcgaagggtagaaaacgaagtctacgggcgcaccggacact

SEQ ID NO: 38077 - DNA, 400 bp, Zea mays
  unsure (1)..(400): unsure at all n locations
tcccgctccaagaaggcttgctacaagtgtggtaagccccgtcactttatcgctaaatgtccattatcaagtgacagtgacagggataacgacaagaagggcaagaggagagaaaagaaaaggtactacaagaagaagggcggcgatgctcatgttttgcgggagtgggactccgacgatagctcaagcgattcctccgacgacgaggacgccgccaacatcgccgtcaccaagggactcctctttcccaacgtctgccacaagtgcctcatggcaaaggacggccaaaagaagaaggttaaatctaactcctccactaaatatgagtcttctagtgatgataatgctagnggtgaggaagaataattgcgaactcttttcgccaaccttaacatggaac

SEQ ID NO: 38078 - DNA, 431 bp, Zea mays
ctgaggcatgcaagcttcacacctctggactaactcggctgcatctttctttctttgtcggccaatagaatcctgacctgaaaaccttcccgactagtgttctggatgccgcatgtattccacattgccccgcatggacctcctccagaagttgcttcctagtggacgggagaacgcacttcatgaggatgcctgaagcgccccttcttgacaatacctccctaatgagtgtatagtgagccgactgcctggcatgcgctcttgcgagttctcgtcgtctggtactcttcatccttatatacttaataatcagccttctccagtcatagagttaactcgggctgtctatgatgttgactcttctgttgatccattgagatactcgctgagaaattcttgccgaagatctggggggacctgagtcgatggat

SEQ ID NO: 38079 - DNA, 310 bp, Zea mays
  unsure (1)..(310): unsure at all n locations
agctntaccctgtggactggactataagttggttactgtatgtgtaccttatgcagttgaccatttccagcatttgtgtaatgaggactctagggagaagccttgtagtgagaccctgtccattcacctcagaagagaatacgggcctagctaacccgggctagagaggaatcccgactcatgggtaaagatgcgccacctctggcagtgtaaaactgatatatcagctgtgctcaccggtatgagcatgctgcactcctcacatgtgtcacacccggtcttgaaggtataccgaatgcgtaccatgttc

SEQ ID NO: 38080 - DNA, 357 bp, Zea mays
tctaactgcacgcatgcgagctcgactcaggtatccacacattaatccttaattcttttttcctgtctcatggacaaggcatcctccctggatccaaatccatagactaacatatatcccattatcaagatgaatacaatcaattcctgacctcgcgcgagtgctagaaaaatcactcgacttctaccgagatcctgattagcaagcagctactcgacctagcatactagtattcatctcaaaaaggaatcctaagtccatgcaactagaggtttcaagcaactcctacacttaagtgcacattacaatcctacaagaattaagtgtagtagagagcatataataacacggttatgc

SEQ ID NO: 38081 - DNA, 451 bp, Zea mays
  unsure (1)..(451): unsure at all n locations
agctntgaattcatcaactcttcgcacatgatctttatatgtcagtaactgatccttgattaacttgcgatcatcacaagagaaatcctccaaatatatctccgtaagactagcaagcttattcacatcaaacttgttgaatgaatctcttggatcaagacaagcaaaacaagtaagcaattcatacgatacctcattgaatcgatgatccaactctgatataagagagtcaatggcagcatataagatatcaacacgataaaaatgctcttgagtgatattatttcttcctcctcttcttgactgaccaaatcttggtattggaccatccatatctggtatatcaataccagcttccacacacaaagctntgacttcttcaaacaatggatcccaaccttcacttctcaaatcattcatacgagatctcacatcaacaactatagacatg

SEQ ID NO: 38082 - DNA, 452 bp, Zea mays
  unsure (1)..(452): unsure at all n locations
agcttcagtcttagcgttagtctcggtcttatttagtcttagttagacagggtagtttgctatatcctgtgcatttatgtttgtcatgatgaactatgtttggtttggatctttgtaatgattgtcaccagagtgtaggtatcccctgcattntggtttacctattatggtaataaagttagttatacagttgggaaaccttttattccactttcctctttatctgagaagctgtgtagtctgagttggagatcagtgaagatgatcatctgttcagtgctgttgaagaattctatactcttctcttatgctgcaagatttgccagatcagttctgatgtgtggttgcattctgtagatgtcagagaatacgcgcataggaggaaggcgtgctcatcatgagcgagccgctcaacatgaggaggcgccccagcagcagcagctgtcaccccc

SEQ ID NO: 38083 - DNA, 450 bp, Zea mays
  unsure (1)..(450): unsure at all n locations
agctntaactctcgcgagacctttccccatttctttctaaccaaggtaaattcattatcgtatgtgatattctatgcatatttactttatttgttcccttgtatggtgtactgtttgtttcctaatttgaatggatggatgtatgtatgtttgcaatcgcatagagaacgatccggttgaagagcccgaggagcccgcaggagaagcccctgagcagtagtcggttggtggaggcaagtgtcctttgacctatctctgtcctattcattctttaattcacctcccgcattacacatttatacctaaggattgactagctttgttatccatgtccttgtttacctactcgggttggattattattgtttagctttatgctattgctcaactctaatcaatgaacatgatgagaatatccatgatacgcctgtttcccttctcttattatga

SEQ ID NO: 38084 - DNA, 422 bp, Zea mays
  unsure (1)..(422): unsure at all n locations
agcttgnttgggctcatcttcttttttcatccaaatctgatgatagcctgagtaatagcctagctggctcataagctccaaagtggcttccgcatctatgagagaatctattcttggcaaaggaaattcatgcttcgaacatgccttgttgagatctatgaaatcgatacacattctccactttcggttggcctttntcaccatcacagtattggctagccattctggatatgtcacctctctaatcacttcgacactcaggagtcttttgacttcatttcttgcaccttcgactttgtcatctgatattttccgaagcttctacttccttggtctgattgttaggtccacattgagagagtgctcgatgacatctctattgacgccacaaagatcattggctgaccaagcaatgacaacct

SEQ ID NO: 38085 - DNA, 440 bp, Zea mays
agcttctcaccacgtcgtccctagccgcaccagctcaccaatcgccgccgtagctcctcaaccggtgatcaccggaggaagcgccacggcgaaagccatatcttccacgcgccagtaccattgttctctccgaccgccagcacatcccggtaaaattgggcgccaccgccgttagaggctataaattgccgtcaccatccgctcctttaggtagttacgcaaccagtgaagcaactcgtgcttcgaatcaccccctagagctcgcaaatttctcgtttcccccaaattggttttccgccgccgcgatgaacacctccccgtggtcagaccagttcgggtcagctccttccctctgctcccttgttttagcatctctgtgtactggtgatgctcaccaactcgcgcaattgagctatgatcccatgaatcaccgggaacgt

SEQ ID NO: 38086 - DNA, 444 bp, Zea mays
agcttctgctcggcgccggcctcgcggaggttctcaacgccgtgttcccagttctcgcatgccgcaagccggccaacacgatcctcgtccccaacaagtcagtctgttattttatttacgcctcttgcaaatttcacttgctctgattagtggttacttgaatgttcaatgtttggttttttacatttttttctgaattctgatataggcagactaagaagaaacctggtgcaaaccacagccatcaccagaggcttttgggtgtagcccgcttgttatcccaggtatgttttctgtttgttgagcaatgtgattggaatcttgacttatgtataggcctgaagtgagatttcatactttgcccagtttaatatcgtataaaacctcagtcaaatttctcggtcccttgcagatgtctgaacctgttatgaaggcagcaatgta

SEQ ID NO: 38087 - DNA, 439 bp, Zea mays
  unsure (1)..(439): unsure at all n locations
agcttgaagccatggtaagtagcatatgccaataatatacgnaatgactcaagcctagctacgggtgcataggtttcaccgaaatccaaaccttcgacttgggagtatcccttggccacaagtcgagctttgttccttgtcaccacaccatgctcatcttgcttgttgcggaaaacccacttggttcctccaacattttgattaagacgtggaaccaaatgccatacctctgttctagtgaaagtgttgagctcctcttgcatcgccaccacccaatccgaatcttgaagagcttcctctaccatatgtggctcaatagaggaaacaaaagagtaatgttcacaaaaatgagcaacacgagatctagtggttacccccttatgtatgtcgccgaggatggtgtcgaccaagtgatctccttggattgcttggtggactc

SEQ ID NO: 38088 - DNA, 464 bp, Zea mays
agcttcggcatagtggcatgtctcaagacgaatgactgcactgacttaaagatgaaatgactgattgatccatgagagtctgtgtcataattgtaatcttttgtaaagggcatgaatgtaatatctcacaggttgtgccctgtgcctataaatagatgaacagtacccacgtactgttcacgctgtcttgtattcactcgcacgtcacactcggattctcatcttctgtcaagccgaaggtataaatgtaattcaatattatccgcgtttattcatgattatataataaaaatgcctgaatgatatcatatgattattcatgtctcttatgtgtcatatgatcctgctttccattgtatattgagatgatgaaggtacgtccttcatgaccttcgtctgaagatcattatatcctaagggaaataatgctttgaaggacgaaaggtctttaatcaataactttc

SEQ ID NO: 38089 - DNA, 464 bp, Zea mays
  unsure (1)..(464): unsure at all n locations
agcttgtgaagattcttcatcccaacatgggcaagttttctatgccagagccagcccatattagtcttagcaattaagcaagtgtctagttcagccttgctatcattaaaatcaactaaatagagctgaccatctaacactcccttaaatgctattgaatcatcacttcttctaaagatagtaacacaaatatagtaaagagacagttgtagcccattttacataattgagagacacaaagcaaattgtagtctaaagaatctataagaaaaacattataaatggaatggttaggggatatagcaattttacccaaaccttagaccaaaccttgatttccaacccctaatgtgatagctctttggggatcttcattnttctcatatgaggagaacatccttttctcctctcgtcatgtggttgtgcacctgctatcgattatccaacttgatccaccagatgca

SEQ ID NO: 38090 - DNA, 426 bp, Zea mays
  unsure (1)..(426): unsure at all n locations
agcttaatgccccanaaagattatctagatttattaatggcaacgctcccatggttcaggataacgagggctatattttatatcctggtggttatcccgaacacaaaattatgagagttcatgctaagaagtctcattctgtttctcaccatgcttttatgtataagaatgaggcatctagctctaggcattctacacatgttaaaatgcctaanaagaaaactcctactgcatcaaatgaacctaatatttcatttaagacttttgatgcttcttatgttttaactaacaaatcangcaaagtagttgccaaatatgttgggggcaaacacaagggctctaagacttgtgtttgggtacctaaggtgcttgtttctaatgtgaaaggacccaagaccgtttgggtacctaagaacaaggcctaaa

SEQ ID NO: 38091 - DNA, 456 bp, Zea mays
  unsure (1)..(456): unsure at all n locations
agcttgaacgatatggagatncaccctaattgttggcactattaatgttgagcgtcagctgctatttagtatacagtcactttaccacacaaaacgctcttcaacttttgcttctgtaacgggaactacggatcggtcgttgctcgtactataaatactattatcgacaatcatttggtcgctgctcgtactataaatactattacacaaccgttagcatcttacgaattcagcgatatattaatttttttacatactcctagttgagataaaaatgacgttntattataataaaaatagagccgatttcataattaaacaaagtagaacatagggcgcccttacgaatgccctatcgtggtcaacgtcgttaaagtgatgatgttgaacaagtacaacatgccctctatgcttattatcaggccacaaaaagaanacgaagtgagatggcataat

SEQ ID NO: 38092 - DNA, 446 bp, Zea mays
  unsure (1)..(446): unsure at all n locations
agcttcagatattagaagaatgtggccttgatttatgaagctggctttccttcccctgttntgtttatgtttgcttgttctgtgtttttctgtctgtttctttttgtctttgttaatgtttagctgcctctttttggctgcttgtacttgatctactttagatctttttcttttccttttagtataatggtctactttagaaaaaaatacactntttgtcgtatctaactatattaactttttgtcataattattagtcttctttctatcaagctagcataaattcatgcaacatgcctgtctaaaaaagtaggactgcctctccttcggttcaccatctgatcatctaggaacctatagtctcttacctttcatatttcatctggaataaggacacttcaaaatactacgcattccctcatttagaaacaattgatgcaatatgt

SEQ ID NO: 38093 - DNA, 448 bp, Zea mays
agcttagaagagggtcattatgctgcttacatcaatgttaggaccaataccttctatttttctaacctgttaatgccactcttccacttcaaattctcttgttctaacttgagttgctaactcaataggatcacccaaaagatgctgattacctcaataggcccatagagaactatatgcctatgcaaatcatatttggaagtggggttgccacaggtaagtttgcaatgggttcaaatgagcctttgggcaagccaactgacattgttgacatcctatatgatggcattgaagtgacctcaaagtttgttgattgttccaatctaactaacaaggggaagactgttgacaagggtacccctggtgagtccaatgataacaagcctaacttatggaagaggaagaggttcatgactgatgaagatgttgctgtgttcaatgggatgaa

SEQ ID NO: 38094 - DNA, 453 bp, Zea mays
  unsure (1)..(453): unsure at all n locations
agctttanggggcaccggtgtgggtagcctttttgaaggcttatgaacgaacatctccctctttcatttctttgaagcgggtggagatttagtcagagttgttgggggatgacctataaaggtcccctcggccaactactcgaggaagtggctgggccccgactctttgcaattttgggggatccactctagttcctatggtggcaagttatacactagcatctatctcagagtccagaggattacatagttgggtaatgcaaacgatagtatccaatgacaaagatgttatacatacctttggatgaggcacaatgagttaataagcttccacaaagcatccatcaggataatctccaatgttgaggaagatctgctttgagtacgccttcacctcagtctttgggatgtctacgatagtggatcgagagggatcatncaacctatcgtact

SEQ ID NO: 38095 - DNA, 455 bp, Zea mays
agctgacaccaccatttgacatttcacatataatttctgagatcaagaatatttagttcattcctcaacatgcaaaagcgggtcttatcaagtggcttagtgaaaatatccgctaattgatcttctgacctcactccttctaaaatgatatctcctttagcaacatgatctctaaggaagtgatgacggatatcaatgtgcttggtgcgagagtgttgtacagggttattagcaattttaacagcactctcattatcacacaacaaaggtactttttctagaactacgccatagtctagaagagtttatttcatatataaaatctgtgtgcaacaagcacctgcggcaatgtattccgcttctgcagttgacaaggcaacactattttgcttttggatgtccaagacactagtgatctaccaagcagatggccatccccagaagtactttttcta

SEQ ID NO: 38096 - DNA, 455 bp, Zea mays
agcttgctagtactcgccctaggcgcccttgtctatccaatcaacctgatccttctgctgatgagcagaaaaagaaaaagagacgcctctggcgagtatccagtttggatcgggatgttggtacttcggttcctgctgctgaagaagtgccggtgactgaatttattgacgctgatcccaatgggtgtgcccgatctgctgctgatcccaatgtgggtgctccatctgttgctgatcccaatgggggtgctgcctgtgttgctaatgaagacgatggggaggaagaggatgaagttcctttgactcggaaaaacagtccgcagttcattctagtggtgaaagtagtggagttccttctcctgctttgtctgctctcattggtctgcaagaattgtccctggcgaattatgattatactctcgaggatatggttccagaggatttgttatctgagc

SEQ ID NO: 38097 - DNA, 423 bp, Zea mays
agcttgtctaccgtgtcaccgtaattcgttttatccatcccatcagcgttaaggaagttgccacgccgtaagccacgtaaccgcgcgccaagcttcttcctcccctccggccgccaacgcatcgcggtcaaattgagagccaccgctctcggagtctataaattgagccccccctcggcttcgctatgtattttactagctatcgcacccgctcccacacccgattgtccaccagctcgcctgaattttgcacttccccaaaatcggttctccgccgccgtagaagtgaactcaccgtcgccagcccaactccggtcagtgcccgcccttttcttcctcgtttgagcattctcatgcctctgtgatgctccccgacccctttaattgaactagaccggcgcccatcgccgggaacacgatcat

SEQ ID NO: 38098 - DNA, 451 bp, Zea mays
agcttacgggctctggggttcttccgtacactggcttgcccagaggattggtgcacgggcgatcgtggaccggcgagtgcgcgcgggcgtgcactgggaggcgcggtgcgcgaacgggcgtgaaccacgggtgtcagccacggtcgaacacgtgttcccgttgcctctgcccctgttcaagcgccgattgggagcaaatcttcgcgaatttgggcaagatcgctgcaagggatttgttcaccagaccaagctttgtcttttgtgtatggacgtcgcgcggttttatgctatggacagggagttgtagcgtcaccaaggtgccagtgtcagaatgcctggtcccgaggttaagctgcgccaaaactgtgccaaatgaatttggttttgagttcaaattttccaggatgtgttcaagggaatttggcacaactttgatatttggatctcctgg

SEQ ID NO: 38099 - DNA, 407 bp, Zea mays
agcttcttggcaacagcctccgtctccaccatcgctgcaacaaggccagcagccagaagggagccaatatgctccacaccaaagggacttcagagaacagtccgaagctcgcacagtcaacagcactgtgccagagtcaaagcacatctattgacaaatatcctaccttgatagcagtctttttcattcagttttattttctgtgtaataaaggacattgtttagatttcgtgtaatagtttcgttgtttgccacaaggaaaatatattttctccacaggcttaagttgttgaagcttaaagatttgcgataacaaagaggaccttcgaattatcaaaaattcttcgaagcaacaaaaagtcgttctaaggaacgcagagtaagtttgccgaagtcacaaaaagtcg

SEQ ID NO: 38100 - DNA, 280 bp, Zea mays
tttagcatctcctaagatgtccgaagataagaagactgctgctgagactaaactgagcctctacgaagagaagaaattggggtttcttatagcgatgtcaaagaccaacacagaaaaaatcaccaaagagattctggaatgtttgtctgaagatactggtgacagtgacagctatgatgtggacagtggtggtgaagactccgaagatcgtccctggcgaccaagccattcagtttatggtaaatcaactatcaaagaaaatcatcttgtcaatatgaga

SEQ ID NO: 38101 - DNA, 259 bp, Zea mays
aataagcaagcgtcgagttcagcattatcaatatctaccaagtattgccgaccctctaacactcccttaaatgctatcgaatcatcacttcttctaaagacagcgacacctacatcatagaatagacagttgtagcccctttgacataattgggatacggaaagcaaattgtaatctaaagaaattactacaaaaacattggaaatagtatggtcaggagatataacaaatttacccaatcctgtgaccaaaccttgaa

SEQ ID NO: 38102 - DNA, 383 bp, Zea mays
  unsure (1)..(383): unsure at all n locations
ctgcagcatgccaagctccgatcattagacaagcactcttgttttatgacccgaaacaactgggaatcagtgttaagtatggtctctctgantcccattgcttttagcttccgaagacctacaacaaagcttcgtactccgcaatgttatttgcgcaactaacattcaattttgccgcataacaaagtttatacttggaaggtgaaaccaacacatcagtcgctcccgctccgaagggtcccaaggccattgcaaacactgtcatgccttggcgcgttatattttcttcctcctgacccctggcggcactcacaaagaaatctgcttaccctgtgactgaatccaaatctttaacatttctcagcaaaattcttgtactctga

SEQ ID NO: 38103 - DNA, 286 bp, Zea mays
ctaggcaaagcaacagcacaagagagcacactttcttcagaccataccactaacctggcctttcgctatgctagggacacgatatgactgaaccctccaataaagcccaaaggggatatactcatgaattgctggcgactgaccaattcacctaatggatatagatcaagcccattgctcacttaaccactgctaatgccgaggaattcatacaagacataatatacacattctggataccaaaacagtatcattcactgactcaggatccaactacaccagttca

SEQ ID NO: 38104 - DNA, 397 bp, Zea mays
agcttgttcgcaacatgagagcaaatatcgttctttggtttgcagaatattcgttgcgtgtcggtggtggaactgaagaagtgaacaacgatggtgatgttcgtcttccagatgaggtatgtgtgccatataccggtgatgaccgcgaccttgacagattgatagatgacatttaccccagtctaaacgaagacatgtctaatacaagctacatcacttcaagagcaatattgactactcggaacgactgggttgatatgataaatatgaggatgatcgatcgtttccaacgggagcagatgatgtaccatagctttgacaccgcggcggacgatcctaataactattatccatcgggaattctacacacgctgactcctaatgggactacccccgc

SEQ ID NO: 38105 - DNA, 428 bp, Zea mays
gccacacgggcacgggcagtagagcatgtgggaggcataaccactggatcccgggcgcccactcttggttctcaatagcagaagggatatgtgaaccaagcatcaccctataactaggccttcatcctaacaaaaagtccatgcacgtacgcggtataaagcccgagagtatgggatcgatgaactaatgttaaactatgtccgaatctgctaaatatagaatggcagattctacgaatatactacctccattatctatttgacgacgcggagggagtcacctttttcacacgctgaaagatacctttgaccattcatagtgtgtttaggttgaggaatgaagtgattcatcttctccccactcggtactaatttattcagctcgagcaaagaatgtgttatccattatcatccaatcatcataagca

SEQ ID NO: 38106 - DNA, 296 bp, Zea mays
ctacttgaaggattggaaagcgggccacagagctcaatagaatcatcatcgattgtgtacacagaatcttaacttcatcccaaacgctagcaaacttcatcgttgactggacgctcagggctcatgaagaacgtgccagtcaagataccgaagcttggacagtgttctgccaatgttcttgaggaaccttcagcgcaagagcagttgtggttctagcggcccatctacaataaaacatgttatgcagccaagttggactttagttgtacaaataatattggtgagtacgcaacact

SEQ ID NO: 38107 - DNA, 425 bp, Zea mays
agcttgcgaagagagaagccagatgacagttttactcctccctaatctgacatcgacgcttgccttgctaggggaactaggctggttgcatcacacagcacttataatatttatgattagccacctcgctccctgcaggtcaagctttggattcccggatcccacaccaccggtctctctcggtgagtgataaccatcgagcgttgagctgaaagccgcgccagtggagatgagtactctgaagagaaccgacaagaaggctggcctcaaattcgcaacatggagttgcaatgtcaccacattggttggactcatcataggcaacaaagccttgatgctacgcatggggtcagcttcggtatgcctggctctgcgcgcccaggaattaattaccaaacctcgacttcaccgtacggcctaactcc

SEQ ID NO: 38108 - DNA, 479 bp, Zea mays
  unsure (1)..(479): unsure at all n locations
cgtccgggatccttaagcactgcagctgcagctgcccttaagcgacccgtaaggcaactgatgagtcctcgcttctaaagatcttcacatncacatcagaaaataaacaattataacccattccacaaagttgtgaaatgaacaacaaattgtagcttaaagaatctaccaataaaacaattgaaagtgattgttggtcagagataggaattntaccaataccaatcaccttactcttgccactatctccaaacacaatttcttgtgcttcttgagttagttgcaatgaatgaaatatgtcttcctccccggtcatgtgatttgtacatccactgtcaagcacccaacttgacccaccagaggagtagacctgcaaaacaagtttaggctatgcttttaggtacccaacatgaatggggtcctacagtgttagttatagccttgggtacccacacacttcttttcatgacttttctttt

SEQ ID NO: 38109 - DNA, 476 bp, Zea mays
  unsure (1)..(476): unsure at all n locations
tactaagctacgaagattcttattccacatgggctagtcggcggtgccagagccaacccatgttagtcttagcaattaagcaagtgtcgagttcagctctatcaaaatctaccaagtatagctgaccctctaacactcccttaaatgctattgaatcatcacttcttctaaagatagtgacacctacatcagtaaatagatagttgtagcccatctgacataattgagatacagaaagcaaattgtaatctaaagaatctacaagaaaaacattggaaatagtatggtcaggtgatatagcaattttacccaatcctttgaccaaaccttgatttccatccccgaatgtgatagctcgttggggatcttggtttttctcatatgaggagaacatcttcttctccccagtcatgtgggttgtgcacncgctatcgagtatccaactcgagcccccggatgcatatacctacaaaaca

SEQ ID NO: 38110 - DNA, 347 bp, Zea mays
  unsure (1)..(347): unsure at all n locations
gacgtgaaaagtgccttcctctactgaccaatcaaagagaaggtctatgntgagcaacctcccagctttgtagatagtgagtaccctaaccatgtgtataaactctctaaggcgctttatgggctcaagcaagcctcaagagcatggtatgaatgcctaagagatttccttatcactaatggctttaaaagcggaaaggtcgatcctactttgtttactaaaactcttgacaatgatttgtttgtatgccaaatatatgttgatgaatattatattgggtctactaacgaatctacatgtgaggaatttagtacgatcatgacacagaaattctagatgtcgatgat

SEQ ID NO: 38111 - DNA, 281 bp, Zea mays
tatatcttgctaattatcctgagcacaacattaggatgattcatgctacgaaacctcatactggttctcaccatgcatttatattttaaaatgaggcttctagctctaggcattaccacacatgtttaaatgcctagaaagaataatcctgctgcatctaatgagcataatgtttttttaagacttttgatgcatcttatgtcttaactaacaaatcaggcaaaatagttgccacatatgttgggggcaaacacaatagtccaaagacttgtgtttgggta

SEQ ID NO: 38112 - DNA, 378 bp, Zea mays
  unsure (1)..(378): unsure at all n locations
agctntatcacaccctgcggcacgtactagttcatccgaatgctataaagactcaaaaacgccggatcaaccttttctcgcctcacaaagaaggtcctcgaaagtcaagtaagccgcaactatttcacctacgtaaacgacaattgtcgtgccagcaaaaacaaagaggatcacctcgccgatcttgtagaaacaatcgccaacatgcgcgatgcatgactccgactcaaccctgagaagtgtgtcttccgagttcgccacgggaaaatacttggttacctggtgtcgcaccgagggatcgaggccaacccaactaagatccaagcgatcatcaacatggcacctccgcagtccaccagggatgttcaacaactaaca

SEQ ID NO: 38113 - DNA, 261 bp, Zea mays
agtacactaaccatgtgtataaactctttattgcgctctatgggcttaagcactccccacgagcatggtatgaatgccttatggagtgtcttatcactaatggatatcaaagtcggaaaggccgatcctactctattcactagaactctcgataatgacttgtctgtgtgccagatctatgttgatgatttcatatttgggtctactaacgactctactcgtgcagaatctactaggatcatgacaccaaaattctagatg

SEQ ID NO: 38114 - DNA, 439 bp, Zea mays
  unsure (1)..(439): unsure at all n locations
agctntctttgtgngactcatagagaattctgaatttcataattctgaaattcagaccttgagccaaagatcatggatgttcaccttgatccctaactcgaatcctaatggccccattgtacaaattgtgtctaactaacccctctgtcgtgtgccaaaagatggcattgggacgcgagccctatacacgacaaaacttgggatttgcctcgggtttgggcagggagacagaccagatttcctggctccatatctctgcaaccagtaggcaaaatcctatgacctccacacaagaatggtagcttgtatggaggagaagagagtttgtgcactgacccatgcgagagcaggctcggatgagcgaccacacgcgccatagcttgggcagaacgcacgggcacacgtgttttaccctggtccgcacgccagagcttgtcca

SEQ ID NO: 38115 - DNA, 451 bp, Zea mays
  unsure (1)..(451): unsure at all n locations
tactcaagctctccttgtcgtcatcaaccttgacatagaaccactccgacttctcttctgctggcccattgcttcggtagctgattacaggaaactctgtggttttccgataggtgaagttatagcaaccaatattgtcgtgcaatccatcctttctagccttcgtctgataatgcagctcgtgaactcggcaaaagctgtccgcaaatggctccactggttggcttcggagtgcccaaatataaacactaagcctaacgatagcgttaggggtcagctggtgaaaatagataccgaacctcttcagtacctctgcaataatcccatgtacggggaatcttaatccagcctttagaaagcttttgaanataacaatttcatccttctccggctntggggtagtctcttcttccccgaagcgtaatagcttcttctgattntcattaaaaag

SEQ ID NO: 38116 - DNA, 418 bp, Zea mays
  unsure (1)..(418): unsure at all n locations
tgtagcatgcagcttcccttacatgacagaacataggagactacttctctcttgcacccacacccgcaacatccagttctcccttatactgaactttttcttgggccaaagcaactgaacttttcactnttgcacacaacataacgtgacaagtcatataaagcacttctccgaagctttttttgcctaagcagtcacttggaaacaccaatgctatcaatgaatgcttatgcatgcgaatgttatgatgtaatgtcatgcaccaatgaatgcccgaaacatattttcgaagccgtattgtcagccattaccttgaaacaaccacacattagctctgcattcccttaagaacgactttggagcttcttcgcctttacctaagcaatataaccgtgacttttcctgaagctctgcatcc

SEQ ID NO: 38117 - DNA, 446 bp, Zea mays
atactattcaactaaagtagaagaagagatcagtggtctttgtgtgaaaacttcctctccttcacgtggattagtattctatccttagcgggatgtaccatagtattagtcaaaatccttgcaatataaaatgatcaatagtgcatataactgtgacatccactatatgtgtgcacctaattaaaggaatctagtctatccttttgggcttcaataatgatgattcatttgccatgtacatataacgatcatcatttgtgaaaccctctcttgtgtgtctaatgctctcttttctaaatgttcaacaacgtcctcccaaattcttttaagatgaatacaacacctataaatataagagccttggtcctttcaatcattgacgttcaatagcgcttcatattatgtatgatcgaatcaataaaagatgagagaagttaagatcacct

SEQ ID NO: 38118 - DNA, 448 bp, Zea mays
  unsure (1)..(448): unsure at all n locations
agctngagcacattagcctccacactactgtttttaccanatgtgcttacaatggtgattgtttgtcttggtattcaaaatgatatccataaaggatatgatgaatctgtgattgattcgaaaatttcagatcattaatgaccatcagtaatgaattgtcatttccaactggttatggttggagtcaggaagttttgcacgctcctgacttgtgattaactgcatgtactgcatgtacaagttcccctatggtttttagtacgtgggaatccgtgaaagatttctcatgcgtacattgggtatgttcccaatctcaccaccgcagcgtacatatatgggcacacagaanactggggatctatgtgagaattcattcttcgtcgatcatttaagtttagaatctcttcataagattctatttatgcgccgtacgcttgcttgaatcatg

SEQ ID NO: 38119 - DNA, 470 bp, Zea mays
ctatatggacgacagtgtcgtactctgttaactggtctgtttaggtgacagaaatctctccaggcctgatatggtaaaggagacagaagagaaagtccaacgaatagttcataatttgaaagaagctcaagcccgacagaagagttacgcagacaaacgtcggatacccttgtactttctagttggagattatgtctacctgaaagtttcaccaatgaagggtgtatcacgttttggggtaaaagggaagcttgcaccctagtatattggtccttttcctattctcgaacaatgtggaccagtagcataccgacttcagttacccaaaaccttgtctgtagtacataatgtgttccatgtgtctcaattgaataagtgtcttcgggttcccgatcgaaccattgaagtaacagatgttgccttataaccagacttgacatattcagagcaccctattcgagtcttggatc

SEQ ID NO: 38120 - DNA, 410 bp, Zea mays
  unsure (1)..(410): unsure at all n locations
agcttgtgaagattcttcatcccaacatgggctagttggcgatgccagagccaacccatattagtcttagcaattaagcaagtatcgagttcagctctattaaaatcaactaagtatagctgaccctctaatactcccttaaatgctactgaatcatcacttcttctaaagatagtaacacctatatccgtaaaaagacagttgtaacccattttgcataattgagaaacagaaagcaaattgtaatctaaagagtctacaagaaaaacattggaaatagaatggtgaggagaatatagcaatttaccaagtcctttgaccaaaccttgatttccatccccgaatgtgatagctctttggggatctttgtttttctcgtaagaggagaacatnnctttctcccctttcat

SEQ ID NO: 38121 - DNA, 464 bp, Zea mays
ggttgtctttctctagggactttattgtccttacaatgagactattacatgaaatagactcgaaaaaggtattagtctcaaagtcttagattatatagtaacctccccctgaaagtgtgcatacaagttttaaatacttgtaggagacatgcactttgattgatattaagaggggcagattatccataatccgagctttggcacatataagttaaatggtaccaattgaagcataccaaatgaagtataaattaagtgttataccacttgagagtttttaccatatcaattgatgtatcattttcttaggaatattaaataagctatgtgtcgcgcttatcattttaaaccatgtaagtttgctcaagagtattgaattaaaatgagcaatcctaccatatgagttacctagtatgcatgcattttaacaaacagttaataccaattgaaatactacggatgac

SEQ ID NO: 38122 - DNA, 355 bp, Zea mays
  unsure (1)..(355): unsure at all n locations
agcttgtactggagacatcacggagatcagctcgttagctcaaggtgggcccccgtatgcacccactctagcacggttgcaccgcactggcgcacacactcctggaccgcggactgctggactcagaaaattagggaatgcatagcttgagcagagctcaacggcgtcatcttggcgcaagcgccgtgctgctacagttttaatgtcctgctataacctgagttctaacagtgctcagccggcgtcatcttggcgctacacacaccaaagccattccccgtaagctntggtggcatggtcaacttcattatcagtgacagatacgcgcgaccacaggaagatggcccanacatga

SEQ ID NO: 38123 - DNA, 458 bp, Zea mays
  unsure (1)..(458): unsure at all n locations
cttgccttccgcanngtaatctatgtatacctattacaatctatcacgaccatttcatggatgccacttgtcggggaccataattaggggtacccccaagactcctaatctcagctggtaaaccccatcagcacaaagctgcaaaggcctgatgggtgcgattaagtcaaagctcggtccactcaagggacacgatctcgcctcgcccgagcccagcctctggcaagggcagccgaccccagaggattcacgtctcgcccgagggcccctcaagcaacggacacaccttcggctcgcccgaggcccagtcttcgccgagaagcaaccttggccagatcgccataccgaccgaccgtatcgcaagagccattaatgcaaagatggcctgacaccttatcctgacgcgcgccctcagtcgacagagctgaagtgaccgcagtcactttcgcgctccactg

SEQ ID NO: 38124 - DNA, 451 bp, Zea mays
  unsure (1)..(451): unsure at all n locations
agcttgtgatntatccgatttaaaacaagcaccatctcttaacatagattntctatggataaactgaacacaagagatgacattagtagcacaagcactagtttcttatttagcaaccctttatatgtgaaaggcaaacgagttgctaaaatagagaaacctcataatatggactaaatttcgcttgagccctcatgcataatatattttgaatgacatggataatatgcatggtttttcaatgaagtttaaagggctgacttaatccatattatggtgagtgtctaatatagaagaatcaaatccaaattaactagatagagaatacgtcacactaatttggattggtgaccatatgataagattcatttttctttcaattggacttttacttcataatcaacaatngatgtataccctcaagtgcttcctctttcttagtggctacaca

SEQ ID NO: 38125 - DNA, 452 bp, Zea mays
  unsure (1)..(452): unsure at all n locations
tctatagtccacacacattctccttgaaccatctttcttgttctcaaatagaactgaggctccccatggagacgaaccggggcaaataaaacctttttctagtaattcttctatttgtttcttcagttcaattaaatctttgacatccatttggtaagctctttttgagatcggtgcagttccgggtaatagttcaatagaaaatactatatcacgatcaggtggcatacctgggaattcttccggaaatacgtctgggtattcacatactattctgatgtgctccanagatttctcttccaactgatttaccattgcctctgctattgctggcatactgacattggacttcaattctttctccttgtgggactagtaatgtaaccattcctttagaacaggatattactccatcatacttggtcaagtagtctaattcaagtatcacatcg

SEQ ID NO: 38126 - DNA, 416 bp, Zea mays
  unsure (1)..(416): unsure at all n locations
agcttgtgaaagttcttcatacccacttgtgctaagcggcgatgccacagccagcccatgctagtcttagctattaagcatgcatctagaccggcctcttcttttgcaaaatcaactaaataaagtgtgccgcctaatacacccttaaaagctaatgaaccatcgcttcttctaaagacagacacatctacatttgtaaatagacagttatatcccatatgacataattgactaacagatagcaaattatatccaagactctctactaaaaatacattagagatagaatgctcactagaaattgcaatttacctaactcctttaccttgccttgattcccatcaccgaatataattgaantctgagaatccttattcttgacgtaagaagtgaacattttcttctcccccgtatat

SEQ ID NO: 38127 - DNA, 400 bp, Zea mays
  unsure (1)..(400): unsure at all n locations
ctattgcgtgccaccgacgctgcattctataggatggccatccatggcgatgggagattgaatggcatcagcttctgaacgaggctgccgctagtgaacacaaggagagttatggacatgggaggtcacggagagatctatggagaggggagcaaggtcaccatcgtacatatggagggaggactcacgacattcatggtgatttggcattgttgtccttgtggagctcatgtagtaatctcatgactcaggggacagagcggacaccatnttcattctacatgttctttcctatgacttgttctcattttaccacatgtcgtaactacgcttctattttggcagatccctttctgtcgtcgttcataataccaagaatctcctctcaccctgtcgacat

SEQ ID NO: 38128 - DNA, 454 bp, Zea mays
  unsure (1)..(454): unsure at all n locations
agcttatgttgagttaccacactctctatgtataaccttgcaatctaagcaggcatgcatgtcctcttttctcaagaagacgaaatcaatctggctagtgtgttggccactactgaaggtcaccaggtgggacttcctcttcctaaagaaagtgtttgctataaacatgtcataagctagggcaaagttcaagatttcctctccttcttgattcctagtcccaaagccgaagcctccatgcacaccctcgaaactggtgctagatgtacccacatggccattgagatctcctcttatgaagagcttctcgccaactagcacactactaaccatgtcctccaggccttcccagaactccctcttgagttctcattaaagcctactngaggagcatacacgctgataacattgagaacaagtcctcatgactagtttactaggatgttctatctct

SEQ ID NO: 38129 - DNA, 320 bp, Zea mays
agcagcagaacctttctgttatccagctacacgccaaagatggtgtagtggagaacaacatggtcatactaccgaaatctacctgggatcctaaggcatgtcataaataccatgttctatcaaccactctgaggttgtccataatagggataattccacacaggtacgtcctacatgcatcaagcacgtgagaagagcctaaccgaaacaggtgacatatatgttactgaaagtcacctggagggggggtgaatacggcgaaactgaaatctacaaaacttatcacaactaccagccgggttagcttcacaaatataatc

SEQ ID NO: 38130 - DNA, 385 bp, Zea mays
agcttgacatggtgtgcttgatcattctcattgccacccgtatcggcccggcgtgtccgactctagatggtgctcttatccaatccaaatctctcatgttctaactcatgtctccgttatgtcttcatcctgattcctatctgaacattatggcgcgtgatctacatggtcgtagatcatgtatacattaactgctgacagttctacctttgatgcagatttgaccatccctaacactagatgtggaagcagagctagtgtcttatttagctatctatgcatgtgtaatgcggatgtctttattaaaacttgaattggcaacttttgcatgctcgcacttcctcgccatagctttctaattatcattatctgtcaaatgctaaca

SEQ ID NO: 38131 - DNA, 436 bp, Zea mays
  unsure (1)..(436): unsure at all n locations
agcttctaaagggagaacacattntgggactaacaaatgttcattttgagaaagacagggttagtagcgcatgtcaagcagggaagcaagttggtgttcatcatccacacaaaaacatcatgacaactgacatgccactcgagctcctacacatggacctattcgacctgatagcttacataagcatcggcgggagtaagtactgtctagttattgtggatgattattctcgcttcacttgggtgttctttntgcaagaaaatctcatacccaagagaccttatagggattcttgagacgggctcaaaatgagtttggcttaaggatcaaaaagataagaagcgacaacgggacggagttcaagaattctcanattgaaagcttccttgaagaggaaggcataagcatgagttctcttcttctacacccacaacaa

SEQ ID NO: 38132 - DNA, 354 bp, Zea mays
  unsure (1)..(354): unsure at all n locations
ctctggcaaatatattatagaagggtatcacatatctcatccacaagcactaatatggctgtatcaagggaaggatcattcaagactgccttgcatgggcctttgagtaaatccatattcttcagaaatcaaataaggaactggtcatcctcaagcttgactttgaaaggctnttgataaagtagagcatgttttcgttctacaagcattgcatcacaaaggttttggttcgaaatggataaactgggtgaaaggtattatgcagacatgtacctcttctgtccttctcaatggtgtaccttggaagggctttcaatgtaaaagaagagtcacacagcgtgatccactatcacc

SEQ ID NO: 38133 - DNA, 389 bp, Zea mays
  unsure (1)..(389): unsure at all n locations
agcttcagctggtcattcttcagtatcatcatcctgcacatattaaaacggaatgagaaaggtgcagagttcaaggagaaggtaaaagtaacaagtataagtttctcactggcttaaggaggctccgagcttcgtcaccagccatttttcgcccgccgcttatccaaatctgggtcataaacctgtttcctatgcttcaggctaagcttgggatgtcaaccanatctgccggtgacaaactgaagtttggcctatttacaatcttcccgtgcgtgcagccagccttcaagaaagcgatagccgtgcctcgagaagctagtatggcgcagaaatcagcatgcccagcaataactttgtcaagtgcatcaactttgccctcaatgtatttc

SEQ ID NO: 38134 - DNA, 424 bp, Zea mays
  unsure (1)..(424): unsure at all n locations
cacacagcggagtatggtattacgctctcttgtgtccgaaccactctanatcctcgcgtgttcttgtgttcggtgaccgcttatcaagatangcaaaacgcttaagccccttcctcatcttatgatttagggcgggtgcactccgccacccggccggagaattccctctccaacatttacttactcagaactaaagatgaggcactagacactttaagatctataagactgaagttgaaaaccagctagacaagaaaattaaaaggctacggtctgatagaggaggtgaatacctctccaacctttttgatgagtactgcanagagtgtggaatcattcacgagaccactgctccatattcacctcagtcaaatggggtagctgaaaggatgaacccaacggtgtgtgactcaacaaatgcttt

SEQ ID NO: 38135 - DNA, 148 bp, Zea mays
  unsure (1)..(148): unsure at all n locations
agcttcatcacactcacagtgaaggactgttattttcttatgctcnagagtctgctaacctccggagctgactttattgtcctcagcacgaaggcccatgatcgccttgttggtccgcacgatatcttctctgattataaacttgctg

SEQ ID NO: 38136 - DNA, 424 bp, Zea mays
gacttctaattaaattatggtattgagaacagtttgaaaagaacaagaaaaaagttaaaaatgccgcttgggccaacatcacccctttctgcccaccagaagcgaacacagcgcgacccaattttccttccacccagagctgacatgtgggcccccgctgtcgtcagactcccacttcttctatgttgcttgtgtgtcactgcttcgcgggacccaccgggcagactctcaactgccgcgcgactccgtctttctcgcgcgtcggtcatttccgtgcatgtcgcgtgccatcccgaagctccgggatttcgttgaggtccgccttgacctgtggataagacccccatggacgccctgcgggtcttcctagcctctctctgcgcagaaaccacacgccgacctatccgccgtaccgctattgcca

SEQ ID NO: 38137 - DNA, 312 bp, Zea mays
gtccctcacccggccagcagaagggggcaactgcgaccctccgagaagaggacaaccttgagggagccttgctacgcgtcccgtcgcagggttatgtcttatcaaaacttttaattatttcaattaatgtgtaaatgctaaaaagatttaaaacataaacaaaattaaattttaaactgaataattttagtaattaaaaacaaatatttattaattatataaaaaaatgtcaaatttaaaaaaattatataaaaataattaaattataaaattaaaacataattattgttataaaataattatataataata

SEQ ID NO: 38138 - DNA, 448 bp, Zea mays
agcttgcacccgagacagcactcctacgctcttctcactgtagatgatggctccggtcgactcccagagatgagaaggaggaacggtgccccggttatataagcactaagaggcgggcccgaagtacgcaacaaccgcgtgagttacatggagcatggagtccgttgcgaggtcgccggcgtgagcgtcccaacggcagcccgaggatgggggaagatccgacaggtaggtccctgcgcccagtgagagaagaaagaggagatagctgccacgtggttgagaggttaaagccgagatccactcgctttccacgcaagttgtttggatccaaatccgagcggacaatgtctacgggtgtggcggatagcagctagaggatagggatgtcgaagtggtcccacatgttatcgagctgagcacacaaccgatgcaacgcagagaccgacat

SEQ ID NO: 38139 - DNA, 493 bp, Zea mays
  unsure (1)..(493): unsure at all n locations
tgaagccatggtaagtagcataggccaataatatacgaattgtcttatgcctacctacgggtgcataggtttcaccgaaatccaaaccttcgacttgggagtatcccttggccacaagttgagcttttgtccttggtcccacaccatgctcgtcttgcttgttgcggaaaacccatttggttcctacaacattttgattaagacgtggaactaagtgccatacctcatttctagtgaagttgttgagctcctcttgcatcgctaccacccaatccgaatctagtagtgcttcctctaccctgtgtggctcaatagaggaaacaaaagagtaatgctcacaaaaatgtgcaacacgagatctagtggttaccccttatggatgtcgccgaggatggtgtcgacggngtgatctcattgaattgcttggtggactcttgggtgtggagccttgggtcttcatcctccttgtcttgatcattgcatcntcccctcg

SEQ ID NO: 38140 - DNA, 442 bp, Zea mays
  unsure (1)..(442): unsure at all n locations
gactagtacaccactaatagctattgttccatcacatcttctaaagacagacacatctacattggtagacaaacagatatatcccatattgcataatagactaacagatagcaaattatatccaagagactctactaaaaacacattatatatagagtgctcatttgagattgcaattttacctaacccctttaccttgccttgagtcccatcaccgaatattattgaatcttgcgaatctctgtgtttgacgtatgaagtgaacatcttcttctcccccgtcatatgggttgtgcatccgctgtcaataatccaccttgaacccccggatgcataaacctgcanagcaaatttaagctaggtcttacgtaccaactcatgttgggcctgcaaagtagcacaaatatcttaaggacccaaaagcagttttgctccctgcatc

SEQ ID NO: 38141 - DNA, 459 bp, Zea mays
  unsure (1)..(459): unsure at all n locations
gcttatggataaaagattcatagtagcgctccatctgactcatcttctccaggagattctccttctcagtttttgagtcctccaacttctgcaggagctcacacattttctnctncattgtgcctgtactaccaccagaacttttcttgatggtatcatcatgtcctgagtttgatagataaccagcaagtggaaccaaatgttctgcattgtgattttctttcatttgacctggctgaacaccttgcttgaggttctcaatgacacgttgaagtgcccccagatcagcaagaagaaaatcaagatcacttgcttgtagtccatggagggcatttgttctggtctgctgcagcttactttcaagaagtagcacaccttgcacgcattcaatttggagatgatgaatggacttctgtacaagaataatcttaccatacttagtcatagttntaccttcta

SEQ ID NO: 38142 - DNA, 438 bp, Zea mays
  unsure (1)..(438): unsure at all n locations
tgaaagatatctggatacagttcgaaggttggaggcttcttttcaaggttnttctgtcaagaatattccaagaggtgaaaatgagcatgcagatttactagccaaatcggcggcccaggggctccctctaccttcggaagtatttattgaaacaataaaggcaccttcggttgaactcatggagagtgcagtgcttactatttcttcggtacatagtaaagattggaggactgaaattatatctttcctccaaggtaattgtctttcagatgatgaagcttataataagagaatggaggcaaggacaagaccatatatgataatagaaggggaattatataaacatggagtctgttctccacttcgcaagtgtctatcaagagctgaaggtattgaattaatgaaggagatacacgcaggtctctgtggatctcacat

SEQ ID NO: 38143 - DNA, 390 bp, Zea mays
  unsure (1)..(390): unsure at all n locations
agcttctanagggagagcacattntgggacttaccaatgttcattntgagaaaataggggttgtagtgcatgccaagcacgaaagcaagttggtgttcatcatccacacaagaacatcatgacgaccgacaggccacttgagctactccacatggacctattcggcgcgatagcttacataancatcggcgggggtaagtactgtcttggtattgtggatgattattctctcttcactntggtgctctttttgtaggataaaatctcaaacccaagagaccttaaagggattcttgagaccggctcaaaatgaggttggcttaaagatcaaaaaagatagaagcgacaacgggacggagttcaaaaactcacaaatagaaagctttcttg

SEQ ID NO: 38144 - DNA, 414 bp, Zea mays
  unsure (1)..(414): unsure at all n locations
tcagcacaacgtatctgaagtcatctcggacccgattgtatatgattattaacaagtggttagtacgtaaggccattgggcattaactgcggcgagctgtgtggtcagcatagngggctgcccacaccatcaactggctaatctaacggccacagtcgtcagacagctctgcattctttagcgcagcataacattgcagggcaaagtattctaacgagnactttgttgagtctgtgacctaaattctgcatatatggccacgttagctaacgataaggatggccatcgctggacgttcggggtttctgctgcgctatcaagtttatntctcttgtaagacacccgttcaacgacgccgtatatatacaccccgcctggttgagggccgatgaccgtggttatttcttctcgcat

SEQ ID NO: 38145 - DNA, 362 bp, Zea mays
  unsure (1)..(362): unsure at all n locations
taagtcacctgccgcatgcaagcttganatgctcgcctagtactcgttggagttatccacaccttggcttggagtctatttcaactccttcctccgtttgctcagatctgtcgggcgacagatagagccttccactatgttgatatcagttacaacgatgtcgtggctacttacaatcttctcaacagcactcccacagagtagcaatgcgctcaagattatgctctagctctcagcagcacttcccctctctctaaaggcttataacttcgcctctacaccaactagagagatacacaagagagggagaagaaagaatgatccaaatggtgtatggacttgttggcagcacttgtgttctt

SEQ ID NO: 38146 - DNA, 396 bp, Zea mays
ccgtccacttcaccatataggtctagaacgacaagaacctctttctgatcaacacgagccagctatggcggacagaaaatcatattcacacacacaactggggggacaaaaccttaaatccaaaccacatctcgcaagctcaactctagctggaaccacattgaataagaggaagcaatcgaacaactttagatataacaacaacactatcatcgcacagctggaggaatagccaactcacctcagagaccctctctctatctttcctggacgctactcgaccgccatggctaacacagccgccttcacctccagcacgccctatctctcgttctcgatccgtgcgataacacgaagtcgattagattcaaagcacgctctcaactcccaatgatg

SEQ ID NO: 38147 - DNA, 383 bp, Zea mays
  unsure (1)..(383): unsure at all n locations
agcttctanagggagaacacgttatatgtttgactaacgttcaattcgaaaaagatagaccttgtgcagcctgtcaagcaggtaaacaggtgggaggagcgcatcacagcaagaatgtgatgaccacctcaagacctctggagctgctgcatatggacctcttcggacccgtcgcctatctgagcatatgagggagtaagtatggtctagttattgttgatgacttttcccgcttcacttgggtgttctttttgcaagataagtctgaaacccaagggaccctcaagcgcttcctcaagagagctcaaaatgagtttgagctcaaggtgaagaagataagaagcgacaacgggtccgagttcaagaaccttcaagtggaggag

SEQ ID NO: 38148 - DNA, 474 bp, Zea mays
gcttctgctcactctccggcagacataaatctccttgctgtttttatacaatacaagaaatattcttctccgctgccgctgaatacctatgccccctttggatatttcagtttctgggcatagtattgagcttctcgcttttcttctttagagagattttttcccgaagcatgacggataatatactcagtattctctttcaaagcttcgggagaaggagcggcagatttttcaggcaaaatttgttctatagcttcttcctccgctgccttttctccaatttccgaggatttctctttgatgggctctgaaggcccagtttcatcatcggcccggctcattgtagcttcggcttcgctcagctttgtctcagattcaacttgtgctgtcgaagccttggcaatttttccttgagtagagcttgaagttttatcgtctccagcacatctaacacactagccatccttttctctt

SEQ ID NO: 38149 - DNA, 428 bp, Zea mays
  unsure (1)..(428): unsure at all n locations
agcttgcacatagtctcgatgatgtatgcctttatataagccaagtcttctaaagctattactntttgtgaaaccgcattgaacaagtaacacaagcgtgtgatgacaactttgacatgctctgtttcaaaggctcttaccgcaattgggaggaacaccgtcatcatcacatggcactcatgagagttgtagccaaatagagacaagtccttcatcctgactagttggctgatattggatgagaaacctgtgggcactttgaccccacgcaaacatttgcaaatctttgttctctcctcaactgacaagttgtatctagctggagggaggtaaggcttccctttgccactatccactggatgaagttccggtctgatctgaagatctaatagatcattgcgtgaattaagtccggcctttgtcttact

SEQ ID NO: 38150 - DNA, 454 bp, Zea mays
  unsure (1)..(454): unsure at all n locations
tcgcanaggacacacgacaagacagaggccgtcttngcgtttgtgcatcgcctcctggaggctaaattcatcgagccagtggcttaccccacgtggctctccaatgtcgtgatggtgcacaaaaatagcggaaaatggcgcatgtgcatagactccaccagtctcaataaggcctgcccaaaggacaatttcccgttgccgcggatcgacaaaatagtcgatagcgcggccggatgcgaggtcatgtccctcctcgactgcttctccggctatcaccagatatacatgaaggaggaagacaaggctagcaccagctttataacacccttcggcactcattgctttgtcagaatgccggagggtctcaagaatgccggatccacctttacacactcaccaaatagagctcgaagggcatgtcggcataacatattcacatatgttgacgacatcc

SEQ ID NO: 38151 - DNA, 407 bp, Zea mays
agcttacaagatactattcaactaaagtaagattaagctgataagaagccaacgtatgaaaactctctatccttcagctgttttagtatgctatccttaatgggatgtaccatagtataggttaaattcattgcattataaaatgttcaatagtgcatataactttgacatcaactatatgtgtgccctaatttaaaagaattattctattcttttgggtttcaagaatgatggttcattctcatccacatataaagatcatcaggtgtgaaaccttcccatgtgtttttaatgctctcttttctaaattgttgaataaggtccttccaagtgctttcaaatggattcaaattacagatataaagtctggttatttcatcattgatttcaatggtctcatttatgtt

SEQ ID NO: 38152 - DNA, 448 bp, Zea mays
tactcactttagcattgcaaataagatcgcatgggctcctgttctaaactaattcgggagagacaggccggtgttccccaagctgcatcagatgattctgatgatgcagcgaatgtcgccgcactatcggaaaaggccatgtgggatgaagcctatgacgcatgcttgtctcgtctgctgaacatcttgtcgaaccgcctatttgacgtgtactctagtttacctctgctaacggcctatgggctgaacttgagaataacttttcttgtagttgacaatggctatgagtcattccaacggacaactacctcaaatataaaatggctgagggaaggtctgtatggagcagctacaggaaatcaactccttgttaaggacttggttccatatggctgcgtcctaccagacagttatcacgtgaatgcaatactggcaaacctccaccttc

SEQ ID NO: 38153 - DNA, 453 bp, Zea mays
agcttctctctcatgatgaaagcacacaagatgaatacatcctaagaggataagagtaaacgccgaagctatcaccatatggatagcttcggctcgcaatgaagaggatgaataatgatgatgatcgaaagaggaaaagactacttagtccttaataacttgtattacaatcatgtgtaaatgttgaggacataaatgtactttggctcaggctacgtcccgtgcctataaatagatgaacagtaacaccacactgttcatgttggattgtaatcactctcccgcattctcgccttcgagcaagccgaaggtatcaatgtaatatcaatactgttgaatattcatttacattttatggaacatgaatataaatgaattaatgaagatccagtcttcatctttatcctttcgcattccattcagatataaaaaagaatgcttgatttatgacct

SEQ ID NO: 38154 - DNA, 459 bp, Zea mays
  unsure (1)..(459): unsure at all n locations
tgcactatgccgaatggatatacatacatataactatgactctgttatgtctgaggctaaagggcagaccaacagaggcggcagatgcatggttacagctcttcagcacagtcgagataaactcagacacgagttcttctaaaaaaaatttggacctgcgccccggaccgtggcccatgcggacataggcttgggtccgcccctgactacactagaggcagtgccactgccgccaccagcttttgttctgaaatccaggttattcagaacgagcgcgccgatgaactggacaagttattggagttcgtttaagaatccggatcggtactgaacaaaaattaggatggagtataagaaaaaaaagggtgcttatttcatagtgcaggttgaatgtcaccatctatcttccanaacaacactgacgtctactctgagtagtatagaattagaggactgact

SEQ ID NO: 38155 - DNA, 422 bp, Zea mays
tactacatcacaatccgcataatcattatacataccaatggagaaatgcactcgtaccatctgtgttaccttaaccttgcctgaatcattgatccactgaatgtggtatggatgtggccgtggacgtgtggtcaggccaagcttcttgaccaaatatgaactcaccaaattattgcagcttccaccatcaataataacacatgcacaccgattctcgatggagaagaaagtctggaacacattatggcgttgctgcttctctgatggtttaagctgagaactaagaacacgctacaccatgatgcttctaaaggtcaccgtagcatcagcaccaagtatggcatcatcattagcagcaacatcattggagtcatcttcgtcaccctcaccgtcggaagcactaatgtaaccatcatccgtag

SEQ ID NO: 38156 - DNA, 416 bp, Zea mays
  unsure (1)..(416): unsure at all n locations
tactaagctaagaggacgacgccgggaaagtcttttgctttttttgcacggcgttcgagagttcttaaccgaacttacagcaatttcagatatcgcgcatgcaaacctaattacattggttggttgctgtgccgaanggtcccagaggattcttgtgtacaattatctcgagaacaatagtctntcatatacacttctaggtgacattgttaccaagccaacactttaacaatccaattttctagtagctatgtgtcatgtgtgtaccctcatatgngattgcaggttctggccggagcaacattcggttcaactggagagcccgtgtcaagattgctgtacgcgttgctcgtgggcttgcttatcttcacgatggaatacggcctcctatatttcatcgagatataaaggcgaac

SEQ ID NO: 38157 - DNA, 443 bp, Zea mays
agctttaagataggatgatcgggtgaatgaataacatattctgacgggctggatggcagcgggcaatattattatttgtttgttctcacgtttattcacagaatgcgcatatttgatccttaatatataatactctcttccgtcaaaaagaagaacaatatggacatatcgactgaacgatgagtactggagctaatcttggggaattgggcctccgtttgatgcagtgttctaaagcccttattttctgttgcccatgacctgccctagtggctgttggtggagccatattcttgccattttatggcccgagtgagagttgggcaatcgtcctcgaagtttgggctggacgctggtccttgtcgtcgcatacatatagccgatgaaatatgcaaacagaaattgacacataacattgcctgtaaacacatgaaacatgacac

SEQ ID NO: 38158 - DNA, 484 bp, Zea mays
cttctccgaaggcaagacagtgtcagcgatggcttctgctggcctgtcatactgtggcagaagggttgggcggccgcgggctcgctgcgcacgggcaaacggtgacgagttaactccggcgaggtatggagggtgtgcgggagggtgtatccgaagcctgggagggctttataagctcgggcgcgggccacggcgcgggtttggctcgggcgcggcgcggggcatgcgaaggcgcgcgcgagcgtgctctggcgcgggcagacggcgtcgaacacgtggcagtgcgtttcttccaatgttcaaacgccttcagagatcgcaaacgtgcgaatctcgccatgaattcggcgcggacctcctcctggcacctagggctatctcacatgtgtgagttccaagggatgatacgccctaaatagggagatagacgggcgccaaatttggctgtctccctgcccgtcagcgacaaactgatgtcaagtgt

SEQ ID NO: 38159 - DNA, 436 bp, Zea mays
  unsure (1)..(436): unsure at all n locations
agcttattatcagatgcccacaagggaggctttactgcataagaatcccagaaaagaggaaaagatcatcttccatcaaaagatgagggagatacacattgagacagatcttttcattttcagaccatggaaatcattcaaatccatatatatctcacagcatttgctatataaaaaaagtaaagacatttttttctggcactaggactgtatttatgattcaattgttttagttctttaataatgctaaaaataggagcaggcacattgcctccaagggaagagagccagcattaaggattgaaagtaggaacgtcagatcgaacatatcctcttttaaaactgagtctgtctctggatagaatacggaatatggtaggtcagtgattatcaatgacatntagttccaaaaactanaacattgtgacattaaatt

SEQ ID NO: 38160 - DNA, 397 bp, Zea mays
  unsure (1)..(397): unsure at all n locations
ttggtccagtgcacgcaagatcacgaagaatacctncaggcgtatgtccgaaggttcttgcgtctgagggcacaggcgccaacagtgcccaatgaaattgtcattgaggccatgatcaaggggcttcggccaggacctacggcccaatacttcgccaggaaaccccctcagaccctggagaaattgcttcaaaagatggatgaatacatccgcgctgataatgactttcggaaaaagaagggaggaagcttacaaattctcccagatgaccaggggcttcggagggagaatccatccaaggcacgtcagatcaatccactctgcccagaatgacgatagaggaagtcagcaacaaaggccacaatattcctcgcaggcttcggggcagcaacaaagc

SEQ ID NO: 38161 - DNA, 351 bp, Zea mays
agcttatgaagattcttcatcccaacatgagtctattcggtggcgccagagccaacccatgttattcttagcaattaaacaagtgtcgagtttagctctatcaaaatctactaagtatagctgaccctctaacactcccttaaatgctactgaatcatcacttcttttacagacaggcacacctatattcgttaaaagacagttgtagcccattttgcataattgagaaacagagagcaaattgtaatctaaagaatctactagataaacatttaatatagaatggtcaggagatatagcaattttacccaatcctttgaccacactctgatgtccatccccgaatgtgat

SEQ ID NO: 38162 - DNA, 279 bp, Zea mays
acgctagtcttagcaatcaagcaagagccgagatcacccctatcacaatccaccaagtatagctgaccctacgacactcccttaaaagctattgaatcatcacttcctctaaagacagcgacaccgacatcagcgaatagacagttgtagcctatttgacacaattgcagaaccgacagcaaactgcactctaatgaatctacaacaaaaacattggaaacagaatggtcaggggataaagcaattttacccactcctttgaccaaaccctgagttcca

SEQ ID NO: 38163 - DNA, 399 bp, Zea mays
  unsure (1)..(399): unsure at all n locations
agctttgggctgactcgccgaagcaacagantctgcatgatgattgcccacatattctggaatgtagggcgaatgatacgaagctgtatgcatgacctgcttccgctgaacttagtgtgctgctgcttcaactatttccttttgcttctgaatagtaacatggcacatccttgtagtatggcctttgttctcaccgcagaataagcaaaagattctactcggttgatcgccaaatcttcctccgaagcccctgtcgcctctgcctcttggagctggaggtcggaaagagctttgttgttgtccagaaacctgtgacgagcattgtggcctttgctgttgacttcctctgtcatcattttgtgtagaattgtgaattgatctcacgtgcctcgggtaaaa

SEQ ID NO: 38164 - DNA, 491 bp, Zea mays
gacctataaaactaagcttcgctctggcaatattttggcagcgaaacagcgcaatatctatgaatgctatggtaactccacacctacccgtctgtttatatagtgccgcaaatgggaaggtgaatcgtcaaggtcttccgcaccggacaaacaaccacccgcactcactgaacggtgggccacagagtccgagaaggtgaatcaccagggcgcgcgtaactactgcaagatggggccacctcacgcacagattattttgatcgtttctcgccaacgagctcagggaaggtggttttcggatcttcggcatcccaaagcctaatagatattttcacggatcaagctcgttacgaataacgatctagcaccgcgaaggggctactgttgtgggtatgcttcgtagccgaagatcctaaagaaagaaacaccttcgacagatcctctcattagcagtaccgaagctatcgcctataaagcttcgacacagtgac

SEQ ID NO: 38165 - DNA, 452 bp, Zea mays
  unsure (1)..(452): unsure at all n locations
agctntctgttaggggttcgatgntctgttgtgactatgaaagaatacgaggccaagagagtttctgctaatttgtgacagatcatgcaggtaggacactccgtgcgaaatgcgaagcagcgaaggtgaagctgtgatttgtgaagcagacaagcagtgaaggtaaaacgtgtgctattgtttgctttgaggttgaattgaagttttgatttgattatttatttgatagtaatcccatgtttataggaataagatggacaaatttctcatcaagaaccagaagaaaatgcttctaattctaaaacaattaggacaaataaaatgggtgagcttgccagtggcaactgcaactcgcaactgttgagagggccttctctgctatgaacattatcaagactgaaagaatatataaaatgggtgatgaatggatgaataacaacatgctatactat

SEQ ID NO: 38166 - DNA, 480 bp, Zea mays
  unsure (1)..(480): unsure at all n locations
ggtgaaggttcttcatccccacatgtgctaagcggctatgtctttccagcccatgctaatcttagctattaagcatgcatctagaccggcctcttctcttgcaaaatcaactaaataaagtttgccgtctaatacacccttaaaagctagtgaaccatcacttcttctaaagacagacacatctacatttgtaaatagacagttataccccatgttgcataattgactaacagatagcaaattataaccaagagactctactaataacacattagatatagagtgctcattagaaatngcacatttacctagcccttttaccttgccttgattcccatcaccgaatataatcgaatcttgggaatccttattcttgacgtaagaggtgaacatcttcttcctccccgtcatatggcttgagcatccgctgtctataatccagcttgaaccctctgatgcataaacctgctatgcaaattt

SEQ ID NO: 38167 - DNA, 460 bp, Zea mays
agctcgtgatttatccaagttaagacaagctttatctcttaacatagattttctatggataaactcagcacatgagatggaattagtagcacaagcactagtttcttatttagcaaccctttatatgtggaaggcaagcgagttgctaaaatagagaaacctcataatatggactaaatttccttgaaccctcatgcacaatatattttgaatgacatggataatatgcatggttgttcaatgaagtctaaaagggctgacttaatccatattatggtaagtgtctaataaagaagaatcaaatccaaattaactagatagagaatacgtcacataattttggattggtcaccatatgataatatgcattcatcttccaattagacctttatttcataatcaacaactgatgtatatcctcaagagcttcttttcgcttagtggctacacaagtcacaaa

SEQ ID NO: 38168 - DNA, 429 bp, Zea mays
  unsure (1)..(429): unsure at all n locations
agcttggtgcataacatgttctaacttttgaaagtgccactaggacagcagccgctcctgcaccgaaagttccccaggatctatcacagaacatcgtccaagcttcggcgtctttgtttatttcttcttcctgagcccctggcgtccaatcagcgatgaagtctgccaacgcatgggactgaattgaggatctatgcacatagtccatggtgaattcattaagttctgtagcccatttcccaatccttcctatagcttctctgttcctcataatggccttcagaggctgtgatgaaggaacaattatgcgatatgcttgaaagtaatgcccaagctttctggaagccattaacacagcatatagcaccttctccaattctgtatattttttctttgacacgcttanaacttccgaaataaagtacactg

SEQ ID NO: 38169 - DNA, 352 bp, Zea mays
  unsure (1)..(352): unsure at all n locations
ntgagcataattatctccaatattgtcttaacaacaatgcttgctctcttaaacaaagttgttctcctataattgggctataatcttgatgtggtgacctagggcaaaaaccctatattttgaaagttacaaggctccaaagttgagcccatatcactgaaatgcagacttaaccaaaaagagtcaagtatggctcttttgcacttaagtccaaatctcaagttttggattgcaaatccaccttcttgtgaaccatgtgacttaagatacttatttaacttggcttttgcactttagttcaaaagaggactaattttgcacataagcccctatggtttggatttaaggtttt

SEQ ID NO: 38170 - DNA, 345 bp, Zea mays
gtgataatgacttacatgggcagacacctccttaacattttgaagtggcaatcaacatatcttcggtggtacatgctgcttaatgcatggttattcaaaacgtcataaagacctggtttaaattgcagctcgattattagaatctgttaaggtgtcctctacgccggttaaaagtaataaggttgggtttatcctaaccaactctctaataacgcgcccttgatcgggggcaccttaaccatcattgcaaaccccggtcacacaagcaccatatgaatagcattaagaactggtgggttaagctaacgcaacagccttcgcccaaaccctaaccccacatagata

SEQ ID NO: 38171 - DNA, 413 bp, Zea mays
  unsure (1)..(413): unsure at all n locations
tagannaatctggtatgaatctacgataatacccatctagtccaagataactccggacttggtgaacagttgttgagggtttccactccagaatatctttgaccttgctaggatctaccgcaattcctttaactgataacacgtgccccaaaaattgaatttcttccagccagaacgcgcacttgctgaacttggcatatagctggtgttcccttaggcgcgtcaatacaatccgtaaatgctgagcatggtcttcttcattcttggaatatatcaagatatcgtcgatgaagactaccacgaatttgtccaactcgggcatgaacaccgagttcatcaaatatgtgaaatgggcaggagcatttgtgagctcgaaagacattaccaagtattcaaacaatccatatcgcgta

SEQ ID NO: 38172 - DNA, 335 bp, Zea mays
agcctatgaagattcttcattcccacattgtctattcggcggagccagagcccacccatgttagtcttaacaattaagcaagtgtcgagttcagctctatcaaaatctaccaagtatagctgaccctctaacactcccttaaatgctattgaatcatcacttcttctagggacagggacacctaaatcagtgaatagacagttgtagcccatttgacataattgagaaacgtgaagcaaaatgtaatctaaagaatctaaaaaaaaacttcggaaatagaatgggcaagagatatagcaatttaccaaagcctttgaccagaccttgatttccat

SEQ ID NO: 38173 - DNA, 308 bp, Zea mays
tatgattggacaagttctgaataattatgaaatctatcttcattagctgacccctaacactatccgtgggctcatcatcttcatctgggcccttctaagccaaagaatggacccacatgctgaatctttctgccgagtgcatgaattgcattatccaacgaaggccatagaaaacgggctacatgaaaatatctgttgtataacttcgtgtatcataaggatgcaaaggctccggtgctcagctatcgtactaagtggccaacccgctggaagagtgaatgattttatttcaatgtccatgacaataa

SEQ ID NO: 38174 - DNA, 302 bp, Zea mays
ttatccacacctaacaatacgggtggcgccgtgtcgctgacaatatgccgcctcgcgaaagaatgatgtcgctgttgagagcctgtggacggactttcaatatcttaccctccatcccggttgcttagtgcaccaccacacgaacatccttgccactcgaggatgaagggacacaacgccgcaacgctatccataggatacctcgaaatgatcgacactacattaaaattcacgagttcagatggctccacgcccaagtggtacacggtcatacctccggtctaatctgacgctatattgag

SEQ ID NO: 38175 - DNA, 363 bp, Zea mays
  unsure (1)..(363): unsure at all n locations
agcttaaaggatactatgcaactaaagtattattgtgtngataacacgccaaagtatgaaaacttcctctccttcagttagtttagtattctatccttagtgggatgtaccatagtataagttaaattccttgcaatataaaatgttcaatagtgcatataactttgacatcaactatatgtgtgcactaatttaaaggaagttagtctatccttttgggtttcaataatttgccatccacatataaagatcatcatttgtgaaaccctttcttgagtgtataatagctctttttcttaatgttacaaacgaagtccatccaagagctttcaagaaggattcctaatcttacaaaaatgaatg

SEQ ID NO: 38176 - DNA, 480 bp, Zea mays
  unsure (1)..(480): unsure at all n locations
ctataaaaactcaagctcgactnatctatatagggatatcgttgaacttttctattctcctcgactttctggcagcttcctgactctcatgaatagcaataggtccatgatccgaaggtattttcatacaaagatatgccggatgaagaattgttttgaaagcattgagtgttccgcgaccaatgattgcatttgaaggatactccatgttgactatgtcaaacacaacttgctcaatccttgtattgatgacaatccgaaagttactggcatggtaatctcaccaagcgctacaatatgtcttcctccgaagccacaaagagggtgcgtagcatcatgaatattgtcctctagctctcgcatctggttgaacgccttagaaaatattatgtcggctgcactgtctgtgtcatccacaacatcgcggactagatatcctctgatgatgcaagatatgaccataacatcaatgtgaggata

SEQ ID NO: 38177 - DNA, 380 bp, Zea mays
ataacttctaaacacactctacaagtcggggttagcgttagaattaaattcaagtccgggagagagggggaaaacaaatcattggataatcaagcgaatgaacaccatgatgtgttttaccgacgttcggtttcaaataacctattcctcgttgaggaggtcacaaagatcgggtctatttcaaccctttctctctctcaaacagtcacttagaccgagagagccttctccttaatcaatcgggtcactaagaccccgcaaggaccaccacacacttaagagtctcttgccttgattacaagacacttgagagcaacattgaaatataagaaaggccttctcagaaacaagagcgcaaaaaacactaacacactctttac

SEQ ID NO: 38178 - DNA, 455 bp, Zea mays
  unsure (1)..(455): unsure at all n locations
agcttcagctccatctatgatatggattgctttttattcagnccagnntccttcggcccttctggcagcttcctgacttccatgaatagcgaagggtccttgatccgaaagtatcttcatgcaaagataagcatgatgaagaattgcttctaaagcattgaaggtgccacgaccaataattgcattgtaagggtattccatgtcaacaatgtcaaacacaacttgctcagttctagtgttgttgatgaacccgaaagtcactggcatggtgatcttgcccagtgctacaatctgtcttccttcgaagccacagagagggtgtgtagcatcatgaatcttatcttctggctcttgcatttgcctgaaagccttaccatagatgatatcagctgcactgcctgtattaaccaagacattgtggaccaaaattctttgatacacaagagaaaccatgc

SEQ ID NO: 38179 - DNA, 436 bp, Zea mays
  unsure (1)..(436): unsure at all n locations
taatgcccctcctaacacattgacagactctgttaatgctttattccatggctcangataacaagggttacattttgtccctgccggttatccccagcacaaaattatgagaactcattctatgaagtctcactctggctctcatcatgcttctattataagagtgaggcatctacttctaggcaatcaatccgtgctaaattgcctaagaagagaactccaattgcatcaaatgaacctaacatttcatctaatacttttgatgcatcatatgttctaactaacaaatcagaccaagtagttgccaaatatgttgggggcatacacaanggcttcaagacttgtgtttgggtacccattgcgcttgtttctaatgtcanaggaccaacgatccgttgggtacctaataacaangcctatnattagtttggttatg

SEQ ID NO: 38180 - DNA, 346 bp, Zea mays
agagcacattctatgactaaccaatgttcattttgagaaagacaggattagtagcgcatgctaagcaggaaagctagttggagcccatcattcacacaagaacatcatgacgaccgacaggccgcttgagctactccacatggatctattctgcccgatggcttacataaacatcagcaggagtaagtattgtcttgtaatagtggaagaatattctcgcttcacttgggtgatctttttgcaggaaaaatctcaaacccaatacaccttaaagggattcttgagaccagctcaaaacgagttcaggttaacgatcaagacaattagaagcgacaactggacggag

SEQ ID NO: 38181 - DNA, 475 bp, Zea mays
tctatagggagaacacatgtgaggataacaaatgtttattttgtgaaagacaagaactgtagcgcatgccaggcaggaaagcaagttggcactcttcatccacacaagatcatcatgacgaccaacaggccactggaactcctacacatggacctattcggcccgcatgcttacataagcatcggcgggagtaagtactcgctacatattgtggaggactattctcgcttcacttgagtattccatttacaggaaaaatctgatacccaatagaccatagacggattcatgacacgggcttaaaatgacttcggcttaacgatcaccagaatcataagcgactacgggacaggagctaagaactctccaacccaaggcttccttgacgaagaggggatcaagcatgagatctctcctcgctacacaccacaacacaatgagtgtagggaaacgaagaatagaactctctctgaca

SEQ ID NO: 38182 - DNA, 276 bp, Zea mays
agtctatgtgacaacctccggctctgaaatagagagtaccctaaccatgtctataggctctctaaagcgctatatgggctcaagctagctcccatagcatggtgtgaatgcctacaagatttcttttagccaatggctacaaagtcagcaagggcgaatctactttattcactaaaactcttgacaatgatttgttcgtatgccaaatttatgctgatgatattatattcgggtctactaacgaatctacatgtgaagaatttagtaggatcatga

SEQ ID NO: 38183 - DNA, 466 bp, Zea mays
gctgtgaagattcttcattccaacatgggctattctgcggtgccagagccaacccaagttagtcttagcaaccaagcaagtgtcgagttcagctctatcaaaatctaccaagtatagctgaccctctaacactcccttaaatgctattgaatcatcacttcttctaaagacagtaacacctacatcagtaaatagacagttgtagcccatttgacataattgggatacggaaagcaaattgtaatctactgaatcaacaagaaaaacatttgaaatggaatggtcaggagatatagtcaatttacccaagcctttgaccaaaccttgatttccatccccgaatgtgatcgctctttggggatcttggtttttctcatatgaagagaacatctttttctctcctgtcatgtggtttgtgcacccgctgtccagtatccaacttgagcccgcggatgcataaacctac

SEQ ID NO: 38184 - DNA, 472 bp, Zea mays
  unsure (1)..(472): unsure at all n locations
cttcatccctacatgtgctaagcggcgatgttatatctagtccatgctagtcttagctattaagcatgcatctagaccggcctcctttnttgcaaaatcaactaaataaagtttgccgtctaatacacccttaaaagctaatgaaccatcacttcttctaaagacagacacantctacattgtaaatagacaattatatcccatattacataattgactaacagatagcaaattatatccaagggactcaactaaaaacacattagagatagagtgctcatttgaaattgcaatcttgcctaagcctttcaccttgccttggttcccatcaccaaatatgattgaatcttgngaatccttggttntgacgtaggaggtgaacatcttcttctcccctgtcatatggtttgtgcatccgctgtcgataatccagcttggaaccccggatgcataaccttcttctcccttgcat

SEQ ID NO: 38185 - DNA, 465 bp, Zea mays
  unsure (1)..(465): unsure at all n locations
agctngaagctggcctctgcgccatgacgaaagatgatcttgcggacagtcttgcatataacagtctgaaggtacgaagattgcaaattttgaattttgtggattttgaatgagtcctttagtcttgtgttaatccattcattctttttaaatagggtttaattctcagcaatgccttaaaggcacaaaagaacgccgaagacgagagctgcaccattgctctcaacaaccttcgaacagaggttataaggctgagaaacgaagccttggagaaagacagaattttgcttacattagtggaaaagatgaaggaagacgaagctaactctaagactcacaccgaagctcagaggcgtgaaatcgaaaatcttcgcaaacaactagcccgagccaaagaagaacgcgctcttgaagaaacaaanagagagttaagtgatcaatgggcagatcatttggaagtaatgt

SEQ ID NO: 38186 - DNA, 447 bp, Zea mays
  unsure (1)..(447): unsure at all n locations
ccttgtcttgactacgatgtcatcgacgtaagcctcgtttgtgctatcgatgtgttcgccgaacacatggttcatgcaccgctggtacgtcgcacccgcgttcctcaaaccgaacggcatggtgacatagcagtacatgccgaagggcgtgatgaaagaagtcgcgagctggtcggactctttcatccggatttgatgataccctgagtaggcatcgaggaaggacagggttttgcacccagcagtggaatccacgatctgatcgatgcgaggtagagggtagggaaccttcggacatgctntgttgagaccagtgtagtctacacacatccgccatttcccccctttctttcacacaagcacagggntggcaagccattcgggatggaatacctctttgatgaatcctgctgccattagcttgtggatctcctcgcctatcactct

SEQ ID NO: 38187 - DNA, 310 bp, Zea mays
tctctcgtagttgtctgtcatacattgcttacttattgacactatataatttattcctcttgctggatagagtaaatttatttagtattgttgtttttagtcaaaaccgcctattcacccgccctctagccggtgtcctagatcctacaacatgcgcaccacaagtcatgaaatatgttgcacacacttatgcccagttagtccacatgattctacccaaggcgctacttcaatcgctcatcataaactttgaccaagaaggaacatatcattcttgcgtatgtaataataaactactcactctgatcta

SEQ ID NO: 38188 - DNA, 450 bp, Zea mays
  unsure (1)..(450): unsure at all n locations
tcagcttcgtggctgatccatccaatagggccttcagagactttccttatgaagntctcctcacctgagaatgcgccaactctggcgaagctggttcttattttcttaacacattctatagattcttcataacactttctctcggatgcccgaagctcttcaatgttatttctaagtgaatggcccattgttcactaatttcatcgtttgtttcttcaagtgtgcactcttctttagctctgactagttgtttccgaatatcctcgatttcgcgcttctgagcctcagcttgatctttgaaagcagcttcgtctttttttattttattcactaacgagngcaatattntatctgtttcgagaccttcgttccttagttcaattacttcggaacgaaggttgctcaaagctatggtacacccttctgtcttaacaatctctttgtgtcctg

SEQ ID NO: 38189 - DNA, 456 bp, Zea mays
  unsure (1)..(456): unsure at all n locations
agctagccaatacttatcataacaacaacatctaccagctcaacaactgcagaccataccagtaacttggccttttgcatgctggggactggatatgattggacctttcaagaaagctcaaagaggatacactcatgtattggtagcaatcgacaaattcactaaatggatagagttcaagcccattgcttctttaacctcagctaaggccgtggaattcatacaagacataatattcagatttgggataccaaacaacatcataactgacctatgatccaacttcacgagttcagagttcttcgacttctgcgaacaaaaaagcattcagatcaagtatgcatctgtagcacatccaagagccaacgggcatgttgagcgagccaacgggatgatactggaggcactcangaaaaatgtcttctataagaatgacaaattcgcatgaaagtggat

SEQ ID NO: 38190 - DNA, 456 bp, Zea mays
  unsure (1)..(456): unsure at all n locations
ttaagtcacctgaagcatgcaagcttanctcaataaaaatgtatcaagatgagtaattattatcctaagcctgccatagcatcatcatgtacacatagaacatactactacaagctagtacaactacaatctagcagttatgcacgtgaaactcaaaaagctacatgagatgctaatataatactagaatcaataaagaaaacctaaaatctatatgaaaaagaagaagagagaaattaaaaccaaaagggagtctgtggcggaaccacccaaattattctagtttaagtgctcaagtaccccagtctttcccgcgccgctggcacgcgcgcgccaacgcgtaagcgcgccgccacgcctggtgtcggtcgagctgcgcctagccccgggcctaaccccgctggcccctcgcttccttcaagctagaaaccgacgccgacttttctttcctcccac

SEQ ID NO: 38191 - DNA, 406 bp, Zea mays
tgagcaaagctcacggtctcaccaggatactatatgagggcttgtatctaacggagggggaccggagaggggctggccacagcggtggctcttggtcggcactggccggctacagggaagtcgccggaggcaatggctggctcgggcgagtcccgcgaggtaccgatgaagcaatggggaaggcaaccgatcgctggggcgggttttataagcgcggacaccgccggggcgtccgttctaccgactggcgcgacgctggcacaccgtgcgcgcgcgccggcgtgctctggcgagctcagagcgcgtcgaacacgtggcgcgttgcttctgccccggtcttcgctctgctgagcggccaggcgtacgaatctcccctaccgcctgtgggagaactttccctgcacct

SEQ ID NO: 38192 - DNA, 444 bp, Zea mays
agcttcagcttcatctatattatgaatatgcttcgtaatccgccaactcccttcagctctcctggcaacttcttgactcccgtgtacagtaatgggcccttgttccgaaggtatcttcatgcaaagatatgctggatgaagtattgcttcgaaggcattaagcgtccctcgaccaatgattgcattgtatagatactccatatcaacgatgtcaaagacaacatgttctgttcttgtgttatgaacatagccgaaagtgactggcattgttatcttaccaagtgccacaatatgtctttctccgaagccacaaagagggtgtgttgcatcatgtatcgcatcctctggctcttgcatttgcctgaaagcctttgcaaagatgatatccgctgcactgcatgtgtccactaagacattgtggaccagaaatcctttgataacaca

SEQ ID NO: 38193 - DNA, 452 bp, Zea mays
  unsure (1)..(452): unsure at all n locations
tccgtgttgagtcctgaaatgggcatgcggactccagtgtttcttatggacggctcgtcgagttagagttccggacttttattgagttttgttatgcgggattaacttggtaaccaatttataaggggttcagagctcctccctttatatatagatgaatggtaccaacttgtaacaagtagtggtcgataaaggcaaagacaaaaacgtcatcattggtgatcctcgcatgtcgaatatatcacaaggagggattgctcggaaagctctgtacaaaaagactaacaagttcggaggcgcagaggggggagggtangctcaatcgagctgccaagcaaagctccctgactcaggcatctcggattgtacggcacctgtgcgcggactgtttgaccctaaacagactgcctactgactcagtcgggcagtccgctcatggccagagtcgtcgt

SEQ ID NO: 38194 - DNA, 418 bp, Zea mays
  unsure (1)..(418): unsure at all n locations
gcttttcagattgttaaagagtgcattcatatgaattatgaaactccagttatgnttgttttactgaggctgtttctgttagcctgacagaaatgagcgggtctgttcactggtaggtttcatcaagtaactagccgaattggctctcccagctatggagacttttgtagagggataaaagttcttaatttcagcagaatttcatgatttttggttgagtagtttgtgagatatcgaattttgaaagttaactatgctgctgtctaaaacagattcagtcagttatcttgttagatgttttagaacttatagatggcagaatttaattatccatcgaataccgaagttgtagaataatttgtgtagatactcatggagtatttgtttgatatcaccactggtataattttaaagatac

SEQ ID NO: 38195 - DNA, 468 bp, Zea mays
  unsure (1)..(468): unsure at all n locations
cttaaaagtgctctacaactttggtatgtttacctcatctttatttttagttagcaaggtcaaaaagtgttaacacgatagctctgtccagatttggacaaattcagatttgcgacttcaaaaatccacaactacaggttcagacatccaaacaaattgatcctagactttctggaaaggtaataacaatttctacatatcatttataaatatctcaaggtgattcaatatttaactaaggacaaaagacactagaaggctttgctgtccagaactggacagattcagtcttcacaccttanacatccataactaaatcttcagatcaccaaaaagagtgatccaagactttntggaaagcttagaanaagtaatacataacttttataatcatcaagaagtgattctatgtttaaccaaatcaaacaattcagttttcgaaatctgttctgatagtggacataacac

SEQ ID NO: 38196 - DNA, 92 bp, Zea mays
gcatgtgacgtcggaagcttaatagcggatgaggcccgaggtgctctcatgatgcgagcatcactccatattacattgcgttagcgctgcac

SEQ ID NO: 38197 - DNA, 457 bp, Zea mays
agctttggagaagaagcaagttcttaactctttatcttttgaagagaaatccactaagtagaggttgttgtacctaaatcctttgaacactattgattcatcatccatctttgttacaataacctctgttggagtgaataagcattgaagttcaagatcacagagttgacccactaataataaattgaagctcaaaggtgcaactaagagaacatttgatattgataaatcatttgagattgccaccttgccaagtccttgcacttttccttttgaattgtctccaaatgtgattttatcttgcccatcaacattcttcataagtgagttgaacatctgtgggttgcctgtcatatgttgtgtgcatccactgtcaataacccaatggctcccaccggtcttgtagttcacctacatccacagacaatttaagcttgagtcttgaaggccctatatt

SEQ ID NO: 38198 - DNA, 401 bp, Zea mays
  unsure (1)..(401): unsure at all n locations
agctntgcattatntaagatctaaattagataagttgtaaatcaactcgagaggaaaattaaacgattaaagtctgatcgtggtggagaatacttcttgggtgaattttctgattnttgtgtggaccacggtattatttatgtgaggacaccgccgtactcaccacaatccaatccaatggggttgctaaaataaagaatcgtaatctaactgtattggttaacgccatgttagagacttcaaaactatctaaagaacggtggggtgaagcgatcttgactgtgtgtcatgttctaaataaatttcccacanataaacaaagaaatcacactcgtcgaggatggcgaaaataagaaataaatatcttctattgcgcacttggggtgttggctaaagtgatg

SEQ ID NO: 38199 - DNA, 455 bp, Zea mays
  unsure (1)..(455): unsure at all n locations
acctataatactcagcttctaaggggagaacacatttgngactaacaaatgttcattttgataaagacagggttngtagcgcatgtcaagcacggaagcaagttggtacacatcatccacacaagaacatcatgacgaccgacaggccgcttgagctactccacatggatttattcggcctgatcgcttacataagcatcggcgggagtaagtattgtcttgtaattgtggatgattattctcacttcacttgggtgttctttttgcaggagaaatctcaaacccaagagaccttaaagggattcttgagacaagctcaaaatgagttcggataaaggatcaagaanataagaagcgacaacgggacaaagttcaagaactcacatatagaatgatttcttgaggacaagggcgtcaagcatgagttctcttctcctacacaccacaacaaaatg

SEQ ID NO: 38200 - DNA, 447 bp, Zea mays
agcttaaggagtctgaagaacttatcttgctgtggaaagaaagagctaaaaaatgagtcaacaaaacaagtggcaagtacgataccaaatgtgctcagggtgagttcctatttatacgatcgacgcgctccaagtaggaaggtcccatttgtcattgactgttgctattctagctaagggaaagtgttttttcagaccttcggcttaaggccttcgtccatatcgcaatctgaattcgttattctaacaaattaatattgtgaagggctactgttgggggccttcttcttccgaaggtcctcaaaaacatgatttaacaatgttttcagagtgtaatacatgaacagctaccttctaactcggatcacaaccatagtgtgagaagcgcgaacaatacgaatgttgatgcagcaccgaatctacgtgcaaaggagctgtggcatgaca

SEQ ID NO: 38201 - DNA, 462 bp, Zea mays
  unsure (1)..(462): unsure at all n locations
aacttcatgcatcgcaaagaactgcatgacagacaatttatatatattctttcaagtgctaaacaccgaataatacaagcttggttcagcacatgttacactaatatactacacatgttntcgcaacgactactcttcttgcttcagaatctgttctgcngcttcgcgaagtaaatcggtaacaacttcgtctacaataccttcggccatattaataatgactatcgcttgctctgtctctgggtcagccagagaggctaatggctctgggggaggagacnagtcagctgcggtagaagacatcaattagttcgaagtcacgataataaacaacacagctcaaagccattaagtaatacctatcccgctttcgagtatctcagctttctcaactgctttcagtgcttctcgagcatcatgaatatcttttcgctcttcttcgtaattcatgagccatgcctc

SEQ ID NO: 38202 - DNA, 442 bp, Zea mays
  unsure (1)..(442): unsure at all n locations
agcttcgaataacccatgttatctatcatttctcgacaaacatttatctccttattgtctggtagacagtaaaggaagtcttcttcgtcacttccaccatacactaaagacccccggggatatttcaagtcctttgcataatattgcacttcagcaatntgttcttctgataattgtttccctgaagcatggcaaacaatatatcccaaattgtcttgagaagacgcttcgggcacaggcaatgtcggcttctctagaagatcttcctttgcttgttccaccggtttacttcccgaaggtccatcttcaacgaggtaaggagaagctgaaagggaaatgtgcccttgggccatttccatagtgttttggtgattaagtgcccaacacagattctctaagtgttaatttgtgcccaagaatgaagaagtacaaatcattgtac

SEQ ID NO: 38203 - DNA, 337 bp, Zea mays
cttgtactggtggaccacattgaagaaggagatattccttttgtatcagagtgtgacacctgtcagaaggataaagcaagccacttgaagtccgctggagctttgcgaccactgtccgtaccttcgtggaagtgggacaatatcagcatggatctcattgtgggtctgcccaacacctctcgtcatcatgatttaatttgggttattgtggaccgcatgacgaatgcggcacattttcttcctatgcacaccactgattaggctcagaagtatgcataattgtatatccaccggatcgagagttgcatggatatcctcggaccattgtttctgaccg

SEQ ID NO: 38204 - DNA, 434 bp, Zea mays
  unsure (1)..(434): unsure at all n locations
agcttcttctctattaggacctaatagcaatttatataccagccaggcgagtgagaaaggaggaaacattactctctttctgcaaagtccgagtcccatttgatgagccaaaagaaccatctctatctcttcttatattccagagattactcactcacctacaatgctttgggcccagtcttctctatgcatggatggctntgaaagaaagataactagaatcaatctcttctcctaggaaaagaatcggatttcttcgaagagctgcgaacttgaccagaagaaaggtcagtgtagagaagctcggtcagtgatagtcttcccccgaccgtattctgactagaaaatctggcttctattacaattacaagttccgttcctaatgaaactactcaaataaaaaagtacgtgtacaatacagaattgttatatgg

SEQ ID NO: 38205 - DNA, 460 bp, Zea mays
  unsure (1)..(460): unsure at all n locations
ctccatctatgttatggattgcttgagagtcagtccatttttcttcggcccttctggcagcttcctgacttccatgaatagcgatgggtccttgatccgaaggtatcttcatgcaaaggtaagcaggatgaagaattgcttctaaagcattgagggtgccacgaccaataattgcattgtaagggtattccatgtcaacaatgtcaaacacaacttgctcagttctagtgttgttgatgaacccgaaggtcactggcatggtgatcttgcccagtgctacaatctgtcttcctccgaaaccacagagagggtgtgtagcatcatgaatcttatcttctggctcttgcatttgcctgaaggccttagcaaatatgatatncagtgcactgcctgtatcaaccaagacattgtggaccagaaatcctttgatacacaagagataaccatggcatcgttgtgt

SEQ ID NO: 38206 - DNA, 440 bp, Zea mays
  unsure (1)..(440): unsure at all n locations
agcttcagcttctgctgaatattatcgatcggacttttatccctacagggcttgttccaaaatttgtccacaatggatgtaaactctgggtgagttaaccaaccattcttaaaatggaaagatgacaaaggttttttatctgtaatttcagtatccataattaatggattatggtcagaaatgctcctgggaagtttagagactttaacaaaaaggaaattagattcccagtttttactcatcattcatcaagaccctgtccagtttaaccaaagtgggattttcctggttatttgaccaggtgtatccaccaccaatacagatctcaacaaattatggttatgaataatgtcattaaagagatgggagtgtttatgtaaggcattatccttnattttttcatgagaacctaataatattgaactcaccactcacaaata

SEQ ID NO: 38207 - DNA, 471 bp, Zea mays
  unsure (1)..(471): unsure at all n locations
tgacaagaaaggcaaagccaaacagatccaacctctacttgattacaccactgcgggagtgaacaagcctatggagggagaaactgtgatttgtacgctatgccacaaggaaggccacaagtctttccaatgcaaggcgatgaccggggataaacaaagacaaaagctcaagcaaaagccatcaagcanaatctcaaacacctacatcaaataggtgaacaacaaggatgctacaccatatttgatcaagaagaaaaataacgaaaaggtgatagcaatcaaggccaacaagcaagccaacaaaggaaagggggccaaacgcatctgggtgccaaaggagataatttcaaccatgaaaagcatcaagaagggttggatcccgaaagggaagtgagtggaccgaaggtccacgggaaatttggagactcggctaaatngggatgtatatcatgggatacatcatattggatc

SEQ ID NO: 38208 - DNA, 459 bp, Zea mays
  unsure (1)..(459): unsure at all n locations
agcttttgacaaaacacagactctattctactatnttctatatctctcaagaggtagctgatccatttatcgctttagcctttattttctccctctttggcatcaagcaccacaacgggatcaatcttggtcctttaaccccattgcctcaccaaaatctttagttagaatacaaaggcaattagagtcgaaagatgaacttggaaataagtaccctctcatcggagtgcagtggaagtctttcatggtccaaatccaccttatccctttcaatcctccttcgagactaaatcatcaaactcaagcacatggttagtcttaaaaggtcaaaatgtaacacatctctccctaaacatgtgcatcactttgcaacggacttgttgaagccacggagttgttgttcacttgacaccacattagcaacaaaatgcataaggaacatgatccaaagcataatac

SEQ ID NO: 38209 - DNA, 305 bp, Zea mays
ctcatcttgtttggttcagaagacccacttggttcctacaacattttaatacgacgtggaactaaatgccatacctcattcctcgtgaagtttgttgaactcctgttgcatcgccaacacccaatctgaatcccttaatgcgtcttccaccctgtatggctcaatagaagacacataggagtaatgttcacaaaattgagcaacacgagatcgagtggttacccccttttgaatatcgctgacgatagtgttcacgaggtgatctctttgtattgcttggtggactctcgagtgtggcggtcttg

SEQ ID NO: 38210 - DNA, 459 bp, Zea mays
  unsure (1)..(459): unsure at all n locations
agcttgtaacangagaatagaagcaagagctctaccatatgtcataatagaaggggagttatacaagcgtggggtctgttccccattgctcaagtgtttatccagatccgaaggtatagaattaatgaaggaaatacatgcaggcctgtgtggatctcacattggatctangcccttgcttgggaaagttttttcccaaagattttattggccaaaggcagcttctgatgcagcgggtctggtccaaaagtgcgaaggttgtcagaaatgtgcaaaagatcagaaacaaccttcgtctttaacccaattaatacaacccacttggccgttgcaaaggtggagcctcgatttctangcccattactaccagcacagggggacctaagatatgtagtagtggcagtggaatatttttccaagtggattgaaganagcccttaccacaatacttatttacta

SEQ ID NO: 38211 - DNA, 429 bp, Zea mays
  unsure (1)..(429): unsure at all n locations
tctaaagggagaacacgtgataggtctaaccaatgtacatttctaataagatagaccttgtgcagcttggcaagcaggtaaacaagtgggaggagcacatcacagcaagaatgtgatgaccacttcaagacctctggagctgctgcatatggacctcttcggacccgtcgcctatctgagcatangaggaagtaagtatggtctagttattgttgatgacttttcccgcttcacttgggtgttctttttgcaggataagtctgaaacccaagggaccctcaagcgcttcctcaagagagctcaaaatgaagttgagctcaaggtgaagaagataagaagcgacaacgggtccgaattcaagaatcttcaagtggaggagtntcttgatgaggacgggatcaagcacgagttctccgctccctacacacc

SEQ ID NO: 38212 - DNA, 207 bp, Zea mays
gcattaatccgtgcatgtgagcattttattcgtgtgcacgtaaagaaatagtttgtgttccaaacggacctctggagcgccgccggtgggtcgacaaatagacttatagcgtgggagggtaacgaaggaaagccctgctcggaaaaggattcttctcataccacactatattgataccatggtatacagtatgacgtgacataacac

SEQ ID NO: 38213 - DNA, 354 bp, Zea mays
catgccggagtttgattttgcattctacataaatatgaaagctaacacctaaattgagtttgaaattaaatttggtttgaatctagttggaattggaatcttgaaatataaaacaaaatacaaaattgtcgggtaccgcaattaggggtactccctatgctccttaacccgactggaaaacatcttcagaacaaactatacatggctgataaaacgcggcccaagtcaaggccacgtctgacgagggacacgacctcattcgagcccagcctcgggcgggaacagtagtcccggccggattcacgcctcgcccgatggtccccttattcagcagacgcaccctcggctcgatcg

SEQ ID NO: 38214 - DNA, 371 bp, Zea mays
cacttattaaagacaaacaacaaaccattactttcgaatcaatcacatctcaagacacaagtttggctacacataatatgggaagcacaagaagctggctagagctgatattttagagctaaaggtagtatatgtttacttactgactaccacatcatttgtgaacatcaaactataacgaaacaatgttcggctgacaaagcatataaaagtactgaagatcaaacacctaaaagtaaaaaacaaagagatgaagcctgtatcacagaagtcagccatgcctatttcagcatctactcataggctagcaagaccaagtttgcatcggccaaactgacttcgcctcgctaagttattcatgcttggttaca

SEQ ID NO: 38215 - DNA, 270 bp, Zea mays
tgatccgaagtatcttatgctaagtatacatgataaaaatgcttcatagctaaggggcccaaccataatgcattgtagggttttcatgcatcatgcaaacacactgctaatataggttgtgatgaacccaagtactgcagggacctgccaggcaaatctgctctctaatcacaaaggtgtgacatataatctatctctgctttgattcctgaggcctacaattgaatcggtgacgctgataacaacttgggacaaatcttaaaccaaata

SEQ ID NO: 38216 - DNA, 481 bp, Zea mays
ctgtatggacgtcggtgtcgaactccgctaaattggtctttatctggagaaagatatttctttacgcctgatatggtgaaagaagtcgataaaaacgttcacagaattattcataatatgaaaaaggcacaagctcgtcagaaaagttatgcagacatacggcgaaggcccttatatttcctggaaggagactatgtttacctgaaggtctcaccaatgaagggcgtatcgcgtttcggagttaaaggaaaactcgcaccacgatatattggtccttttcttattctggaaagatatgggccagtggcgtatcgactccaactccccgaaaccttgtctgctgtgcataatgtgttccacgtatcacaactgaagaagtgccttcgggttcctgatcgaaccgctgaagtgactagatgttgtctggaaccagatctaacatactcggaacatcctattcgagttctggatcataaggaca

SEQ ID NO: 38217 - DNA, 415 bp, Zea mays
  unsure (1)..(415): unsure at all n locations
agcttngaaagagagcattgattacatcatcctccatgcttcgggtaaggtactttctaaggaagaagaacgagaagctcaacattatgcccaaaaactgaaatacccgaagggggcattagtgtttaatggcagcggggaagaagattttttgtactgtctcccggataacaaagagatatccgtcagtcgggagataagaagaagcttctgatttccgaagctagaagatggcctctcagtattgtcaaaagatgaattggctgacagtttagcatataatagcataaaggtataaaaatcaattctgtatttgaaaacgaattacttcatttgtttatacttaatgttgtactcctctcgcagggcttgatccttagcaatgccctcagagcacagaanaacatctaagatg

SEQ ID NO: 38218 - DNA, 456 bp, Zea mays
  unsure (1)..(456): unsure at all n locations
tagcaagngcgagttctggatcagagaaggtctgttcttgtttcacataataaaccgagatggactagttgtggatccaaagaaggtagcagcgattctggactataaagcaccaaaagatgtctgacgaatcaagagtttcattggaatggccagttactatcggcgtttcattaagggtttctataagattgatagaccaatgacaaccttgctagcaaagaaggttgagttcaagtggaccccagcgtgccaagaatcatctgatatgttgaagcagaagttgacaacagcaccagtattggttctgccagatgttcacaagccattctcagtatattgcgatgcttcgtacacctaactaggatgtgtgttaatgcatgaagggaaagtagtggcatactctgtccgacaattgaaggttcatgagaagaattatcccactcatgatatgga

SEQ ID NO: 38219 - DNA, 398 bp, Zea mays
  unsure (1)..(398): unsure at all n locations
agcttgccgntctagcattacatgtgatatatctagccaagtgagataatgcaacaatacccctattaaatgcaatgattcttgtgcacacaacatcactgccactcctttattacacttttttgtctagattccgctgctatcaatttttttagactcacacacatcagtacttgcttatatatatgtatatatatatataatatgtatcaatatcatttgtaaatatgtaaaataaaaatagactttagtaccgattcttggcttgaaccgatactaaaagtccttctttagtaccagttcgagccaagaactaatactaaagagggttctcttaatatcagtttgaactacgaaccgatactagtagtcctctatagtaccggttgacaatcgac

SEQ ID NO: 38220 - DNA, 471 bp, Zea mays
  unsure (1)..(471): unsure at all n locations
ctgcacccagacatcaagatcagagtgtatttctctagaagacggctccagcaagagatattataggctacatccgctatgctcctgggcccacatgtcggggctcagcactcttgtacatgcccccctctagctataaaaggggaggcatgatgtgttacaggacagactcacttagacccaagtgattctagacaactcaaactctcaagcaatacatcacacagtggagtagggtattacgctccggcggcccgaaccactctaaatccttatgtgttcttgagttcttcccattntccaactaacgagcaaaacgcttatgcccctcctcatcttaagatttacggcgggtgcactccgccacccggccggagattcctccacgacattttgcgcgccaggtatgggctacgctttaagttttagtttgtatctcgctcatcatgatggtgcggatcattgagcacc

SEQ ID NO: 38221 - DNA, 456 bp, Zea mays
agcttgcacccaggtacattggtccattctctatacttgaaagatatgggccagtggcgtatctacttcaactacccgaaaccttgtctgctgtacacaatgtgttccatgtgtcacaattgaagaaatgtcttcgggtaccagatcgaaccgttgaagtgacagatgttgtccttgaaccagacttgacatattccgaacatcccattcgggtcttggatcaaaaggacagggttacccggagaaaaactctcaagttctataagatacagtggaaccaacattctgaaggtgaggctacatggaaaactcaagactctttagataataatttcctgcgctttttagcctcatgtaatttgtaagtgtgtatagttgctgtaataaaagaataaaccccacaccacccttgcttgtaccatatataaagaaattagaatgtgacacattttcttt

SEQ ID NO: 38222 - DNA, 319 bp, Zea mays
  unsure (1)..(319): unsure at all n locations
tctttcttgcctagcctttgttgtcgagcctatgacatcattatgtangacatcttaactaacattgtggttctctttattaaggcgtccgaaaagggcttcaacttgtctatcaatattagtggtagtacacatgccatatcaatattagtggtagtacacatgcatatcaatattagtggtagcccatgatgcccctggcgaacggaggtggcgagctcatgctgccctctctctctctctctttctacgatgcacacacactctaatgggcgcacttgtgcgagtggtgtggattcggacagggaacaccgacgtg

SEQ ID NO: 38223 - DNA, 425 bp, Zea mays
  unsure (1)..(425): unsure at all n locations
agctttggcaggtttcgtacttctcgtttctatccaaaattcactctcatttagataaccacaactgacgatgttngcaaattggcttgcttgtcaacttaacgttagttctgtttgtgtatagtttgggtattgaagcttttatgtcttgttgggttcattttcttagagggactgaagaaaatcgagcagattacagtggactcagcttcggtcgagaccaatatggttagcctgctgtaccatttaattgatcatcgcactttccactgttaactgtaattagggtcttatatgcacatatcaactctttgtgaggtattctttgaggtcatggatccaagaatatcacctgacaaactgtgtcaagtcttggaacagcacaacgtgcttgcaatgctaacccaattaacacatcatctctc

SEQ ID NO: 38224 - DNA, 450 bp, Zea mays
  unsure (1)..(450): unsure at all n locations
acctatanaaactcagcttcactctccaagctattgaggagaaaaatacgtctttttgtatcatagtagaacacatatatgaatttagtggctgtaatttagagaacttcattcacgtggatagatatgttaagattctatgcagatttcttctttagtggagcgctcggtagtttcgtttcagcgcagcggtatggtagggagaaaaatatgtgctatatattaacatgtgtagaaaaccataaaactagaatatatacatctactaacatttgaggctctcaacttttggaggccctgtgcgagcgcacggctcgcacatgccttggcccggccctgagcctgggtcagcatcatatccatagagggccttgacagtggacaacccagggcagtgtgatacggagtaaggtaccatattatattttcagcaaggatagccacttcttc

SEQ ID NO: 38225 - DNA, 149 bp, Zea mays
cacctatatgggcactctattaatttcttgatgctttagtaaccatccgacacccgcaacatcgtgaccgaaccctctggcgatcaaatacttacgttgtttctatcaactatcctataacataatttcatattattcacgactaaact

SEQ ID NO: 38226 - DNA, 342 bp, Zea mays
  unsure (1)..(342): unsure at all n locations
actcaagcctagctacgggtgcataggtttcaccaaaatccaaaccttcgacttgggagtatcccttggccacaagtcgggctntgttccttgtcaccacaccatgctcatcttgcttgttgcggaacacccatttggtttctacaacatnttggttaggacgtggaaccaaatgccatacctcattcctagtgaagttgttgagctcctcttgcattgccaccacccaatccgaatcttgtagagcttcctctaccctgtgtggctcaatagaggaaacaaaagagtaatgctcacaaaaatgtgcaacacgaaaactagtggntacctccttatgaatgt

SEQ ID NO: 38227 - DNA, 490 bp, Zea mays
  unsure (1)..(490): unsure at all n locations
attaatactcagcttctaagggagagcacattntaggactaaccaatgttcattttgttaatgacaggatttgnagcgcatgccaagcagggaagcaagctggcactcatcatccacacaagaacataatgacgactgacaggccactggagctcctacacatggatctattcggcccgatcgcttacataagcatcggcgggagtaagtactgtctagttattgtggatgaatattctcgcttcacttgggtattctttttacaggaaaaatctcaaacccaagagactntaaaaggattcttgagacgggctcaaaatgagttcggcttaaggatcaagacaataagaagcgacaatggaacggagttcaagaactctcaaattgaaagcttccttgaggaggagggcatcaagcatgagttctcttctccctacacgccacaacaaaatggtgtagtggagaggaagaatcgaactctattggacat

SEQ ID NO: 38228 - DNA, 444 bp, Zea mays
  unsure (1)..(444): unsure at all n locations
agcttcaattntactcaaatgcgcagtgctagttatctatttcgagccaagagcccaaattccactttcttcgcctaaagtcaaaccaagcacacacttcactcatatttacccatataaacctatccaagaagtatcgtctcaattccaagtcattttatgcctcatttccaatttcaaacctcctatggcactatttctcgttcaaacgccgttttcgcgtcgtttgacctctcgatcgccatatctctcgacttctgagccataacactctgtgtatgtatttattcacatttcatatacttatgactatgtgactaatatgtgctcacctcttctgtcatttcagagacctcgcctggccgtgagtcgactnctgtcctgcctggattctcttcctctcgcgtgagaattctaggtagctattcattcgtttgccatcct

SEQ ID NO: 38229 - DNA, 361 bp, Zea mays
  unsure (1)..(361): unsure at all n locations
gcgccgctgngtacgacaagctcccgcgaagccgccgcttggacgcggcccaaagcagctgcaccgcgctgtccatcgttaagcaggggggcctcatggttgtcggcttgtcgccaacgtcgatgactctcgggttgttctggacaccgcatccgacgacgatgccatcacgccgtcttcacctgaagtccaacctgccacgtaagtcgctactgaccggacatgaattcttgtgcgctgggacgatggacgtcgctgacgctgtgtgagtgtcctcgaacatgatgtatgtagtggaatagcgccatcggtggtgcaacggccaggggtactacctcgctgataagcccgcgtgcacttc

SEQ ID NO: 38230 - DNA, 438 bp, Zea mays
  unsure (1)..(438): unsure at all n locations
agcttctanagggagagcacattttaggattatcatatgttctatttgagaaagacaggatttgtagcgcatgtcatgcagggaagcaagttggagtccatcatccacacaagaacatcatgacgaccgacaggccgcttgagctgctccacatagatctattcggcccgattgcttacataagcatcggcgggagtaagtattgtcttgtaatagtggatgattattctcgcttcacttgggtattctttttacaggaaaaatctcaaacccaagagactntaaagggattcttgagacaggctcaaaatgagttcggctcgaggatcaagaaaataagaagcgacaacgggacggagttcaagaactctcagattgaaggcttccttgaggaggagggcatcaagcatgagttctcttcaccctacacacctcaac

SEQ ID NO: 38231 - DNA, 495 bp, Zea mays
  unsure (1)..(495): unsure at all n locations
taacctactgctactggacatattagagtgtacaaacaacgtgtatctgtggatacactaatctgncgctttgaacattgtcactgctgtgaatgtgtgataattagttaacagttaccaaggaaaaaaaaggggtcaacgtcaagacgcttactgcttgctaacttcgtctcttatggttggatggcactccttgctgtacatgcttaaggtgtgaaacaagaaaccactgtgactgacaatagctatctctttctcttctcttgtccacaacctgaaagtatgttcaaacaatgggcagaaatccagatataatgatagagtgagtaactagtccactcatagaccaagctaaactgcctttacaggccccgacctacatgcaagaggttctgcttgttcctgcattagaccctttctaggaaaaaagtattcaactctgtgagagatcatcagtacatggatactagcacanaataatcagtacaaaacata

SEQ ID NO: 38232 - DNA, 339 bp, Zea mays
agcttctccaccatgtcgctgttattttagttgttgcagctacctccatcaatgatcaaacgacatgaacgctccttaatgacacactctgtttgaaacaatgtatgtcgctgattctgctctgccttctccatttgtgcactaagcacacgctgtacaatgaggctctcataatgctctgcatcatctgcaccaatctgttcttcgggtggttccttagtgcctgcatcatcagccgcaagcaaagcaagtgtagcttcatccaaatcactagcagaagaatacccaccatcgtcttttaccaccaaaacacgctgattaggacaatcacgctgcacg

SEQ ID NO: 38233 - DNA, 445 bp, Zea mays
  unsure (1)..(445): unsure at all n locations
tcagctttattttcactacatgtcattctcaaactgatggtcattctgaagttgngaatagaactttgtctactatgttaagggcagttctaaagaagaatattaagatgtgggaggactgtttgcctcatattgaatttgcttataatcgatcattgcattctactacaaagatgtgcccatttcagattgtatatggtttgttacctcgtgctcctattgatttaatgcctttgccatcttctgaaaaactaaattttgatgctactaggcgtgctgaattgatgttaaaactgcacgaaactactaaagaaaacatagagcgtatgaatgctagatataagtttgctagtgataaaggtagaaagggaaataaatttgaacctggagaattagttggttgcatttgagaaaggaaaggggttcctgtttacgaaaatctaaa

SEQ ID NO: 38234 - DNA, 358 bp, Zea mays
atagaccttgtgcagcttgtcaagcaggtaaacatgtgggaggagcacatcatagcaagaacgtgatgaccacctcaagacccctggagctgctgcatatggacctcttcagacccgtcgtctatctgagcatatgagggagtaagtatggtctacttattattgatgacttttcccgcttcacttgggtgttctttttgcaagacaagtctgaaacccaaaggacccttaagcgctctctcaagagagctcataatgagtctgagctcacagtaaagaagataaggagcgacaatgggtccgagttaagaaccttaagtggagagttcttgaagggaagggatcaacacgattctct

SEQ ID NO: 38235 - DNA, 480 bp, Zea mays
ctgacaatgaggagaaggcgctcgtcatcaagagctatcttttatttctcaagcataggagagggaaagactacaagtcccgctccaagaaagtatgctacaagtgtggtaagccctggcattatattgctaaatgtccattatcaagtgatagagacaggggcgacgaccagaaagggagaagaaaggagaagaagaggtactacaagaagaagggcggcgatgcccatgtttgtcgggagtgggactccgacgaaagctcaagcgactcctccgacgacgaggacgccgccaacatcgccgtcaccaagggacttctcttccccaacgtcggccacaagtgcctcatggcaaaggacggcaaaccgaagaaggctaaatccaactcctccactaaatatgagtcttctagtgatgataatgctagtgacgaggaggatcaattgcggtccgttttgcaaccttaactagctcaaaaag

SEQ ID NO: 38236 - DNA, 421 bp, Zea mays
  unsure (1)..(421): unsure at all n locations
agcttcttcttcattctgatgaaaaccaagttcttttatcacttcatcaaaacgaatgttccaactccgagatgcttgcttcaacccataaatggatttctgaagtttgcatatctttccagcattgatcggatcgacaaaaccctcgggctgtatcatatacacgtcctcatctaggtttccattaaagaaagctgttttgacatccatctgccaaatctcataatcgaaatatgcggcaatagctagaatgatccgaatagatttaagcctcgctactggcgagaatgtctcgtcatagtcaactccttgaacttgtcgaaaaccctttgcaacaagtcgagccttatagatatgaacatttccatccatgtctttcttcttcttatagatcccatttgcatctatangtctaacacta

SEQ ID NO: 38237 - DNA, 482 bp, Zea mays
  unsure (1)..(482): unsure at all n locations
ntcttcggtggcatgacgaaggtcagtgctcgccgaatgtggtctaacagagttcgccagaggtgggcgccaatgttggggactngttctcaaatgctatgagttaagaacaaggcaacacagaaaatgttaaacattaaagtccttcgtccttcgaagcattatttcccttgagagataatgattttcggacgaaggttatgaaggacgtaccttcatcagtacgacatataaataatgaagaagaaatcatatgaaatataaaagataacataaacagctatgaattattattagctcatttctattntattattatggaaaaatagaaatgataacaaattacaaatgtacctttggcttgaaagaaggtaaaagtacaagcgtgacgcataagcaaatgccaagtccgcctgaacagtacgggagcactgtntatctatttataggcacgggacgcagcccatgtaaaatacacccat

SEQ ID NO: 38238 - DNA, 400 bp, Zea mays
gcttgactaaacaatattccctcctttctatttaaaattcattattctcatttagtagattcatacaataattaatgtatgtgtatttatatatatgtttagattcttatcatcccatatgaatataaacatataaatctaaagctaaaatgaatgttgtttataaacgaatggagtattatagaattatatttttttattaaacgaacatggtacatgcttatgcattacttcgcgaaactactagatgcacagtagacctacacctactaaatatagaaacccgtgaatttagggggtgtgtttgtttaggattataatatgaccagattgtataatcttacacatttttaactaagtgttatttaaaatgtggtggattatataatccgactaaatt

SEQ ID NO: 38239 - DNA, 271 bp, Zea mays
ctagcagactataacgtcattatgtttcttatcatgaatctattatactttggtgctccccgttatgcctttcaaggacagctgtcaaatttatatacaatgtagatgtgagttagttcattctgggtgtttgggacccgggtgtacaaatataccacaaaaacaaagtcataagaatggcaagtgaacactagaacataacgacaaaattgctggagtcacctgagaggagccctggatgcatgacctatctctaaaaatgcctttctac

SEQ ID NO: 38240 - DNA, 478 bp, Zea mays
  unsure (1)..(478): unsure at all n locations
ggatccttaagtcacctgcagcatgcaacttcttgatgctagttttaaattagagatgctacacctccatctttcttcgagttttagcaattcttcactaatatatatatcaaattactatatctgaagagacacatttctttacattgtaggaagcattattaaggaatgcttagtgcaattgattctataataacttaaggtttgaattgatttacattcctcattaatgtcctaaaatcttcaataggaatagaaacacaagtttctcatgtaattcttaaattttatggttcttaccatagtttttccctgatatagggtaacaaatacatgtttgcgtttgtggctgatgtgaaattactgtcccaaatctatcatacaaaatngtgcagtgggatcagtagcaatataaagtgtgaccaacgttgttgggattacctactcttcaggaagancattaactaatatggcttaa

SEQ ID NO: 38241 - DNA, 479 bp, Zea mays
  unsure (1)..(479): unsure at all n locations
ctaccacatttgaagcacgagcgcttaccctttgtnctggtctttcttgtgctgcccttgcgacccttaagcgccgacttgaagcgctggatgatgatggccatctcttcatcatttagccctgccgcctcaacttgcgccaccttgctaggtaacgcctccttgcttcttgttgccttaagaagcatgggttgaggctcattgattggaccattcagtgcgtcatccacgtacctcgcctncttgatcatcattcgcccgcttacgaattttccaaggacttcttcgggcgacattttggtgtacctgtgattctcacgaatattattcaccaaatgtggatcaagaacggtaaaggaccttagcattatgcggacgacgtcgnggtcccgtcatcgcgtgcttctggaagctcttattctgttgataagggtcttgagccgagttgatgtttgagtgggctcctcgccccttatcat

SEQ ID NO: 38242 - DNA, 427 bp, Zea mays
  unsure (1)..(427): unsure at all n locations
agcttctagcaaaagaagtttgtttctatctagttgtgcgcactggctaattaagttcatgctgttatggttgtcttcacattgctagcagattattaatgtcgactatgttttcttataatgatatctatttatactttgttgctttcccgtttatgcaatattcaaaggagatgctgtcgaaatnttatatatgaatgttagaggtgtagtttactaccattctggggtgtttgtggatcccggcgtggtacacgtggtatcaaagcatacgctttagatccttggcaatttgatataaatttgacacactcgcacatataggaagggtatgggttcaaatatctttgatatatggtaaatgtctttgaagtgcagatgaaatacattcaccctcctattctttatggtgatgtgtaagttggta

SEQ ID NO: 38243 - DNA, 458 bp, Zea mays
  unsure (1)..(458): unsure at all n locations
tcggcatctccacttatccattcgatgacaccttctgggttgtctcgnatgaagatatcttcggtagaatatgcgcccacgttggcgaagctaacctttatgttctccacgcaacctaaagatttttcgaagcatctttctttggatgcgcgaagttcttcaactgttttctctaaatagtttttccaatattcactaatatctcggttagcttctgcgagaccgcattnttctttggcttcggccaattgctttcgaagatcttctgtggcagaacctcccaagttattgggcccacatgcacctgtccttgtctcaaaggcctcagacggctatgcatgtgcaccacataacctaacaggatctgtccgattgccccaaggacatcggataaaccacttacaaccagaaccgcgggattaagtgatacaaatcacacacaccatcatctttgcagc

SEQ ID NO: 38244 - DNA, 409 bp, Zea mays
  unsure (1)..(409): unsure at all n locations
gcttatgaagattcttcatcccaacatgatctattcggcggtgccagagccaacccatgttagtcttagcaattaagcaagtgtcgagttcagctctatcaaaatctaccaagtatagctgaccctgcaacactcccttaaatgctattgaatcatcacttcttctaaagacagtgacacctacatcagtgaatagacagttgtagcccatttgacataattgagatacggaaagcaaattgtaatctaaagaatcaacaagaaaaacatttgaaatggaatggtcaggagatatagcaattntacccaaacctttgaccaaaccttgaattccatccccgaatgtgatcgctctttggggatcttggtttntctcatatgaagagaacatctntttctccccagtcat

SEQ ID NO: 38245 - DNA, 475 bp, Zea mays
  unsure (1)..(475): unsure at all n locations
tcttgcgtnaagcttcagaccttggctcctcgcggtccatattaagatatttagccttataattgcctcgggagtaagctgatgaagatagacttcgaagattntcaacacctccacgacgaagctgctcaaggggaatcgcagtccagctttcaaaaagcttcggtacaccacaacttcattttcttcagggtgtggacaagttttttccccttcgcccgccctcacaatggacagatcccggaaataccttcctctcatgttaacaagatgtttctctttgatagttgatttaccataaactgaatggctcggtcgccaggggcgatcttcggagtcttcgccaccgctgtccacatcataactntcactgtcaccagtatcttcagacagtccctgcagaatttccttggtaatcttttctgtgttggacttcgacatggctataagaaaccctangttcttctcttcatca

SEQ ID NO: 38246 - DNA, 325 bp, Zea mays
  unsure (1)..(325): unsure at all n locations
agcttgtggcgccctcgggcgtcttgtcttatccgaagcaccaaatctcccacttggaagcctcggggccgaatccttcgggcgtggtagcgtcgcagagactgctgatactgcgccgagtgtagtaaggctacgtcctgagcctcttccagctggtccaatgaatcttctcggctggtttggttagtttggtcgtcgtatgcctttgtcctcggggaaccgtattctaagtttgtgggtaagatggcctccgccccatagactangaaaaacaacgagaagcccgtggcccggctcggcgtctgtcttagactccaaactaccg

SEQ ID NO: 38247 - DNA, 288 bp, Zea mays
  unsure (1)..(288): unsure at all n locations
tcctaaaaaacacggctaactatctggttttggcatattattaagtattacaggagcttcattaccagaaaagcttctgttttaatcaaaggaagtgcgacgaagcatgctttgttacgatgacacaggaagatggtgtanggagaaggtgttgattcaaactgcttggtgcaaatgacaaanatgaccctgtgacatttgtaaaccttgtatgtattcttcgaggatatgaatgtaatatcgtacgaacgtgtacgatctaccgataataattgacagtaccctcgt

SEQ ID NO: 38248 - DNA, 256 bp, Zea mays
tgcttctctgaaagaaagattcttgctttttcttccgaagggtccctggttgagttacaagctgaaaatgttagattaaacgaagaacttgtcaaggctcaaacaactatgaaggaaaaatcagagcactttgagcaagtaagaaaagaatcgcaagataaatccgaagctgaagctgagaagaatttgaagctgcaggagacgctaagagaccttctgaataagtgctcggagtttgctacacgctgcgtggatc

SEQ ID NO: 38249 - DNA, 340 bp, Zea mays
  unsure (1)..(340): unsure at all n locations
ggatcttaagtcacctgcggcatgcaagcttctaaagggagaacacattntaggacttacttatgtntactntgagaaagacaggatttgtagcgcatgtcaggcatgaaagcaaagtggtattcatcatccacacaagaacatcatgacgactgacaggccactcgagctcctacatatggacctattcggcccgatagcttacataagcatcggcgggagtaagtactatctagttatggtggatgactattctcgcttcacttgggtgttttatttttgcaagaaaaatctcatacccaagagactttaaggggatcttgagacgggctcaaaatga

SEQ ID NO: 38250 - DNA, 93 bp, Zea mays
gagcccacccatgttagtcttagcaattaagcaagtgtcgagttcagctctatcaaaatctaccaagtatagctgaccctctacactccttaa

SEQ ID NO: 38251 - DNA, 72 bp, Zea mays
tgtctgtttatccctacgctagttctgtggcaatcatcacagaccctcgtgacattgaatgtactcatgctg

SEQ ID NO: 38252 - DNA, 175 bp, Zea mays
cacctgctgcatgcagctagaaagaaattccaccctgcttcgttttctaattgcgcatttgattcttcatcttccctatgaggcacgaatggaggggcccgtgtatggacgttggtgctattcaatccagaaatgtctaaagacttttcgaaagaaatgtaaaataaattgcaaa

SEQ ID NO: 38253 - DNA, 436 bp, Zea mays
  unsure (1)..(436): unsure at all n locations
gaccctaagcacctgagctgcagcttagtaaaagacgctctggtttactctctctaccgtgttncacggctctcctactggttgcgtatcgacgcgtgtctggagcctaacacaaaatttctatgcaattgaacctnttcacgttccgctgggcgctagcggcacaccgcttcacccctcatcactcgtgagctcctcgcctccggtccaccggactttcttccagaccttggcttccaaactcgtcccaccggccgtagccgacaagtctcgcgtgagtatcactactgctgccgtgctgagggtgagacagctcgcactagagctagctcccgtgggaacctagcgcgatgtgggctcacaactcgcgccgggccgactagacatgggagggcttgagttggtggcggcggcgcacctgagggggcactgcacc

SEQ ID NO: 38254 - DNA, 200 bp, Zea mays
taccacggccaacgccttgaacaacgcttcgcgccttttcacacgcggggagccaaagtagtcgcactcttaagagacgtaacgctaagactgtagtggcaaatagcaatatattagctggtgaagactacaagcttcagtgtaacctcactgttaagattcagggctctacatatgttgagagtatatactcttactat

SEQ ID NO: 38255 - DNA, 350 bp, Zea mays
  unsure (1)..(350): unsure at all n locations
gattctaagaatattaaagcgtacttccaatattgggctatggtatcccacagatgctcaatttgaattatatggatattcggactcggactatgtgggttgcaaagttgataggaaaagcaccttccgttgttgtcaattcttgggatgtctcttatttcatggtcttctaagaagcagaactctgttgctctctctaccgccgacgcggaatatatatcggccaaacaattgtgtgctcaattattgtggatgaaacanacactattggattatgggatttctttaagaatgtgcctctcatgtgagacaatgagagtgcattgaaattgctacaaatccgtccaaca

SEQ ID NO: 38256 - DNA, 170 bp, Zea mays
  unsure (1)..(170): unsure at all n locations
ctcgaacgaacccaacgactggagactgacgcctttactagaattgtaatggattcctatgggtttggactaacagacttcgctgaatnaataccaggaaaagcaaggcatcactatggattaggagaaccattctctaccaagggaaaaagcttcagagagtgataacc

SEQ ID NO: 38257 - DNA, 227 bp, Zea mays
  unsure (1)..(227): unsure at all n locations
agcttatcacttagagattaggatttattatctatttgcccgtgctntgctacaattgtatatatcatataaataggtattgagatattaattcagatataattattatttatttctaaacacaaagatacttatttctaaacacanagatacgtgtgatctgctggttagcctgttgcgcggacacaaggtgtanggcccacaggacacggcgccaatgtgggaca

SEQ ID NO: 38258 - DNA, 91 bp, Zea mays
aggtctagacacctgcaacgctaatgtaatagctttgcgcggaaggaactccgatgtgcacaagccttgtgggaagacctcaagtatgact

SEQ ID NO: 38259 - DNA, 127 bp, Zea mays
cacctgcggcgtgcaagcttcttctgaaggtcttcaactacttctttatgaatcttcgattgagcattatatttcagtgtgtctcttcatcactttggccaccaatgaaagataaaatttatctttc

SEQ ID NO: 38260 - DNA, 429 bp, Zea mays
  unsure (1)..(429): unsure at all n locations
agcttctgacttgtgggcccgcctgtgtgttcggtgcacaccggacagttactgtttgctgtccggtgtgccagcatgagcgcgcctgacttctgcgcgcgcagagcgcgcatttattgcgcagcaggtatccgttggcgcggagacgaccgntgctctcgagtcgcaccggacagtccgggcacaaccgacagtccggtgaaatttaacggacttagccggtggctttccccgagctgcgagttcctgaggccgacctcccttggcgcaccggacactgttcggtgtacaccggacagtccggtgaatatagccgagtcgccctggatttcccgaagtggcgagttgagtctgagtccctagtgaccggacagtcgggcgccaaaccaggggccttcgttgccttttgctcttgtgaatcaaaaaact

SEQ ID NO: 38261 - DNA, 260 bp, Zea mays
ggatctctaagtcacctgcggcatgcaagcttgacatatcttgattatgggaagcattcccactgcaaggctatcaggtccttgcaggagcaatctgtctcgtcaacaatgccattatcacagtgtacataaggtcatgcagtgtgccactggccagaatggtgttttattagatctgttgggggcaaggaaacaattaaatggacttcaatgatcgtggctatggcacaacatgctttgggagaacaagtcgttgccat

SEQ ID NO: 38262 - DNA, 155 bp, Zea mays
ttttttttcatttcctctccaagcgtcttaaaaaatgccagctgtaagcataatctattatttttaaggtctagtttgggagctctggcccccctgctacatagctacgcccccacaaacacttagcaagcttcacctattcagataaggatagt

SEQ ID NO: 38263 - DNA, 203 bp, Zea mays
acccccgctgcagctcttgcctgaacacatgtatatatatacatctgtaagcacacgacatggatttatcatcacatggttgtggttaccacttaatggataataaccatgcttgaagcgcatatggaagcttcatgacacattccggtaagcctgggatagaaaccgtttaaatcttaaatgaactcttttttaaaaacaac

SEQ ID NO: 38264 - DNA, 234 bp, Zea mays
aactactagctcctgccgctgtactatacagagtgtttctggcttatgtgctgagaacatgtggtggacttgatgactgcaccaaggtggacccctgcatttgttaccatatgtataagtagataagtggaacctttttcactctctttattgaaactggggctggtgaacatgaagcttcgtcggtggaaattttttcttcgaatgcacttagggtcttaagcaacgccagga

SEQ ID NO: 38265 - DNA, 255 bp, Zea mays
  unsure (1)..(255): unsure at all n locations
ctatgagtcacctgccgcatgcaagcttgaagctggattatgcgctatgacgtattgtgatcttgcggatagccctgcatacaatagcctgaaggtgcaagaatcgtatatntaaaaatttacaatttttgaatcattcttttattcttatactaattcttgtatatacagggcttaatattgagcaacgcgctgagagcacaaacgaatgccgaagacgagagctatgacattgctttcaataatctacgatca

SEQ ID NO: 38266 - DNA, 112 bp, Zea mays
  unsure (1)..(112): unsure at all n locations
actagctctctatatcatagcacgcacggaggctctgtatgggttgtcgtgttcatgtaaacatgattctgctggcgtggttatgannatgactaaagtctgatctatggaa

SEQ ID NO: 38267 - DNA, 111 bp, Zea mays
gtgctctacggacttagcacgagctgcactttaggaaccggtggtgcttttgcatcgaaaatgactggcacttgtacagtaacaggggagacactccacaagatgtgatga

SEQ ID NO: 38268 - DNA, 435 bp, Zea mays
  unsure (1)..(435): unsure at all n locations
agcttgagactgggacaaccatggaaagcactttattccttgaagaatatgtcaaggacttgaggattgccaagaggagggaacaaaagaagaaaccaatacctctgccaaaagcctcaaccatgcctccatacaaggtaacatccaaggtaatgatcaagccacacttcacactaagagaagtaagaagtgtattgaattctttaanagggacactcaattaggtcatgtcccggtgttaaaaatggcttgatattaacaaagatgataaactttgttttaaatgctcaaagaagggacacttaattaagtctttgtcctatttgaaacaaaaaggcatagtgttatataagaaaatattaactaaccatgtagcaagcaagaaacaatgaaagaagaaacattcaagacttgaagatcgcctttgctacatat

SEQ ID NO: 38269 - DNA, 275 bp, Zea mays
  unsure (1)..(275): unsure at all n locations
ggatcttaagtcaccgcggctgcagctaagtatgatgttcaaatattatttactgaatctgtccagttctggacagcaaagtcttatagtgatatttatccttagttaaatattgaatcaccttgagatgtttataaatgatatgtagacaattttattacctttccagaaagtctatgagcaccttgtttggatgtnctgaatctttgttgtgaatttttgaagctacaagtctgaatctgtccaaatctggacagagctgctgtgtttgcaca

SEQ ID NO: 38270 - DNA, 183 bp, Zea mays
agctatcatccgaatcccattcaactaagtaggctttgtcatccttcttcttgttgtagaatttcttcttctttttatcatctccatctttgcccttctttttcttggtagggcaaatcatggcaatgtgaccgggttccccacacttcaaacattttctatcattgaaagcatttcttcttg

SEQ ID NO: 38271 - DNA, 219 bp, Zea mays
  unsure (1)..(219): unsure at all n locations
tgtgaccttaatctactgtntacgttctatttgtgacttgactaatgcatgaaataatcaatctgtgtcctactttgataaccttttacctgtaatacacacacaggagttaattaatacgtttatttgactatacttcattcctctgcttataggtaaggctccattatatcctgttgtgtagatgatatttaatactctataccttagacattatat

SEQ ID NO: 38272 - DNA, 126 bp, Zea mays
agcttcttggcacagcctacgcctccaccacagctgcaacaaggccaacagccagaagggagccaatatggcccacaccatagggacttcagagaacagtccgaagctcgcacagtcaacagcact

SEQ ID NO: 38273 - DNA, 261 bp, Zea mays
acgtacaacttaagtaaagtactactcatttcttagccttgaagcaacttattactttgagtgatcacataatgatgctttatgagatggtaagcctcctactgatccccatgctccttgttccattaattcacttgatatttgattcttcataaaatccagtgtatacattatgaccattaattctcaataaacaaaaaatggactactcattcacagtgtgctacatgtcatataatgtatttaccatcatatgggtgt

SEQ ID NO: 38274 - DNA, 461 bp, Zea mays
  unsure (1)..(461): unsure at all n locations
agcttaacaacttaagcctgtagaggagatatattttccttgtggcagacaacgaaatcattacgtgagatttaaaaagtgtcctttattacacagaanataaaactgaatggaaaagactactatcaaggtaggaatattgtcaataaatgtgcttcgactctggcacagtgctatngactgtgcgagcttcgaactgttctctgaagtcccttttgtggtgaagcttatgggcccnctcctggctgctggccttgttgcancggtggtggaggcggaggctgttgccangaagcttgagggtgactcgccgaagctacagaaactcgcagggtggtgcctacatattctgggatataaggcgaatgatatgaagcagtgtgcatgatctgcttcngctgaccctgttgtgctgcagcttcggctatctccttttgcttctggatggtaacatggcacat

SEQ ID NO: 38275 - DNA, 217 bp, Zea mays
ccttggcacagtattaaaacagatgtcctgtagtggaacagtggtctatccacaactttacactgcagcctcactctacctgactttcgccgtagtactagcatcgcgagtagactgcagtatgtgtatatctctactggtgttttgagaaatttcccaaactaaggattgacgctaaacatcgtagatataataagcacacgcgatagacttaatg

SEQ ID NO: 38276 - DNA, 316 bp, Zea mays
  unsure (1)..(316): unsure at all n locations
agcttgttcaaaacatgagggcacagagcgtctccatggntngcagaatatttgttgcgcgtcggtggtggaactgaggaagcgaacaacgatggtgatgttcgtcttccagatgaggtatgtgtgccatatactggtaatgatcacgaccttgatagactgatagatgacatttatcccaatctaaatgaaaacatgtcttacacaagctacatcacttcaagagcaatattgtctacacngaatgactgggtggatttataaatattaggatgatcgatcgtttccaggtgagcagatgatgtacattagtttt

SEQ ID NO: 38277 - DNA, 155 bp, Zea mays
  unsure (1)..(155): unsure at all n locations
gctcaactggctatccattagtcaattatgtgatcatgtnnntcaaggtttattcatggagaaagacgttattgtgtctaaagtggatgatctccaacttatattcaagggtttatatacaacattctatatttagtggatttttaccttggaaa

SEQ ID NO: 38278 - DNA, 301 bp, Zea mays
agtcacctgcggcatgcaagcttagaaaagactggtataaatctgcggtatatccatccagtccaaggaaacttctgacctgatgaacagtggtcgggggtttccactccaaaatgtccttgactttgctggggtctaccgcaatccctctggcagatagaacatgtcccagaaattgaatttcctccagccataacgcgcatttgctgaacttggcatacaactgatgttctctcaagcgcgttaacacgatccgtaaatggttggcgtgctcctctcattcttgaatatatcaaatatc

SEQ ID NO: 38279 - DNA, 185 bp, Zea mays
gctgtgtagcatgcaaataagcttgtgttatctcatacacctcagatttgttggcctgcttggttgtgtttacctcatacacctcagatctgatgccacgcaaaactagatttacttgccagtagccttcacatgcttctgtatggtagaactaatctagttttacatggatcatttgatgcacc

SEQ ID NO: 38280 - DNA, 225 bp, Zea mays
tgcggccgctgctgcggctactcgaacgcgtgttttttgcaatagccatctcagtcagcctctcctggccggctggttgaagcgcagccgcctgctggatgtacacaagacacggcactagtccgccgacgtgcgcgcaaaatggcgaattccaaaccgcctgcaaggccccagacagggctccaacatgccgtggtgatcgcttccactctgcaccccagaccc

SEQ ID NO: 38281 - DNA, 126 bp, Zea mays
  unsure (1)..(126): unsure at all n locations
ctgcagcttcaaaatcccatactcttagatatctcccggcanacggatattnctttgttggctgggagacagtatangaaatcatcttcggtagtgccattgaacactaaggccctcctttggata

SEQ ID NO: 38282 - DNA, 131 bp, Zea mays
  unsure (1)..(131): unsure at all n locations
ggatcttaagtcactgagctgcagcttgcctattgggaagccatgccgtgcttctcttctacaacaaacaatctctnaaagacgaaataaaacagagatgatgctcgttatattaagagaacgcattccgc

SEQ ID NO: 38283 - DNA, 460 bp, Zea mays
  unsure (1)..(460): unsure at all n locations
cacctgggctgcagcttacggcctncaggagagctatccgttggcttgtatctagcggaggagggcggaaaaggggttggccatggtggttgccctccggtggatctggcgggtcgcggggaggtcgccggagctgctggcgagctctggagagttatgcgcggtacagatgatgctaacgggatgatggccgggcactgtggtgggcattatatcccgnggtgcgggccttgttcacggggcacacccaggcacgcggggtttcgcgtgcaggcgtgctctgagcgcgctcccgagtgtcagcccacgtcgaacacantggggtttacttctgccagggttcaacggccgatttgatcgccttagcgtgcagatcttggtaaaacccccgtgtacggtctcttccctgcaccagatcctatctttttgatgtgagttccaagaaacgataccgttggag

SEQ ID NO: 38284 - DNA, 171 bp, Zea mays
gttttacttgtatacctattcaccccctctaggtgctctcaattggtatcagagccgttctcttcaagaaagggactaatcgcctgaagagatggatcctaagagaaaggggatggtggtcaacgacaatgagaaagagtccatcttccaccagcccaaggacaacaaagt

SEQ ID NO: 38285 - DNA, 272 bp, Zea mays
  unsure (1)..(272): unsure at all n locations
agcttatgattntaccaatggaaagagcactatctctacttatgaatttccatgaaatatcttanaagagattgtattagtaacacaagcaatagtttcctatttagcaacctctagtatatgaatgacaaaaaggttactaaaataaggaaacctcatgatatgaactaaattacccttacaagcatcatgcataacatcaanttgtaaaaagatgaaagtagcatgaatatttaattaaaagttacatggcaagtttaattcatagcatg

SEQ ID NO: 38286 - DNA, 112 bp, Zea mays
ctctatgagggtggtcaatgagtggtctcctacgctcgacaatgaggctacccggagcaacaggaagcaggagtagtgtagtgtaatagtagaaatagtagtgatgtttaat

SEQ ID NO: 38287 - DNA, 126 bp, Zea mays
  unsure (1)..(126): unsure at all n locations
agctngaggcggctattgggatcgctcttcattctctccttgatgtgaaatatgcccttgtcggatttctgcttttggatgatctgatcctctagtgagcaatgaacttgaatgttgagtagcact

SEQ ID NO: 38288 - DNA, 403 bp, Zea mays
  unsure (1)..(403): unsure at all n locations
agctttgacacaacagaaactctattctactattttaaaatctctcaagtggtagctgatccatttatcgctttggcctttattttctccccctttggcatcaagcaccaaaacgggatcaatcttggccttttaaccccattgcctcaccaaagtcttcaattaagagcaaatggcaataagatntcatgagatgaacttggaattaattaccctcttattcgagtgcaatggaagtctttcatgtccaagccacctttccctttaatcctcttcagactaaatangcaaactcngcaaatggtagtctanagggtcaagtgaacacatctcccctaacatgtcatcacttgcaacgacttggaggtcaggagtgtggtcaactgagcccacatagcaacaa

SEQ ID NO: 38289 - DNA, 275 bp, Zea mays
  unsure (1)..(275): unsure at all n locations
gacccggatccttgagtcacctgcggctgcagctggatgttntatagatttattaacttattcttacgatatagaaaagattctcttcacgaagcatgaaaagaacggaaggtatttttcgccgaacgctcaaaaaatggtatgtatgcaaaagttcatgcatcgtaaagaattatattataaatagactatatgttacatttcaagttacaacacattacacattctatgttccagatgtttctaacataacgatttaattcttcttgagaaat

SEQ ID NO: 38290 - DNA, 216 bp, Zea mays
  unsure (1)..(216): unsure at all n locations
tcacgatccaccctctttaatactcttacgcttttgnaaataaagtgcgctaacactaactggacctctttctaacaacctacttgaatacattatcatatgtatgcacaatcaatttcaagttatacctaaaaagcttaaagatacaacttactctgatcgacattatgattggatctattgcgcagtacatttctccgaatgtgctcggctata

SEQ ID NO: 38291 - DNA, 409 bp, Zea mays
  unsure (1)..(409): unsure at all n locations
agcttcggcatgttctcagaaatggtacctacttanagatgaataggccatttagacctcgattgagtgctatataaatatcaccaaatgtgaagggcatgtatgtaattttgtatgggttgaaccccgcgcctattaataagtgaccagtactcccgtacggttcactgttgacttggcgattgtttttgggaacacattggatattatattcctttccagccgacgggccttttataataaaattggttctttctttttaataatataaaaaattaatgggaaatggtattaaatattcagcgattttttatgttaattgcttcgccttatataatgataattggaataaagagtcactttatgaacttttccagaaacttttttttaagaaaaattttaaagaaaa

SEQ ID NO: 38292 - DNA, 153 bp, Zea mays
  unsure (1)..(153): unsure at all n locations
gcttatgtggacgatgtggtaatcaaaactgtttattcgaanatttcattgaagatctacaactggttttcaacagtctacgacgatatcgatggaagctttaatcccgaaaatgtgtcttcggggtaccagcangaaaattactcgggttta

SEQ ID NO: 38293 - DNA, 221 bp, Zea mays
  unsure (1)..(221): unsure at all n locations
tgcagcttatcaatggacgtgaaaagtgtctttcttcttggacncaatcaagggaagatgtatatgttgagcaacctcccggctttgaagatagtgagtatcctaaccatgtgtataaactctctaaggcgctctatgaatgcctaagagaatttcttatcactaatggcttcaaagtcggaaaggtcgatcctactttatttactantactcttgacaat

SEQ ID NO: 38294 - DNA, 153 bp, Zea mays
tttctgaccagtcttcattgcatcttgggagatactgatcacaactagtgccctgataatgactaaggcccaaacatgatgtacttgatgcctgcacctgctttcttattgttagatttttgcctactcataggaggaatcgtgggctgcttg

SEQ ID NO: 38295 - DNA, 142 bp, Zea mays
  unsure (1)..(142): unsure at all n locations
aacattggacgtatatccgaagcttgatctttcttgctcacagggagcaggaagctttggcttcaatagaattnttcagcagcgcaacgacgtagtagcaatgaatgtngtggtaacttctcaccagcccatctatttatat

SEQ ID NO: 38296 - DNA, 209 bp, Zea mays
agctttatagaagaaggaggaacctacgactttcaagattcccgctgaaaaaagacaaaggattattactgttattgatgctattgaagaaacgccaccgtcggcttcagcgtccaaaacaccagctgccgaagctgctcccaccgaagctacaactgatgaagctgcggcgggccgaactacaaatcttgagggcgtattttctgata

SEQ ID NO: 38297 - DNA, 180 bp, Zea mays
  unsure (1)..(180): unsure at all n locations
agctncacgtgttcgacgcgagctgacatcnctgtggcgcgctcagagcacgcccgtgcgcgagcccctgagcgcccgcggtcgtccgtgaccacccccactccacagctataaagcccgccccagtgcttggatgccattcccgttgtcttcttcgtacctcgtctgacttacccgagc

SEQ ID NO: 38298 - DNA, 198 bp, Zea mays
gcgaatggactcaagcctagctacgggtgcataggtgtcaccgaaatccaaaccttcgacttgggagtattccttggccacaagtcgagctttgttccttgtcaccacaccatgctcgtcttgcttgttgcagaaaaccccattggttctacaacattttggttaggacgtcgaactaaatgccctacctcattttta

SEQ ID NO: 38299 - DNA, 161 bp, Zea mays
  unsure (1)..(161): unsure at all n locations
agcttctaaagggagaacacgtgatatgttttactaacgtgcaattcngaaaagatagaccttgtgcagctggtcaagcaggtaaacaagtgggaggagcgcatcacagcaagaatgtgatgaccacttcaagacccctggagctgctgcatatggacctt

SEQ ID NO: 38300 - DNA, 188 bp, Zea mays
  unsure (1)..(188): unsure at all n locations
aagcntggccaaataactcagataaaaccccatatcaagcttctcatgtggggacttaatgggaattctgaatttcagaattctgaaattcagaccttgagccaaagatcagggatgttcaccttgatccctagctcgaatcctaatggccccattaacaaaaatgtgcctaattaacccctctgtca

SEQ ID NO: 38301 - DNA, 222 bp, Zea mays
ctctttgaaacatataagtgcttaaacctaagtatgacatctttttaaacgaccttacttggataacagttatcctatcaagtgctccaacacagtttcacgatcctaaacactaaatgaggtcgagaatacatttctacctcactgctggtcatacgaaatatgatttgggtctgtctgcgagagaacatctcttcccgatgtgtggatcgtgcatatcac

SEQ ID NO: 38302 - DNA, 442 bp, Zea mays
  unsure (1)..(442): unsure at all n locations
agcttataaaggggagaacacatttgggactaacaaatgttcattttgagaaagacaggatttgtagcgcatgtcaggcagggaagcaagttggtgttcatcatccacacaagaacatcatgacaactgacaggccactcgagctcctacaaatggacctattcngcccgattgctacataagcatcggcgggagtaagtactgtctaattattgtggaatgattattcctgcttcacttgggtgttcttcttgcaggaaaaatctcatacccaagaaaccttaaagggattcttgagacgggctcaaaatgagttcggcttaaggatcaagaagataagaagcgacaacggaacttagttcaagaactctcaaatagaaggcttccttgaggaggagggcatcaagcatgagttctcttctccctacacgccacaacaaaa

SEQ ID NO: 38303 - DNA, 211 bp, Zea mays
agcttacatcccatccaggacagcgagagatacctctctcacggcgtgaagaaggcgcgcccgtgttccgttcctcgaatggctcgtgcacgcgcaacggccgccccacgaaccactcgccctgtcgcattaactccacggcaagacatgcggcgcctttgcaggggaagcgagcgacgcttcgccttcgccatattgaccgcgtgaaaaa

SEQ ID NO: 38304 - DNA, 167 bp, Zea mays
agcttcagctccatctatgttatggattgcttttgaatcagtccagtttcctttagcccttctggcagcttcctggcttccatgaatagcgatgggtccttggtccgaaggtatcttcatgcaaagataggcagggtgaagaattgcttcaaaagcattgagagtgc

SEQ ID NO: 38305 - DNA, 252 bp, Zea mays
  unsure (1)..(252): unsure at all n locations
gcttccatcgataccgtctcagactgttgaatactagctgtaagtcttcgatgaagttttccgagttctccgttttgattaccacatcatctacgtaggcctctacacgcttgccccagtgatcgactaagcatgtntgaatggttctctgataagtcgctccaacgtttttgaggccgaacgacatggatgtataatagaaagcacccaaacgagtaatgaacgctgttttcttccgcttctttgccaact

SEQ ID NO: 38306 - DNA, 256 bp, Zea mays
gcagtcgtgacgcaggtctgtctgcagctgctgttcgatctcacgctctaccccgatgactctctccagatcccagcagctgggtactttcgtacaatgtgcttacggaccttacactgaactacattggccagctgtgcactggtcatgacatgagaacctcgctatcccagctggtccaccgaaaccacaatgcttcttctaaccagtcagtaacgtcctgcagaccttgcccagtgcccttagtccacagctg

SEQ ID NO: 38307 - DNA, 208 bp, Zea mays
agcttagcaatcttagaaaatcctacaaaaatctttataatatcctgcaagtcccaagagacttcggtcctccgtaaccgtagtgggtatgctccacaccactatctccttgattttagcatgatccactggtattcctccattagaaatgatatgtccaaggaatgacacctctgtcatccagaacttgcattactggacttggcgt

SEQ ID NO: 38308 - DNA, 258 bp, Zea mays
gctacctgacataaaacttgtcctgcatgttgcatatcatgactacgctgtacgtttgtactgacatggctgaatatgccttggcgtatgaaaaaatgattaatatctttgggcggacttgatgtacctattgtgacgtttggtcttttagacttggctccaaagatgggcaatcggcacggtttatatctctgcatggtctgtaatacgcgctatctagctgatggacagtttactgactgtactctcgctgatgat

SEQ ID NO: 38309 - DNA, 426 bp, Zea mays
  unsure (1)..(426): unsure at all n locations
ctgcaagtcaatacactcagaagccgtgtctacctatgaaccaaccttgttttcttgctagcgtcttcttgaagctcgggggcgagattcctgttaagtgggttagatttgtaacaccctgaanttgggggtataaatattcttttctaatatacaccaaattgcacgtgttaccctctcttttccttgctgttctttccctaaaaagggaaaagattatttggtttaatctcttcgcaaaccctataaaataaaatcttaaggaacttgatattgcttcatgccatgcatatgtttatagtgcaaatgtttcgaccagattaaatatctgaggatgtcccaagagtttggatcttcgaacgttcttgggtatgaatatgatttcagttctctatataataaatacctaaatgtggattgtaaact

SEQ ID NO: 38310 - DNA, 191 bp, Zea mays
  unsure (1)..(191): unsure at all n locations
caatatacccgagctgacaggttggatgactgggactcgacggacgtgtgctgttactcaagtaactgatgcgaaatgattatccaatacatgtatacagctgtttggctcgagtaacatggatcaggctctaaatgtcagtgtcgcattgcaagtgagtanatcactgaaattgtggtcaagtactctca

SEQ ID NO: 38311 - DNA, 335 bp, Zea mays
atggacgtgaagagtgcctttcttttcttacccatcaatgaagagggttatgttgagcaacctcccggctttgaagatagtgagtaccctaaccatgtttataaactctcttaggcgctttatgggctcaagcaaccccaagagcatggtatgaatgcctaaaaatttccttatacttatggattcaaagtcagaaaagcccatcctcacatttttacataaaactctttaaaaatgactgctctgatgccaaattatgttgatgatatatatttgctctacaacgaatctacatgtgaagaattagtggatcatgacacaaattcaaatgtcta

SEQ ID NO: 38312 - DNA, 214 bp, Zea mays
agcttcttggcctcagctaccatcgtttatcatctgaacctacttattcccgaagccagcagccagaagggcgccagcactcccaacaacaacgtgacttcagggaggtgtatgaagctcgtacaatcaatagcactgtaccacaatacaagcacatatattgaccaatatgctgttcctaaatactttaatctcctatctacctttttgtttt

SEQ ID NO: 38313 - DNA, 165 bp, Zea mays
  unsure (1)..(165): unsure at all n locations
agcttggatgttcttacgaagcatggatatttttactaagcatggatctttttctttacgaagcatgaaaagaagggaaggtgttttttcgccgaaggcttcaaaacggtatgtatataaaagtttcatgcatcgcanagaaatgaaatacaaataatttacata

SEQ ID NO: 38314 - DNA, 314 bp, Zea mays
agcttcttctctgtctacccgagagaacctatctttatcatcgtcggcacatcagccttagagacagtatattgttcaaaatctaagtggctgggttttgatgggactagagtgttgtagtcttcctcttcatcagcatttactacctcatatcagcttcttcagccttagctgtatgtccatcttcgtcaaccgtcccctttggaacacccaatcacaatgtttttaaactttggaaaacggggcttgtttgggtacctatggcctcctttccgaccgggtcactctaacaattgaacgtactctggccataa

SEQ ID NO: 38315 - DNA, 323 bp, Zea mays
agcttcctggaacagcctgcgccttcacctactttgctacaaggccagcagccagaagggagccaatatgcttcgcatcaaagggacttcaaagaacagtccgaagctcgcacggtcaatagcactgtgccagaatcaaagcacatctattgacagatattctaccttaatagcaatcttttcattcagtttaattacttgaaaaagagacattgtaaggtttaaggaaaaaatttcgcagatcctacaagagaatatgttctttcacaggctgtgataataaaaggacctctgactttcgaaattcttcgaaaaacaaaaag

SEQ ID NO: 38316 - DNA, 443 bp, Zea mays
  unsure (1)..(443): unsure at all n locations
agcttcatgtggactgtcgttccattntccttctctatgtcagcttcatgtgttgcttccacttagcactctgcaagtaccaagtaacaccaattgacacacggtttagtttacaccatgtaccaacattttacaactaggaaatgaccaaagcgaagaaacttgcagaagtatgcattaagttacagccaggcatgcagtgcaaaacatatggatatccactgccttacaattcagaaaaatcactatgttcatttcagcttaaatatgcactgtatgcacaaagaagaacctacatccaggcattgtatgcacaaatatgcactgtatgcacaaagatcataaggctatngttcaagtatcctacaagctactttattattcagggatgcaagttatgtaaattgttgtctaatatggcaggagcgtcaaagtttccaaag

SEQ ID NO: 38317 - DNA, 183 bp, Zea mays
  unsure (1)..(183): unsure at all n locations
agcanattctgcattcattagatcttctcttgtctaagaactcacgtacctactctgattatgttacctctagctctaaccgactaatatgggatcaagcttttattaagtgattacattgtaggacccgactatttacctcctctacgagactatcaattatattaatcacaaccttatctt

SEQ ID NO: 38318 - DNA, 158 bp, Zea mays
acttcagactagatgtacactggttggcggtttcctctctaaaatatccttgaccttgctgggatcaaccgcaatccccttggcagaacatacgtgtcccagaattggatttctttcagccaaaacgcgcatttgctgaatttagcatacagttgatg

SEQ ID NO: 38319 - DNA, 169 bp, Zea mays
ctcagcaagctacgccgggcttcgttcacgcagggtccttgaacgcgtgcgttgaagagcgggcattgagtacgtgtctacccttcacgaactctaacgatacggacgtggagtggacctggtctacaccccatctccacacgtatggcctgtagtgcacctcttattg

SEQ ID NO: 38320 - DNA, 162 bp, Zea mays
gcttcggactgctctctgaagtccctatgatgttgttcatactggctcccttctggctgctggccttgctgtaacggaagtggaggcggacgctgttgccaagaagcttgaggttgactcgccgaagcaacagaaactgcaaggtggttgcccacatactct

SEQ ID NO: 38321 - DNA, 144 bp, Zea mays
agtagtgaagtaaaccagttggtgataaagagaaaagacctcctgatgtcttgaatggataactggacatatcaatgattgaaatcagagacacatcgcataagtaatggcagaaccagcatttatctgtgtcggcatgctctt

SEQ ID NO: 38322 - DNA, 122 bp, Zea mays
  unsure (1)..(122): unsure at all n locations
aaacgatcagntctcagcgcgtatcggcccaccttgcagattactgtttggtcttgcggccaccgccaatcagtgcagccgctgtcacctggtgtaaaatcctggcgctcccttttactgca

SEQ ID NO: 38323 - DNA, 187 bp, Zea mays
tctatcacgggcagcggagcgaccaccagagctatatactggcagtagcttcaacacagtacgacttcccctaagttgattactttcaaacagaactctagaaaacgtgccatgaatggacgaggatgactagattcaaaactgaaagtggcggatcattacctctgacaacgttctccatgaaccg

SEQ ID NO: 38324 - DNA, 278 bp, Zea mays
  unsure (1)..(278): unsure at all n locations
ccacccatggtagttttagccattaagcatgtgtcgagtttagctctatcaaaatctaccaagtatagctgaccctctaacccaacccttnatgccattggatcatcactctttctaaagacagtgaaccctcataagaagaaacagtgtgcccttttgcaaattggacaccaaaggcaaatggtatctaagaatctacataaaaaacattggaaatagtatggtcaggagatataacaattttacccaatcctttgaccaaaccttgattccatccc

SEQ ID NO: 38325 - DNA, 372 bp, Zea mays
tttgagaaagataggatctgtagcgcatgtcaagcaaggaagcaagtttgacttcctcatacacacaagaatatattgcaaccgacatgccgctcatgctactccacatggacctattcgttccgatcgcttacataagcattggcgggagtaagcatggccaagcaatggcggatgacttattctccatcactaaggtgtccttttgcaagaacaatcacaatacccacagaccttaaaggattctaagacacgctcaaatgagttctgatgagaatcaaacagatagaagtgtaatgggacagagtcaagactctcatttgaagatttctgggaggaggctcaagctgagtctctttcctaccactaaca

SEQ ID NO: 38326 - DNA, 149 bp, Zea mays
atttttcaggttaggttgtttgctaaagaaatgattggagggagtatctataatgagccctgcgttttaacaatttataaaagaaggtgctgggatctaccaaggaattagacgcccgcttgattattggtgtaaaaacgacaaatttt

SEQ ID NO: 38327 - DNA, 184 bp, Zea mays
  unsure (1)..(184): unsure at all n locations
nngctggacagtgttctgcgacagatcttgttgtaaccttcgggcacgtgcggctgctgtcttagttgcaccttccaaagtcaaaacatgctatgcaataaagcttgcattcagctgcacagataatatagctgaatacgaagcttcgcttctggagcttcagaatttaaggcattgggaataa

SEQ ID NO: 38328 - DNA, 167 bp, Zea mays
aaacgcatgcttttatgcgaagatatcgcagagcaaaatgtgctgctgggatctcaattgtctgacgaacaagagaaaaccctgataatggttctgttaacaacaaagatgttttgcatggtccgctacgatctctgtggcgtcacaaggatgttattgacactcct

SEQ ID NO: 38329 - DNA, 316 bp, Zea mays
  unsure (1)..(316): unsure at all n locations
agcttaagatgtcnggcccgaatgggatcattaccttcggatccacgtaccgccacgcgtacgaatgcgacatcgagtgcgtggagtacggcgaggctctcgcagagtccgaggccctcatcgctgacctggaacgcctctccaagaaggcgcccgacgcgaagtggcacaccgacaacttcgaaccattggaggagttaggtccattttttttaccccanccaaaaacccaagaagagagtttggatcggctctaagctcgaccccaaataggaagcagtgctcatcgactttctccgtgcaaacgccgaagtct

SEQ ID NO: 38330 - DNA, 380 bp, Zea mays
ggctgcaagcttgcaagccctcggacccggctggacttcatcggaggcccgagatcgacctcaccggacttcggtcttccgccgccgcgcgtggaccgagctatctagtgagtctccgccaaattccttgcgctcatatcttctcaggcatcccgtgaacctccctgacccatccaattgaactatcttcgccgtgaccaaggccggacttctcttccgcgagaaagaatattcccgctctgcgcgcgtggaccgaccgactccggccattttcgacggcgacccgcacaccgttgtgatccctgagacctccccttcgtcctcgaccacttcaccgagacaatctcgccgctggtaagcccctccaccctttcttccgc

SEQ ID NO: 38331 - DNA, 180 bp, Zea mays
  unsure (1)..(180): unsure at all n locations
agctngccaagccctcggacccgaccggactttattgaggcccgagatcaccctcaccggacttctgtcttccgccgccgcgcgtggaccgagctatccagtgagtctccgcccaattcctttcgctcatagcttctctggcatcccgtggacctccctgacctatttgattgaactatc

SEQ ID NO: 38332 - DNA, 360 bp, Zea mays
  unsure (1)..(360): unsure at all n locations
agcttaatgccactaagagattgtcttattttgttaagggcaaggcccctatagttcatgataatgagggctatattttatatcctactaattatcctaagcacaaaattaggaggattcatgctaggaaacctcataatgtttctcatgacgcttntatgtataagtatgaggcttatagctttaggccttcaacccatgttaaaatgcctaaaggaaaactccttgtgcttaaaatgaccacaatgtctcatttaagagtgttgatgcatcttatgtgttaactaacaaatcaggcaaagtagttgccaaatatgttgggggcaaacacaaggggcttaaagacttgtgtttgggtac

SEQ ID NO: 38333 - DNA, 119 bp, Zea mays
tcgagctcaagttaatttatttaatgccattaactgtgatatgctgtttgaagaacaactgctttccaatgctatcagacacatgaggctattgcctatgctggtcaacaatgtaaaat

SEQ ID NO: 38334 - DNA, 230 bp, Zea mays
  unsure (1)..(230): unsure at all n locations
tatcaaattcactttgcangctagtatatgattataattagatacgataatatatatactcgcttgattatcattcattataccttgatatctataagtatgaatttctacaagtattctagctacctttcacttgacaatcatatcgaggatatgttcagcacgcatatttaacttgtctcctgattagttaacagttcaccatctgaccatcatgacatctgaatatc

SEQ ID NO: 38335 - DNA, 166 bp, Zea mays
agagaggaggcgagatgtccattttttcctaggacttgctaaagatttacccatttaattgcgagaaaaggttagaaagttcatcatcttatataatatagttgaaatagttacttggtttggtttaaattctttaaatggatgggtgattgattaattaaaaaaa

SEQ ID NO: 38336 - DNA, 366 bp, Zea mays
actagctacggcctgagcaaaccacccttctatacaccgagctacgcatccccgcgcgcgccgcactcgctgatggcattcagccctcgacaatggcctacatggacctacccgctgcttgacatctgtacaacgacccggaacgcgaactacggcggtcacgtcccgacctcacgcgtgctcctcttgtggcgacaggctaccctccatcgtagggcctcacgacccactctgcatccccgcaagagatatcttctcctagcataatagtaagatagccaactaattgcaaatgttatgccccatcgtgcgtactttaaagctccatttcgagtgcctgaatgcaataagattctgatttttctc

SEQ ID NO: 38337 - DNA, 393 bp, Zea mays
  unsure (1)..(393): unsure at all n locations
gattcttcattccaacgtgggctagtcggcgatgcgagagccaacccatgttagtcttagcaattaagcaagtgtcgagttcagcactattgaaatcaactaagtatagctgaccctctaacactcccttaanagctactgaatcatcacttcttctaaagacagtaacacttacatnnctaaaaagacaatgtagcctattttgcgtattggagaaacagaagcaaatggtaatctaatgaatctacaagaaaaacattggaaatagaatggtccggtgatatagcaattttacccaatcctttgaccaaacctttgatttcatccccgaatgtgatagcccgttggggatcttggttttctcataaaggagacatccttnctcccctgcat

SEQ ID NO: 38338 - DNA, 402 bp, Zea mays
  unsure (1)..(402): unsure at all n locations
gagttctcttctncctacacaccacatctgtatggtgtagtggagaggaagaatagaactctacttgacatggtgaggaccatgcttgatgaatacaagacttcgaaccggttgtgggcggaagcaatcaacaccgcttgctacgccatcaaccgactttaccttcactgaatcctcaaaagacatcctatgaccttctacccggaaaaagcccattgttattttttaaagtctttggancaaatgtttattcttgttaaagagtagaaaatctaatttgctcctaggctgtgaacgcttttactaggatatgatcaacacaagggatatagagtcnttacaagtccctggactattgaagttcttggacatttgttgatagactatggctctaagtaagca

SEQ ID NO: 38339 - DNA, 396 bp, Zea mays
  unsure (1)..(396): unsure at all n locations
agctggtgatttatccaattntaaaataagctctatctctcaacatagattntctatggataaactcaacacaagagatggcattagtagcacaagcactagtttcttatttagcaaccctttatatgtgaaagtcaaacgagttgctaaaatagagaaacctcataatatggactaaattttccttgagccctcatgcacaatatatttttgaatgacatgggataatatggcatggttgttcaaggaagtttaaagggctgactaaatccatattatggcgagtgtctaatttggaagaataaaatccaattaactagatagaaaatacgccacataattttggatggttgaccatatgataaatatcattaatcttccaattggacctttatt

SEQ ID NO: 38340 - DNA, 108 bp, Zea mays
tcacctgggctgcagctgttgttgacgggcaacggtattgtcttagcctggagcgaagcagcccccgagcctctgcactgagcgagaggactatcaaggaccatctcg

SEQ ID NO: 38341 - DNA, 88 bp, Zea mays
tctttcttcggcatctgctcttacaatggacatatctcgaaagtatctccccttcatgttttcaaggtgacttctgcccatagttgat

SEQ ID NO: 38342 - DNA, 379 bp, Zea mays
  unsure (1)..(379): unsure at all n locations
agctggctcctcacactcttgagctcatatgactatgacaccacgttcctcttaaagctcaacttctttgtaagatccatcagcaacggatccaaatagcagatgaaagcacccgtcagtaagatttcttcatggcaatacagagctcaagtagccaagtgtgtcttttaacatgtagcctggacttatcatacattcactacgtaaattccattcctttcttttattaaactaacttaaggtgggaaaacaacaaatggtggtaaggtgactgaatctatgacacagactcaatatatattcaattattcattaaanaataatattattaataattgagaagacccatggaactgtaggtgcnggttcagactaattc

SEQ ID NO: 38343 - DNA, 143 bp, Zea mays
tttatgtactatattaccctcgggccgtatacgtttcttgtcctcgcggctggccacccaacgaataatcttttctgcctgcaccatctgtgtgtgtcccaccaatcatccctcgagttactaaccgcatgttctacgactct

SEQ ID NO: 38344 - DNA, 418 bp, Zea mays
  unsure (1)..(418): unsure at all n locations
agctngtcttcctctggagatcattatgggctccccacgggtccagtcgtttgatgagtctatgcaggaacagctacggcgtgaggacgtggacttcatcgtcaagcatagatggcgagcggcgatccgaaatgcatagtacaaccaagcgctcaggcgctaccaccaacggttcgtgcatagtaaggagctcangggtggggacctattcccgaaggtgaatcctgaactgataagggcttcacaaactctccctccagttgtgaaggacccttcaggtgacgaagtatgccgacccggtgtgtccgccttgccacactgaaggatgcctcttccaatccctgaacataaagcacctccgtaagttctccaatagaaccgaaactagggggtgagagtttcttccttcgtaactagg

SEQ ID NO: 38345 - DNA, 370 bp, Zea mays
  unsure (1)..(370): unsure at all n locations
agccttgaggatgtaacaggatttataagatatatagcacgaggttataattgaaaacttagaaaacacaataaaagatcaaacagctgcttttgagaaaaaagagttcgaactccaaacaactgaagggttgctagcggaagccgaagctaaaataacagaactgaattcgatgcttttctatcagtcagaaaggtgctaacaagaatagctgaacctaattgaaaaacttgaggctgaaatctaaaatggttagttatgacaaaatcattgactgacctatagaacaaatgtttgaaattcagcantcaatgtattcaacgactgaagaagggtgtttattcagtcagggccagtaggggaaagttta

SEQ ID NO: 38346 - DNA, 178 bp, Zea mays
tccatcctgcgaggcagtttcgagacgcaggcctgaacccagctatccgcaaatgaaatcacaacaccacgctgcccacaactgacccggcacttcatagaccctcgccaccctgggtgtgctcgcgccggtggcttaagaaccgatccgcagtatggagacttgcacacagttaggc

SEQ ID NO: 38347 - DNA, 94 bp, Zea mays
ctgcagaaggaacaacacaacgggcctgctgcttgatcaactttgctccctgacggacctttgatgacaatctcacttgactagcttctttctg

SEQ ID NO: 38348 - DNA, 403 bp, Zea mays
gtgaccggtatctctgtcatctatgttcttggccatagctctcgcaccccgggactatcagccttgattgactaacgtgcgttaccggacaccgcgcacgaatcccgctgcccgggaccgcgatcgaccctcgttcagtcgtcatgtgatcgcagactccgagtacccgcctcgcgacttctgcgcggaccgccgctttttccggtctgtacctggagacgaggaacataagctagtttgctgctgactggataaccacgtactgagtactaataccagctcgcaatggttcgaactttactataacaacatgtacttttgtgtacaacgcacattgcactatagactctaaactaccaggtcaactagtgatttgtgcacacatggaattcctgatgtaatg

SEQ ID NO: 38349 - DNA, 434 bp, Zea mays
  unsure (1)..(434): unsure at all n locations
agctntgattaanatcgagggtgtcatctaggcaatgatgatccaagggttggaaccaaacactgactgtttctgcaatatatatgatttatcttatcacatgaaggcagtggggaaggaaaaatatcataaccatgttggttgtcagtccttcatataccgctctgatgcgagatgccatgtcccaacatttcggaagaaatggccccaatcataaaattaaatagtgggcttatgtaaagaatgattaagttgagagggtggatataaaagatataattcagcgtccgattcagtcacgcttcggcttcaaaagccttctatcgtgactagtgacagggctaagcttgtctggtggcctcaacactgtgtgcatancatcacggccttgggcaagactacttttcaagttggcgtacttgtaatgaatggga

SEQ ID NO: 38350 - DNA, 369 bp, Zea mays
  unsure (1)..(369): unsure at all n locations
agctttttcatcaaccaagcttaatgaggtcttctgtctagcgcatcaactctcatatcaaggatactggagaaccccctccgtgcaatagcatgacgtttgctgtcatttaaaatctgaatgcttactataacatcttggggattgcatctcacattaagcccttgctgaaataacgtaaacaatgnataaccgaaacctttacatctgattaatcccaactcaatgtttaaaccaaatctcaatacaacataatttcacgcagaaaatgatatattggcattgaccatcaattctaacctggcgcgggggatcctactgctttctccgctntgtaactatcttcttcagaactttggaggactgtca

SEQ ID NO: 38351 - DNA, 186 bp, Zea mays
agcttccatgtatatattgatttcttattttttacaagatccaactctaacgatctatggttctagatttatcttggtcttgcaggcgggattgccataagactggtgtccacgctgaggtgagcggtacgggtgctgagtcccaacgggagcgggggaaccaccgtccagataacgacgttccgc

SEQ ID NO: 38352 - DNA, 152 bp, Zea mays
accctggacgtggcatgcattccctgaggcagtttcaacatgcagccttaaccagttcccgtccttatctatacacgtctccaccacgtcggttaaccaaccggctttagaccgctccttcagctccatgagtttccccacgtgtcggggcg

SEQ ID NO: 38353 - DNA, 173 bp, Zea mays
  unsure (1)..(173): unsure at all n locations
ctcgacccggatcttaagtcaccgcggctgcagctggatgttttacgaagcctggatgtttctactaagcatggatattntcacgaagcatgaatctttttctttatgaagcatganaagaaaggaaggtngttttttcgccgaaggcttcaaaatggtatgaatataaaagt

SEQ ID NO: 38354 - DNA, 394 bp, Zea mays
  unsure (1)..(394): unsure at all n locations
atcattttttgatatgcaagtacacctaatcatacatctcgtggatcagataacaatattagggccactatatttacatcatatgtttcagttggagcgatacctgtgagtattaataggttatgtgcgaaatcgcgctcacctcagagggtcaatcatggagggatcactacagaaaagtgaatgagacctgtttattttcttcagtgacgaacaatgataggtgtgcctgtacctaacatganggtaactatgtgggagaggagaatgggcaaaaactttcgcgttaggatacaagctntacattgtctcatggagtgtctacacatctacgatagccaccttacatgaggacacttgatgagctcttaacaaaatagaaccgccaaggact

SEQ ID NO: 38355 - DNA, 129 bp, Zea mays
  unsure (1)..(129): unsure at all n locations
aactaagcttcgcgcacgcgtatccacaccctgatgcacgataccatatcatttaacgcngccgctgccctcccgctcgctctctactcgcgtcngcngccctcacgtgatggccacgtggaatatata

SEQ ID NO: 38356 - DNA, 417 bp, Zea mays
  unsure (1)..(417): unsure at all n locations
agcttacaccttntcctaattgattntggttgttgaattgcccaacacaaataattgaactaactagtttgctctagactataagttttataggtgtcaaaggttcacaacaaaccaataaaaagaccaagaaagggttcatataaaaggagcaataaacaacccgaagtgtgccctgatcttgcgcacccgactgtcccgtgcaccaagggaattaaactccgaactgcttaccttcgggaattctgggagctgctccgctataattcaccggactgtccggtgtagcaccggactgtccggtgtgccagcagagtaacggctactacaacgccaacggtcgtctgaacggcagttaatgcgctacagtacgcgcagaagtcagagcagagccagaagacgcacctgacagtctac

SEQ ID NO: 38357 - DNA, 399 bp, Zea mays
  unsure (1)..(399): unsure at all n locations
agcttgtgaaggatcttcattccaacatgtgctagtcggcgatgccagagccagctcatgttagtcttagcaattaagcaagtgttgagttcagctctaacaaaatctaccaagtatagctgaccctctaacactcccttaaatgctactgaatcatcacttcttctaaagacagtaacacctatatctgtnaaaagacagntgtagcccattttacattaattgggaaacggatagcaagttgtaatctaaagagtctacaagaaaaacattggaaatggaatggtcaggagaatatagcaatttacccaatccttgaccaaaccttgtttccatccctgatgtgatcgctctttggggatctggtttctcaaggagggaacatttctctccctgcat

SEQ ID NO: 38358 - DNA, 110 bp, Zea mays
agaccacccacagatgtatacactcagacctgactgtgtatgacttcgacgccctttactagggagagatgcatatgcagactttcgtacttgggttttgagaaactaac

SEQ ID NO: 38359 - DNA, 419 bp, Zea mays
  unsure (1)..(419): unsure at all n locations
agcttatcggctgcaatacagtgtattggtttttcaaataatagaaaaatgtttcttaacacagagatacaataggtatttatactangaacaaccctcctagctaggtgtggacggacccctngaaggtgtgaacaaacctcttcaaatggctgaagttattaacttaagaaacttcaggataataatgattcattggaaacttgcgtaaaattcttacacctcttgtgcagtctccactaaaacaaccataaatattgattgtgaagtccaaaagatgtgccatttgttgcattgtaaagaggacttaaacacctttccaaaaagtactcgtagaccctcatagccttcaggactaanaaagtatgatgntctctttaggcgctctaattagtcactctaatctgcacgtgtccctt

SEQ ID NO: 38360 - DNA, 438 bp, Zea mays
  unsure (1)..(438): unsure at all n locations
agcttccttgtgcacttgttatgttaaatttatttatacaaacttggttggtgtctgctgcgcaaaacaatatccagtctcaaattctttttggaaatcttgtccaaaagcctctttaaattctcctctgctcaacctaaaaaccatctgggttgatgacctctcttttcacctagatctggaaatcttttccttgtgaatcatgttgcgactctatcatctgaatctctggatcccttaatgactctgacccgttctctggttatctgctataacctgttctcatgtatcatatgtggatcattctaatgtctcattatgatcgttctcatactcttctctaaggatcatgacgctgctttatccgatttatctctaagcaacgtatccatgtggatctgatgatggtgctgntatctcttgatctctcatgtctct

SEQ ID NO: 38361 - DNA, 406 bp, Zea mays
  unsure (1)..(406): unsure at all n locations
gcgtctnggtcactgcgcagatgctgctctatttgttgctctatttccttgacctctagggcactgcgcagacgctgctctatttgctgctctatttccttgtcctcgctcgttgtgtggcggtcgtgtccgcatccgtggcagcagctgcgatcccttgtgtcgtcaagtgatcccgagaactccgataaagtaataaataccacgtggtgctcaccacgtgctcgacataatggcagaatcggagaatcattaccgatctcgcggagtcgagtcagatattggaacagtaagctaatttgctattttatcaactggtttggtagatgaattgataggtgtgtacttcccgacgattatcccgcttgtagctcacgcatgtatttaattaacgcttgtagaaata

SEQ ID NO: 38362 - DNA, 421 bp, Zea mays
  unsure (1)..(421): unsure at all n locations
agcttgggcacgcatatctagatcatctnttatgtttgtttttttatcatagatctcacttgaaatattcaatcgctaagccaatttcaaatctatgttcttagcatttttacgaacaaaactagattacacttgctatataaattttagatatgtatttatttattgtatcggatctttaatctgatgctgacaaccaaacaagaattgtatagcctgaatacactaacacaaataaccaaacaaaagtctattgcatgatcctagcctgaccaaatgagcctgaatcctcaagtgctggctaagttggaccaggctgctactgcacgggaaccaatcacgtggattgtgtccttcgaagacaattgtggccttggtcactggcaagagcaactcaccgaggagatgacgcagcaaccag

SEQ ID NO: 38363 - DNA, 446 bp, Zea mays
  unsure (1)..(446): unsure at all n locations
aagctggncaaggaccttcttctgccgatgagctgagtcaccctgttattgtcgaggctanggcggaatcgaccgaagagccaatctcaaagacagcagcggagcaatcacaaactgtgagttcattgcactaggcaaaactgtcgaatgttcaaaagagtgctctaataactccaaagagataaagaatggccagggtattggatgtgttattgaatccacaaaaggattaactcatgtctctgcagaagtatctagcatgggagataaatatacaaaggaatctgccgaagctgccatgacacaggatgaaactgaagctgggccctcaactcccagagaagcagggcctgcggacttctgtgaaaaggatactgaatcaagaccttcngatgcttcaaaagtgatgttaccattacaagagaaagctacagaagaatctgaat

SEQ ID NO: 38364 - DNA, 349 bp, Zea mays
agctagctacacgccttctatttttgctccatagtatgaaccttactggaacactaccccacttaaaaagaatgatggtagaactcttgaatcttgggggatttgaactccttgaagtacctcataacaagggtgttacaaggccttcttctgctattgctgcttgaacaggctgcgaagagatgactgacacaaggttgattctgggagaaccttcttcttatcttctcttcgctatcttcttttctcttctcactgcctctatctttctctttgctcttcccactggaggattctatctaagagtattaccatcataagaggaggaaaccacagatgttgaaccatg

SEQ ID NO: 38365 - DNA, 432 bp, Zea mays
cgacgagtgggatggatgggcacatgcttcttgctcgcgggtgtactgtttggcgatgcaatggacaggcacgccacctgcaagatggccaggacaccgcctgccaactgagtggatatggcacattaaatgctgaaagggcacatcatctgtcagcgggatagtcaggcggcgcatcttcttcgcaataaatgtatagacagcgcagcccaaaggtcttacgtcatgctccgcccgctggcttacgtcacgcgcggtaggccacgcggcagcatcgggtctccgcccgggcggagagcagtagcgctatgcggacaggttcacatcatgctgggcttggacacatgtctgcaccagaccccagcctgagcaaggcctgagtattttccccagagtcccgggacccacctgtgggtggtccggaccccacac

SEQ ID NO: 38366 - DNA, 376 bp, Zea mays
  unsure (1)..(376): unsure at all n locations
gcttatcaaatggacgtgaanagtgcctttctctatggaccaatcaagggagaggccnnngttgaccaacctcccggctttgaagatagtgagtaccctaaccatgtgtataaactctcaaaggcgctttatgggctcaagcaagccccaagagcatggtatgaatgcctaagagattntcttatcactaatggtttcaaagtctgtaaagccgatcctactctctttactaaaactattgcaaaagatttgtttgtatgccaaatttatgttgatgatatcatatttgggtctactaacaaatctacttgtgaggagttcagtacgatcatgattcaaaaattcgagatgtctatgatggggagttgaaatattt

SEQ ID NO: 38367 - DNA, 472 bp, Zea mays
  unsure (1)..(472): unsure at all n locations
gcttctanagggagaacacgtgataggtctaaccaatgttcaattcgttatagatagaccttgggcagcttgtcaagcagggaaacaggtgggaggagcgcatcacagcaagaatgtgatgaccacttctagacccctggagctgctgcatatggacctcttcggacccgtcgcctatctaagcatagggggaagtaagtatggtctagttattgtagatgatttttcccgcttcacttgggtgttctttctgcaggataagtctgaaacccaagggaccctcaagcgctttctcatgagagctcaaaatgagtttgagctcaaggtgaagaagataaggagcgacaacgggtccgagttcaagaaccttcaagtggaggagttccttgaagatgaagggatcaagcacgagttctccgctccctacacaccacagcataatggtgtggtagagaggaagaacaggacgctc

SEQ ID NO: 38368 - DNA, 412 bp, Zea mays
agcttgacaacaccatttgacattttacataaaatttctgagatcaagaatatttagttcatttctcaacatgcaaaagcgggtcttatcaagaggcttagtgaaaatatccgctaattgatcttccgacctcactccttctaaaatgatatctcctttagcaacatgatctctaaggaagtgatgacggatatcaatgtgcttggtgcgagagtgttgtacaggattattagcaattttaacagcactctcattatcacacaacaaaggtaccttttctagaactatgccatagtctagaagagtttgtttcatatataaaatctgtgtgcaacaagcacctgcggcaatgtattccgcttcggcagttgacaaggcaacactattttgcttttggatgtcatgaactagt

SEQ ID NO: 38369 - DNA, 465 bp, Zea mays
  unsure (1)..(465): unsure at all n locations
ntcttcggagcaagagaaggcagacagagcaagaagcgtgatgaactgctgtgtccaaatgaaggtggccagcatgacgaacggatcgatcattcgtgctggttcgaaagcctttgggttgattccattccagagaagaactggagacactactcaccttcgactggatcggtcttcatcctcgccgcttgctgggcttgcgcggatgatgatgcagctagaagcagcagcagcagcttcgggagcgcggaggcggagccatagacatagaggcaccggcgcggagaaggtctggaggtcgatccangccgcatcgttagctcccttcttctttctctctccgcctgctcgagcagcggagcctggattgactacccggcctatcggatcggaggccgataggctgtaaagactanagagagatggtgatgacgacggcgacgagtcgtctttgaatatgacgtg

SEQ ID NO: 38370 - DNA, 378 bp, Zea mays
  unsure (1)..(378): unsure at all n locations
agcttatgaagattcttcatgccaacgtgtgtctttccgcgatgccagagccaacccatgttagtcttagcaattaagcaagtgtcgagttcagctctattaaaatcaactaggtatagctgaccctctaacactcccttaaatgctactgaatcatcacttcttctaaagacagtaacacctatatccgtaaaaagacaattgtagcccattttgcataattgagaaactggaagcaagttgtaatctaaagaatctaccagaaaaacattggaaatagaatggttaggtgatatagaaatnttaccaagtcctttgaccaaaccttgattccatncccgaatgtgatagctctttgtggatcatggcttttctcat

SEQ ID NO: 38371 - DNA, 433 bp, Zea mays
  unsure (1)..(433): unsure at all n locations
actaagctgtcatccttcttcttcacaaacagtgctggacattctcttgcgaagtgcttgggcgaataaaacccttatctagcaactcttgcaattgcttcttcaattctgccaactcancgggtggtattcggtagggcctcttggaaataggggtcggtcccggttgcaactcgatggcgaattcaatatcccggtccggtggcattcctggcaattcatcaagaaagacatctgcatactcacagaccactgggatcttcttcaggggtaactccgtcatagagaaagcacatgactgagaagaaccctgactatgcagaatcaaagtgaaatttccgcagaaaggagaattaacttccacggtacgactggctacatcaaacacaacttggtgcaaggtcatccaatttgcccctataataatgtccac

SEQ ID NO: 38372 - DNA, 403 bp, Zea mays
cagctggcatatagctggcaatctcatagtctctgaagtactttcctcaaatgctcctcatgctcttgctcattctgggaatatataagaatatcatcaataaacactactatgaacttgttgaggtagtctatgaatacactgttcatcaagtacatgaagtaggctggcgcattcgtcaagccaaatgacataaccgtgaactcatatagtccatacttggtgatgaatgttgtcttcggtatattcgaaggtcggattctaagctgatggtagcccaacctcagatctatcttcgagaacacactggctcctctcaactgatcgaataaatcttcaattctgggcaggggatacttgttctttatagtaatttcattcaaatctcgatagtcgatgcaca

SEQ ID NO: 38373 - DNA, 451 bp, Zea mays
  unsure (1)..(451): unsure at all n locations
actaagcttctaagggagaacacgtgataggtttgactaacgtgcttttcgaaaaagatagaccttgtgcagcttgtcaagcaggtaaacaagtgggaggagcgcatcacagcaagaatgtgatgaccacttcaagacccctggagctactgcatatggacctcttcggacccgtcgcctatctgagcataggagggagtaagtatggtctagttattgttgatgacttttcccgcttcacttgggtgttctttttgcaggataagtctgaaacccaagggaccctcaagcgcttcctcaggagagctcanaatgagtttgagctcaaggtgaagaagataaggagcgacaacgggtccgagttcaagaaccttcaagtggaggagttccttaaggaggaagggatcaagcacgagttctccgcttcctacacaccacagcanaatggtgt

SEQ ID NO: 38374 - DNA, 375 bp, Zea mays
  unsure (1)..(375): unsure at all n locations
agcttgtcaaatgttcaagtctcggtttcttatttttccagggggtgccttaggtggtatagcacatttttggtatagaacccaagtggttttggcgccattttcaaagtgaacacggctggtctttgaattacggctaaaatgtgacttacagagaaatagagagctctagctctctatccacttggagatttgaaatggggtttctccaggggcctttntgcaatatttccctcctctaattgatggttataatgttgcttaaggtttgggtaaaagttacacatgctttacccacttgatcactctcttcctccccttacttaaggttttggaggtatggctatggacagatctatggttcttctccctcta

SEQ ID NO: 38375 - DNA, 436 bp, Zea mays
aaactcagcttacaggcactggcgggctagccgaagcactggcttttcttgtggtggctggagtgggctggccacggcggccgaagctctggcggcaatggcgggcggaattgagctcgccggagctaagggaaagtggctggccggtgagggtgagtgcggggcgaagagaggtgcgcccggggaggctttataggcgcgggcgagcacggtcgaaggcgtgggcgcgcggcggacttgaccggacgccggggtgagcgcgcgcgcgggttgggcgagctctggcgtgccgaccaaggtcgaacacgtgtgcccgtgcgttctgcccaagttctggcgcgtgtggtcgctcatccgagcctgctctcgccttggtcagtgcacgaaacctcttctcctccctacaagctaccattcttgtatgggggtcatagga

SEQ ID NO: 38376 - DNA, 373 bp, Zea mays
  unsure (1)..(373): unsure at all n locations
agctngaatcactnttatacccctgagatatcanaaaccctaattggaaccctggaaaaccctaaaccaaaccctaggggcttatatgcaaaattagtccacttttgggctaaagtgcaaaaaccaagccaaataggtttcttaagtcctttggttcacaaaaatgtggacttgaaagcaaaaccccaaagttttggacttaaatgcaaaatggacttcatttgagttttgctctaagtctgaaaatcagtgaatgggctcaactttggggctttgtaacttacaaagcatagggtttttgccctatgtcaccacatcaaagttgaagaccaattataggagaacaactttgcttaaggttgtaagcttagtt

SEQ ID NO: 38377 - DNA, 331 bp, Zea mays
agcttcctcaactattaaagtgtcgagtgaggggtttatacaacaatatgtgtcttactccgtagcattgtgatattcagaatttgaaaaaaaatactccctctgtcccaaattaaaatttgttttagtttttaaattaatttatacaatacttggtatatgtgttttatatgtctctaaagtcatcatcatctagttgaatattgacattaaaaaccaagaagtaaatgaatgtcaatttatgacttatggagtatacattctaccatcctaaattaaatatacctcatttattgaaagccattgttttctaaatttaactaaatatata

SEQ ID NO: 38378 - DNA, 397 bp, Zea mays
  unsure (1)..(397): unsure at all n locations
tctgggtgcttgagcagattaactcaattcttatttctatctatcaatcttacattgtctatcctttaagaatgacccacagatgaatcgagttgttatatcactaacttcatattcatctctagcaagaacttgtgttgtagggaaaaaggattaacctttgtgggaatcaagcanaaggcctactgaaagggaattaggtttacacctattccctacatgatattggtagttgaattgcccaacacanataattggactaactagtttgctctagattatacgttctacaggtgccanaggttcatctacaactatactaaatcgactgtccggaataccgtagattattcctgacaggagaagctttttggaaaacaggccagcgcgaccgtcc

SEQ ID NO: 38379 - DNA, 410 bp, Zea mays
  unsure (1)..(410): unsure at all n locations
agcttcgatgggaatttctagtgtcagtgaccactctagatgatttttcattcaagataagatgtgtgggaggtagcatgcataaagctaccgatgcttatacttaatgccattcaagattgtgtcctcaatcccataaattataaactcaaccacatcaattattgaatgtgaaatcgaggcatcgagaagccactattgtatgttggtgagtgcctcaatgtatcccatcattagaagtagagtcctcctcataaatgcaccaaggaacctcacaataggtgtgaagtagataggtgctctacaggattcatctctaaaggttgtcctanatagaggggtccatgtgtgctaacaataaaactctcaccgcatgagggcgtctcagtggacctatagtttcgtaacat

SEQ ID NO: 38380 - DNA, 439 bp, Zea mays
atgtgtgtcatcaatcaccaataagggggagattgtatttgcattcatccctcttgtgagttgtggtgatttggataacaacacatttaaaggtctaacgagtttgctaagtgttgaacaggaaattcagtatgatgaacatacttgaatagtgtataatgatcagtgaacaaaggttcaacacgaggttaaataaccaatgagacaatgcacatggatataatatgatctctatattggtttgaatatatggacaagacctgagaaatcactacatacatatgaccagaatagaggacaaagtgatttagaggattggtcaagccaaagagaataagatatgaggaatcgtgaattggcttgaccatattactatcagtccatatatgcttctatgagaatcaaactagagcttgatttatcttaacagttatatcta

SEQ ID NO: 38381 - DNA, 450 bp, Zea mays
  unsure (1)..(450): unsure at all n locations
agctngttcattatccttttcagttgttcagtgtacgcgtcctgagatgtgcaatcctttaatgagaggagagtatcatcttctaaggtaatgagaaattctctggtcttcaaattgagggcaaatgggctatgtttatagagccaatcatgacatcgtattctttcaagtccaggactctaaggttgttgttgaaggcatgtttctgaatagagaatgcagtgtctgctatgattgccccagatgtaagttggcctcccccagccacagctattttagccgaatttttggatatggcaagtggttttaactgcgaaagacaaatcaatgaatgtacttgaactgccggtatcaataagggcaatgcctgtttgtccaccaacagtgaccttgacttataatgtgccagcagtgaccagccctgaaactgcatgagccgaaatatgcatg

SEQ ID NO: 38382 - DNA, 450 bp, Zea mays
  unsure (1)..(450): unsure at all n locations
ngaggaagtccttggacctagcttccncgcactggaccgagaactcgagctatatgctcaatagtcgatcgacttattctcctcaccggaaaagagaacaaactctggcaccttggaaactgaggaactcggtcgatccaatcagggtatgctttcctagccgtcggcctcagatggacgagacaaagaacgcaactcanggggcgaaggtggaggtccgggcaaggctagagccaagcagagggatggagtangggacggttggtgaaagtatgaacgagcggaataaacgaacggaatactcactctgttctactcccccagtagagctatatgtaacgagtcagacagactttttacttgtagcaagcgataaaacggctgcacagttctactgtgccgagataagaaacgaaagtgcaacggctttcgagtaataaagaacctact

SEQ ID NO: 38383 - DNA, 414 bp, Zea mays
agcttgaacccggctattgcatacatgaagagactttctctcactggcagtggagagaaggcgagagtggcacttaccctcctggcaaaggatcgcctaaaaaggtggtgtgctctcagatggcgcggacctgttcatgcagtggaggatctgtgggaatggttgacatatgcaacggttaagtgcctcatatgtcgtgtggttacagatcctcatctgagtaaatcgattcggatcgccgttatattcccggagagtggagacttgatcgctgccctacaaactaagtcatgatgtgaacattatgaataacaatgatgctgaattgatgagatggtgaaattagactagatgctaccagagtctattaatatataatctggcgatgaaatattgataagtaggactcacttt

SEQ ID NO: 38384 - DNA, 468 bp, Zea mays
  unsure (1)..(468): unsure at all n locations
taagcttggaaggttcttcatgcacacatgtgctaagcggcgatgccattgtcagcccatgctagtcttagctattaagcatgcatctagaccggcctcttcttttgcaaaatcaactaaataaagtttgtcgtctaatacacctttaaaagctagtgaaccatcacttcttctaaagacagacacatctacatttgtaaatagacagttatgccccatgtggcataattgactaacagatagcaaattatatccaagagactctactaaaaacacattagagatagagtgctcattggaaattgcaattttgcctaacccttttaccttgccttgattcccatcatcgaatataattgaatcttgggaatccttattcttgacgtaggaggtgaacatcttcttctccnccgtcatatggtatgtgcatccgctatcaataatccagcttgaacccncggatgcata

SEQ ID NO: 38385 - DNA, 417 bp, Zea mays
cgcttctaaagggagaacacgtgatacgtctatctcttgttactttctaataagatataccttgtgcagcttgtcaaacaggtaaacaggtgggaagagcacatcacatcaagaatgtgatgaccacatcaaggcccctggagctgctacatatggacctcttccgacctgtcgcctatctaaacataggagggagtaagtatggtttaattattgtggatgacttctcccgcttcacttgggtattctttttgcacgataagtatgaaacccaagggaccctcaaacgccttctaaggagagctcaaaatgagtttgaactcaatgtgaaaaagataatgagcgacaatgggtccgagttaagaacctacaagtggggactacttgaagagaatggacaaacccaattctcgctcc

SEQ ID NO: 38386 - DNA, 458 bp, Zea mays
cttataccacagataagctttgaagtgcagatataaaggcgattaatactgagagttttatttcaatacagaacagagcacacagacgcaatgatttatcccgaggttcggccaagcctgaaatgcttgcctagtcctcgttggagttagccacacctgggctcggagtctatttcaactccttcctccgtttgctcagatctgtcagtatgacaaataaagcctttcactattgagtggggttacaacagaaccgcggttgcttactaacttcttggcagcaccccggcagagtaacgatacgctcaagaccttgctctagctctaagcagcacttcctctctctctaaaggcttatagctgtgccttttacacaaactatagagtacacacaagagggagagtgagaattgcttcgagtgatgtctacacttgttggctgcacttggtatttgctg

SEQ ID NO: 38387 - DNA, 447 bp, Zea mays
agcttacacttgccctgtctgcgtgcgcactaatctgttctgtgcacaccggacaatgcatagtacaatggtcgtcgaatctttgattgattggtttcctgttctgaagggcactggattgtccgacgaccaagttggtcgttggagccgctgacatggtcgatgtatccattggtcgcctgtcacaccggactatcctgtgattagcctggattgtctggtgatttttagctaaatcggtcaagcagaggccgagactgggcagttgggtcgtacaggcaccagattgttcggtgttgcctagaccgggcccaagtttggctcttttgatccaaacttctccatctctttttgattcttcttgagaggtcccctatacttagacaaacatagttactacctagaacaattgactaagtgttgggaatcatacctctttcattcttt

SEQ ID NO: 38388 - DNA, 477 bp, Zea mays
  unsure (1)..(477): unsure at all n locations
aagcttaatcccgagaaatggtgttttggggtaccagcaggaaagttactcatgtttattgtcagccaccggggaattgaggctaatccggataagattgaggctatcatgaagatggaagcacctcgatcagatttatatccaggctgggagaaaaaggtttgccattttacaagctactcaagaaagtggataagtttcagtggacttcagaggcacaggaagctctagatgcactaaaaagattcttgacaacaccgccagtactgaagccgccacgacgagccacatcaactcaaccagctgaagatctgctgctgtacatctcttgcatgactcacgtggtaagcaccgcgttggtagtcgagcgagcagaagaaggacatacctacccagtgcaacatcctgtttacttcatcagtgaagttctgggaccctcgaagaanaagtaccctcaagttcagaagctattatatg

SEQ ID NO: 38389 - DNA, 430 bp, Zea mays
  unsure (1)..(430): unsure at all n locations
agcttgtcctttaaaaatgggatacttttattatatataatgtgtggcaaggtggagataacactatgaaatatcatttggttaattggccgatagtttgctccccgaaagataagggggtttgggtattcttgatctgagaaacatgaacattatcctgttgaccaaatggttatggaggttggagacttctgatggactgtggcaaaagattatcaggcataaatatataaaagataatcccttgattgtggtgaaaaaaacaaaatatatctcatttttggagggggctcttggagaataaagatctgtttcataaattctgcacaaaaaagttgggaatggttctcatacttgtttttggctggatatctggtgtggggattctccttttagagtcaagttcaaaaggttatttgatntaaccttt

SEQ ID NO: 38390 - DNA, 454 bp, Zea mays
  unsure (1)..(454): unsure at all n locations
gcacatagtctcgatgatgtatgcctttagatagtccaagtcttctaaagctattacnttttgngaaaccgcatngaaaaagtaacacaagcgtgtgatgacaactttgacatgctctgtttcaagggctcttaccgcaattgggaggaacaccgtcatcatcacatggcactcatgagagttgtagccaaatagagacaagtccttcatcctgactagtttgctgatattggatgagaaacctgtgggcactttgaccccacgcaaacatttgcaaatctttgttctctcctcaactgacaagttgtagctagctggggggaggtaaggcttccctttgccactatccactggatgaagttccggtctgatttgaagatctaatagatcattgcgtgatttaagtccgtcctttgtcttactcggcatgcccagcaaggttccaatgatgctg

SEQ ID NO: 38391 - DNA, 384 bp, Zea mays
  unsure (1)..(384): unsure at all n locations
agcttccagaaaggctgaggggaactggacttattcaaaggcaatccataatatagatgaaaccgaagcttgtgagcagtacaagtacagaagggagaaggctgcttcggccgatcagccgaaacccatgcttttatgcgaagatatcgcagagcagaaggtgctactgggatctcaattgtctgaggaacaagagaaaaccttgataaggtttctgttcaacaacaaagatgtctttgcatggtcagctaatgatctctgtggtgttaacagggatgtcattgaacactcgctcaatgttgacccatccttcagacctanaaagcagaggcttcggaacatgtctggcgacaaagctgaatgtgctcggaatgaagtaaaaag

SEQ ID NO: 38392 - DNA, 156 bp, Zea mays
gtggtacatcacgacagacaagccattatataacactctattattggaacacaaaactgctaaaagcaaacaggaaaaccctaagggccagtttgggagctctcataccttagtgaattcttttttctgacaatccactcatattgatgctatcca

SEQ ID NO: 38393 - DNA, 439 bp, Zea mays
  unsure (1)..(439): unsure at all n locations
agctntatcaaatggacgtgaagagtgccttcctcaatggaccaatcaaggaagaggtctatgttgagcaacctcccggctttgaagatagtgagtaccctaaccatgtttataaactctctaaggcgctttatgggctcaagcaagccccaagagcatggtatgaatgcctaagagactttcttatcactaatggcttcaaagttggaaaggtggatcctacactctttaccaaaactcttgagaatgatttgtttgtattccaaatttatgttgatgatattatatttgggtctactaacgaatctacatgtgaagagtttagtaggatcatgacacagaaattcaagatgtcaatgatgggggagttgaagtatttcttatgatttcaagtgaagcaactccaagagggcaccttcctaagccaaacgaagtatac

SEQ ID NO: 38394 - DNA, 445 bp, Zea mays
  unsure (1)..(445): unsure at all n locations
tgtggcgctctcgggcgtcttgtcgcagtcgaagtaccatgtctcccacttggaagcctcggggccgaacccttctggcgtggtagcgtcgcagggactgctgataccgcgccgagtgtagtaaggccacgtcccgagcttcttccagctggtccaacgaatcttctcggttggtctggttgctttggtcatcgtaagcctttgtcctcggagaaccatattctaagtctgtgggtaggatggcttcggccccatagactagaaagaacggcgagaaacccgtggctcggctcgacgtcgtcctcaggctccaaaccaccgagggtagctcttttacccaccgcttgccgaacttatagaggtcgttgtagatcctcggctntagtccctggcaaatcataccattggcgcgctccacctgcccatttgtcattgngtgagctac

SEQ ID NO: 38395 - DNA, 379 bp, Zea mays
  unsure (1)..(379): unsure at all n locations
gatgccacaaccagcccatgctagtcttagctattaagcatgcatctagaccggcctcttcttttgcaaaatcaactaaataaagtttgtcgtctaatacacccttaaaagctagtgaaccatcacttcttctaaagacagacacatctacatttcgtaatagacagttatatcccatatgacataattgactaacagatagcaaattatatccaagactctctactaaaaatacattagagatagaatgctcattagaaattgcagatttacctaaccgctttacctttcctttgattcccatcaccgaatataantgaatcctgggaattcttattcttgacgtaggaagtgaacatctccttctcccccgtcatat

SEQ ID NO: 38396 - DNA, 406 bp, Zea mays
ctcgatctccgagccatgcattatacaccatttgtcctatacaataattatgaagtgataaatatagttggtctaaacatttatacatggaaatgtatgtgtgggctagaatatggtctgtgttggcccagcactgtattgctgctggaagccacaattaggagaaagttgcaatgtatgccattgattcactaagacagcttggtatgaagtacttggagcgtgctgaattaaacaatttcacatttcagagtgacatactgaaaccttttgtccttttaatgaggaatacccacaactcataaatccgaggtttaattgttgatcgcattgttcacggatgtccttgtgcatgaaccttgacacatatatgaatctatgatatgtaatgatctggtgtttctta

SEQ ID NO: 38397 - DNA, 432 bp, Zea mays
  unsure (1)..(432): unsure at all n locations
agcttcngaaatcccatacttctatccatcttcctacagacggataattctttgttatctgggaggcagtatatgaaaccttcttcgtttgtcccattgaacactagtgctcccttcggatatttcaattctttggcatagtgattagcttcaaaagcttcttcttccgataactttttccccgaagcatgtcgcacgatatagtcgtatattttggaagatgcttcggggacggcagtatcaatttcttcgaccaaagttggctttgacattntcatttcttcggttgcctttgcaatttttgcttcttttgcttccgaaggtattaccttgggtggttctgaaggcccggtttcaactccagtctgttgcttcggagcttcagcaacggacacttcagcaagcgcctcaggagtttcagtagtcttcttt

SEQ ID NO: 38398 - DNA, 352 bp, Zea mays
gcttgttccgagcactcaaactctatgaaatctttttctttcgtcttaggttctctgcctcgggccccacactacagtccagatgacatcctcatcaaactatggtcatgggccaggcccgaccaacaccaaatacttgcaggaagcctccattctttgaaagtgctgcaaaatggatgatcatagagccacatgactttgcaagaagagagtacacaattaccaactgcaagctttaggaagttcatcaagcatgtcaacattacacctggcaggcaagaaaacaccctgttaggtcatagccacacaacaactctcatacacctttccacatgtagttgctactcaaggg

SEQ ID NO: 38399 - DNA, 321 bp, Zea mays
  unsure (1)..(321): unsure at all n locations
tgcttagcacatcacagtgcacatgatctatatatcgaactgagcgggagtggttggccagaaagcgtgcaaaatgagaatgcggtatggacgcttttatacgctctgagcgttgaaaggtgaaagaccccacttgtcattgaatgttactcatttatcaaagggaaggagatttttctgacctctagggttaagccttcgtacatagtngaatctaaatttattatttcacacaaattaataatgcgaggggctactgttggggaccttangatgtcaaatgtgctcaaaacaggatctaacagtatattctgttttaca

SEQ ID NO: 38400 - DNA, 161 bp, Zea mays
atcctcagcattcttccttacgcttaaagcgtcgatcataaatatgccctgcacggagaacggagacctatgagcatctcaccaattatagacaaacaatagtgtgtctataattctataacttttgtacttccaaactattgtaagcaatgttgtctgag

SEQ ID NO: 38401 - DNA, 428 bp, Zea mays
  unsure (1)..(428): unsure at all n locations
agctntaccctgtagtctggactataagtttgttacgggaggtgtgccttatgcagtttgaccatttccagcatttgcgttatgaggactctatggagaagcctcgtagtgagaccctggccattcacctcggaagtgaatacgggtctagctaacccgggctagaagggaatcgtgactcatgggtaaagatgcgccacctttgcagagtgtaaaactgatatatcagccgtgctcacgattatgagcagcctggactcctcacatgataattgaacttgaagatggaaataaatcgagatccgatgatctaccaatggtttgcttaagtggtttcacttaagtgttttttatatactcttatacctctgtctaatgggatacttgggatccacacttattagtaagacagggtgttgtaataaaat

SEQ ID NO: 38402 - DNA, 383 bp, Zea mays
  unsure (1)..(383): unsure at all n locations
gcatgaaccacatcaactaattccaggtcatgagtnggataatgcctcttatgccggcgcaactgccttgaagcatatgctaccaactcgccttcttgcattataacacagcctagatcactgcctgatgcgtcacaatacacatcaaagggcgtttcaatgtctggttgaactaataccagagcagtggtcaataatactttcagctgttcataggcttcattacatcttgaggaccaattatattagaatcattctcaataaacttgtgattggttcagaagcttcgaaaatctggataaatcggcggtataaccagccggtccaggaaacttcggatcgatgtacatagttgcggtttcactcaaaaatcttgacttatg

SEQ ID NO: 38403 - DNA, 469 bp, Zea mays
agcttcagacaaaatcttatgcctatgcttaggatgatcagatatatttttctttatcaggctaatcaatgttctattactagactcggcctgtccattggcttgagcataatatagagaagaattgagcaatttaattctatataattcagcgaactcacgcacctcatttgacataaaagaagttccctggtatatagtcaaagacttgggaatatcgaatctatgaataatatgctcaacaatgaactcaattacctctcggtgtgtcatgttctttagagcaacaactttaatccatttagtaaagtagtcagtgacaactaacacgaactgatgccctttttatgataaaggatggatctctcctataaagtccaatccacatcctctaaaaggccaaggtgtaacgatatgatgtaattcgactgcggggaccaattataagtcgtcgaatttctgacatacc

SEQ ID NO: 38404 - DNA, 471 bp, Zea mays
taagctagagacattatgacttactggtcatgtgttgtgcgaagtatatatttgatgtcatcatatagacgcaccaacgaaccatatgcagccttcaatgtccatacaatctctgtaatgaaccacactctctcctttgaaacaatccaaagaacttaaccaaattagatcagattttaagataacagggacttaaaatctcattcccaatgatactcatcaagtatctatcttatgggaaaaacgtgaccaataaaaatgctcataacttttcatttcattccaaccatgggatgaccaattcaatcttacccagcatggtaagtatcatatcttgaacagttataacatacgcaacactctgtatgggaggatgtatgtacaatacaatccataccaaatgtttctgagaaacatatgcaatatccatcactatcatcttgtgttccacatgatagagatcatatggat

SEQ ID NO: 38405 - DNA, 386 bp, Zea mays
  unsure (1)..(386): unsure at all n locations
agcttgaaccgcctatgagcctgtgattggttactctatctttatggctgaaggtggcgtatcttgatcgccttgcaaaaccattatcgtggtcatggaagtgagttcagcagaggtgggcgccaatgttgttcacttgtttttgattgttgtgaaccaaaaacgaggcaacacagttgttaaacattaaggacctttgtcctttgaagcattatctcctttcagatataatgatcttcaaacgaaggtcatgaagaactagtcttcatcattcataaaagtaagaatttgcatatacggaatgtgatgtncgttcacatatctatttcagaataaatgtataaatattatcaacagttacattacatcgataccttcagcttgtt

SEQ ID NO: 38406 - DNA, 466 bp, Zea mays
  unsure (1)..(466): unsure at all n locations
tctccgtcgctggaccgcctctccctcacaggtcgtgctgttctgtcttctcatccgtccctgatgtcctctgccctcgaccctgccgctagctaggtctgatgggatcaagcctacccctccgtcacgaccccaccaccaaggcagctttgacgcgctagacgaccaagccttcttctccgcgcggcgggtgaactccttggcactcgatcctgccgccaagctaggtgtgccgccctaccaagtccgacgcgccggctcaaggttcgcctcctacgttgttggatgtagcagataggtacaaggtgctaacctgattaatagctcctaggagacgttggatggagttgtgattagttccaacttgttacgttcgatggagttngtgcagactgccaacgctcaggctgccgctaagaagaagcangctgttacggagacagagtctcgatctgatccttcacta

SEQ ID NO: 38407 - DNA, 432 bp, Zea mays
  unsure (1)..(432): unsure at all n locations
gtgcaagctgggagttatgattntctcaagtctagtcttggaatctgtccagattctgtacagatttcgaaactgaccttgtttgtctaagttaaacttcgaatcagttcttataaattataaagaagtggtagtactttccttaagctttccaacaaattttgggtcaccctttttggtgacctataagttaagctacaactgttttaagtggaatctttgaatctatccaaatttggacaacaaagcctttcttatgtcttttgatcttgatatgcattgaattaacctaatatgtttataaatgaaatatatacaattttactagcttcctaaaaagtctaggagcgcctcaattggatgactgagactccaattatggatttttgaagtgagtagttgaattctgtccaagtctggacaaaaattacg

SEQ ID NO: 38408 - DNA, 411 bp, Zea mays
  unsure (1)..(411): unsure at all n locations
tctcctggacaagcgccgcactcactgtagagtgcgaagctgttcttacagcagcagaggagcccctagcgctagtggagttagcgtcgttagatctatcagatactgcttcagctcttcgaaggctttttgctgagctgatccctattggaagacttcggccgacttcggcacttcaaagaatgggaaatttctttctgctgatctagatataaatcgattcaaagatgccaatcttcctgtcagccgctgtgtgacacccggtttgcaaagaagagaagttggagggtattctttttggtttttctctctttcggtgggtgcgttttgggaatntggaattntaggaaaaacattcaccagtaggcagtagaatttattngattanggcgcttgcatcgggtcgggagc

SEQ ID NO: 38409 - DNA, 420 bp, Zea mays
  unsure (1)..(420): unsure at all n locations
agcttagagtatgcttggtgtactcctccttgctcttangggtcccttttatagccccaaggcagctaggatccgttgagagcaatccangaaggcaattcttgccttctatcgggtggcgcaccggacagtccggtgcaccaccggacaatgtccggtgctgattgctttcctattctggcgcagccgaccgttgaagatttggagccgttggcgcaccggacagtccggtgcccccatcaaatcgttggcccggccacgcgtcacgcgcggattgcgcggccgaccgttggctcaccggacagtccggtgcaccaccggacagtccgatgatttttagccgtacgccgccgatgaaatcccgagagcggccttttcactatagccagcctggcgcaccggacacagtccggtgcaccc

SEQ ID NO: 38410 - DNA, 482 bp, Zea mays
  unsure (1)..(482): unsure at all n locations
acctataatttctcnagcttgtgaagattcttcatcccaacatgtgctagtcggcgatgccagatccagcccatgttagtcttagcaattaagcaagtgtcgagttcagctctatcaaaatctaccaagtatagctgaccctctaacactcccttaaatgctattgaatcatcacttcttctaaagaaagtgacacctacatcagtgaaaagacagttgtagcccattttgcataattgagatacagaaagcaaattgtaatctaatgattctacaagaaaaacattggaaatagaatggtcaggagatatagctattttacccagacctttgaccaaaccttggtttccatccccaaatgtaatagctcgttgaggatcttggtttttctcgtaggaggagaacatccttttctcccctgtcatatggtttgtgcacccgctgtcgagtattcaacttgagcccncggatgcataaaccta

SEQ ID NO: 38411 - DNA, 431 bp, Zea mays
  unsure (1)..(431): unsure at all n locations
agcttctaaagggagagcacattctgngactaaccaatgttcatnttgagaaagacagggtttgtagcgcatgtcaagcangaaagcaagttggcgtccaccatccacacaagaacataatgacaacggacgggccactggaactactccacatggatctattcggcccgatagcttacgtaagcatcggcaggagtaagtactgtctagtaattgtggatgactattctcgcttcacttgggtgttctttttgcaggaaaaatcacaaacccaagagactttaaaaagattcttgagacgagctcaaaataagttcggattaaggatcaagaaaataagaagtgacaacgggacggagttcaagaactcacaaatagaaggttttcttaaggatgagggcatcangcatgagtctcttctcctacacacc

SEQ ID NO: 38412 - DNA, 446 bp, Zea mays
cttaaagactaccacctcatccttttgcggcttcttagttatttcgtctccgccaaagcgaattagctcctttttggcctcactgaaatagcctaacttcatcaacttaagcatatcatcttcggtaacggtggacctcccaaactccatgtggccgggtttatatggcacgacactataatcatcttcagattcatgttcctcagcaacaacctgctcaacctctgcggcaggtgcaccttcgtcagaaacatcttccgacactactaaccccgaccgcttcatcacttcggaaatcggagcagtctcagcagtttcagcttcttctccatcatgtgtaaccctagcagtggaacgtacctgtcggggaccataattaggggtacccccaagactgctaatctcagctgataacccccatcagcacaaagctgcataggcctgat

SEQ ID NO: 38413 - DNA, 380 bp, Zea mays
  unsure (1)..(380): unsure at all n locations
agctntatcaaatggacgtgaaaagtgccttcctcaacggaccaatcaaggaagaggtctatgttgagcaacctcccggctttgaagatagtgagtaccctaactatgtatataaactctctaaggcgctttatgggctcaagcaagccccaagagcatggtatgaatgcctaagagattntcttatcactaatggcttcaaagtcggaaaggtcgatcctactctatttactaaaacacttgcaaatgatttgtttgtatgccaaatttatgttgatgatattatatttgggtctactaacgaatctacatgtaaggaatttagtatgaccatgacacagaaattcgagatgtcaatgatgggggaagtgaagtacttc

SEQ ID NO: 38414 - DNA, 447 bp, Zea mays
  unsure (1)..(447): unsure at all n locations
caatctcagcttangagaagtttttcttcttgtgtggttggtttgttgattgtttccataatgtctagaggataacttgtcttcgccacttttgcgggatctgatgaagaccttgctgatgttgaggtttcagaatcttaactggttgataatgagacaaagtctctcaaatctggtgtatccctaatggatgagatcgcccttgatccatttgttcaaagaaggtcatgggttcataactaggtttgcttgttggagagcaaagtagttcccaaggagatacaccggttcaggaatagctgagccacatcgacatcatagatggaggtggaaagaaggtggcaaccccaagtccccaaccctagccgcaaatcttataaacaatggtagataaataatatttttaaaaatggacgatagagataagaaaaaaacagggtacgatga

SEQ ID NO: 38415 - DNA, 364 bp, Zea mays
  unsure (1)..(364): unsure at all n locations
agctttctcccttgtgtcaacaatgatgatctatattcaangaaaaaaaacagacaactttgggcaatccattcctagaaaacacattcacaaccataaagagagttagtgtgtttgattgggattcaaaaaaaattagaaatatttaagatccgaacctctcaagaaatgttatatatgattaatcaaaactacttcatgaaattgtttggctagtagactagattataattcacatgaagatacaatttttttaaagaaccatataaataaaagtatgcttcaaaacaattcagatcaattaaggggccagtcttccgctcttactttttctttcaacaaaaggcatatcgtgtattacatc

SEQ ID NO: 38416 - DNA, 204 bp, Zea mays
aaaaacgcgcgccacaacaggacgctttaacaccacacagaggcaacccaacggccacggccccaaaggcaaaggcgaacccgcgaccacaaccagcaccagggggccaacaagacaaacggggactagacacacacccagaaagcagccaaacgcaaacaccccaagaaacaaacgcccacaaaggagcgaccacccagaaag

SEQ ID NO: 38417 - DNA, 433 bp, Zea mays
  unsure (1)..(433): unsure at all n locations
gcttgtgaaggttcttcatccncacatgtgctaagcggttatttctcatcagcccatgcaagtcttagccattaagcatgcatctagaccggcctcttcttttgcaaaatcaactaaataaagtttgccgtctaatacacccttaaaagctagtgagccatcacttcttctaaagacagacacatctacatttgtaaatagacagttataccccatatgacataattgactaacagataacaaattatatccaagactctctactaaaaatacattagagatagaatgctcattagaaatcgcaattttacctaaaccttttaccttgccttgattcccatcaccgaatataattgaatcctgggaattcttattcttgacgtaggaagtgaacatcttcttctcccccgtcatatggtttgtgcatccgcta

SEQ ID NO: 38418 - DNA, 341 bp, Zea mays
agcttcaactcttcgaaccatatctatatattgttcaagcttcggatctttagccttgcaactcttgtcaatatgacccgaaacaacctgtgaatcagttttaagtatggcccttctgattcccattgcttttagcttccgaagacccagaagcagggcttcgtactcggcaatgttatatgtgcaactaaaatcaagttttgccggatagcaagttttaactttggaaggtgaaaccaacacagcagccgctcccgctccgaatgttcccaagacccatcgcagaacactgtccatgcttcggcgtctttaattgtttcttactcctgaacccctggcgt

SEQ ID NO: 38419 - DNA, 432 bp, Zea mays
  unsure (1)..(432): unsure at all n locations
tctaagattcagaagctattgngattatttaatctttgtacactctatgaggacaactggagtgagggttgggagacagacatccttcctgttcaaaagcagttgagccttttcagttgatttgaacttcttcaactgagttgagcttcttcagctgagttgagctttttcaaccgagttgaagcttttcagctgagttgagcttcttcagttgagttgagattatttagctgagttgaactttctcagctgagttgaccttcttaactgagttgagctttttcagctgagttgagcttcttcagctgagttgagccttttagctgagttgaacataacttcaactagggtccagggaagttcaaccggggtccacggcaagttcaaccgcggtgcagggcaagttcaatataatccagagcaggttcaacc

SEQ ID NO: 38420 - DNA, 362 bp, Zea mays
  unsure (1)..(362): unsure at all n locations
tgcaagcttgtgcaaagcccgctggatcttatcttctgagaaacccgacctcgctgcgacatgacacccgaaggtccaacacaacaagcaatgagtgaattcagaattattgcagagcatatcagcacaaaggacctggttcaagaatttttagctctcaaagtttttcccagtttgaaagaatggganatgcccgagctacagggagaaaagaaagaaggtgaacttgtaccgttaccttactatttcaagtttaaaaagtactttaaagcaccttgtcaagagtggctagatacaattgaagcaatgtgcaatgaaattcttggcaattattccaaaaaggaagatcaattgatgaccgc

SEQ ID NO: 38421 - DNA, 177 bp, Zea mays
gcgagcgcgctggcgtcgtcttgttgctctagatcattttgtcgcggagggacagcgcttgtcttcttctcgaacgcgaggtcgacacccggcgtgcctttcctctgggcgtccggggcgtcgattctctctacaggcgacgaaactcgggctcccgcttggccttggttgcccgcc

SEQ ID NO: 38422 - DNA, 459 bp, Zea mays
acgtgacctatatttactcaagcttaaagccatggtaagtagcataggctaataatatgcgaattgactcaagcctagctacgggtgcataggtttcaccgaaatccaaaccttcgacttgggagtatcctttggccacaagtcgagctttgttccttgtcaccacaccatgctcatcttgcttgttgcggaagacccatttggttcctacaacattttggttaggacgtggaactaagtgccataccttgttcctggtgaaattgttgagctcctcttgcatcgccaccacccaatccgaatcttgtagtgcctcctctaccctgtgtggctcaatagaggaaacaaacgagtaatgctcacaaaaatgtgcaacacgagatctagtagttacccccttatgaatgtcgccgagtatagtgtcgacggggtgatctcgttgtattgcttggtggactc

SEQ ID NO: 38423 - DNA, 442 bp, Zea mays
  unsure (1)..(442): unsure at all n locations
agctngacaacaccatntgacattntacatattatttctgagatcaagaatatttagttcattcctcaacatgcaaaagcgggtcttatcaagtggcttagtgaaaatatccgctaattgatcttccgacctcactccttctaaaatgatatctcctttagcaacatgatctctaaggaagtgatgacggatatcaatgtgcttggtgcgagagtgttgtacagggttattagcaattttaacagcactctcattatcacacaataaaggtaccttttctagaactacgccatagtctagaagagtttgtttcatatataaaatttgtgtgcaacaagcacctgcggcaatgtattccgcttcggcagttgacaaggcaacactatttttgcttttggatgtccatgaaactagtgatctaccaagcagatggcatccccca

SEQ ID NO: 38424 - DNA, 441 bp, Zea mays
  unsure (1)..(441): unsure at all n locations
ngaagccatggtaagtagcataggccaataatatatgaattgactcaagcctagctacgggtgcataggtttcaccaaaatccaaaccttcgacttgtgaataccccttggccacgagtcgagctctgttccttgtcaccacaccatgctcgtcttgcttgttgcggaagacccacttggttcctacaacattttggttaggacgtggaactaaatgccatacctcgttcctcgtgaagttgttgagctcttcttgcatcgccatcacccaatccgaatcttgtagtgcttcctataccctgtgtggctcaatagaggaaacaaaagaataatgctcacaaaaatgtgcaacccgagatcgagtagttacccccttatgaatgtcgccgaggatggtgtcgacggggtgatctcgttggattgcttggtggactcttgggt

SEQ ID NO: 38425 - DNA, 377 bp, Zea mays
agcttgccaagccctcggacccggccggacttcatcggatgcccgagatcgacctcaccgacttcggtcttccgccgccacgcgtggaccgagctatccagtgagtctccgaccaattccttgcgctcatagcttctctggcatcccgtggacctctctgacccgtttgattgaactatctcgccgtgaccaggccggtctcctcgccgccgacgagcatccccgcctgcgcgcgtggaccgaccgactccggccatcttcgacggcgttccgcacaccgttgtgatccccgcgacctccccttcaccctcgaccacttcaccggagcagtctcgccgccggtaagcccctccgcccttttctccgccgcggctact

SEQ ID NO: 38426 - DNA, 425 bp, Zea mays
  unsure (1)..(425): unsure at all n locations
tgagaagatcgcgtgcangagataaggataggggcgtggtggctgtataagatgagcacgagcatgactcgcgcaggagataaagaaaggctgaggcggtgggatttttgtttttcagagttgagcggcgcaggataacgactggagatagagttggctgtaaaaatatccgagaagatatttcctctgctacaaaaacttgtatgcatctatgttcccagatttgaatcaaaacaagatgcaaatagaataaacccaaacaatattggttatactaatataaactggatctgtcatagtttaaaattagacactttcatctactgctcgaacacttgatcgatgtgccctagaataattattagagaatcaaatctcaattataaatncttggacgcgatttcgtcgtcaaaacagcgtgcgga

SEQ ID NO: 38427 - DNA, 449 bp, Zea mays
  unsure (1)..(449): unsure at all n locations
agcttcngctccatctatgttgtggattgatttagaatctgtctagtttcctttagcctttctagcagcttcctgactaccataaatagcaatgggtccttattccgaaggtatcttcatgcatagatatgctggatgaagaattgctttgaatgcattgtgtgttccacgaccaatgattgcattgtagggatattccatgtcaacaatatcaaacacaacatgttcagtcactggcattgtgatcttgccaagtgctacaatctgccttcctccgaaaccacaaagagggtgtgtagcatcatggatcttatcctctggctcttgcatntgtctgaaggccttagcaaatatgatatccgctgcactgcttgtatcaaccagaacattgtggactagaaatcccttgatgacacaagatatgaccatagcatcattatgagggtaat

SEQ ID NO: 38428 - DNA, 446 bp, Zea mays
  unsure (1)..(446): unsure at all n locations
gcttggctgtcaggctggtttattctgaaattcagacttacagtgttataaagccatctttggggttgaattcaaccatgatctagttatcaaatgagctcagtcactatagtcgatttgtagctggtatgtagccctataactttggtacagaaagcttgctcggttactacacaaaattgggagtaaataaccctgcaaatcactctgtcaggtcggctgatgatcttcgccatggtacagtgacaaaagatctgaggtgccgtgcatctcaccgtcggtgactcgccgccgcgattcgtgtcgccaccgttccaatttgggctcggtaaggaacggataacgccggagttagataacgcatacgtggcaccatntctcgagtccagccggagacctcaccggcagccaccgtgacccaatgactttgccgcggtgtcacccat

SEQ ID NO: 38429 - DNA, 445 bp, Zea mays
agcttgacattgctcccctgttggaaaccaatgtcatccttaatgccaaggtgtctcccattatagagcatgcttcgatcaattttttttttattttcgagctcatgctcagcaattttagcagttaatttagctatgtgatcattttgttgtttaatcatagctaggtgttcatcaatagcttctacattaatatctctacatatagtacaaatagaaacatgctcaacagtagatgtagatggtttgcaagcatttagttcttctatcttagcacttaatctaatattctcatctctaagacaggaaatataatcattgcgaatatttaaatcttcaaccttagaaactaagctagcattttcatttctaaggctagaaattgaatcaggaaaaatgctaagctccttagataagttttcacatttctctacttcctgagcat

SEQ ID NO: 38430 - DNA, 441 bp, Zea mays
  unsure (1)..(441): unsure at all n locations
tcactgctaaagccttctntatttccacagcacgaaccttactgtaacactaccccacttaaaaagaatgagggtagaactcttgaatcttggggatttgaactccttgaagtacctcataacaagggtggtacggggccttcttctgctgttgctgcttgagcaggctgcaaagagatgactgacacagggttgattctgggagaaccttcttcttatgttctcttcactatcttcttttcactgaccctttctttctctttgctcttcccattggaggattctatcaaagagtattaccatcatatacattataggaaaaatggagaaccatgtacaataatcttcaacccaagaatcaccaagcattatgatcttaggggcgagggagtggaaaaatggagttgcttgcgatttggtagcggggattatatcgggagt

SEQ ID NO: 38431 - DNA, 419 bp, Zea mays
  unsure (1)..(419): unsure at all n locations
caagcttgccaatagggcgcataattatacttttaatatcttctcgtattgtcagatcatttttcacataaaaccattctgtcatccagtcgccgggccatctcttccgaaaggttggcacggggcagcttgacccggaccgagaaacgaaactgtagcagccaaaattattgtgatactgttccttaccccaaggttttgtctcgtatgataattcgtgtatattacagaagctttttgcatcaggcttcagaccttggcttctcacggcccacacgaagatattcagctntataattgcctcgggggtaagttgatggagatagatttcgaatattttcagcacctccacaacgaagctgctcaagggaaatcgcagtccagctttcaaaaagcttcggtacactacgacttcattc

SEQ ID NO: 38432 - DNA, 462 bp, Zea mays
  unsure (1)..(462): unsure at all n locations
ctcaagcttaatcctgagaagtgtgtcttcagagtgccccgatgtattctcctgtggttcatcgtctccgagcgtggcatcgaagccaacccggagaagatcgcagccatcaccagcatgggacccatcaaggacttaaaaggcgtacagagggtcatgggatgtcttgcggccctgagccgcttcatctcacgcctcggcgaaagaggtctgcctctgtaccgcctcttgaggaaagccgagtgtttcgcttggacccctgaggccgaggaagccctcgggaacctgaaggcgctccttacgaaggcgcctgtcttggtgcccccagctgatggagaagccctcttggtctacgtcgccgcaaccactcatgtggttagcgccgcgattgtggtcgagaggcaagaggaagggcatgcatngctcgttcagaggccagtctacttcgtcagcgaagtactg

SEQ ID NO: 38433 - DNA, 414 bp, Zea mays
tgcaagcttccctttaaccccaaaacgcaatactctcttcattggtgaaaccttcaggtagacatagtccccttcatgaaaatacaagggcattcgccgtttgtctgcataacccttctgacgagcttgtgctatcttcatattatgaataattttctgaaccttttcctcggcctccttcaccatatcaggcctaaagaagtacctttccctaggttcagaccaatttagcggagtacgacatcgtcgtccatataaagcttcgaagggtgccatcttgatactttcttgatagctattattatatgaaaactccgccaagggcaaacattcatcccatttctgtgagaagtccagaacacatgctcgcaacatatcttcgagtatttgattaaccctctcagtctgtccact

SEQ ID NO: 38434 - DNA, 458 bp, Zea mays
  unsure (1)..(458): unsure at all n locations
actcagcttctgttcagtctgtatttagcttagcttctctcttaaaccttcagttgcttggagctcgaagttcttcttctcaatagcagctgattgctcctttattttgctttctaaattttcaattataacttcgggtttcttgtcttccaaatcttgctgcattttcaaagctttgctcaacagcatactctgcacgagaacaaccttcgttagacatgttttcattattaaaaacaataaaagttaagggaaaagtagttcaccttgaaattggaataaaataaactaccaacgatatgttgtcgtcggtagcggctaatgtccgtttctagcttcggaaaaccgatactctntgacagagtaccgataactttggctccagtttgatctcggatacaatctaatttttcatcatcaatacctccgaagaggagtgctcctggtttatactcgca

SEQ ID NO: 38435 - DNA, 380 bp, Zea mays
  unsure (1)..(380): unsure at all n locations
tgcggcatgcaagcttgtctagtggcctttaacgccgtgtttttcttatnggtactagggtctagtccaagaacacatatcgtttagggtatgccccttgtgaatgagtgggaaatgccgaatattcaagaggacaacccatctaagcaaggggtggagaagggtggtttggtgaatttaaaatatacataccattgcagaagtcagttcggtgaaccagatgacgaatggctataggcccttgaattgacatgtaactgaaatttgggaaattatacgaagaaagaagatgatgctttgaccattgcttttggtgcttgacggaagagaacgttgaaccaagtttttgatgctattcgcttttgttatcctgaatactc

SEQ ID NO: 38436 - DNA, 338 bp, Zea mays
ctatatagtggatcgcttgtgagtctgttttatattcttgggcctttctggcagcttctcgacttacatgaatagcaatgggcccttgatctgaaggtatcttcatgcatagatatgctggagaagaattgcttcgaaagcattgagtgttcctccgccaattatttcattgtaggggaattccatgttgacaatgtcaaagacaacctgttcggtccttgtgttatgaacaaagccgaaggtgtctggcattgtgattctaccgaaagctatgatctgtcttcctccgaagctgcataaaggatgtgtagcatcgcgaatcgtatcttctagctctt

SEQ ID NO: 38437 - DNA, 417 bp, Zea mays
agcttctagcacaatccgaagatgcactgctcttctaagatgcaagggatccttctgccgaagctagcatggctggtggaaaatctttcaccgatatctgggataatggtggtcgagagatggcccgagaaatcattcgaaaaagtgaaaagggcatccacgacgctagagaagtagctgagactgctgagaagagcgcacagcccgaagggcagttaggtattaactaatagtttttattgtgttgtaatttttggttttaagcttcgtttgccatttgtaatagcaatgtagccgtatcctgtcctacttcagatcctgccaaagcgtctccgggccctcagccgaaaggagacgacgaaattaaaaaaatggctgaagccattatggacgaagtcgtcaatcggctcctgaatg

SEQ ID NO: 38438 - DNA, 339 bp, Zea mays
  unsure (1)..(339): unsure at all n locations
caccgagatccaaaccttctacttgggaagatcccttgggcacaagtcgagctttgntccttgtgaccacaccatgctcgtcttgcttgttgcggaagacccaattggctcctacaacactttgattatgacgtgggactaaatggcatacctcatttctcgtgaagttgttgagctcctcttgcatcgccaccacccaatccgaatcttgaaggcttcctctaccctgtgtggctcaatagaggaaacaaacgagttatgttcacaaaaatgagcaacacgagatcgagtgttaccctcttatgaatgtncccgaagatggtgtccaccgggtgatct

SEQ ID NO: 38439 - DNA, 407 bp, Zea mays
agcttcaaccgttaaagaactcctgccactgttctatgtcaccacgggtgcagccgataagaacaccggtgatagccgtcgtccggccttgcgccgcgtgtcccaacctcgccaccgcatcgccgtgactccctctagcttcccgtcgatcaccggagttactgccacgtcgtggaacacgtattcactgcaccgtgttcttcttcacttccgaccgccgcgcgtcagcacccaaaattcacggtcaccgccgttgtgcgctataaattgaccccgcagcaagcttcgcaatatcattgcacaccctcacaccaagaattgctcccagccgaacactagtgagcctgaatcgcgcattctcccattcgatcaaaacaccgcgactaactcgcgaggcagcccctttc

SEQ ID NO: 38440 - DNA, 393 bp, Zea mays
  unsure (1)..(393): unsure at all n locations
caagcgcccctatgcatatgacaattccatagttagtcaattcaggttaagcagtatacaagtgaaccatagaatcagttatgcacttacatttagctgtgacacaaagttgttgtaatatttctggtcgtccttgtaatctttccaacgagttaggataagcatggtttcccgaataatgatgccagcctctaatgcaaacttggcagcttgaacaggttcatgtggcctttttgccttcctcaacagctatgggcagactcctttgcataactttagtcatcctgtccagttgntttcccttagttgctgccctacgtctccttggtgctcgctgtgtangagctacaaaatataattcacatttatntaataatcaaattgttttgttca

SEQ ID NO: 38441 - DNA, 444 bp, Zea mays
  unsure (1)..(444): unsure at all n locations
agctntcatgtcaacatcaaggccactggaactacttcatatggatttatttggacccacaaattatgtaagtgccggtggcaacctctactgtctagtgattgttgatgacttctcaagatacacttgggtgttctttctccatgacaaatctgaagtcgcatctatattcaagaagtttgccaagaaagcacaaaataaatttgattgcaagatcaagaaaattagaagtgataatggcaaagaatttgacaacaccaacattcatgagtactgtgatgaaatagggatcaagcatgaagtatctgccacatacacacctcaacaaaatggagttgttgaaagaaaaaataggaccttgatcactcttgcaagaacaatgattgatgagtataacacaccggagagggtttgggccgaagctgtcacactgcatgtatgctt

SEQ ID NO: 38442 - DNA, 432 bp, Zea mays
  unsure (1)..(432): unsure at all n locations
ntgtgtggaatgtgggagaggatttgatctcttgagtgtgtctataatcgaatgcctagctcttgtaagtggntggaagtatgaaaacttggatgcaatgaatggtgggtggttgggggtatttatagccccaaccaccaaactagccgtttggtggggctgactgtcgtatggtgcaccggacatgtccggtgcgccagccatgtcaccaaagccgttgggttccgaccgttggagctctgtcttctaggcccgcctggatgtccggtggcgcaccggacatgtactgtaaagtgtccagtgcgccaacatgggcgtgcctgacttctacgtgcgctggcgcgtatttaatgcgctgcaagtaaccgttggcgccgaaatatccgttgctttgatggcacaccggacagtccggtgtacaccggacatgtc

SEQ ID NO: 38443 - DNA, 442 bp, Zea mays
  unsure (1)..(442): unsure at all n locations
agctngcccacactatatcgaatggactttaagattatctgtaacctagtctgaagacgctattttgcatacttatattgaaatcatcatcgagttctgtcagaatgcttctgctattctacagaaataaaagataaggcaatgaccagaggaattcaacattccttggcatgatctatgcaatactttactaggattatgtcacaggagttgtatccacaattgcttattacttattagcgtgggtaacttacccaatagccgtcgcgctccatgatgctatattataaacaactttcgttccatcccatgccttctgcagtttgcttttcctcttttagctgaaaatgtcttgctaagagctgacaaaattaattggggagtcttcatcacgatttcatgtaataagtaataatcaaactcatctcaaataatggaacac

SEQ ID NO: 38444 - DNA, 438 bp, Zea mays
tcaagctggacaattgtctattgatgaatgacaagcggatttattgcctctgcccaataagaatccgatatattatattctgctaacatagacctagccatatcaatgagagttctattctttctttcaacaataccgttttgttccggggtatatttggaagagaattcatgtgtgatacccttgtcatcacaatattgatcaattctcgcatttttgaattccgacccattatcacttctaacctttttgatgtcgaaatcaaattgattgtgagccaatatagccaatgacttgaatgtttcaaacacattggatttgtctcgttgaaaataaacccaagtgaatcttgaataatcatccacaatcacttgacaataggatataccaccaatactgacaaaatatgtgggcctcaatatatccatgtgaagtatt

SEQ ID NO: 38445 - DNA, 444 bp, Zea mays
agcctatattatatatctgatgattaagaatttctcttttttaatgttattcactgcaaaactatagaaatggtcgagtgttacaacttcgatgttaactttggttccattcgacattattaatcatgttaaatctgattaaaaacttataatgaatattttgacttgtaaaccatgtttaaatttaaaagttaccaactagaaagggtcaaatgtctttaaaccctatagatttaatataaagctttgatttaatataaatcttatcttaatcctatctcacagaaaagtcatgaacattattatttgagcatgatgttcttagctttataccttctccataaaaacaccgcgtatcttccaattcattcatagatgatcgatactgtgtagcacacaaaaaaaaacaacaaccagtaaacaaaatataacggtcatccgagc

SEQ ID NO: 38446 - DNA, 459 bp, Zea mays
  unsure (1)..(459): unsure at all n locations
taagcttctngaagcctcagaggctaaagtgcatgaaggaaccagtgtgttcgttctgtangtggtaacacgtcttatggcgatgaattcaaagtacaccttctccaacaactgttacaacgatcttgtgaaactgattattgatatcaacccaccgaatcataacatgccgaaagacttgtaccattgcaagaagctcgtatctggtctcggcatgaactaccaaaagattgatgcttgcgaggacaattgcatgttgatctggaacgagcatgaaaataccacacactgcagtaagtcaagatatgcactggtgctagatgaggatggaaatgaggttacgacaaaggtgccgatcaagcaactccggtacatgcctatcactctacgacttaagcgtcttctttctaaatcaagagacagcaaagcatatgaggtggcataaagaaggggatgttc

SEQ ID NO: 38447 - DNA, 452 bp, Zea mays
  unsure (1)..(452): unsure at all n locations
agctcgcattgcatatttaaattccttgtattgcatctatgacttgnctaacctagttgagataaccgccaataaagcgagtgaaaaagcttaactcgggtcaaacctgtcaagtcttagtttttaagcttttagcactaaaattcttacttctcatgcaattattggttcttgaaatatgcatgaggtactgcacttagggggagtattcaaaactcaaatcactcttgaaaacccctagtgcaagccaaaatgcaaatttcaccatttgcctatnttctctaaaaattatctagcctatggcaaaatattttgaaaagtatatgagggtgccaatacctgtcccaacaagtgttattttgtgtgattaacagttgggatttggtttggttaggagttagatagaaaaattcaaagatttccaaactctcctctgtctgggctcaccggac

SEQ ID NO: 38448 - DNA, 471 bp, Zea mays
  unsure (1)..(471): unsure at all n locations
gcttaacacatgatcaagtagaagtgtaggccatgtttggttcagctntttttagcttctggctaccagagtctgctacagactctcaaacacctagcttctatgagaatcactttagtcaaaaccatagtcgttgagatagaagaaaaccgtcactttctacgtcataaactttatagactcttttatcttccttcgtgtgtaatctccacgatactcagattctttccacagccagatccagattctcaaaaaagctcctcgtaaaaagctgaaccaaacaggcccagagccgccattactagaattggtaaagcataccaagcatgaacaaaagcaaatgtgcgatagcagaacaataaaaccacgatctgacgaactcgcatcaggcattaacagacaatcaatctaagcaagctagaaattcgctcaatcatcaacctaaattcctaaatcagcttcctaagcaag

SEQ ID NO: 38449 - DNA, 429 bp, Zea mays
  unsure (1)..(429): unsure at all n locations
agcttcangggagcaaggtagggccgatatttcctttatttanactccagccgagggatcatgccagggaacagggagctcccgccagtgacaaggatcgactggcagaggcgctccttcacagactcgtcctccattaatctcctgagtgagatgctgaccatctcatcgatgccggcctggtcgattccaatcatgcctggctggaagaggacttcagggcaacggaaccgctcgatcccaatggcaattctgtaatcctcagcggttagtggccggactttgggtggctccggagtcagttgaacagcttcggaattggacacaaatgtaggatcaatctcctgcaccgtggaacatcaaatggtacctgattatagctgaaattgctgacatctgaaatgaaactaagataggatacaattttca

SEQ ID NO: 38450 - DNA, 467 bp, Zea mays
  unsure (1)..(467): unsure at all n locations
ntactcaacaacatactctgtgcacaaacaaccttcgttgattacatctttgttgttaaagataataaaaactgaagaaacgttttttaccttgaaattggaatagaataaactaccgacgatgtgctgtcgtcggtagcggctaatgtctgtctcgagcttcaggaaaccaatattctttgatagagtatcaataaccttcgctccggtttgatctcggacacagcctaacttttcatcgtcaacgccaccgaagagtagtgcccccggttgatatctgcaagatatggtatattcttttaactcttctttctcagccttcgtcaactcctgtccaactaagttttgaaagttgaaaatntcctcttccgaagtgtcttcggctatttccttctccttcttaggctctggggacatagcttctttggtggctgcgacagcttcttctgcggccatgtctagaagta

SEQ ID NO: 38451 - DNA, 438 bp, Zea mays
  unsure (1)..(438): unsure at all n locations
tctaaagggagagncacatttgggactaactgatacacccatcctatgtggggttggccgaggcccaacaaattatggttgcccggagcccaacagttcattaagcacacccaactgagggaaaggcccaatcgccccaaaagactaatccaatgggggaagggtggctctcccttttaaagtggcttcctcctcccaagttaagcgaggtgggataattctgagggtcacacggtcgtcgtccgactacaattgggccaactgggccaattgcgtctttgccaacgggtaatagtggaggatgtcctcatcattcccaccttcttaaaatgggccctagctctgataccagatgatacacccagcccatgtggggttggccgaggcccaacaaattatggttgccccgagcccaacagttcattaagcacacccaac

SEQ ID NO: 38452 - DNA, 425 bp, Zea mays
agcttcacgagagagggaacaggtcttatgctctctgatgagtctagtggtgcggagtggagttcgatgttggagtgagtccgtctccgtcgtctgtgccgcctgtgcccccttcctccttttcagaaggccctgggcatccccttttatagatacaaggggatggtctagctgtacatatgggggtgttgctatgtgctaacgtggccgacggagaagtgcttgtgccctgtataagcgtatctggcggtgcatccctgtgtcctgctgacgtttctttgccttcatagagagcttgaggactatcgacgtcatggacgcatgcgaggaaccattgtgacggaacctctcaatgtcattatgcccacctacagttgtccttgtccacggacctcaacaacctgtatgtgccctgaatacttgac

SEQ ID NO: 38453 - DNA, 421 bp, Zea mays
  unsure (1)..(421): unsure at all n locations
aactaagctagaacccggctgttccatacatgaaaagacaatctttcatcttttctttgagagatagcgagagtggcacgttccctcctggcaacggatcgcctaaaaggggtggtgtactctctggtggtgcggacctgttcatgcagtggaggatccgtgggaatagtagacattcatgtttacgagaaacatgtgtcgtgtggttagaaatcctcanctgagtaaatcgattccgatcgccgttatatccccggagagtggagactagagctccgacctacaacctaagtcaagatgtgaacactatggataaaaatgatgttgtattgatgagatgatgaaattatactagattgcaaccgagtctattaaatatttaatctgttcgtaaatatttgaagtaggactcactttaata

SEQ ID NO: 38454 - DNA, 432 bp, Zea mays
  unsure (1)..(432): unsure at all n locations
gcttcngatctcgtgccttgctacttttattcacgtggccaacaataacttgagaatcagtctttaggatggcccttcttattcccattgcccttagcttccgaagccccaatagaagtgcttcgtactcagcaatattttttgtgcaactgaaatccagtttgactgcataacatgttttaacttttgaaggttccactaggaccacaactgctcctgcaccgaaggctccccaagaaccatcgcaaaacactgtccaagcttcgacatctttgcttgtcccttcttcatgagcccctagcgtccaatcagcgatgaaatctgctagcgcttgggattgaattgaagatctgtgcacgtaatcaatagtgaattcattaagctccgtggcccactttccaatccttccagtagcttctctattnctcatga

SEQ ID NO: 38455 - DNA, 446 bp, Zea mays
  unsure (1)..(446): unsure at all n locations
gcttatcaaagaaaaatatacagagttggaaaaggtgttatattctgtttaatggcctcaaggaagcttcaacattatttccaagcatatcatataattgttcctttgtcacaacctctgaaggacataatgaggaatagagaagctactgggaggattagaaaatgggctgctgagctcaatgaattctctattgattatgtacacatatcctcaatacaatcccaggcgttagcggatttcatcgctgattggacgctaggggctcaggaagaagtaacaaaagacgctgaagcttggacagttttctgtgacgactctttggggaaccttggcgtagtagcagtcgctgtcctagtagcgccttctaaaattagaacatgttatgcagcaaggctggattntagttgtacaaataacatngctgaatacgaagcccttcttgt

SEQ ID NO: 38456 - DNA, 256 bp, Zea mays
  unsure (1)..(256): unsure at all n locations
cccacaccgaggagagcggtaccggcgctgagacccaaccggagcgggggaaccatcgtccacgagacgacgctccgctcgcacaccccgcagcagggcgagctcagcacgagccccacccagcccgacaaatgcatggaccagctccgtgtacaccacagcggccaggccgaatgagctgctcaacccatgacagccctnaccgacaggngagacaaacacgcctcctgtgccgccacatggacggcaccgggaa

SEQ ID NO: 38457 - DNA, 375 bp, Zea mays
taccttggcagcttgcaagcatgctaacaggcgggaagctctcatcacaccaaatatgtgatgactacatcaagacctttggagatgcttcacatggacctcttcggacccatcgcctatctaagtataggacgaagtaagtatggccccgctatacttgatgacttttcccgcttcacttgggtattctttttgcaggataaatctgaaacccaagggaccctcaagcgcttcctaaggagagctcaaaatgagtttgagctcaaagcgaagaagataaggagcgacaacaggtccgagttcaagaaccttcaagaggacgagttccttgatgacgacgggatcaagcacgaggtctgcgctccctaccaccac

SEQ ID NO: 38458 - DNA, 449 bp, Zea mays
  unsure (1)..(449): unsure at all n locations
agcttaaagaaaagaagatcggattacaagtttatctgaataatntcacagggaaagagcatgcactcgtcatatcaaatcatcgaagtgatattgattggcttataggatggatattggcccacgttatctcccatcttctgtatagttgttagagatttactttgctcacagttcatactgtgtagatttatttgtattagctgataaataatatgagactcttgttttctggtccatgtgttcagcgctcatggtgccttggaagtacgctcgctgtcatgaagaagcatccaagttccttccagtgagttattagttcatatgtatatttctgtaacatgtagttttacaattcatatgcacattggagttctatttgcagcataattaagcaacataaacaaatatattgtggagtagagacttgtctatctatgttcaaaaaa

SEQ ID NO: 38459 - DNA, 434 bp, Zea mays
  unsure (1)..(434): unsure at all n locations
aaccttgtaacgaggataagctacctgaggaccaaatgtgtttggttcttaagtctctntggaatccttaaaggaaaatgctcaaaatgtttgcaacatgctttcataagtgcataaactgtcttgagcatcactcatatactatgacacattgcacttcacattctgtataatatagatatgttctcattaacctaattatgtgcaattggcatttaaggccataatatgtgttcctctccatgcacatacttagggggagaaatctatattatatagaactatgatcatgcttaattgacatatctcttgatcatatctctttcattttggtacaaatgcatatatcctattattcccgtaccatgactacgactaatatgtttccaagtatattactatgctaagtcgtagattgaaatggaaatggagtc

SEQ ID NO: 38460 - DNA, 344 bp, Zea mays
  unsure (1)..(344): unsure at all n locations
agcttgccttcgnnttagtttatcatccgtagttcaacggggtcgtggagcgcgccaatgggaaaatcttcacagctgtaaagaagatgctcctcgatgaaaaaaaaggcagatggactgatttgttacatgaggcagtctgggcgctaaacacaactgagtgcagggcgactgggttcactcctttctgccttctatacggatcggaggccatgaccccgcaagaaataaagcatgggtcaccgcgaacagttccgtcagccgtccccgacgtggacgagccaacttcaaaggatctcattgacggagaccgggtcttcgccctgcaggccctaaacaaatac

SEQ ID NO: 38461 - DNA, 357 bp, Zea mays
  unsure (1)..(357): unsure at all n locations
gggtattttatcttgttttttagccctagatgcaatacaacatatntaaatatgcaatgcaagctngacatcaccattctatggttaagtaaaatttctaagatcaagaatatttagctcattcctcaacatacaaaagcgggttttgtctaaaggctttgtgaaaatatccgctaattgatcttccaatctcacttccttctaaaatatatctcctttagcaacatgatctctaagtaagtgatgatggatatcaatgtgcttggtgcgagagtgttgtacatgattattagcaattntaacagcactctcattatcacacaacanaggaccttttctagaactacaccatagtct

SEQ ID NO: 38462 - DNA, 246 bp, Zea mays
tctcatgccaccagccaacttcagtggcccatcatcctaaatatgccttcactagacttggcctcttataaaacatgttccaaagaaatacttcttttctgctgacggagaaagagtgatagacgaagccttcatgctgcacatagtggtgagtgggaacccgaaggaatgcgctccgtctggatggaggcgttcgtgagtatgcggacattttcttgcaatgttaccaataacaatattgcatcg

SEQ ID NO: 38463 - DNA, 284 bp, Zea mays
aaaaatggttagactcgaaagacatgttgttttcccattggtctatcaccttattgagtcggcattgctattaccaggagcgacaacaacggttgtaagggtcttcttggcaatgaacgttatcaacattgagtggtgcaataagatgcacaatggttgactaaatgatgtcatggatcgctatattgacagggaaatattcaaaggacttgatatttagaacactaaaaggtgtttcacaataagaaagatagacaaatgctattgcctctaagggtgaaaac

SEQ ID NO: 38464 - DNA, 392 bp, Zea mays
  unsure (1)..(392): unsure at all n locations
atgcaatcttncacaacaatccaacacacaatggtgtattgtattacgctctggcggcctgaaccactctaaatcctcgcgtgctcctgagttcattgttcatctaccaataggcaaaacgcttaagccccctcctcatattaggatttatggctggtgcactccgncacccggccggagaattncctctccgacatttggtgcgccaggtagggggctaagcattacgtttnngcttgttttctcgctcagnatnatggggcaaatngnngagcaccgngccgaaactttaactgattttttggtggaggaagaagctgtttcttccacgccatatgtttccaaccacccaaagccangcactgttgctgtgcacgctgcacggtagcata

SEQ ID NO: 38465 - DNA, 461 bp, Zea mays
tgaacaaatccttcacagcgatcttgcccaaattctttaagatttgcacccaatcggcgcttgaacatgggcagaggcaacgggaacacgtgttcgaccgtggctgacacccccggttcacgcccgttcgcgcaccgcgcctcccagtgcacgcccgcgcgcgctcgccggtccacgaccgcccgtgcaccgcgccgtgcctataaagccttcccaggcgcgccccacttcaccccgcactcaccagcaccggctggccacctttccttagctccggcgagctcaattccgcccgccattgccaccagagcttcggccaccgtggccagcccactccagccacccctaagtcaagccagtgcttcgactagctccaccagtagcccatgaagctcgccaagccctcggaccaggccggacttcaccggaggcccgagatcgacctcaccggacttcggtct

SEQ ID NO: 38466 - DNA, 447 bp, Zea mays
  unsure (1)..(447): unsure at all n locations
agcttcatgggccactggcagagctagccgaagcactggctctactcgagggtggctggagtgggctggccactgtggccgaagctctggcggcaatggcgagcggaattaagctcgccggagctaagggaaagtggccggccggtgaagatgagtgcggggcgaagtgaggcgcgcccgaggaggctntataagcgcaggcgagcacggccgagggcaagggcgcgcggcggacttgaccgaacgccggggcgagcgcgcgctcgggttgggcgagctctggcgtgccgaccagggtcgaacacgtgtgcccgtgcgttctgcccaagttcttgcgcgtgtggtcgctcatccgagcctgctctcgccttggtcagtgcacaaaacctcttctcctccctacaagctaccgatcttgtgtgggggtcatnaggatttgcctactgg

SEQ ID NO: 38467 - DNA, 468 bp, Zea mays
  unsure (1)..(468): unsure at all n locations
tctccanaatcttgaggtaaactatgaacctcgatcagacatgatcnttcttggtactccatgtagacacacaatccgagccatatataattctgcaagttgagagcctttataagtagtcttgaccgtaatgaaatgagctactttcgtcaatctatccacaatcacccatatagcatcatatcctttctaggttcgaggcaatctagtaatgaaattcataccaatctcttcccacttccactcgggtatcttgagtgggtgcagtagtccagctggcctctagtgttcagccttaactctttgacacacatcgcacatagccatatgtgcagctacatctctcttcaatccataccaccagtgtttctgcttcaaatcctgatacatcttggtactgccaggatgaatagaataatccgagtcatgggcctnctttaaattagtctcatgaaggctttcaatatc

SEQ ID NO: 38468 - DNA, 420 bp, Zea mays
cggaccttaagcaccgcagctgcagcttatgaaatcttattccacagggctgtctgcgggcagaccacccagttagtcttacaataagcaaggcgagtcagctctataaaaatctaccagatagctgacccttaacactcccttaaagctttgaatcatcacttcttctaaagacagtgcacctacatcagtgaatgacagttgtagcccatttgaataattgtgaaacggaaagcaattgaatctaaagaatctacaagaaaacattggaatagaaggcaggagatatgcaattttaccaagacctttgaccaaaccttgattcctccccaaagtgatatctcgtgggaatctggttttcgtagagagaacatttctttccctgcatgtggtggccccgttgcagtatcacttgacccc

SEQ ID NO: 38469 - DNA, 420 bp, Zea mays
cctattcacgatcctgtccttctggccaatctcctgaacattggatgatgagaccgcggttggccaggtggtgttgcaccttccaagatctgcaaactgggggggctcaccaacaaatgagttgaaagggtctgcagaggaatgcagccgaccaaggtgttgttggttgcttggctcaagagactgtaatggcaagttgtttgtcgtaaccagttgtgtgctgtttgatatgttcgcgaacgaattaccagaagggccagtaggaaagcatttgctagtatcctgcagtggcatatgcgcacccctgatcaggttgccgttgttcatccccccgacattccctagggaagtgctcagattgttctggttgtgtccaatctgaagtggctgcgaaggcagcagaccatgcataccaaatgc

SEQ ID NO: 38470 - DNA, 385 bp, Zea mays
agaaaaccaagagatttctctatggctttagcatactctcccttggagaaatccattccggtctcaaatcctaaatctatcacatggtggcgctcatcagatatggcaagagcataacctattatgctggatatctcatcttccattatgcacaaaatattaccacctggacatatcgcgaattgatttgaaagagctaggaaattatccaaaaaaaagttatattaggggaagcataagaacagcaagaggctcctctcatatcagaaatgaaccaaaaccaaattgtctttaataatgaacacagcagaagagagcctaaaacacacatcatccatgaattaactaagggatagcgaaaggtacaatcccaagacttcacatg

SEQ ID NO: 38471 - DNA, 437 bp, Zea mays
  unsure (1)..(437): unsure at all n locations
tcgcgagagagggaacgggtcctaagcctcctgaggagtctagctttgctgagtggagctcgatgtttgagtgagtccgtctccgttgtgcctatcgctcgtcctcccctcacccttgagaaggccctatgcatccccttttatagacacaaggggatggtccagctgtacatatggcggtgtagctatgtgctaacgtgtccggcaaagaagtgcttgagccctgtatgaagcgtagctggcggtgcggtcctgngtcctgctgacgtttctttgccttcgtagggagcttgtggactattgacgtcatggacacatgcggggaaccatcattacctgtggctggagtaatctagatgtgactccggtcttgttcctttgtagcctgaggcggctagctagaggtagggtaatgatgtatcccctgtagcatagtc

SEQ ID NO: 38472 - DNA, 445 bp, Zea mays
  unsure (1)..(445): unsure at all n locations
agcttanaacttcagagacaaagtattctgttgcttgctttttgannttgccttctaatttctcctgcacaagcgccgcactcactgcagagtgcgaagctgccacatataatagtaacggagcccctggcgcaggtggagttaatgttgttagatcaattaggtattgcttcagctcttcgaaggctttctgttgagctaggcccactgaaagacttcgggggactntannntttcaaagaatggcaagtttctttctgctgatctagatataaatctgttcaatgaaaccaatcttcctgccaaccgttgggcccccttcttcgtacttggcggttccattcgaagtatggcttcgatcttgcttggattggcttccatccccttcgttgaaactagggcaaccaaggaattacccttctttacttcaaagacacatttttca

SEQ ID NO: 38473 - DNA, 451 bp, Zea mays
  unsure (1)..(451): unsure at all n locations
ctcagctggtgcggcctcctcttcaggtggagaccttctctcttgttttgtccgggccgggccagattcttctaggtggagacgacgtcagggtactgctgctccctctgttgatgtctgaacctgcagggagagtttgtctgtagtgtgcgtatgtttttcgcggccgccgaggcccaaacatatcattgtcgtgttgtaaagctgcgtttcctttcctcttgtttcgagtatcaggacttgttcgtcggtagcagaatcgtttatccgagcgagagttacttttcacggaaggtgatgagtgaggtatctgtatcccggaggcgtangagtcactcngctcggtcgacctcgccgcttacatgcactcttactcgttcgtaggattctgttatcaatatagtcgagatgcacgantatcgttctggcagaaaaagtttcgagcgtaata

SEQ ID NO: 38474 - DNA, 231 bp, Zea mays
taaggtttttttgtcacagacaccccaggcatatataatgcaccaataccatataaccttaatgccataccattatgaatggcccactcctacttgaaacaatacaagaacccaaccatcacacagatctaagaaacaggactaacatctattcccaagaactcacaagatcctctatgggaaaaacatgacaaacaacgccatacttcattcatccaaaaggaataccaa

SEQ ID NO: 38475 - DNA, 434 bp, Zea mays
ctaagctctagcaccgcgtcccacatccgattgcccaccagcttgtctgtatttcgcgttgcccccaaatctgttctccgccaccgtaaaccacccatcaccgcggccagccctttccaggttagttcatctctctctctcccttgtttaagcaccctggttactctgtgatgcttgccgagccttcaatttaaactaggagcccaccagtcgccgggaacatggttatctcgccacaacattctcggtcaccgtggccaaagctccttagttagtcttggatgcaattaggttaggggaaatgattaaggtagccccaatttcatttatgttgctcggagaacctagttgttgccccaatcagccggtacagaggctcgccggaacctctctgcgctcgacgccgtcggggaccttcccctgcgaagaaacag

SEQ ID NO: 38476 - DNA, 450 bp, Zea mays
agcttaaaaaatcaccaatgtaaatatattttctcttgatggttacttaacacaaccgccaatgaaaatgagatatttacattggcagttgtcttaagaatccgccattaaaaatggtatttccactgtccgttcaattaacacaaccgccagtagaaaagggctatttccaccgtcggttgtgataacacagccaccaattaatatacaaggggaacatggtcctattagttgtctgtttggacaaagttcaagccaaacttataaaatcttgattataattaactatcttgttatgtagttttaaaacctactatttatatgcaccgatttgtcttactaagtacttttataaaagtgcaaatgtattaagagtttatttgcattttaataaaacatattcggcaaagttatactttggagaccatgtcgttgtcctaaactacaact

SEQ ID NO: 38477 - DNA, 460 bp, Zea mays
tcaacagaatgacagcgaaggtccttcattcccagatatgttgatttgtgctaacttatgttgatgatatcattgtaaaaagcacgaagcacgataatcacattgctgatctgcaagagaccttcgctaattttagacaggctggtttaaagttgaacccagaaaaatgtgtcttcggagtgaagaaagggaaatttcttggctgtctagtctcaacaaaaggaattgaggctaatccaaacaaaatcgaagctatccttcgaatggaaccaccaagtacaaagaagggggctcaaagattgacaggaagactggcatctcttaacaaattcatatctagatcagcagagagaaatttaccatttttcgaagtgttgaagtcagccgaagtttttcaatggggaccagtccagcagagagccttcgaagagctgaagcaatatttgatggatctaacaac

SEQ ID NO: 38478 - DNA, 363 bp, Zea mays
  unsure (1)..(363): unsure at all n locations
agcttaagcacaactacattctattgttattgttatacataaagtcgagtccaagagagagggcaaanacaaatcacaagcaaataaagagtgtgacactatgattttgtntaccgaggttcggttcttggtaacctactccccattgaggtggtcacaaagaccgggtctctttcaacccttttcctctctcaaacggtcacctagaccgagtgagcttctcttctnaatnaaacgggacactaagtncccgcaaggatcaccacacaattggtgtctctttcccccggtacaattgagtcgatcacataaaagaatgaggaagaaaagaatcattcctagcgcaagagcttcaatgaacac

SEQ ID NO: 38479 - DNA, 373 bp, Zea mays
  unsure (1)..(373): unsure at all n locations
actcagcttctaaaggagaacacattntangactaactaatgttcattttgagaaagacaggacttgtagcgcatgccaagccgggaagcaagttgttgttcatcatccgcataagaatatcatgacgactgacaggccactggagctcctacacatggatctatttggcccgattgcttacataagcatcggcgggagtaagtactgtctagttattgtggatgattattctcgcttcacttgggtattctttntgcaggaaaaatctcaaacccaagagaccttatagggattcttgagacgggctcaaaatgagttcggcttaaggatcaagaaaataagaagcgacaacggaacggagttcaagaactc

SEQ ID NO: 38480 - DNA, 407 bp, Zea mays
  unsure (1)..(407): unsure at all n locations
agctttactaaatattgtcctatatgacatgtttttatgactggaggtagtactaatgaaaccaattatcctcggcccgttgaatttgtgcattgtggctatggggctatgcacctttgtacaatggcgcaatgcacctcaaattaaaaccattttgaagatattattccttatacgattttatgttatttccaacattgaaagcaatgcttattntgggcacctatggcttggtttttggaaggggtgtgtattttgagattcttgagatgatatatagggagcaagtcctacaagccttgggtcattgggtagtgtcgaaacttgctgaaataaactagaatggcatgctggaaaatgaactagctagctgactcacataatgacaaatgccatgggacccactg

SEQ ID NO: 38481 - DNA, 452 bp, Zea mays
  unsure (1)..(452): unsure at all n locations
aatactcagctngacattnnttgaagtattgaagttatctaaactattcctatgggatctgactcaacaacaagccttcgaagagctcacaacaatattgatctagttgacaactctctcaccaccttcgccaagggctccaccattgtcatatgtatatgcctctcattccactgtaaacatggccttggtctatgagaatctaaaggatggatgcaagagacaaatgttagtgtacttcgtcttggaggtgctttgtccatctaaaaggaattagtcagaaatggagaaggtgttgtatgcagtattgatggcctctaggaaccttcacaatcacttttagtcatacaacatcattgtacctttgcctcaactatttaaatacatcatatgaaacagggaagccactggtcngaatcaaaaatgggatgctatgctcaacgaatttgtat

SEQ ID NO: 38482 - DNA, 384 bp, Zea mays
gatcttaagtcacctgcggcatgcaagcttctaaaggagaacacgtgataggtctatacttatgttactttcaaaaaagatagaccttgtgcagcttgtcaagcaggtaaacaggtgggaagctctcatcatgccaaaaatgtgatgacaacatcaagacccctggagttacttcatatggatctctttggacccgtcgcctatctaagcataggaggaagtaagtatgggcttgttatagttgatgatatttcccgcttcacttgggtattctttttgcaggataaatctgaaacccaagggaccctcaagcgctttctaaggagagcccaatacgagtctgagctcaaagtgaagaagataaagagcgacaatgggtccgag

SEQ ID NO: 38483 - DNA, 468 bp, Zea mays
  unsure (1)..(468): unsure at all n locations
tctanagggagagccacatttgngactaacaaatgtttatttttataaagacaggatttgtagcgcatgtcaagcagggaagcaagttggtgttcatcatccacataagaacatcatgacaactgacatgccgcttgagctactccacatggatctattcggcccgatcgcttacataagcatcgcgcgggagttagtactgtctagttattgtggatgattattctcgcttcacttgggtgttctttttgcaggaaaaatctcaaacccaagagaccttaaagggattcttgagatgggctcaaaatgagttcggattgagaatcaaaaagatttgaagcgacaacgggacggagttcaagaactcataaatagaaggctttcttgaggatgagggcatcaagcatgagttctcttctccctacatgccacaacaaaatggtgtagtggagaggaagaatagaactc

SEQ ID NO: 38484 - DNA, 417 bp, Zea mays
  unsure (1)..(417): unsure at all n locations
ngaggaggacctaaggacactagaacaatcgaccagagtgcttgtctatcctggaataagctggccgcggtgagggtgtctctgtggtggcggaaaccggattgggggatgtaagaaatttgtggtctctggtgaacgatttgaggcaatacttggtggcttggtgcgtgatcatcctacggacctgaccgcgcgctcaatttatagaagacaagagcggtggccggtgaatttgggagggacgcgcggcggccggaggaacaagaagttactggcgcgcgcgattagtgtccgactaccgtggcaagctctccggtgatagacggagggttacagcaagtcacagcgacgcgggggatgtgccaaggcacgtggcgttcggtcgacgggcagccaactccggtgacttatccggac

SEQ ID NO: 38485 - DNA, 420 bp, Zea mays
  unsure (1)..(420): unsure at all n locations
agctttaacgatntgactaaagaacatgaggtgctatttttttctcatngtgacttcggccaaaggtatgaaactatttcaactgagcaatataactctttacattgtattgctcaattagtaaataggaatgccttgcttaaggaccaagtataaaagctaaaagttgaaaatctatgctttcaaaaaaaatatgatatgcgtctatgttctcatgaaaatcttatggatgatcatatcatgttaaatattgctcatgaggttgtgataaaaaacttaaaatcccaacaacctcactcatgcacatgtattcaaattgaaactattttgccatgtgctaatgcttgttcgtccgcgactagaaaatcctcctttgagctaatatttccacgaacacaagatgatacatgtcaagagctc

SEQ ID NO: 38486 - DNA, 468 bp, Zea mays
  unsure (1)..(468): unsure at all n locations
ggttatgatcttgtgatcctatcanagacaatggttcaacttgatagacatattgtgtttccattggtatatcgacttattgagttagcattgttgttaccggtggcgactgcaacagttgaaatggccttctctgctatgaagattattaagtctgagttgcacaacaagatgtccgatagttggttaaatgacttgatagtctgctacattgaaagagagatttttaaagaacccgatcttctgaaaattaagaaggcatttcaaaataagaaaactagacaaatgcaattgcctatgcctcctacaactcggctcaactagaggtatattcttatttcacttgttcacacaattttacttcaatttgccattgttaactntttttctttttcagattttattctatatatgggaattggttgtaaatggatcgtgatcacgattactcttgaataanggtatttt

SEQ ID NO: 38487 - DNA, 356 bp, Zea mays
acatgtgctattctgtgatgccagagccagcccatgttagtcttagcaattaagcaagtgtcgagttcagctctattaaaatctaccaagtatagctgaccctctaacactcccttaaatgctattgaatcatcacttcttctaaagacagtgacacctatatcagtgaaaagacagttggaacccattttgcctaattgtgatacagaaagcaaaatgtaatctaatgaatctacaagaaaaacattggaaatagaatggtcaggagatatagcaattttacccaaacccttgaccaaaccttggtttccatccccgaatgtgatagctcgttggggatcttggtgtttctcata

SEQ ID NO: 38488 - DNA, 459 bp, Zea mays
  unsure (1)..(459): unsure at all n locations
ntagtaggatgtgtattagcaacttgctttccagctggacatgctctacatggcttgtctttttcaaacaccacatcctttaatcctctaaccatgtctttctttaataccttcttgagtgtgctcatcccaacatgtgcaagcctcctatgccaaagccatccaagtgaagctttggtgaagaggcaagttcttaaatctgcatcttctgaagtgaaatccactaagtagaggttgttgtatctaaatcccttgaagaccattgattcatcatccatctttgttacaataacctctgttggagtgaataagcattgaagtccaagatcacagagttgacccactgataataaattgaagctcanaggtgcaaccaagagaacatttgatattgataaatcatttgaaattgccaccttgcctagtccttgcacttttccttttgaattgtctncaaat

SEQ ID NO: 38489 - DNA, 428 bp, Zea mays
agctttgccagatcagttgtgatgtgtggttgtgttctgtacatgtcacaaaacacgcgtagaggaggaaggcgtgctcaacatgagcgagccgctccgcaagatgaggtgccccatcagcagcacctgccgcccccgcccccgatgtcaattgagcagatgtttctgatgcatactcatgcagtccaagccatcggtcagactctggccgccattcatcagcagcagcagcagcaacagcagcaagcaccacctcagcctcagatgcctcagatgcctagagacaagcgtgctgaattcatgagaggtcatccaccaacgttcgctcactcttctgaccccatggatgctgaagattggctgcgcactgtggagcgggagttgcataccgctcagtgcgatgaccgggagaaagtcttgtatggtcc

SEQ ID NO: 38490 - DNA, 436 bp, Zea mays
  unsure (1)..(436): unsure at all n locations
tactcaagctagaaccgaggacccgcgtcaccggaatagctgatctgtgctcgccggagttcatccccctgccggcgcacgtggaccgggtaaatcactgagccattttccgattcaatgcacagatagcctctacatcatcccaggaagctcaccgtgccgttggattggactaggtcaccgtggtttggccggcacacccgccgccgacaagggcacccgcctgcgcgcgtggaccgagcgattacggccatccccgccggcgagccgtacgtcgttgtgaccgccagaaatccccgagctaaccctacccctcgccggacttctctcgtcgccggtaagccgcgccacccctttcttctctgtgggtactatntacacctgngagggaccgctggtgagaggaagagaaagtcagggggctttttgaactgtc

SEQ ID NO: 38491 - DNA, 351 bp, Zea mays
agcttctactgaagcttcggctcaataagcttaagctgaagctgggccttcaaagccctacaaggagcaactctttgaagccgaagcaataaaaattccagaaccagtattagttgaagaaactgacgccgccatccccgaagcacctgccagcatgcgtgattacatgatacgacatgcttcggggaagaagctatctgaagaagaaactcatgaagccatccattatgcaaaggaactaaaatatccgaagggggcagtaatattcaatggaacgaatgaagatgacttcttatactgcctgcctgacaacaaagagctatctgtctgccgagaaatggccagaagcat

SEQ ID NO: 38492 - DNA, 423 bp, Zea mays
  unsure (1)..(423): unsure at all n locations
ctttctcctgacgaagtaggcaccaaactggagcttcttctttatgcgagagtcaagcttcggcaatggttaaaattttcggcaacaaaacagtgcaatggcaatgaatgttgtggtaacttcacacctacctgtctgtttatatagtgctgcaggtaagaagatgaatcgtcaggatttttacaccaggcaaatagctgctcgcacccgctgcgcggtgggccgcaaagaccaaaatagtgaacctgcatggtgggaccgctacacgctcggaaactgtatcgtttctcgacaacgagctcagggaaggtgtttttcggaccttcggcttcccaaagcctaagagactntnttcacggatcaagctcgttacgaanaacgatctagcaccgcgaaggggctactgttgggaccatgcttcgt

SEQ ID NO: 38493 - DNA, 388 bp, Zea mays
catgcaagcttaacgacgatgatgatgcgcgctatgactgtagtctttaaaaaataccaggactctgcggcgacatcctatgagcagcttgatcgacgagttgctgaacttgttacacgcatggacatactggaggctcatccccaaccaccaactccagccccagctcactctcctgcggacgatgacgatgacgatgatgtttatgcaccgctgcgacaacgcctcacacgtaatcgacaaggtatgggaagtaatggtagacgtcgtcatcataatcctgaaccagaccatgatccatttgctaagattaagttctctattccaccgttcatgggttcttatgatgctgaagcttacttaaactgtgagatgacggtagaacaaa

SEQ ID NO: 38494 - DNA, 459 bp, Zea mays
actcagcttggagtgtcacactggtggtgtacaaggtcgatcctggctctattgtggacaggcggcgccgcaattcgtcgccggagtactctacaccgcgaaatctgtggccgaccgatgtgggcatctgattaagcggtatgtatcctcggacttggtttgccacctgcttctcattgcgtagcaaccagcgcggcgaggaatcctacaccaggggcgggagtcaagcgctctccggcgatagtccgtcgcgaacctgtgcggcgccgtcactctgcctgctcgtaagagaagatggcgatcgggccgttggtccgtccgtcgatggcacaaatctaaacctaaggataccggttcagggttttatttgtaccgtagatcagcgatcccgtggccgtgggtgagcgagtgatcatgcgccatccgattgtgatccaacggtgcgcagagtggtaccgt

SEQ ID NO: 38495 - DNA, 446 bp, Zea mays
  unsure (1)..(446): unsure at all n locations
agcttatcgacttcttgtgcactatatatttctggtaaattnnctatcatgtaacataacctgctgttgagcaatttctgctatgtccagagatttcatctgtttccctangaactctgcatggttttgtgccccgtgtttccatctcttatctctacacatgactcttgtgccctaaattattaaagattaaagaaatggttattggtttcaggaaagtgtcgcctcctgctgaatcagctgttctctgcattgatcatttatcaaggaatgttaatgaggctcacttgaaagagatatttggtgagtttgtgtttatatctccattcactttattctgttgtaacttgaaagtctactatgatgattatattcatagngaagacatttaagatacgtaaattatatttcactttcatgagtttttcttgtgtgatatcacctga

SEQ ID NO: 38496 - DNA, 447 bp, Zea mays
  unsure (1)..(447): unsure at all n locations
ttatcatatggacgtgataagtgccttgctaaatggttctttatagaagaggtctatgttgagcaacctcccggctttgaagacagtgagtctcctaaccatgtctataagctctctaaggcgctntatgggctcaagcaagccccaagagcatggtatgaatgccttagagattttcttattgcaaatggattcaaagtcagaaaagctgatcctacgctctttaccaaaacacttaagaatgatttgtttgtatgccaaatttatgttgatgatattatatttgggtctactaacgaatctacatgtgaagagtttagtaggatcatgacacaaaagttcgagatgtctatgatgggggagttgaagtattttctatgattccaagtcaagcaactccaagagggcaccttcattagccaaacaaagtacactcaagacattcta

SEQ ID NO: 38497 - DNA, 71 bp, Zea mays
ccacaccagaccgcctgtctcttcacccacaaacggggcacgcccaaaagaaagctttaagggccggacca

SEQ ID NO: 38498 - DNA, 359 bp, Zea mays
caccgaaatccaaaccttcgacttgggagtatcccttggccacaagtcgagctttgttccttgtcaccacaccatgctcatcttgcttgttgcggaagacccactcggttcctacaacattttgattatgacgtggaaccaaatgccatacctcattcctagtgaagttgttgagctcctcttgcatcgccaccacccaatctgaatcttgtagtgcttcctctaccccccttatggatgtcgcccaagatggtgtctaccgggtgagctcgttggattgcttggtggactcttgtgtgtggcggccttggatcttcatactccttgtcttgatcatttgcatcctccccttgatcatt

SEQ ID NO: 38499 - DNA, 358 bp, Zea mays
gcccatattattcttagcgattaagcatgcatctagatcagcattctcttttaacaaatcaactaagtagagcttggcgtctaatacacccttaaaggttaatgaaccatcactccttctaaagacagatacatcaatatttgtaaataaacaattatagcccatatgacataattgacttatagacaataaattatacccgagcgattctactagaaacacattagagattgaatgctcggttgtgatggctatcttgcctaagcctttgaccttgccttcgttcccatcttcaaagatgatagaatcttgggaatcttgttcttgacgacgaggtgaacatttctctccccgcatg

SEQ ID NO: 38500 - DNA, 422 bp, Zea mays
  unsure (1)..(422): unsure at all n locations
agcttaacaacagggttaatagcctcatgtgttttgcaagataaaagttcattttcaacaagaagattgtcatgatcaaatttaatttgagtatagtcttccttgatctttactagtctagtttgcaactccctattagcttcatttaatttgtcatatttttccttagcatcttttagggagtttgtgagctcatttacagttgatgacatagttttattttcttcttttatttcatcactagcctttataactatgtcatacttggcatttaaagattcattttcatttttcaacctatcacatttagcntttgactttctaaatgattgagtatgttctttaagtaagtcagctaactcatcatatgaaggtgaagcaaattctcatcactatcactatcactatcatcatcaatatta

SEQ ID NO: 38501 - DNA, 362 bp, Zea mays
  unsure (1)..(362): unsure at all n locations
tcagctattaataaactctcacgactgttatctgatctgagctcgaatctaattcctgaacttcgatcgatggttgactattctaatccgaatccggactctcaaaaaatactcagtatgtcgccctctaattaatttctatccgattcggcttaatatctctgtatccaatccgatgtcaaaatcagcatcgacagcaattttaaaatgccacgattcaccttctccgactaanaatccaaagccgatcgaatctcaggacgatttattttcgaatcacgcgtaggtaattattttcgagccaaatcaaattagactctcggncgaataatcgctcgatcgtccattcatcgaaactctaa

SEQ ID NO: 38502 - DNA, 472 bp, Zea mays
  unsure (1)..(472): unsure at all n locations
tcaatagcaaattcattcttggcagatgagtgtatggtgttttgttctangtacatagaaggtttcgctaccaagcataataaaccatcaaggaacgatgatagtttggaccatacccaatcgaagatggttggacaagattcatctttattcccttcagtagggaaatcattgggaaaaccagccaattttgaattaagtcatctagagaaattgcaagcgcatagatatgtgttgtacaattgtgatgttgttaatccatatctaaagtaagtgttttggttaactaatgaactatgcatatagattatgaattatataattatatggtaatcatagtatagggaacatgcttctaatctgaaacgaaagagacacgtccgtcgcctaactcctaaagatattgagcagatacagaataaagaatttccagaatggtttagaacaacatgtagtagcataatctgatatt

SEQ ID NO: 38503 - DNA, 397 bp, Zea mays
  unsure (1)..(397): unsure at all n locations
agcttacaacataattgttccttcttcacattctttgttgacattatgaggaaccgagaagctactggaaggattggaaaatgggctgcanaactcaatgaattctgtattgaatatgttcatagatcttcgattcagtcccaggcgttggcagacttcattgctgattggacgccacgggctcaggaggaggaaacaaataaagacaacgaagcctgaacagtgttttgtgatggatcttggggaaccttcggagcaggagccgctgctgtgttggtttcaccttccaaagtcaaaacttgttatgcggcatagcttgattttagttgcacaaataacatcgctgagtatgaagcattgattctaggtcttcggaagttaaaagcaatgggaatca

SEQ ID NO: 38504 - DNA, 466 bp, Zea mays
  unsure (1)..(466): unsure at all n locations
taagcttattcaattatggtgcngaacagaagttgtggctgcttatgtttcatggccgcagngcctgataaagggaagaaagatgttgatacttcttcnggagagaaagaatttgaccttcggcacttgggtggccaggaactgcctgataaagggaagaaagatgttgatacttcttcgggagagaaagattttgacctttggcacttgggtggccaggaactgtccgaggcagacaaggaggagctgaaagaatatggaatatcttggggctatcggtcgagatctctgctctttggcggcgttgacgaagaaattttgggatgtattcgaaccgcaccggggcgaanataatcggcactctgtctaagagtggtggtttcccaaagccagagtctgatattagtggttaccaaccgtaacacattgtcgatagcctattctattccaatttcaaagtgaaatc

SEQ ID NO: 38505 - DNA, 461 bp, Zea mays
  unsure (1)..(461): unsure at all n locations
tgaggcatgcaagcttggcttagttaagggagcttgtgcatcatccacggataaggcagcttcngcctgagtcagggttctgacatgatcgcaacccgccttctccaggatggctgaaattcctcttgcaccggagaacgcgcagacatccccgcgatcatttagaatttcttcaaaagcttcggcctctccgcttatccactcgataacaccctcagggtcgcctcgtatgaaagtatcttcgtttgaataggcgcccacattggcgaagctagccttcatcttcttcacgcagcccaaagatntttcaaaacatctttccttggatgcgtgaagctcttcaactggtttttctaaatagtttttccaatattcgctggcctctcggttagcttctgcgagagtgcatttttctttggcctctgccagttgtntcgaaggtcctcgatctcattcttttg

SEQ ID NO: 38506 - DNA, 463 bp, Zea mays
tctccaccatgtcgctgctagccaagtagttgcagctaccttcatcaatgatcaaacgacatgaacgctccttaatgacacactttgtttgaaacaacgtatgtcgctgattctgctctgccttctccatttgtgcactaagcacacgctgtacaatgaggctctcataatgctctgcatcatctgcaccaatctgttcttcgggtggttccttagtgcctgcatcatcagccgcaaacaaagcaagtgtagcttcatccaaatcactagcagaggaatacccaccatcgtcttttaccaccaaaacacgctgattaggacaatcacgctgcacgtgtccatagcccttgcatcgataacacaaaacatctcttgttctacccgtggaggctactgaagaggcactacctgctggtttctgggcagatttggttgctgaatatgtggatgatgcacgtggttt

SEQ ID NO: 38507 - DNA, 444 bp, Zea mays
agcttggacatttttcatcagagaagtttgttaattcttgtgatatagaaaggattttcttcacgatacatgaaaagaagggaaggtgttttttctccgaaggctcaaaaaatggtatgtatgcaaagattcatgcatcgtaaagaattaaactataaatagattatatattacatttaaagttacaatatattacacattttacgtttcaaatgtttctataatagcattcaatcctctttaagcactatctctgcagcttcattcaatagttggttgacaaccttgtccataatggcttctgccatctttctaatttcatcgtcccccttcgggtgggagcccggagatgcctcagcatgttctgatggaagaaaagatacggctatattactattacaaaccgagaacagagtctggaattaaaaatacagtatgataaaa

SEQ ID NO: 38508 - DNA, 125 bp, Zea mays
cggaacacgatcagaccgtacaatcccaacacgtaaactgttgagaccctaaccaagcccacaaataggctgacgtgtacaactgctaaacccaaaaactgaacgaaagaaaatattttaacatc

SEQ ID NO: 38509 - DNA, 462 bp, Zea mays
  unsure (1)..(462): unsure at all n locations
taatgtcagaatcgccataaaggaagctccctcactcttctatcctcccattgnctcatggcaaagggagatgctatggtaaaaatcatcaccgatttaaatgatataaaagatgatgatgatatcgatgatgtcgatgatgatggctattcatatgatgatcttgttacaatgttaggagaggccgatgactacatgcacaaagaaaaagaaaaaattaataccttgaaggaattgtataaaaacctccaagtgtcttttgaggagctcaagacctctcacaatgacctataagaaaattgtgagaagcttgcggatgctcaaaaatcatctattgtgcatgaagttaaggtggtcaccaaggatattggagtcacttgtgacttacttgatagtcttacaagtgaaccactatctactaaccctatttgtgataaatgcaaaatttctctcaatgataac

SEQ ID NO: 38510 - DNA, 248 bp, Zea mays
ggaagcaactatttctaacgaaaccctttaatcaacatgccatcctatctagctaagaccattgacctggagctcgatggatgctctcacccaattcttacagtcttaaacttaatggtccaaaaccatattcatgttgttgaagcaaaaaaatcattcctatcatgctttaacttttactatttcaaatctgtaacactatataatcaaatgaaatacgaattacacataatttacattttatacta

SEQ ID NO: 38511 - DNA, 396 bp, Zea mays
  unsure (1)..(396): unsure at all n locations
agcttatgtccgacggctctggccgtcngtatttgtttcnnttactgtagagctagtcgttagaataagcttctggcagtcaaacgtttcacaggttggattattttcgtgagaattgctttaatgaaaatcatcaaaatcaatgtgaatttagaattcatcgagtcatcgcgacgggacaaatcacgatattaaggatttcctccacacccaaattctccaagaatccagattcttataaaagctcatgtgacaaaaaagctaaaccacaccggccctatagcgctcaagcagtggcatggaatgagcagcanacagggacactagacaagaacccacacgcgcactcttgacaagggagccacacgttcatgtgcatgtgccgtgcgttcccct

SEQ ID NO: 38512 - DNA, 395 bp, Zea mays
  unsure (1)..(395): unsure at all n locations
tatctggagaacaggccacatncatttctgtatgcaatcttatgtttgaacaaaaacagtgcttagcccaatctataaaccacaancactcgaacgctgactcagatggtatagccatcacaccaatggtgctaccatcagtaaaataatagaatncaatttgttttccttactgatacagtacccttcgaataattgtntataagcaattgaacttgctgcccaatgtattatagtcttggtcagtctaaacatttaccttagtctccttcactcccgcgccgctctgacctcagacccggcctcgctatcctctcctttatcctccgtcggtcctccaactccaccaggggtcgcgacattcatagtagttccacaccaggcatactcatggc

SEQ ID NO: 38513 - DNA, 437 bp, Zea mays
  unsure (1)..(437): unsure at all n locations
agcttgcaacttgtttagtggtcatgtcaatatcgactntngtagcattttntttaataaaaaccattggcgcctcgaagcatgaaagaaacatggaaaaaaacaataggcacctgaactaaacactattatgtgggctagacctgtgtaatatggatactgaaatgcctatgaggctaagacctatgcataaataccgtgcaaatggtacgttttttttaccttattcgcgcttaagggcatgtttgacatgactcctgagcacaactctaaagagaagctggtcagagtctgccaaacaccctaaatctagagttgctacgtgtgaaagccgtcgaaaataactcatgaccatatgttagccattgaaaataactttatnnttcacgccatgtgtcagccgcgataaataactcgttattttcgacaccatatat

SEQ ID NO: 38514 - DNA, 418 bp, Zea mays
  unsure (1)..(418): unsure at all n locations
tatcaaggccgacattctcttcgtgaatattggagcttgcttctaatcggtgtgtggatctcttcttgagctgcaagtttgctgcatccttggtatgttgtaagtttccccaattcatagtaaaaaacttctcatactatgagcgagagctcttggcttgagatcgaggaagggtttgtgtatcccttggccttaatggcattcctcaacaatgtggatgtaggcaaggctttgtggcgagctgaaccacatgataaataccttgtcttttgcgtgctaatntgatgttctcatttggatagttagggttcgagtaatgctcacttgaatctcttattactctattcagtctgctttctacgcattactagttcgaacctcatgttntaagtagaagtgggaaatcatatcaatttca

SEQ ID NO: 38515 - DNA, 285 bp, Zea mays
aaaatcttcacagctgtcaaaaagatgctcctcgatgaataaaaggcagatggaccgatttattaccggaggcagtctgggcgctaaacacaactgagtgcatggcgaccgggttcactcctttccgccttctatacggatcggaggcaatgaccccgcaagaaataaagcatgggtccccgcgcacagttccgtcagccgtcctcgacgtggacgagccaacttcaaaagatctcattgacggagaccgggtcttctgcctacatgccctaaacaaataccaag

SEQ ID NO: 38516 - DNA, 362 bp, Zea mays
taagctctagtgggatgtgtattatcaacctgctttccagcttgacatgctctgcttggcttgtactttcaaataccacatgctgtaatcctctaaccatatctgtctttaataccttcttgagtgtgctcattccaacatgtgcaagcctcctatgccatagccatccatgagatactctggtgaagaggcaagttcttaagtctgcatcttctgaagtgaaatccactaagtagaggttgttgtatctaaatcccttgaataccattgattcatcatccatttttgttacaataaccctctgatggagtaaataagcatcgaagtccaagatcacagagttgcccactgataataaattg

SEQ ID NO: 38517 - DNA, 242 bp, Zea mays
  unsure (1)..(242): unsure at all n locations
ttaacacatgcaattgccggagtctatgatcagtgtacaccatgtattccatgtctctatgttgagaaagtatttgcagaatccagatcaataaatcaagctagagtcgattcccatgtagcaagacctgactctagagtgtcgtctgctgcgtatactanaatccttggagctcgaggagctgatgcggcagaagtacccttgacttttccgtatggggtgagtatttgtcgtcgctgatc

SEQ ID NO: 38518 - DNA, 353 bp, Zea mays
  unsure (1)..(353): unsure at all n locations
ataccttcaatagataaggcagtctctgtttgcgccaagcatntcacatgtttgcagcctcttctttctaagataacggcaatccccctagcacccgagaacgcgcatattgtcccatggccactcaaaatttcttcaaaagcttcggccttgccgctgatccagtcgattggaccttcgggatcgcccagtatgaagtngccttcattcgaatatgcgccgacgctggcgaaactagtcttaattgtttccacacatttcatggattnttcataacatctttcttttgaagaccgaagttctgcagttgttttctaccaatgattatacagtaattgctggcgtctcggtca

SEQ ID NO: 38519 - DNA, 535 bp, Zea mays
  unsure (1)..(535): unsure at all n locations
ttaagcactgagctgcagctgtaaggggacacatttagaacaactatgttatttttagaaaacangacttgagcgcatgtgaggtaaggaagcatgttggagttcatcatccacacaagaacatcatgacgaccgagaggccgcttgagctactccacatggatctatctggcccgatcagcttagcatcggcgagagtaagtattgtcttgttattgaggatgattattctcgcttcacttgggtattccttgtgcaggatatatctcatacccaagagaccttgaagagattcttaagatgggctcaaaatgagttcggatcgagaatcaaaaagagtagaagcgacaatggaatggagttaaacactctcatatggaagatttcttgaggagganggcatcagcatgagttgcttctccacacacctcataaaatggtgtaggggagaaagataaactctatgacatgtaaggacatgctgataatacaaacaccgatcggtctggcgaggcggaacaccgttgtactcata

SEQ ID NO: 38520 - DNA, 366 bp, Zea mays
  unsure (1)..(366): unsure at all n locations
taagctggctgtatatatttcttagaggaaggcanatcgatgtcttccttctctcttttctgttgcaaatataacctacagtggtgggatagctcttcccccatcctacagcagcatacagctcctaattctcgatgaagaatccaattgttattattatcctgcatcggaaatgacctatcggccattgtgcctaacctggtattgttaactcccatcttataaaaaaaacactttgaattgttctggcacaaaacaaaaacactttttgnttggcttgataggcggtggtagaatgacctgctagagtgtcttatctacgtctgaccatctatgagattaaaaatattggtttctatacatggt

SEQ ID NO: 38521 - DNA, 447 bp, Zea mays
gagctaaaaactctgtttctcattggagctctcacgctaaacctaaatctaatctgcatgcagtttgtattgttgctgaaaatgttccagtggaactgcaaaactaccaagcaatatgtgaattatgatctacaatcggagctagtgaagaagtggacatcctatctttatattctaacgatatgcgtagattcaaagttcatgtcaagagtgtcgccatgatcccgcccatcattgaagaggtggttaaaccttctctttatgacattatctttaagattgatgatatcactgatgaagcgtggacgatgagctatcaccttggaaataacttcatgataacatggcttgtaccctataacactggcaaagctagatgggagaaatcgcaagagaatgaatgaaatatgataatgcgctatgcaactctgtaagactgatggatag

SEQ ID NO: 38522 - DNA, 487 bp, Zea mays
  unsure (1)..(487): unsure at all n locations
gcttcgaacctacgctgcttcattgctggtcaatactgcttatcgctgtatctttngttctgggcgcgtgcgtgagagcatgacgacccatcatcattcatcagtgtggagttggaaagtctctgtttcgctgcctgcacttggctggctctggctctgcttctgtccacctcaaccgcactagcaatctatcattcgtgcggccggtcaccttctgttggtgggtggaacgctggaaacatgggagggtttcagtctccagagtcaaagggggagccaacatactcaccatgaacgcgatctccggacctctctctatctctctgatttttgttaaaaaaaaaaaagcggtgtggcgttgctgtatgatcacgcgagcagctgcagttctctgtgcgctgtattgcagtatgagcaaagcatcgtccaatcaatagactatacatgcatgacaccttcattactatacatacaaccatacactcac

SEQ ID NO: 38523 - DNA, 315 bp, Zea mays
  unsure (1)..(315): unsure at all n locations
cttcaaaacacgaactaacgcataaagctccttgtcataaactgagtaattcagatgtggaccatttatcttttcagataagtaggcaacatgtttaccttcttgcagcagtacacctcctatgccaataccacatgcatcacattcgatctctaatgtcttaccacaattangaaagtgtagcagcggcgcttcacaaagctttgttttagctcattgaaagcttggtcttgtcatctccccacttgaatggaacattcttctttgtcaaattattganggggtgaacgatcatgctgaaaatctttacaaaat

SEQ ID NO: 38524 - DNA, 353 bp, Zea mays
cagctacctccatttattatcatacgacatgaacgctccttgatgacacactttgtttgaaacaacgtatgtcgctgattctgctctgacttctccatttgtgcactaagcacacgttgtacaatgaggctctcataatgttctgcatcatctgcaccaatctgttcttcgggtggttccttagtgcctgcatcatcagccgcaagcatagcaagtgtagcttcatccaaatcactagcagcggaatacccaccatcgtctgttaccaccaaaacacgctgattaggacaatcatgctgcacgtgtccatagcccttgcatcgataacatagaacatctcttgttctacccat

SEQ ID NO: 38525 - DNA, 215 bp, Zea mays
  unsure (1)..(215): unsure at all n locations
agctctatcaacatctacacaagatagctgaccctctaacacatcacttaaatgctactgaatcatcacctcttctaaaaacagtgacacctacatcagtaaatagacagttgtagcccattngacataattgagaaacagaaagcaaattgtaatctaaagaatctacaagataaacatttgaaatggaatggtcaagagatatnagcaattta

SEQ ID NO: 38526 - DNA, 298 bp, Zea mays
agaacacgtgataggtctgactaacgtgcaattttttatttatataacctgtgcagcttgtcaagcaggtaaacaagtgggaggagcgcatcacaacaagaatgtgatgaccacttcaagaccactggagctactgcatatggacctattcggacccgtcgcctatctgagcataagagggagaaagtatggtctagctattgtggatgacatttaccgcttcacttgcgtgatctctttgcaggataagtctgatacccaagggaccctcaagcgcttcctcaggagagctcataat

SEQ ID NO: 38527 - DNA, 454 bp, Zea mays
  unsure (1)..(454): unsure at all n locations
atctctaagtcacctgcagctgcagcttcntaccatgtgatcacaggtattttttttgttgtcaatgcatttcccttttagttgtgcgtagctccttattatcctctcattntctcctttgagcttttgacatgtatcactctcttgttcctgcaaattctagctcaaaggaagatttgcttgtcgacggacaacaagcattagcacatggtaatgtagttccaatttgaatacatgtgcatgagtgaggttgctgagattctaagttttctatcacaacctcatgagctacatttaatatgatatgatcatccataagatcttcatgagagcttataagcatatcatatctatccttgaaagctagatgttcaacttttagcttttctacttggtccttaagcaaggtactcctatttactaatttgagcgatacaatgtagagcgctatctt

SEQ ID NO: 38528 - DNA, 453 bp, Zea mays
  unsure (1)..(453): unsure at all n locations
gtcttctactttntctacacagcaggaacactactggttttctaccccacttaaaaagaatgagggtagaactctcgaatactggnggattgaactccttgaagtaccacataacaagggtgttacgggtccttctgctgctgttgctgcttgagctggctgcggagggatgactggcacatggttgattctgggagaaccttcttcttatcttctcttcactatcttcttttctcttctcacttttcactgcctctttctttctctttgctcttcccactggaggagtctatcgatgagtattaccatcatacagaggaggaaaccaaagactatgaaccatgtacaacagtcttcaacccaagaatcaccaagcattgtgatcttacgggcgagggagtgggaaaatggagttgcttgcaatttggcagaggngaattatctggagtgtgc

SEQ ID NO: 38529 - DNA, 273 bp, Zea mays
gaacgcgcccaccgaacaagacgaccgaggaagaaaaccgcagccacagggaagaaaaccacagaaggaaaaaaggccaaggaaaaacccgaaaggccacagcccccaaacgaccaagaaggaaaggggatacaaaccacccaacaggcgggaggcacaccgcgcgaaaacccaaaaagcaaagaggggacaccaagagcgaggcacccgaacagacagaggagccaagcggccaacaagcaacgacggggcgacacggcagaaagaaaaaca

SEQ ID NO: 38530 - DNA, 351 bp, Zea mays
gcttcggaggaaggttaggggatcaccctaaaaaaatttatagcctcatttgtggtgaggacaagggccatactacaaggatgttccacgtcaccattcataaacagaaggaaatagcagaagctgcagctcaacagaaccaccccgaagaaagtcatgcacactgcttcgtatcactcaccctacataccagagtatgtgggtaaccatcctgcagcttctgttgctttggtagccagcacaggcatcatggaacagcctcaccttcgcaccactaaacctgtgattacgaagcacagcagaaggagcacagaccatcacaggaactccggagagtcgactcgacagcac

SEQ ID NO: 38531 - DNA, 515 bp, Zea mays
  unsure (1)..(515): unsure at all n locations
cagcacactatgatactaagcttgtcactactcgtgtgagagtcgaataaaagtgtactttctttctgtttcanactccccanataatggatgctttgatggaagtatggagatgttctacaaattatccaataggattaagtgatgctcaaggtttattaactgcacttgaaaattttgagtttttatgtggtatggttatttggcatgatattttattttctataaatatggtgaataagaaactgcaatctaagaatgtgtgcatggatgctgcactcgaacaaattataggggtcattgtatattctaagaagtatagagctgaaggcttcagtcgcatcatcgatattgcataagtgcagatgagatggatgtagagccagtatttcctagaagccatcaagctaaaagaaagaaacattgtgatgaacaaaatgatcagaatgaagaagatgcttatcagctatagagtcattcagaagtattactttcttgcatgattgaatggaatt

SEQ ID NO: 38532 - DNA, 217 bp, Zea mays
cgacacttaaatactaagcttaggacgagctgcgagcaccatcaggatgtcatatttacctgtcacacatcaagccctgccacaatgcacgcatgacgatgatgtatacctcaactcgtttgtctgacagttcattcgaccagtgtcacattcgtcttatttgaccacagagattgtcactgtggccatgatcataggtgttcagcttggacccact

SEQ ID NO: 38533 - DNA, 245 bp, Zea mays
tagcgacctatatatactcaagcttcttagggagaacacgtgataggagtgactaatgtgctattcgtataagatagaccttgcgcagcttgtcaagcaggtaaacatgtgggaggagcacatcacagcaataatgtgatgaccacttcaagacccctggagctgctgcatatggacctcttcggacccgtcgcctatctgagcatatgagggagtaagtatggtctatatattgttgatgactt

SEQ ID NO: 38534 - DNA, 478 bp, Zea mays
  unsure (1)..(478): unsure at all n locations
tcccgaatcgatgggatcgaggaacaggaacgtagtacacggtacgctactaaaactaggttataacacaaggaacgtgattattcccacattcccggtacgaggaacgtggccaagttccatgttcccggtttctatgagtcgaagtacttgcaaaatctctcatatttgaaaaaaaaattaaggatatcttcttgaagaatttaatggttaaatataagcatcaaagatcgtgtaaagtagaacttgtcaagtattaatgatcagagggagcatgtccggtaataaacacaagaaaactgcaacaattacgagtnggagtataagagtgttttacatcaatactagatgatgagtagggtactttagtaacttttccatcttcagaattgtgataaaaaaccanacaaagtatttactacccactctattcactttgcatctatggctctaagtctaagtggtggattatacatat

SEQ ID NO: 38535 - DNA, 245 bp, Zea mays
catgttagtcttagcaattaagcatgtgtcgagttcagctctatcaaaatctactaagtatagctgaccctctaacacacccttaaatgctattgaatcatcacttcttctaaagacagtgatacctacatcagtaaagagacagttgtagcccactttgcatatatgagatacagaaagcaaattgtaatctaatgaatctacaagaaaaacattggaaatagagtggtcaggagatatagcaa

SEQ ID NO: 38536 - DNA, 431 bp, Zea mays
gtaatacaaaattagatgaattttcttttcgggactagcaggtgggctccgtggtatgtccagaagatgccgaagaaaagttctcagcatgtcctggaaggatggtcttcttgaagctcggaattgcaagcattcaccaatcatcttccacagctccccaggaagtcctacacctactactcttgaatattgaggcggtggcttcttttcttttacaacagacttacatatttcctctgcactcagtccagcccatctgcatttcaatgagcatataacaacaccattcacaatacattaaggacaacaaattgaatatcatgctacttacggaacagcaccagtacacatttccacaagcgtgcaaccaaaactacatgcatctgactctggtgatataccgcttgcactatcccataacatattcagtg

SEQ ID NO: 38537 - DNA, 329 bp, Zea mays
cttagttatcaaagaaaaactatatagaattggagaagatgctgtttgctgtcttaatgagctccaagaagcttcgacattatattcaagcataccatataatagttccttcatcacagcctttgaacgatattatgagaaacatagaatctactggaaggattggaaagtgggctgcggaactcaacgagctcaacattgattatgtgcatagatctttgattcagtcccaagcgctagcagacttcatcgttgactgacgccagtggctcatgaggaagaactaatgtaagatgtcgaaccttggatagtgttctgcgatggttcct

SEQ ID NO: 38538 - DNA, 385 bp, Zea mays
  unsure (1)..(385): unsure at all n locations
agcgaccttagatactaagcttagccctttctgcgcaacttgttctctcgctgtttcttcaattacgacaggctctgtcttanaagactctaaaggcccagcttcagtatcagcttgaattactgcagcttcaatttcggccggctttgtttcagcttccgtttgcgctttcgaagcttcggcaattttccttgaaggagtagagttcaaagtctttactgtttctaacacatctagtacatttgccatccttcttctcttgggagttgcgacagaacttttttgtgccttcggcgctgntacttctgatgaagggcttattatatctaacacttttgtttcttcaatatttgactcttcaaccttatccttatcagtcttcgtc

SEQ ID NO: 38539 - DNA, 279 bp, Zea mays
ctgagctgcagctctacctggacaggtatctggaagttatcatgaatccctttagtgagcagctattttacctctattgtctgtttgagctcttgatatgatcatcgcttgtacctgcaaaacctaacccaaaggaagaattgcttgccgacggacaacaaagcatttacaccctgggaatatagtttcaatttcgacacactgtgaaatagtgatgctgctggagatttaaagtgtttattacaacctcatgaaccatatctaatatgacatgatcat

SEQ ID NO: 38540 - DNA, 418 bp, Zea mays
  unsure (1)..(418): unsure at all n locations
taagctgcattgatgttaaatatcttgattgcatctaaggcttgtcttacctatttgtataaccgccaacatagcgagtgaaatagcttaactcgggtcaaacttgacaagtcttagttttaagcttttaacacttaaattcttactttttatgcaattattggttcttgaaatatgcatgaggtactgcacttatggngaagattcaaaactcaaatcactcatgaaaacccctagtgcatgccaaaatgcatattctcaccatctgcctattttctctaaaaattatctagcctatggcaaaatattttgaaaagtatatgagggtgccaatacctgtcccaaacaaagtgtatttgtgtgattataagatgggatttggtctggttggaaagtagatagaanaaattcaaaattt

SEQ ID NO: 38541 - DNA, 387 bp, Zea mays
  unsure (1)..(387): unsure at all n locations
cgtattcagcagactggtcccagctttcaaacgccgnccacaactccggctcccaggatttcgataaacttccccttcgacagttggtgtaacttctcctccatctttggcaggcttcccccagtcttcagtgctctgttctttgctattctgccttaaatcttgctctatatagcatatatactgcatactatatagtacaacggttttggtacatagaggatgactacatgtatgactacagtcgactaggctcaactaatcaggcttatcgacgactaatcgcaacttggtcgcttatcagtgccatggaactagggtnattagatcattganaacatgcatggaccataaacacatactgcagtgctcagtgaacagattatg

SEQ ID NO: 38542 - DNA, 305 bp, Zea mays
gcgcacgccatgcagggaagcaagttggagtccatcacccacacatgaacatcatgacgaccgatatgccgcttgagctactccacatggatctattcggccccgatgcttacataagcatcggcgggagtaagtattggcttgctattgtggatgattattctcgcttcacttgggtattctttgtacaggaaaaatctcaaacccaagaaaccttaaagggattcttgagacgagctcaaaatgagttcggcttaaggatcaagaaaataagaagcgacaacgggacggagttcaagaactct

SEQ ID NO: 38543 - DNA, 238 bp, Zea mays
  unsure (1)..(238): unsure at all n locations
gcctctggatgacgacttggatcaagagatccaaaacttggagtngctccatcaacaggtccaacggaagaaggaaaagatggctcgtctagctgacctgcaaaggcagatagacgaagcctctgaagaagttcgtcatcttgctcaagatgaccagaaccgaaggcctccgcacagagagcttcatcaggagggcttctacaacgaggacgactgggatgaagattccatcatggaa

SEQ ID NO: 38544 - DNA, 408 bp, Zea mays
  unsure (1)..(408): unsure at all n locations
gcttatctcaacctgagaggaaagcttactcttattagtggtttccttgagtcttanggaagaagaaattgtgcattaaagcttattgtgcattaaagcttatctcaacctgagaggaaagcttaccctataagggttttccttgagtcttatggaagaagaaattgtgcattatagctcatctcaacctgagaggaaagcttatcctataagggttttccttgagtcttagggaagaatgtgtagtnttgttgatactacttatgcttcttattgtattatatggggataatgcaaaatcagggtttccgttgatatgaatcatttagtatcttctgtgtttatcctgtaatagaaattcatgtggttctggtgctcataaaatagntttaatctggtatcttaatg

SEQ ID NO: 38545 - DNA, 358 bp, Zea mays
  unsure (1)..(358): unsure at all n locations
tcttcctaaaggcgatgttaaactcctttgttgtatcaactagtctacatgttaactatcacaaatccaacatctactccatcaatgtgtcgaaccagaagatggaaattctagcaaacatgtttcattgcaagattgggtcaatgcctttcacctacttggggctacctttggggctaaaaaagcccaaccttggagctntccttccattcattcagaagatagagaaacgacttgcgacaacttccatttttctatctcaggctagcagactgcanatggtcaatgttgtttttccaccgtcccaacgtattatatgtgcactctcatactcccgaaatcggtgataaacatattg

SEQ ID NO: 38546 - DNA, 434 bp, Zea mays
  unsure (1)..(434): unsure at all n locations
gcttctanagggagaacacgtgataggttngactaacgtgcaattcgaaaaagatagaccctgtgcagcttgtcaagcaggtaaacaagtgggaggagcgcatcacagcaagaatgtgatgaccacttcaagacccctggagctgctgcatatggacctcttcggacctgtcgcctatctgagcataggagggagtaagtatgggctagttattggtgatgacttttcccgcttcacttgggtgttctttntgcaggataagtctgaaacccaagggaccctcaagcgctctctcaggagagctcacaatgagtttgagctcaaggtgaagaagataaggagcgacaacgggtccgagttcaagaaccttcaagtggaggagttccttgaggaggaanggatcaagcacgaagtctccgctccctacacaccac

SEQ ID NO: 38547 - DNA, 496 bp, Zea mays
  unsure (1)..(496): unsure at all n locations
tctaatgacgtgtntcatcaacttcactaaacttcgtgaagctcctattcaaggcctaagtcagtaatttatgctagtacgttgagtaccttggggcgctcgagggtgatggggcggaatatatgagcgtgaagatgtcggccaggatgaccgcttggaggatggacgggcgcgggagatcttcggcggcggtgcagcggagttcgtaatcggaggtataggttggtctgctcgctcgttcgcgcggtcggtgtcgccgtggctcggctagtctccactctggatgggtgggccggattgtagatgggctggcctttcttcaggccccaagttttctttatgtattntttgggctactgcaacttagctttttttgtaccattgagaggtcggctggttttgtcagaatatcttcgacggtctttcttaatgtgaacactctagggttttggtntaatagtggctaaataaaactactatcataagtaactgctat

SEQ ID NO: 38548 - DNA, 442 bp, Zea mays
  unsure (1)..(442): unsure at all n locations
tcggctatggttataaattttggcagcanaacagtgcaatagcattttatgctgtggtaacttcacacctacccgtctgtttatatagtactgcaggtaagaaggtgaatcgtcaggatttttacaccaggcaaacagctgctcacacccactgcgcggtggaccacatagaccaaatagtaaccctgcagggtgggaccgctatcgtttctcgataacgagctcanggaaggtgtttttcggaccttcggcttcctgaagcctaagagactntnttttcacggatcaagctcgttacgaataacgatctatcaccgcgaaggggctactgttgggaccatgcttcgtcgccgaatgtcctgcataaagagacagcttcgactgaagcttgccgtacgtgacgccgaaggtatcattcatgaagctttgataatacaacata

SEQ ID NO: 38549 - DNA, 352 bp, Zea mays
  unsure (1)..(352): unsure at all n locations
atcttaagtcgcctgcnggctgcaagctcggtcgtcgcagagagcttctgcggtgtcttctctcgcagctgcgcatcgatagacgtcgccttgtccaccgcattgcgcgccatcttcttccctcttcccccaagaacccttcccttctcgtccgctgcaacagaatccgcacagataaaaacccagaattcccacaaaagagaagagaaaaccccncacaaatccctccaatcccacggatttcgatatgttcctgcagcgagaagacgatctacccagccctaaacacgcggattccaatatagcacggtgttttctcgaatgcataaaataaaaataagatcacaaccca

SEQ ID NO: 38550 - DNA, 376 bp, Zea mays
cttgctgtcattcctcttgaggacttggtacccgagctaacggattcctcgcccttctccttgtgctcctctgctgatgacgtcactcatttgggaaccttctttcgacatcactctgggttttagaccctaaataaagtaccgtgctatgatacacaattctcatgaaaattcccactgattcggaggttaattacacggtgccttgagtgttaataattacagttaacacacggttaattgcattgaacatatatatacctagtaatatcatgaactgaacattaatgactatatctaacaatcatcacccaaccctatcagtcgaggtcgattgcatgcatcactgtgagcgaaaagcatgccgcagatcatg

SEQ ID NO: 38551 - DNA, 403 bp, Zea mays
  unsure (1)..(403): unsure at all n locations
agcatataaagcatagatttaatttctttcttttaagtggaatattaaggaagttgcctgaagtttaagtctatttttcttttctactttgtagataccatcaaactgattttattgctggttatattctcaaggagttgtttgcagacaacaaagtgatggacgtattgcaggctggtcatagcattgcatccaattccaacttgttttgctatgaaatgaaaaaaaaagaaagaacgaaagaaggtttggtctggcgctgctggattcatgctccactggtaaaatgctggcatgtgtactatgtacacgtaanatgtctcacgttacatcatgcgtagatacatatatagtatataccaccacatcgtgctcgttagccacgtgtgtgtcactgctgttc

SEQ ID NO: 38552 - DNA, 232 bp, Zea mays
cttgcggccaggccgaggatgtcattctaatacgctggtgatatgctgaagatcagccgtgtcacaatattcccgtgcatgcaacctgtccttatataagtgacacgtgtaccacgataagctttcagagcgcataaatcaccatgcccaactatgacctcatcaagagcatcaacttcctcttcaatatgatcaaagatgcctggcacgtgtttagctgaaagctaaactt

SEQ ID NO: 38553 - DNA, 355 bp, Zea mays
ctgagctgcagctaccgattagagccgatcgttccctttgttttattctgttcggctgaccattgcgaccctttagcaccgtcttgaatctcttgatgatgagggccatttcttcatcattaagaccggctgtctcaatatgcgccaccttgctgggtagtgccttcttgcttcttgtggctatgagagcaaacgttgcggctcgctgatcggtgcattcaacgcgtcgaacacataccttgcctccttgatcatcattctgccgctgacgaattttactaggacttcttcgggcgacattttggtgtacctgggattctcacgaatattattcaccaaatgatgatcaagaacg

SEQ ID NO: 38554 - DNA, 393 bp, Zea mays
  unsure (1)..(393): unsure at all n locations
tttctgatgccaaagacacgattctgactgcgccattcactttggatgatgtctgcaaggctattttncatattgaatgaaataagttcctcgcccagatggctttctggcaaaattctatcaagntttctgggatgtcataaaggatgaattactaatctggtttgcagaattacacaatgatatcctaacggtctatatcctaaatttggcataattaatcttttacctaagaaatgtaatgcgtcaaaattccaagaatatagacctattngcttacttaatggttaacttaagattattactaaagtactaacgaacagaacaggggtgggtgcagataggcctattaatccatctcagactactttcatgagtggtcacaatattctt

SEQ ID NO: 38555 - DNA, 416 bp, Zea mays
  unsure (1)..(416): unsure at all n locations
tgtccctacacattattgatagcacacacaanagccaaagcaaaaatagatgtcatttgctgaatgtgcaacccaaaagattgaacccacaaaaaatgaaattctacctgtggaccgtattcttggcatgcaaataagctaagcctgaaagtatctgaagggtgtagctgcgtattgctggttcaccaagctgtccatattcttgtagaagtttatgtatggatccaccagaaacatattccaaatatatgtaaaagttatcttcaacctaatgttggcaaacataatgataagttcatgcctaanaataaaataatgcatcataaccctataatgaatgtgacagctggtgtgaactctttacacccttgctgaaggaaagggtaaaaaaagtagattaataacaatacatcttt

SEQ ID NO: 38556 - DNA, 460 bp, Zea mays
  unsure (1)..(460): unsure at all n locations
agcgcctttaactagctgggagagatgcttgaatgaatggcggatgaatgatttatattctagtggcatgtgcataatagtgactctcttcccatggcagatgacttcggatagaaccacgcctaccgccttcgggattggagcaagacttcccctangagctgatggagaggctggcggataatggggtgagacccacctccccgcacctccagaactaccactagacctatcccaaattctggccaatcaaaccagactcattgaagtcctcactcgaagtctggagaaccagcgcctatgcggtggaaggccccaggacaggatgggagaattcctgagactgaagccgcccacgttcgcggtgtccagcaatcccctcgatgcagatgactagcttcgcacaatcaagaggaagttggacgccatcgcttgtcctgagaatcaacgtattcagctg

SEQ ID NO: 38557 - DNA, 373 bp, Zea mays
  unsure (1)..(373): unsure at all n locations
cagcaatgcaatcagagcgcatgcatgtgtatgtggcagcgtggcagtagagttccttacgtcagtagtcaaaaacactcagtgacatcttctatgctctctacaccttgagaatgaagttgctattttgaaagatttccaggtccatcagaggaacttgagtaggagagcactttgtgaaagaaacatttgaaggaatgagatacactggcagaggagccagtattacagattccaatatacgtcacttcaatattttattctcatttgcagcatctcagctttattatctagatctacctttattgatgcanggattgattaaatgttctatccaatgtccgaactcggctatcaatgcatatagtactgg

SEQ ID NO: 38558 - DNA, 414 bp, Zea mays
  unsure (1)..(414): unsure at all n locations
tcttgtagctgctgccaaaaatgagatgtgaactgcgttcctcgatctgtcactatcttcttcggcacaccatgaaggcagactattcgtgacatgtataactcagctaacgttgctccggtgtatgtcgtcttcacaggtatgaagtgggccacctttgtttagcggtccacaaccacccagatggaatcgtatccggcccgggtacgaggtangccaactatgaaatccatcccgatctcatcccacttccactgatgaatccgcaatggctgcaacaatccggcaggcctctgatgcttcgctttggttctctgacagctatcacagatggcgacatattctgcgaatctccttttcataccataccaccaaaaccctctttttnagtcctggtacatcttctcactccct

SEQ ID NO: 38559 - DNA, 274 bp, Zea mays
  unsure (1)..(274): unsure at all n locations
cttcatccccacatgtgctaagtggttatgtcacagccagcccatgcatagtttagccatgaagcatgcatctagactggcctcttcttttgcaaaatcaactatgtaaagcttggcgtctagtacacccttaaaagctagtgaaccatcacatcttctaaagacagacacatctacatttgtaaacaaacagttatatcccatattgcataattgactaacagatagcaaattatatccaagagactctactaanaacacattagagatagag

SEQ ID NO: 38560 - DNA, 477 bp, Zea mays
  unsure (1)..(477): unsure at all n locations
tgtgaagattcttcatccaacatgggctagtcggcgatgccagagtcctcccatgttagtcttagcaattaagcatgtgtcgagttcagctctattaaaatccactaagtatagctgaccctctaacacacccttaaatgctattgaatcatcacttcttctaaagacagtgacacctatatcagtaaaaagacagttgtagcccatttgacataattgggaaacagaaagcaagttgtaatctaatgaatcaacaagaaaaacattggaaatggaatggtcaggtgaaatagcaattttacccaaacctttgaccaacccttgatttccatccccgaatgtgatagactcgtggggatctttggttttctcatatgaggagaacatncttttctccccggtcatgtggtttgtgcaccacgtgtcgagtatccaacttgagcccccggatgataaacctacaaaacaaaaattagt

SEQ ID NO: 38561 - DNA, 307 bp, Zea mays
  unsure (1)..(307): unsure at all n locations
taccttcttcttatcaantaatcaacgtcctattactagactcggcctgttcattggcctgagcataatatggagacgaattatgcagcttaattctgtataattcaacaaattcacgtaccttctttgacatataagaagtaccttgatctgtagtcaaggtctgtggaatgccgaatctatgaataatattttcaggtatgaactcaattaccttcttgtgcgtcatgttctttagagcaacggcttcagtccatgtggtgaaatagtcagtggcaactaacacaaaccgatgccccttgatgat

SEQ ID NO: 38562 - DNA, 363 bp, Zea mays
cattctatgacgcctagactctgcaatcacgcaatctcattatcgttcttgagccttgagcaccgtgtgagttgtaaactccctgtgtcgagtttgtgtgctcacttcttcacttgtgtgcgtgtgtttgctgtgatttgagtcttgtgtgcgttgctttctctcccttactcttgtgcttctttgtgatctatattgtaagggtgagaggctccaacttgtggagattcctcacaaacgggagaagaacactaaacaaaaagaccatggtattcgagttgatcattggatcacttgaaaggggttgagtgcaaccttcgtccattgagacgccacaacgtggaagtaggcaagtgttatact

SEQ ID NO: 38563 - DNA, 491 bp, Zea mays
  unsure (1)..(491): unsure at all n locations
gcttatttatagntaggcctctaacttctatatatttttcatgtatataaaatgtggtctccagagcatgggtatatatacatatagtcaccttattctgtgtgataacagatatgctagggcaaaaatatcctcgtgttagacagtttatggtgagaagaactctgtgttggatggtaatgcatctgatgatcaagattgacttctcttctttcttgatgaggatgatcttgctcttttctggtcttggtctattgattcgagttagtgtatatcatcgggcagggaatatggctagatagatgtgcggagatagactacatgatgaggtcaaggttgttgatgtggtgggattacagatatgcatctatcatgacttattggtgcgtatcctcgaagattgatagatctaatagattggatactaataactattatgtaattattataggatgagaaatattagactgtagatctctgaaacaagactt

SEQ ID NO: 38564 - DNA, 393 bp, Zea mays
ctaaacatatatttattaagtaacttataaatatatataggctatgaacatagcttggatgtgtgtccatattcattatcattatttgaatatggacagaaataagagggctcgaaagaactatatttaagaacggatggagtatctttttaaggctatctaccaagttatatctagtggcctcatgcactctggcttgttcagatagaggctatatgatacacggcattcgactactttgtagcacttcaatatttattgaaacgtggctagatattctgcaacacaggtgatgatctagcctacggattggtgacagttatactgtgttatcttcaaaacataactctatgtgaaacgctatatggaagtcgtgagttctttcaaaatgtt

SEQ ID NO: 38565 - DNA, 320 bp, Zea mays
atccgcgtccactttttccatagaagaggtggacagcagagtcctccgagtagatagatcctctgctcctgggttacaggacgtagttttcgctcgaagcgctggaggttgcgcttcttcctgcttcgctccgggtatctcggagattgctgaagaaggctctctctccggcagactcgcgatgcgatgtaaagactcctcttcgtctgctacggatgaaatggttcaaagcagaacacgtacccgaggccgaggatgatcttatgctatatagtgatgtgcattgagctagcttggatcagtgacacaccttgtacctg

SEQ ID NO: 38566 - DNA, 289 bp, Zea mays
acgcatgccaggcatgaaagcaggttggagcccatcatccacacaaaaacatcatgacgaccgacaggccgcttgagctactccacatggacctattcggcccgattgcttacataaacataggcgggagtaaagattgtcttgtatttgtggatgattattctcgcttcacttgggtattctttttacaggaagaatgtcaaacccaaaagaccttaaagggattcttgagacgggctcaaaatgagttcggcttaaggatcaagaaatatagaagtgacaacgggac

SEQ ID NO: 38567 - DNA, 463 bp, Zea mays
  unsure (1)..(463): unsure at all n locations
agctngcatgaagtattgacataatgaatatattattatcttgtaataagcacataatattttgtaggatgagcataacaccatgactggatgtgaacatgcgttaacaataataacaactggtaaccaggtacatattacaataatattgttcatttgtctaaaatgaaaatatatatttatgttgcatgtaaatggtgatgtatttgggttgggctctaaaggaggacaacatgagaatttacatgagggtggtgnacaagttcttcgtgtcacgtagcgcatgncaaatggaacatattgctgcatctcagaactaaaaggtgagcatgataatgatttactggatgtataatatatgtaatatgcgatactanatataactttattatatgcgaggtgaatttaatgggatgtataatatagatgccgatcggcaagacaaaggacggacatcaaaatc

SEQ ID NO: 38568 - DNA, 457 bp, Zea mays
  unsure (1)..(457): unsure at all n locations
cttcagcgacctatgatactaagcttgccaccttgtccggcccttgcattancaacatgcttgtttctctgtgtcccagggaattagagtggaaaagggtaggggttgagtcattacctcaagaatctatgtgtcgcctatggatgtggtcgaagagctaccccgcgcctatgcagttgctttctctacatgtttcttcaaaggagtggccctgttcgaaggtgactcttcgtcactaatcatttggtatccttggcttcttctttatcagatttagtttggttctcctttgaggcctttntgctagatctctntgtgctcctttttcttttctccccaacttcgatgttatgcatcggcttcgagtaatctaggttttcaaacccaatagcattcatcactctgttcagccttagtttaccttggtccctaaaggttctatcatagcttcatgtta

SEQ ID NO: 38569 - DNA, 331 bp, Zea mays
  unsure (1)..(331): unsure at all n locations
ctatgttatggattgctgttgagtcattccatttttcttcggcccttctggcagcttcttaacttccatgaatagcgatgggtccttgatccgaangtatcttcatgcatagataagcaggatgaagaattgcttcgaaagcattgagggtgccacgaccaataattgcattgtaagggtattccatgtcaacgatgtcaaacacaacttgctcagtttctggtgtgttgatgaacccgaaagtcactgacatggtgatcttgcctagtgctacaatttgtcttccttcgtagccacagagaggatgtgtagcatcatgaatattatcttc

SEQ ID NO: 38570 - DNA, 467 bp, Zea mays
  unsure (1)..(467): unsure at all n locations
agcttctccttctcttctcgcctttactctttcatacttttacttcttactactncnctgcttctcttggcgatggatccggatgatcgtccgcttcttcgagctcatgacttagacccatcccctggtttggaatttcaaaaggaagtgctccgcaggtttgcttcttcagtgcatcatccttctgcttgtgttgatggctcgtttcttttgattgcggtctttcaaagatttacttttatgccccgtttgtttcgttggaattgaattccattttaataattataattcagaccaaactaattaagtttatataattatatatgtaatatatctggacattatcctaaatcatataaggggagatagtatatactatcacttatgtatagcgaagcacgtagaagagtgtgctataagttgtgcatcggnaaataacatgtnaattatagaatcaattccatctc

SEQ ID NO: 38571 - DNA, 378 bp, Zea mays
  unsure (1)..(378): unsure at all n locations
tctgcaatatacacgaattatcatacgaaacanaaccttgtggtattgaacagtatcataataattttggctgctacagtttcgtttctcggtccgggtcaagctgtcccgtgccaacctttcggaagagatggcccggcgactggatgacagaatgattntatgtgaagaatgacctgtcagtacgagaagatatcaaaggtataattatgcgccctatttggcaaagcttcggccttcggagaccgaaggttgaaatgaatgaagctgccgaagaatgccagagggccttcggcgttatctgttcttttattggaacgagagatttagtacaagagcatattgccttcatggtatggccgctcgcggagaaatggg

SEQ ID NO: 38572 - DNA, 155 bp, Zea mays
  unsure (1)..(155): unsure at all n locations
aacatacccccaacaatggnggacttaatttcttgtgttggtttccagaatatgtagataaaaatgacaatatacacccggaccttcaacaattatacctatgttggtgcatctcatatcgcacgaagccatgtatttgctttgtttatttaaaa

SEQ ID NO: 38573 - DNA, 454 bp, Zea mays
tctggaatgaatcgacggtaataaccagctagcccattgttatctttgacttgatgtacaagtggtgggggtttccactccaaaatatccttgactgtgctggaatccaccgcaatccccttggcagataatacatgtcccagaaattgaatttcttccagccagaacgcgcatttactgaacttggcatataactgatgttctctcaagcgcgttaatacaatctgcaagtgctgagcatgctcctcttcatccttggagtatattaaaatatcgtcgatgaagaccaccacaaacttgtccaactcgggcataaataccgagttcatcagatatgtgaagtgggtaggagcattcgtcagtccgaaagacataaccatatattcatatagtccataccgcgtggtgaatgcggtctttggtatatcctcgtgcctgatacggatctgatgat

SEQ ID NO: 38574 - DNA, 241 bp, Zea mays
ccagcattcccaacagcaacgtgacttcagggaggaagtcgaagctcgtacagtcaacaacattgtaccagagtcaaagaacatatattgagaaatattccacttttaaagcactcttatgggttatggcactttattttctatatgagaaacaaataatgaagagcttaatttcaatttcctggtataattctgcatgcaccagaatgaaatatatcttcttcatagatttatgaagctc

SEQ ID NO: 38575 - DNA, 334 bp, Zea mays
  unsure (1)..(334): unsure at all n locations
taagctaggataaatctcccgacataaccganatagacacatggggtgtctcatttcntaccctctatttaccctgtgtccctcgcagcttcactccctcgaccacggcacgttcgcgcagcgatgaagttctggattgggcgctcggcactatcaatgggcgagagggataacgagccatcggattgtggccttatatatgcttggtgtggcgcccgcgatttgtggcctatcggcaacctggatcgagcggaggaagagaagctactgttcatggtgtcccacacgtcaacgacgtcagggacaaacaggcatgcggtattaccctgcccgc

SEQ ID NO: 38576 - DNA, 456 bp, Zea mays
  unsure (1)..(456): unsure at all n locations
ctgcagcttacacctctgaactagctcagctgcatcattcttcgtcgtcggncaatanaatcctgacctgaaaacctttccgactagtggtctggatgctgcatgtatcccacattgccctgcatggacctcctccagaagtttgtttccagtggacgggagaatgcacttcatgaggatgcctgacgcgccccttctgtataattcttccncaatgagtgtatagtgagccgactggctggcaatgcgctctgccgagtttntgtcatctggctcttcttcattctttatatacttaataatcgaccggctccagtcatcagatattgactcgggttgatctatgatgtngcactcttcntgttgatctattgagatactcggctgaagaatntcttgcacgaagacnccgggtgggacctgagttcgactggatccgagcttggatagtacatc

SEQ ID NO: 38577 - DNA, 467 bp, Zea mays
  unsure (1)..(467): unsure at all n locations
cgagagcatccccacccttatcacattcaatgtgttttcttcatgcggaagttcaaggtaacaaaaacagcaagggtgcatgtttctattggctcttaccatgactttgctggtttcgatgtggtgactatggatgcttgctctcttttactgtgacgtccttgggagtttgatactgatgctattcaccatggtagatctaataaatatacttttatgcacaagggaaagaaaattgtgtgcttcctatgactcctactgaaattgtccactttgaacatgagaaagagactaatgctaagcaaaaaggtgttgtgaactctgaaaatcagcaacctattatagtaaaaactcctactttgctagccactagatctgatcttgatgagttacatgcctctattggactttgctatgccttatngtgcaaaaatgctntctattccatntgatgatagtctattact

SEQ ID NO: 38578 - DNA, 421 bp, Zea mays
  unsure (1)..(421): unsure at all n locations
gatatcagccgctaccgaagacagtatatctgtcggtagttattctattctaatttcaagggaaaaacttttcttcagccttttcattggtntaatgacgaaggtgttttctgacgaaggggtgttttgcacagagtatgctattaagtaaggctttgaggatgcaacaggaccttgaagataaaaaacatgaggttataattgaaggtttagagagcanaaaaagatcatgcaactactcttgaaaagaaagatttcgaacttcaaactgtggagggtttactggcagaggctgaagccaaaattgaaagattgaatagtgaactctccctacagtcaaaaagctttgagcaagaagaaaaagatttganacanaactcgaagcccaagcttgaaaaagttcanatatacagaaatcact

SEQ ID NO: 38579 - DNA, 471 bp, Zea mays
  unsure (1)..(471): unsure at all n locations
taagcttagatacagntaagattatattcttatgctaaacaatgtggtattgctgtccttngntntgaaatccctactactattaagaaagcattgtggggttacaggggttcaaacatgcatgcatgaagttttccttttaaatcattntacaaaatgacataaaccatacataaattgatagttgtgaaacaacagacttcagttaaatctgaaaaaaaaaactattttaacagaaagtctgggtggtgtagttgtgtatcacgtcatacatgtatttttgttatatttttgcattattttcttcttctgctcgacgagaaaaaactgaacagagaacactatctatctatgtatggaacacaaacactgatcctataatgcagtattataggaattatgtctacagatgtgctactttcagagaacagccaactatcagagggaatatgtcatgtgttnggtcaaatc

SEQ ID NO: 38580 - DNA, 454 bp, Zea mays
  unsure (1)..(454): unsure at all n locations
aatgtccaatagcactttggacatttgagttataaaataaattaaacaagtgtttgggagtcactggtttgtcaaatgatttgtaaaagacatcggctccggtagagaagctgctcttttaaaagagccgctggtggagccagttttagaggagccagagcccttccaaacagggccttagagntaagtagctatactttaaagntacaaaatntctaaaaatggttgacttacagatgtaacatccaaaatnttatatggggatcgatatatagttttctcanaaaaaaatattggagtaaaaacataantaataatatattcctttctcgtatattacctaaagtnataaatagtatatcacaagctcagagcttaaattagatcanaactggaactaagatcaagtaaaatatggaacatagtanataacctttcattattatataattat

SEQ ID NO: 38581 - DNA, 459 bp, Zea mays
  unsure (1)..(459): unsure at all n locations
atatcaatctatttctcccacaaactaaaaaaaaaatccctagcaaatattgatctatatctagcagtgtcatttgtgatattcttagctcaaatatcaaattatttacaatcgcttgcgtgtaggctgtgggcggcaaagctggtcgctagtttgagccctaagagtgagggttactatatgcaccgaggagatgggccctgagaagtggnggttcanggcagtccaccctcctcagacacggtcccgaacattagtgtcgtggtatggtagtgtcgagcgccctgcgcggtagtgctactcgataaataccactcggaatgagggtaaaacgtgtgagcgtaaagatagagataatccaagagtgttctagaagtttgagcactctaagatcatagacgaagaatcggagtagataactcgaactcgaaagggagtttctcaagaatggtacaatat

SEQ ID NO: 38582 - DNA, 326 bp, Zea mays
  unsure (1)..(326): unsure at all n locations
gcttctncttgtcctcatcaaccttgacatataattcattctgatttcagcctgccaggccattgcttcggtagctaattacaggaaactctgcgggtatccggcaggcaaanatgtagcaaccgaaagtttcatgaagcccatcttttctggcctttggttgataatgcaattcatgaactcgacagaaactgtcagcaaaaggctccactgcttggcttcggagggcccaaatataaacgctaagcctaacgataagcgtaggagttaactggtgaaggtagatgccaaacctcttcaatatctccgcaacaatctcgtgaaca

SEQ ID NO: 38583 - DNA, 402 bp, Zea mays
  unsure (1)..(402): unsure at all n locations
ctaagctanactcagggctatgaccatgcttaacttctcctctttttctatcggacttgaataaaaccactcactcttccagccagttggccacttggtgcgatagctgaggactggagccttcgtatccttgcgatacgcgaagttataacagccaaaattntcatgtagctcgtcttctctggccttcgtttggtaatgcagctcatgcactcggcaaatagcttcaacattngggtccatcccttggcttcgaatggcccagatgaagatgctgatcctaacgatggcgttaggagtcagctgatgaagaataatctcanaattatccaaaacttccncaatcatctcgttcaagggaaaccgcgatcctgctctgaaaaagcttttgaaaaccactac

SEQ ID NO: 38584 - DNA, 380 bp, Zea mays
ttgcgcgcgccatggaagagctggagatggccggcggccgtcgctcatgttactggacgcagaactcggacaggcgggcacgctatggaagtcagcatggcggccaatgcgagggaggagctcggcgcgcagagctccacggcgcagtggccatggccgagcacatgggcgagatccgagtataggatcaccgagctggatagcgagcatggagggcacgccatgggagtcgcgcgggcctggacaaaatccaagcagggagggagccgccatggtgagaagatgagggagctgggcgcgagctctgtgcggatctagccctcctcggccatgcgcgacaaccatggcgagcatagaagtgcacagaatgtagagagagt

SEQ ID NO: 38585 - DNA, 456 bp, Zea mays
  unsure (1)..(456): unsure at all n locations
atcctcttagtcacctgcggcatcaagcttctaaaggaaacacgtgaaggtttatctttgtgcaattcgaaaaggatagaccttgtgcagcttgtcaagcaggcaaacaggtgggaggctctcatcacaccaaaaatgtgatgaccacatcaagacccttggagatgcttcatatggacctcttcggacccgtcgcctatctaagcataggaggaagtaagtatggtcttgttatgggtgatgatttttcccgcttcacttgagtattctttttgcaggataaatctgaaacccaagggaccctcaagcgcttcctcaggagagctcacaatgagtttgagctcaaggtgaagaagatacagagcgacaacgggtccgaattcaagaatcttcaaatggaggagtatctngaggaggaaggaatcaagcacgagttctctgctccctacacaccac

SEQ ID NO: 38586 - DNA, 371 bp, Zea mays
  unsure (1)..(371): unsure at all n locations
tgtggacgagacaactaactctcatgcacatgtttattctgatgagtgcctaatgtttctcggggtaactggcttatgttgggttttttttcaattctatgtctggacgctgatgaccggngacgccgaggaccatggagacgacgaggtttcggggctgcgtgtggcggccgatgcgtgggcgacatttctgaagcaacgaggcttgcgtgatggggcgagggggagggaggcagaatcacggtgcacagatggtctacgttagagtcttgtagagaagtagagaatatcgtaatattatatattctcgttgaacagttgacataagttatttaagtatctatgtntctgttgaacgcacggcacttcat

SEQ ID NO: 38587 - DNA, 285 bp, Zea mays
gcatgaccgccgtattgccaccatacgaagatatgattgcttcatagctcatcaagaattgcttcgggtctgaatgaacgtcgtacatacggagcttgaaagggaaatgtgcccttgggccatttctaagtattctggtggcttagtgtccaacacatgtgactaagtgtataatggtggacatagtacaaatcaaggataaaggtatgtttctcagacttatgacattgtgttatggactaatgtattgtggttaagtgctggaaacaggaataatccaattgg

SEQ ID NO: 38588 - DNA, 422 bp, Zea mays
  unsure (1)..(422): unsure at all n locations
ctctcagcgccttgaactcagctgggccatggtaggcagaagtccctgaagtcctggctgtttttctgtttgccgttgtcaactgtgagctcggacgggactccgaatcagcatacaatgctttgccagaagaacttctatgcagtcttcgacgttattgtggatactgccctagcatcgatcgacttggtgaagtattcgacggcgacgaatgtgaacttgaggttntcttgaaccgtatgtagtggcccgattatatccagcccccaacgttgaagtggccatgtgtgggcaatcagcttggtgaactgcgaatggttgcccgagcgaggagaaaacttctggcaagcttcgcacgacctcgtgactcaattcttggcgcagattatagcgggacagtaaaatccttgatggatcacatt

SEQ ID NO: 38589 - DNA, 394 bp, Zea mays
atcctttagtcacctgcggcatgcaagcttctatagggagaacacatatcgggactaacatatggttcatttgagaaagacagagattgtagcgcatgtcaagcagggaagcaagttggtgttcatcatccacacaagaacatcatgacgactgacaggccactcgagctcctacacatggatcttttcggcccgatagcttacataagcatcggcgggagtaagtactgtctagttattgtggatgattattctcgcttcacttgggtgttctttttgcaggaaaaatcacaaacccaagagactttatagggattattgagatgggctcaaaatgagctcggcttaaggatcaaaaagattagaagcgacaacgggacggagttcagaactc

SEQ ID NO: 38590 - DNA, 382 bp, Zea mays
  unsure (1)..(382): unsure at all n locations
ngaagccatggtaagtagcataggccaataatatacgaattgactctatcctatctacgggtgcataggtttcaccgaaatccaagccttcgacttgggagtatcccttggccacaaatcgggcttggtttcttgtcaccacaccatgctcatcttgcttgttgcagaaaacccacttggttcctacaacattttgattatgacgtggaaccaaatgccatacctcattcctaatgaagttgttaagctcctcttgcatcgccaccacccaatctgaatcttgaagtgcttcctttaccctttgtggctcaatagaggaaacaaaagagtaatgctcacaaaaatgtgcaacacgagatctagtggttacccctttatgaat

SEQ ID NO: 38591 - DNA, 348 bp, Zea mays
  unsure (1)..(348): unsure at all n locations
acatgagctaagcggcgatgccactttcattccatgctagtcttagctattaagcatgcatctagaccggcttcttcttttgcaaaatcaactaaataaagtttgccgtctagtacacccttaaatgctagtgaaccatcactccttctaaagacagacacatctacatttgtatatagacagttatatcccatattgcacaattgactaaccgatagcaaattatatccaagagactctactaataacacattagagatagagtgctcatttgaaattgcaatttacctaacccttttaccttgccttgantcccatcaccgaatataattgaatcttgggaaatct

SEQ ID NO: 38592 - DNA, 415 bp, Zea mays
  unsure (1)..(415): unsure at all n locations
caagctgcacacaagcaggtccggcgcattctctggtctgtgtctgggttctagatcacccaggtgggcctcttcttcaggctcacgttctgggagttctcctgagacgttatggagcccatcacgttcttcacgaccacgacaggcctgggtgtgggatacgcatacttcctcatcacatcaagggacccgacctaccgagacttcatggagaggatgtttgagtctcggcagaggaagctgatccagaggcagaacttctacctggacaagtacctcgagctccagaggcgctgcaaggatcccctggagaaggcctgcggcacgaccaaccctgacacggttcatcttcatgagctctncgttcacaaatgacaaagaaatcaccattngcttactactcacttcattctat

SEQ ID NO: 38593 - DNA, 403 bp, Zea mays
caacacatgccagctcatcttcttcttaccataccagtaacttggcctttcgcatgctggggactggatatgattggacctttcacaaaagctcaaggaggatatacccatgtattggtggcgatggacaaattcactatatggatagagttcaagcccattgcttctttaacctctgccaaggctgtggaattcatacaagacataatatttagattcgggataccaaacaacatcatcaccgacttatggtctaacttcaccagttcagaattcttcgacttctgcgagcaaaagagcattcagatcaagtacgcatctgtagcacatacaatagccaacgggcatgtcgagcgagccaacaggatgatattggatgcactcatgaaaagggtcttcgata

SEQ ID NO: 38594 - DNA, 384 bp, Zea mays
atgaagggcgagactcgatataaaatctcgtgttctttttcgtccaaggacgcaggaagttttgctccaaacgtctatggatgcaacatacacgaaagcaacctgaaccgctaataaaagcgaaaactcaaaacgtcctaaggaagcaagctaaccgctaagaaaaggaaaactccaagcgtcctagggaagcaactacacgaaagcagcgctgaacaaaaattggtgggaatgtggatcttcgaacaaagcatctacaaacaacatatcacatatttgatacataacatcatacatatgtgataggcaaaaagggaccatattgactcgaagagcttgaagaggaaatggcaagcacaagaacacaactcattcgagatactc

SEQ ID NO: 38595 - DNA, 267 bp, Zea mays
ctgagctgcagctggacaacagtcaaaggaaattttttttgtcaccaaaccgcttatggagattacaaccaaggctattggactcatgccaaggcagaaaacctgatagtctgtcaaataaatgtttgttggcactatgatcttggggtacaggagtatgacctcctcatgtgatctcttaaccaaagcaggttaaaatttgagacagcaaggctaaagatgaaaatccatgcgagtttaaagaaaccaaggtgtaccgttggaaag

SEQ ID NO: 38596 - DNA, 325 bp, Zea mays
cgacttatgccagtatgcagggtaccattctgtttctgatgagaagaagagggatcgcttccgtagggtctcaataccaagctgcgggaacgactcaacactgtccgggctgatagcttcaatgagttggtcaatatggccatctcccaggaggattgcattgtagctcaccgggcagagaagaagagaaaggcaccaatggcagcaccatccgctcaggctcagaggttccggattgtttctcacaaccagagcaggggttttcagcagcaggcaggcagatgggtgatcaggccacctcagcagcagcagccggcacccaatc

SEQ ID NO: 38597 - DNA, 338 bp, Zea mays
  unsure (1)..(338): unsure at all n locations
atcatggcctcgatgacaatattattgggcaccgattgtgcctgtgccctcatacgcaagaaccttctgacatatgcctgaatgtattcttcgtggtcctgagtgcactggaacagagcctgatcagtgaccggcttcgactgatatccttgaaagctggttaacaacaaatccttcagcttctgccatgaagtgatcgttcctggtcgaagggaagaataccaagtttgagcaacacttctgacagccataacgaaagaatttgccatgactgaagcattgccaccatacgaagacattgttgcttcgtanctcatcaaaaactgcttcggatcttg

SEQ ID NO: 38598 - DNA, 385 bp, Zea mays
  unsure (1)..(385): unsure at all n locations
tcgagttcagctctatcaaaatctactaagtatagccgaccctctaatactcccttaaatgctattgaatcatcacttcttctaaagacagtgacacctacatcccgataaagacagctgtaacccattcttcataattgcgaaactgagagcatgttgtatctaaagaatctacaaaanaacacttgaaatggaatggcaggtgatatagtaaatttacccaatccttngaccaaaccctgattaccatccacgaatgtgatangctcgttgagatctcgatttttctcataggaagagaacatcttcttctaccctgtcatatggtntgtgcacacgctgtcgatgatcaacttgagcgccggatgcataactacaaacaatt

SEQ ID NO: 38599 - DNA, 361 bp, Zea mays
  unsure (1)..(361): unsure at all n locations
ccaaggcgaggtacttggtcgaatgtaacctttctctgacagctcatcaatctgcttcttaagctcaaccaactctggtccagatattctgtaagctctcttaaagatgggggcggttccaagaagaagctttatgagacactcaactttncgctctggtggcatacccggtaagtcctctggaacacatctggaactcagaccaaccttgtactctcattgggtctgtttactgcttcaacagtatctgaaacacttctttcttggctagcgggatactagtaccattctctctatgggacacactcgaggtcttatacaatgtactgctgactattaccattatctagatacttattct

SEQ ID NO: 38600 - DNA, 336 bp, Zea mays
ttaagcgccgtcttgaatattttgatgatgagggccatctcttcatcattaagtacggccgcctcatattgtgccaccttgctaagtagcgcctccttgcttctttgtgccctgagagcatagggttgcggctcgttgatcggaccattcaaagcgtcgtccacgtacctcgcctacttgatcatcatccttccgctcacgaattctcaaagacttcttcgggcgacattttggtgtaactgggattctcacgaatattattcaacaaatgaggatcaagaacggtaaaggaccttatcatcagtcggacgacgtcgtggtccgtccatcgcgtgc

SEQ ID NO: 38601 - DNA, 365 bp, Zea mays
  unsure (1)..(365): unsure at all n locations
gatcctcatagtcacctgcngcatgcgagcttgtgccacctctgtgaagctgcccgagcatgttatcggagtttccttcgccggagaagccagtccgcgctcgccggagctctcacccncgccggagcacgtggaccgtgtaagccactccaccatccttcgattccttgtgcacacagtcngtgcgtgaccccgtgatgctcaccgtgccctcggattgcgccagttcgccgtagtttggccggtacactcgccgccgacgaggacacccgcctgcacgcgtggaccgggcgatttccggcacctccgacgccgagccgtacctcgacgtgaccgccagagtctccccaagccgaccccaccct

SEQ ID NO: 38602 - DNA, 352 bp, Zea mays
gacgtgaaaagtgccttcctcaatggacctttctttgtttatgtctatgttgagcaacctcccggctttgaagacagtaagtatcctaaccatgtctataaactctcttatgcgccttatgggctttatcaagccccaatagcatggtatgaatgccttatggattttcttatcgcaaatggattcaaagtcggaaaggccgatcctacactctttactaaaactctctgaaatgacttatttgtatgccaaatctatgttgatgatattatatttgggtccactaatgagtctacttgtgaagagtttagtaggattatgacacagaagttcgagatgtctatgatggggg

SEQ ID NO: 38603 - DNA, 263 bp, Zea mays
gactatgggcgagctccgcgagtttgcacggtgctaggatgcacgtgaagacgtcggctctggacgggcttatatacgggcacggcgggcactgcggcgctgcgccggggttccgcacgcgtgcttagcgcccccgaggcagccggtcaacactggagctgctttgcatggtcaacggggattgacacctacgtgcatatttggaaaacactggacggtctttcctgtcatatctacctttgaggagtccagcaaatacgtcg

SEQ ID NO: 38604 - DNA, 516 bp, Zea mays
  unsure (1)..(516): unsure at all n locations
agcttntaaagggagaacacgtgatatgtctgactctctttcaattcgaaaaagatagaccttgtgcagcttgtcaggcaagttaacaagtgggatgagcgcatcacagcaagaatgtgatgaccacatcaagacccctggagctgctacacatggacctcttcggacccgtcgcctatttaagcataggaggaagtaagtatggtctatttattgttgatgactnttcccgcttcacttgggtattcttcttgcaggataaacctgaaacccaagggaccctcaagcgcttcctaaggagagctcaatatgaggttgagctcaaggtgaagaagataaagagcgacaacgggtccgagatcaagaaccttcatgtggaggagttccttgaggaggaatggatcangcacgagttctccgctccctacacanctcagcaaaatggtgtgcagagatgaaaacaggacgctatcgatatgcgaggcgatgcttgagagttaagaccctcagtgtttt

SEQ ID NO: 38605 - DNA, 369 bp, Zea mays
  unsure (1)..(369): unsure at all n locations
ctaagctgtgcgtctaaggtacctagcctttgcctcatggaggacttcgctgacatattataccggcttctggatggntcggatccctgtggttggtctcgagtcctcaaactcctggccttctgtcaacatcgtggtggtcggaccaccaccttctcctangggatctttctaagtcccctatggatgttgtgccgtcctttcagcaaccatcaccatgctcaccacctctgtagccgctgtaatgtatacaacggctcccctggctctgaagctaccggtattggtagggacacaaggtgctgcttcaattcttgaaaggctcgttttgtctcttcggtccaagagaatggcccggacttccacaat

SEQ ID NO: 38606 - DNA, 484 bp, Zea mays
  unsure (1)..(484): unsure at all n locations
tagtagcgttgtctacttcacacgccttgacctnncaattcactgttcagacatgggttgaacactctcgaccacctccttncaacatnctacctacttttaggctacctagagtctaaatttcattattttactatctctttacactagctgatggcagataatattacactaatgatctggataattatgatattaactggtaaccctaaatgaaaaagtactcatgtcattcnttattaaatgggtcgttatctatgaaaccaaatacctcactggtaactaaacttgacgatagcaaaatagctcttcaacagactagccatttaacttgacaagctatccggctctctanatngactccctcactcagccaaattgtgtagcanatctcgctagccaagctaacttgtatgtnggagagtctggtggaaacgagatgtatattttagagttaatctttatagagtgatanataaagagt

SEQ ID NO: 38607 - DNA, 316 bp, Zea mays
  unsure (1)..(316): unsure at all n locations
cagaacgatatccataaaggatatgatgaatctgtgatagattcgaaaatttcagatcattaatgaccatcagttatgaattgtcattttccacctagtatggttggagtcaggaagtttctgccgcctctgacctgtgattaactggcatgactcgattgacaagttctcctatggttntagtatgtgggaatccatgaaagatttaccatgcgtacattgngtatggtcccaatctcaccaccgcagcgtacatgtatgggcacacagaaagctggggatctatgtgagatattattttctcgcgatcattaag

SEQ ID NO: 38608 - DNA, 470 bp, Zea mays
tactaagcttatacaggagaatagaagcaagagctcgaccatatgtcataatattatgtgttgtttacaagcgtggggtctgttccacattgctcaagtgtttatccagatccgagggtatataattaatgaatgaaatacatgcaagcctgtgtggatctcacattggatctatgcccttgcttgggaaaagttttcgccaaggattttattggccaaaggcagcttcggatgcagcggatctagtccaaaagtgcgaatgttgccataaatgtgcaaaagatcaaatacaaccttcgtctttaacccaattaatacaacccacttggccgttgcaaatgtggtgcctcgattaactaggcccattaccaccagcgcatggaaacctaagatatgtaatagtggcagtggagtattgttccaagtggattgatgcgaaacccttatccacaataacttcatttactatt

SEQ ID NO: 38609 - DNA, 150 bp, Zea mays
  unsure (1)..(150): unsure at all n locations
tgggttgagactcgtggagaggaccattcaacgcgtcgtcgacgtatctcgcctccttgatcatcatccgcccgctcacgaattttcaaagtacttctcgggcgtcatcatcgtgtacctgngattctcacgaatattggtcacgagatg

SEQ ID NO: 38610 - DNA, 460 bp, Zea mays
tctaaagggagaacacattgtgggactaacaaacgttcattgggataatgactggatttgtagcgcatgtcacgcagggaagcaagttggtgtttatcatccacacaagaacatcatgacgactgacaggccactcgagctcctacacatggatctattcggcttgattgcttacataagcatcggcgggagtaagtactgtctatgtattgcggatgactattctcgcttcacttgggtgttctttttgcaggaaaaatctcatacccaagagaccttaaagggattcttgagatgggctcacaatgagttcggcttaaggatcaagaaaataagaagcgactatggaacggagttcaagaactctcaaatcgaagggcttcttgaggaggagggcatcaagcatgagttctcttctccctacacgccacaacaaaatggtgtagtggagaggaagaat

SEQ ID NO: 38611 - DNA, 267 bp, Zea mays
  unsure (1)..(267): unsure at all n locations
cttgagtctcggaattttgtattgatatttgcacacatagctcatttatgtacctctgatcatatctctttcatgtgccatgaccaaagggagttcaaggcaactcttatgctaagtcatagatcgaaagggaaatggagtcctctgcgaagacaaggctttcacttcactccatcgtattatttacccttcggcgtcactccacatcgctctccactttggtataatccctcactcatatanttgttgccaagggggggagaatta

SEQ ID NO: 38612 - DNA, 492 bp, Zea mays
  unsure (1)..(492): unsure at all n locations
cgatggggagcctacttgatgtagactcttctttcttctcttatgtcgctttgaatgcgacgggttgcacctcgggtgtggaggtgccgccttgcttcaagttgacgatttgtttggagcctttgatcatcaattcaaagctcacaaactttcctataacctcctcaggagacattagcttatatctaggatcaccacgtattaactgaacttgcgtatgatngcgaanaacgagtgatcttagaataaccttgaccatntcatggtcatgccatttggtgctcccgaggttgcgcacttgattcaccaatgtcttgagcacggtgtacatggcttgtggctcctcttcttggttgaagacaaatcgactgagctcttcctcgatcgtctcccttttggtgatcttggtcacctcgtacccttcgtgtgcggtcttgaggacgtcccaaatttgtttggcggtctctaacccatgcacttttgtatactcct

SEQ ID NO: 38613 - DNA, 364 bp, Zea mays
  unsure (1)..(364): unsure at all n locations
aattccattgacatttataagctaagtgatgcgaatattgtgaggaagaatatctccctactaccacaacaaagatataagagcatcatcactattctcacaacatggaggacttgagtacaataaccccgaccataatgattatgaaaaatcgcggcctttgggatgtcgcgaaaaatgtgtcaaggagaggagccaacttcctcaagaacatatgctttngcatgtgatgaaagggaaaggaaaaagaaggttctcactccaagttcctcaagtgaagaagaggangaagaagaaagggatgacgatgaagaatatcaaccatcaacatcatccttcaaagatgaagaaacaatccgacgtg

SEQ ID NO: 38614 - DNA, 386 bp, Zea mays
gaactaactcggctgcatcattctttgctgttggtctattaatcctgacctaaagaccttaccgactagtgttctggagtctgcatgtattccacattgcccagcatggacctcctccagaagttgcttcccagtagatgggagaatgcacttcatgaggacgcctgatgcaccccttctgtacaatgtctccccaatgagtgtgtattgagccaactgtctggcaatgcgctcggctgaattcttgtcatctggatcttcttcattctttatatacttgatgattggccttctccagtcatcagagtctgactcgggttgatctataatgttgcactcttctggttgatctattgagatactcggttgtagtatttcttgcacaa

SEQ ID NO: 38615 - DNA, 362 bp, Zea mays
  unsure (1)..(362): unsure at all n locations
atcttaagtcacctgcggctgcagctttgcaaatgctgaattgtatatgagactaaccctgggcaaagacaatatcataacagntgtggctggtatagtttcgtcgctcgctctgactcgagttgttccgtgccaaccttccggaaaagatggcctatggactggatgaaggaatggttttacgtgataaacgatttaaaggcacgagaagacatcaaagatattatcatgcgtcctatctggcagcgcttcggccttatgaagtcgaaggtggaaatngatgatgcagccgaagaatgccaaaaggccttcgacatagtctgctctttcatcggaacgagggatntagtccaagagcacat

SEQ ID NO: 38616 - DNA, 362 bp, Zea mays
tgtgtattgcgatgcatcacaccttggacttggatgtgtgctaatgcaagaatgaaaagtgatagcttatgcttcaggacaattgatgaagcatgataagaattatcctacgcatgatttggatctagctgccgcagtgcatgctttgaagatttggaggcactatatgattggaaacatgtgcaaaatcttcacggatcacaaaagcttgacatatatattcactcggaaagaactcaacctaagtcagagaatatggcttgagttgattatggactatgatttggagatacaatatgaccacggaatagcaaatgtagtagctgatgctgtgatccataatgggcaatgtgaacaacatc

SEQ ID NO: 38617 - DNA, 283 bp, Zea mays
  unsure (1)..(283): unsure at all n locations
cttaaaggaaaatgctcaaaatgttcgcaacatgctttcataagtgcataaactctcttgagcatcactcatatactatgacacaatgcacttcactttctctatgatatagacttgntctcattaacctaattatgtgcacctggcatttaaggccaaaatatgtattcctctcaaggcacatatgtanggggagaaatctatattatatagaactatgatcatgctctaatgacatatctcttgatcatatctctttcattgttgtacaaatgcatatatc

SEQ ID NO: 38618 - DNA, 362 bp, Zea mays
  unsure (1)..(362): unsure at all n locations
gacgcacaatatggttgtggatcagatacctggtagtatgtatgcggtgaagaataacaccatttcttaccgaccctgaacagtacgagatgattatggagtgttatagactgtttgcttgatcaaaattgtttatgtcaaatatttctgctgagaagaataaaaacaggggaaactgtgccataatttgtaaaaatctactttctagactctgtgttcaaatcacaagaatctaatgcgaatacattaccttttcagaagcattaatatcctatacaagtggatatgtcatctagcattttcagagctataacatagnctttctagaagcattaatatcctatagtgtgagtatgacatct

SEQ ID NO: 38619 - DNA, 497 bp, Zea mays
  unsure (1)..(497): unsure at all n locations
gtgatgacttgattcaagaagagcaaacttgtctacatgatgaattgactgaaaaagttgaagtcctgactttatacaaccaaaaattgaagaattacttgactgatgcaactactagaggaatagttgctattgagaacaatgatttcaacaatgagttggcagtggataatcaaaggcttaagaatgaggtcaagaaactaaaaagtgaaaatgaacatcttgcaacaagtgtgcaaaagttcaacaagggtcaatacctccaaaatgagctgcttatgaacactgttatgataaataacaagagtggtattggatacaatggctttgtgcaaaataaagctatcactcaatacaagccaaagcagactcacaagcctatcaaatggcttgagtgtggaaatgaaggtcattttgcccacaactgcaaagctaaaccaccaactcccttgcctaagcactcaagaccattngctttcaatgctcacttatgtcta

SEQ ID NO: 38620 - DNA, 389 bp, Zea mays
ctgctgagtatcgaaactgtcacacatgtttctatatgataaattcaaattcatcttaaatatatgttaggatcaagtcgcacatatatgataactcattggacaaaaatcaatgtcatatatttattagaccaactccagcaacactccccatcccactccgcattcgcattttgcacggtctgaggcactattgcgctctccagcaggctccgcatacgtctccgcaaaatagacgtcgtgtgcctgcactccccatttacacgctttctctctcctctccgcagctctctgcgtgcgcgcgcggttgctcgcgggccccatgtgtcatatactgcatgcagaatgggatggggagtgttgctggaaacggagacggataccgagag

SEQ ID NO: 38621 - DNA, 313 bp, Zea mays
tgagcgcatgtcatgcaggaaagcaagttggagcccatcatccacacaagaacatcatgacgaccaacaggccgcttgagctactacacatggatctattcggcccgattgcttacataagcatcggcgggagtaagtattggcttggaatagtggatgattattcacgcttcacttgggtattctttttacaggaaaaatctcaaacccaagagaccttaaagggattcttgagacgggctcaaaatgagttcggcttaaggatcaagaaaagtagaagcgacacgggacgaagttcaagaactctcaaatc

SEQ ID NO: 38622 - DNA, 353 bp, Zea mays
  unsure (1)..(353): unsure at all n locations
tttcaaccgaacttttctatcatgccattntattggttcggcttgatatttagtgatattttccacagcctgaagtctggtcccttctatagtatcctttgccatagaataattagcttcgtcttctattgaagctactgttcttatcgaccccgctttatcctcttcagggggtatagcttcgtcaccaaataataacttgaatggtggttgtggggacttggtctcaaatgctaagagttaagaacaaggcaacatanaaagtgttaagtgttaaagtccttcgtccttcgaagcattatgtccccttcggaaataatgagtttcggacgaaggtcataagagacatacct

SEQ ID NO: 38623 - DNA, 422 bp, Zea mays
  unsure (1)..(422): unsure at all n locations
cgacatcagccgctaccgacgacagcatatcgtcggttgtttgttctattctaatttcaaggtaaaatttttccttcggctcttcattttcttacgatgaaggtaattgctgatgaaagttatnttgcacagagtatgctattaagtaaagccttgaggatgcaacaagatctcgaggataagaaaactgaggttataattgaaggcttggaaaagaaaattaaagatcatgaagctgctcttgagaagaaagattttgttcttcaaacgatggagggttcactgacagaagctcaagtcgagatcgccagattaaacaatgaacttctcctgaaatcagaaaattttgagcaagaaaaaaggaatcttgatacgaagcttatagccgaagtcaaaaagaagttcaaattgcagaaatcatt

SEQ ID NO: 38624 - DNA, 290 bp, Zea mays
  unsure (1)..(290): unsure at all n locations
ttcttcatcccaacatgtgctagtcggttatgccagagccaacccatgttagtcttagcaattaagcatgtgtcgagttcagctctatcaaaatctactaagtatagctgaccctctaacacacccttaaatgctatagaatcatcacgtcttctaaagacagtgacacctacatcagtgaatagacagttgtagcccattntgcataattgagatacggaaagcacantgtaatctanagaatctacaagaaaaacattagaaatggaatggtcaggggatatagcaat

SEQ ID NO: 38625 - DNA, 420 bp, Zea mays
  unsure (1)..(420): unsure at all n locations
tcgtcatctgaaaggaatntaccctgaaggtaagagatgatctctgttctctctatcttcgctaaaaacaggagatatattaagaactgctctttcaagaagttccaccgaaggtgcttttattgtttcgaagaatacatccgaaggtaaaggcagcccctgtgctgctgacttagctagcaaatcagcatgctcattttgtcctcgagggatatttttgacagaaaacccttcgaaggaagcttcaactcttcgaaccatatccagatatttttcaagcttcggatccttagccttgcaacttttgtcaatatgacccgaaacaacctgggaatcagttntaagtatggcccttctgattcccattgcttttagcttccgaagacctagaatcaatgcttcgtactcagcaatgttatt

SEQ ID NO: 38626 - DNA, 228 bp, Zea mays
atgtctacgactgagtcgattaaagaccgcgtcgacgtatgcttgatgaccgatgaccctttaactggtcacatacctcatcatggagaagccttgcctcgggcagactaaggccagaataatataacaccgaatgggcgtggagcggcgatgggagtagcgtgtaccctccatggcaagaggccggatggtggtgatctgcgctctcggatcgcgtgaacctgatct

SEQ ID NO: 38627 - DNA, 502 bp, Zea mays
  unsure (1)..(502): unsure at all n locations
tctaaagggagaatacactttaggactaacaaatgttcattttgatatagacagggattgtagcgcatgccaagccgggaagcaagttagtgttcatcatccacacaagaacatcatgacgactgacaggccactggagctcctacatatggatctattcggcccgattgcttacataagcatcggcgggagtaagtactgtctagttatcgcggatgaatattctcgcttcacttgggtgttctttttgcaggaanaatcccatacccaagaaaccttatagggattctcgagacgggctcaaaatgagttcagcttaaggatcaagataattagaagcgacaatgggacagagttcaagaattcacantatgaaggctttcttgaggaggagggcatcatgcatgagttctcctctccttacacgccacaacaaaatggtgtagtggagaggaagaatcanactctattggacatggcaagaactatgcctgatgagtac

SEQ ID NO: 38628 - DNA, 386 bp, Zea mays
  unsure (1)..(386): unsure at all n locations
tgagaaagacagggtttgtagcgcatgccatgcgggaaagcaagttggaacccaacatccacacaagaacatcatgacgaccgacaggccactagagctcctgcacatggatctattcggcccgatcgcttacataagcatcggcgggagtaagtactgtcttggtattgtggatgattattctcgcttcacttgggtattctctttacaggaaaaatctcaaacccaagagaccttatagggattcttgagacgggctcacaatgagttcggcttaaggatcaagaaaataagaagcgacaacgggacggagttcaagaactctcaaantgaaggctctcttgaggagganggcatcaagcatgagttctcttctctctacacac

SEQ ID NO: 38629 - DNA, 376 bp, Zea mays
acaacttcccgttgccgcggatcgacaaaattgttatatctcggccggatgcgaagtcatgtcactccttgactgcttctccggttaccaccagatatacatgaaggaggaagacaaggctagcaccagcttcataacacccttcggcacatattgcttcatcataatgccggagggactcaagaacgctgggtccaccttctccaggcttaccaagacagtgctcgaagggcaagttggcagaaatatattcacatatgtggacgacatcgtcgtcgccagcaagagcaatgaataccatctcgttgacctcgccgagacattcgcaaacatgcgagacgcacgactccgcctaaacacggaaaaatgcatcttc

SEQ ID NO: 38630 - DNA, 326 bp, Zea mays
  unsure (1)..(326): unsure at all n locations
gcttgngaatcccatacttctggccatcttncggcagacagataattctttgttgtctgagaggcaatacaagaagtcatcttcatctgtgccattaaacactaaggcccctttcggatactgtagttctcgggcgtagtgtttagcttcaaaaatttcttctttagataatctttttcccgaagcgtgtcgaataatataatcaaagacttcggaaggtgctctgggagtatgagcggtagctntttcaagcaaaatctggtctatagcttcttcctccgctggcttntctccaatttccgaggatttctccttggcgggctctg

SEQ ID NO: 38631 - DNA, 486 bp, Zea mays
  unsure (1)..(486): unsure at all n locations
cggaggcgtctattggttgtcggcatgggtagactccttcttcttttcttccgtcgccttgaatgcaacgggttgagcttctgatggctcgccaagctcgttgattntcctcgagccttctatcatgcactcaaaacttacaaaatgcccgataacttcctcgggggtcattntagtatatctaggattaccacgaatcaattgaacttgagtgggatgtagaaaaatgagagatcttaaaataacatttaccacttcgtggtcgtcccacttcttgctcccgaggttgcgcacttggttcaccaaagtcttgagccggttgtacatgtgttgtggctcctcccctttgtgaagccgaaaccgaccgagctcccactcgatcgtttcccgcttggtgatcttggtgagctcatctccctcgtgcgcggttttgagcacataccanatctcctttgcattttcaacccttgacnnttgtgattcttc

SEQ ID NO: 38632 - DNA, 205 bp, Zea mays
ctgcgttacgaaagaagaaatttttttgtggcaaagcgcctacgccagccaagggaatggcacgcccgcccacaaaattgccaagccttgctttgaatatgggacgggtgacaatgttcacaagcgtgacattataaaaaccccgagtctatctttgcaagggagcccgacactgacgcccgggactcgacactaaaacaccgat

SEQ ID NO: 38633 - DNA, 369 bp, Zea mays
  unsure (1)..(369): unsure at all n locations
tcttcttcattctgatgaaaaccaaaccctttgatcacttcatctaaacgaatgttccaactccgagatgcttgcttcaacccataaatggatttctgaagtttgcatatctttccagcattgatcggatcgacaaaaccctcgggctgtatcatatacacgtcctcatcaaggtttccattaaggaaagctgttttgacatccatctgccaaatctcataatcgaaatatgcggcaatagctagaatgatccgaatagaattaagcatcgctactggcgagaatgtctcgtcatagtcaactccttgaacttgtcgaataccctntgcaacaagtcgagccttatagacatgaacattttcatccatg

SEQ ID NO: 38634 - DNA, 349 bp, Zea mays
  unsure (1)..(349): unsure at all n locations
accaagcatggatatctttctttacaaagcgtgaatctttttctttaccaagcatgaanagaaggaaaggtgtttttcggcgaatgctcaaaaaccgtatgtatgtaaagttcatgcatcgcatagaaatgaattacaataatttacatattcgattcaaagttacacacatcgaatattacagttttgtcacaataaaagcacaatgtcttttctagtgtctcttacattgaccagtacaaaatgttgttacaataagtgatattcctcttaaaggactttctctgcaacttcgttcagtatatttgtaacaacttcatcgacaatagaatcagccatgttaatgatc

SEQ ID NO: 38635 - DNA, 300 bp, Zea mays
ctgcagcttatactggacatgtgctgagctctcaattgtatggttattataaatgaaactgcaagcaccattgaacttctgtttaagtataatgggtgaatagaaagctacaatcaaagagttatccaccagcagccacgcatgagatccatgggcagtgcaccagttactaccaccaatcagcagagcttcattgaagcaatgctgttcgcaagtgccattgtcttcttgagctgagaagcgtcactcccctgcagtgaaggcatagcagaattgaattttggcatctcttacttgatg

SEQ ID NO: 38636 - DNA, 460 bp, Zea mays
  unsure (1)..(460): unsure at all n locations
tcctattctcagcccggttctttgtatggatagtaaagnattttaanaaatgagaaataacttatcatattcataatcacctttctctgcattttctcatattcataactattggtaggagaagcaaacaatcaaaagtgggtactgggtagtcatattaactgaaacaaagtggacctttcgcttgtgtaaacagagttacaccaacttcttgatatatagactgagaaaatcaggatatttgacctttatttcatcgcaatttctttttggaggtgtgtaataaaattggacaagaatatgattntcagggtggtttgtgatcatcaagtgtcaaaagtagcatatgatgacgatacacagtggttctgaaagaaagaanaagtatggtgtataaatacttcatgtatacaccaatcaagatcagtagtggcaaacacaaaagagaatcatgtcacac

SEQ ID NO: 38637 - DNA, 202 bp, Zea mays
  unsure (1)..(202): unsure at all n locations
atcaacattgtcagaactgctctcagattggtggtatcaaaatggaaaatggcctataaataattcggctaatcatgtatctcacacccccatttatatgatcatattaacccgactgagaaagagtcacttacatgtatnttcattaacaaatgtgattcaataaaagctgacaatggcaagactctagcacatacattta

SEQ ID NO: 38638 - DNA, 470 bp, Zea mays
  unsure (1)..(470): unsure at all n locations
cttctatagggagaacgtgtgataggtctaacaaacgtgcacttagtatttgatattccttgcgcagcccgncangcatgtaatcaggtgggaggagcgcatcacagcaagaatgtgatgaccacgtcaagacccctggagctactgcatatggaccttttcggacccgccgcctacctaagcatatggggaagtaagtatggcttacttattgatgacgatttctcccgctccacttaggtggtctttttgcaagataagtctgaaacccaatggaccctcatacgcttcctcacgagagctcagaatgagtttgagctcaaagcgaaaaagaaagaagcgaaacgggtccgagtcaagaaccttcagcggaggagtccttgaaaggaaggataagcacgattctccgtccctaccaccacagcaaatgggtggatataggaagattagacgccatcgactggcaggac

SEQ ID NO: 38639 - DNA, 418 bp, Zea mays
atagtcactatcattaaatatacataatatctgcgcattaataaaattagatctcatacctttctaacatccccatattgtgttccttcacaatcatcatttccaacaagcgtcatttgcaagtcagaatgatgatgtgcattaatatttaaagcctcatcctactcattagtgcattataatcaatattacaaataatggataaatcatcccatgtggttgcactatacataaattacattggtttttgcataaattacctgttgcatgaatgactgcacatgctctcgtatacattggaacatgttatcttagaggttcacatatcctttcgcctgcacggtaattttacatagcataataagttgaataaattcacaattattaaaaacccaatgttgcttcagattgacacaca

SEQ ID NO: 38640 - DNA, 336 bp, Zea mays
ctcagcttctgcaactgggccaccggcagtctgttggtgcaccggacattcactgttcaatgtgcggtacgccttctggcgcctgctctgactctgcgcgcgcagtccgcactgttcactgtatcacgtgcaatcgaccgttggcgcgagtagcccgtgcttcgcttggcacaccggacagtccggtgctacaccggacagtccggtgaattatagcggagaggatcctataattcccaaagctgagcagctcggaattggactccctggtgcaccggacactgtccggtggcacaccggatagtccggtgcgccagaccatggcagccttcgggt

SEQ ID NO: 38641 - DNA, 313 bp, Zea mays
  unsure (1)..(313): unsure at all n locations
gagcttcagctaaagctgtgtcttcagttttgtcatacttcagctngncaatcttcagcttcgtcatcctgtatacatcatacagcacagtaagaaagatacaaatctctaaggagaaagttaaagtatcacacatattgtttttaccggcttaagatggcttctagcttcgtcgcatgccattttccgcccgccacttacccacatctgggtcatgaatctattcccgatgcttctggcttagcttgggatatctaacanatctgaagctgacaagctgaagtttggtctcgtcacaatagtttcatgtgtg

SEQ ID NO: 38642 - DNA, 361 bp, Zea mays
tgaggatgacatagtattgattaagaatgacattcctatgctggaaaccgtcaaggcttaacttgaaaagagtctttctatgaaagacttcagggaagcagcatatattttgagcacaatgatctatatatatatgtcgaataggcttataggattaactcaagatacgtacattgacaacgttttgaaacggttcaacatggaacagccaataaagggtcttacctatgtacatggatacaccttaccacatgcaatgcatgcgacgctaatgagcgggcctcatgataaggaccataccctcaacataggatcttcatgatgcatgatagacacgccagatgttatacccttatgtcta

SEQ ID NO: 38643 - DNA, 383 bp, Zea mays
  unsure (1)..(383): unsure at all n locations
taatatacgaaactcattcctatctacgggtgcataggtttcaccgaaatccataccttcgacttgagagtatcccttggccacaagtcgagctttgttccttgtcaccacaccatgctcgtcttgtttgttgcggaaaacccacttggttcctacaacatnttgattatgacgtggaaccaaatgccatacctcattcctagtgaagttgttgagctcctcttgcatcgccaccacccaatccgaatcttgaagtgcttcctctaccttgtgtggctcaatagaggaaacaaaagagtaatgctcacaaaaatgtgcaacacgagatctagtggttacccccttatgaatgtcaccgaggatggtgtcgacggggtgatctc

SEQ ID NO: 38644 - DNA, 257 bp, Zea mays
  unsure (1)..(257): unsure at all n locations
atgtgctttagtaatgtactcttgaaaaacatcagattcaccaaaccatataggcgtatcctctctagctatcaaacgacataattcagttctagcaacagcattagagtattcccatcgaactagagaaccatcacgattatacttaagaagagactgaacaatgccacctacgttgtggtcctttttagcattgcaattatgccgaagcanatggccagtcccacaactatgattatcactgaaggtctgcttac

SEQ ID NO: 38645 - DNA, 218 bp, Zea mays
ttagcgaccttagatactaagctgacatgctcttttggaaccatgcctccttgatgcctatcgtctccattatagagcattgctctagcaaatttaaaaatttcattttctatctcatgctcattaaatttagcagttagttgagctatgtgatcattttgttcttttattaaagctatgtgatcatggatagcatcaacattaatgtctctacatct

SEQ ID NO: 38646 - DNA, 434 bp, Zea mays
  unsure (1)..(434): unsure at all n locations
cttgtgaacagtacaagttcaagagggaaatagcatcttcggctgatcagccgaagcccatgctgctgtgtgaggatatatcagagcagaaggtgctattgngctcgcaattatctgaagatcaagagaaaaccttgataaggttnttattcaacaataaagatagttttgcatggtcagccaatgatctttgtggagtgaatcgggatgttattgaacattcgctcaatattgacccatccttcagaccccgcaagcagaggcttcgganaatgtctgatgacaaggccgaaggggctcgcaacgaagtaaaaagactcctaagtgcaggagttatcagagaagtgaagtatccagaatggctagctaacactcgtatggtgaagaaagccaatggaaagtggagaatgtgtatttgattcacagatctcaac

SEQ ID NO: 38647 - DNA, 271 bp, Zea mays
  unsure (1)..(271): unsure at all n locations
tgcgagcttgacaatgaggagatggcgctcgtcataagatttttctcacatcctcaagcaaaggagagggagagactacatgtcccgctcctagaaagtntgctacaaatgtggtaagcccggccattttattgcacaatgtccattatcaagtgacagtgacagggataacgaccagaagggccagaggagagaaaagaagatgtgctaccaaaagaaaggcggcgatgcccatgcttgtcgggaatgggattccgacgaaagctcaagc

SEQ ID NO: 38648 - DNA, 467 bp, Zea mays
  unsure (1)..(467): unsure at all n locations
tagcgaccttatatactaagcttataaatggacgtgaagagtgccttcctcaatggaccaatcatttaatatgtctatgttgagcaacctcccggctgtgaagatagtgagtaccctaaccatgtttataaactctctaatgcgctttatatgctcaagcaagccccaagagcatggtatgaatgccttagagatttccttatcactaatggcttcaaagtcagaatagccgatcctactttattcactanaactcttgaaaatgacttgtttgtatgccaaatttatgtcgatgatattatatttgggtctactaacgagtctacatgtgaagaatttagtaggatcatgacacataaattcgagatgtctatgatggnggagttgaagtatttcttatgatttcaagtgaagcaactccaagagggcacctttctaagccaaacaaagtatactcaagatattct

SEQ ID NO: 38649 - DNA, 390 bp, Zea mays
  unsure (1)..(390): unsure at all n locations
acttcggacttgatgaacagtggtcggaggtttccactccacaatatccttgacattgctgggatccaccgcaatccccttggcagacaatacatgtcccagaaattggatttcttctagccaaaatgcacaccttattgaattggcatataattgatgttctcttaagcgcgtcaatacgatccgtaagtgttgagcatgctcctcttcattcttggaatatattaagatatcatctatgaagaccaccacanatttgtccaactcgggcatgaataccgagttcatcagataagtgaagtgggcaggagcattcgtcagtccgaaagacattaccaggtattcaaagaaatcataccgcgtagtgaatgtggtcttcgtatatcttcg

SEQ ID NO: 38650 - DNA, 427 bp, Zea mays
acatgcaactgaaaagcacaacatatgctatcgctgcaggtttctatttatatgcctagcgcatcacaacttggtgggccccattagtcattgactttcgctattctagcgaagggaaggtgttttttggaccttcggctaaaggcctttgttcacgtcgcagtctgaattttgtttgaagcaaaaataaattaatactgcgaggggctactgttgggggccttcatcttccgaaggacctcataaacacaactaacatgttttccagtatagtatactgtcacaggaagcttcgactttaagatgaaggcgtgcatggtatgaaaaagcgtgatctggaagaagaatggaccgactctgaagctgtggctggagaagctttggcttatcacaaggacgatggtggaggatgaaactgaccctaaag

SEQ ID NO: 38651 - DNA, 284 bp, Zea mays
  unsure (1)..(284): unsure at all n locations
agctccatagttaagataacgagggtatatttatatnctgctcggtatcccgaacacaaaattatgagaattcattctaggaggtctcactctggctctcatcatgcttttatgtataagagtgaggcatctagttctaggcattccactcatgttaaatctgctaaaaagaaatctcctatagcatcaaatgaacctaatatttcatttaagactttngatgcttcttatgtgctcactagcaaatcaggcaaagtagttgccaaaatatgttggggcaaata

SEQ ID NO: 38652 - DNA, 267 bp, Zea mays
catgcaagtcttatccatttagcatgcatctagaccggtctcttcttttgccaaatcaactaagtaaaggtgtgtcggctagtacaccctttaaagctagtgaatcatcacatcttctaaagacagacacatctacatttgtgaatagataggtatatcccatattgcataattggactaacagatagcaaattatttcaaaagactgtatctaaaacacattatatatagagcgctcatttgagaatgcaattttacctaaccctt

SEQ ID NO: 38653 - DNA, 300 bp, Zea mays
acttgtagaggaactatatgagtatatactttatcaagcaacttgcccctagaaacatttggaacccacgaaaaagagtggttccaagtggtgctactgtatttctgaattctccaattggaaacagtaagtgaaactgagtttcagtgtcttgaattttgatagccgctttgaagcctactttgggctattctataaaggtttgggctgtgatgttcgtagaggaaatgaagactatatgatgttgaataactctctctaagggtgagggacatgatcctatatcaaatctgacaatca

SEQ ID NO: 38654 - DNA, 417 bp, Zea mays
tcatgtgcggatgaaggagcactttcacatgtgttctctttattataaatgcaagatgatatgacgcatgatgcataatgatgtgatgatatgatgtataggtgcctggattaatatgacgatagaaaaaatattataataagactctgcatccccttaggaatgacttttgagtctattcacctttactaagtgagattttagctctacatccccttaggaacgactttggagcttattcacctgtactagggggtattttgagctctaaatccacgtatgaacgactttgaagcctcttcacctttactaggtggtattttgagctctgcatacaccgaggaataactatggagcttgtttggcacttttgttacactctatggtgtaacctcagattattacagagtgtcaaac

SEQ ID NO: 38655 - DNA, 201 bp, Zea mays
tttttttttacccccccacaaccggggggcccacaaacagacccccccccccacacccaaaacacccaccccgacccctcccccacccacaggagagtacgccaccaacaacaacacgcgaaaacaccctaaacagacaacccacccacacccccccacccccaacccacctcccccaaccgacccctccaccccccaact

SEQ ID NO: 38656 - DNA, 377 bp, Zea mays
  unsure (1)..(377): unsure at all n locations
cacacctancaccttaattgtgcagcagtaactgaggacaatctaccacacaacctaaatataagcttgaagagaagctctgaatttgcgaggtatcagaagacgaccgaaaatcataacataggaagggcgagatgggcctaatatccctaccgtcggcccactaacacctttgctctctcacgcacaggcgggccaggaacctcctcaccgcgcgcgacgccctggtaacgggacccacgcatcaactgatgcggccacttgcacgtgtcactgttgccgggcccgcatcgcaggctgccccagcgcacgctctgtatatttgcctttgaccggtgggccggctcggacagcagcgaatcctacaacattcaccg

SEQ ID NO: 38657 - DNA, 348 bp, Zea mays
aacgcaagaaaacaccttctgttcacaaataaaaaactggaaaaccggtataaacacacagcgataactccctgatctgatgtccgcaagaagtggtctacctcggcactggtagaactacaaattatccaccactcatatatagactcctgtattgttttgagggctccaagaccacaataaactgggcaagaacagaaactgtacaatctgcctatccacggaaaactaaatttgagatcaaaacctaacaccacaactaatccaacctgtaatcccttgattccaacgaaccaccaccttcaagaacacataattacgaggaggaacaaggaactcatccatacc

SEQ ID NO: 38658 - DNA, 426 bp, Zea mays
  unsure (1)..(426): unsure at all n locations
agcttgagaccggagaaaccgcaggaagtgttaatacttcttaataaggatgttcctaaagcaataaatgaagaaatcaacatgaacaaagaataaggtaaaaattcaattattcatgttgtttgcactgatcatctctctatgtcatccaagagcaaaaagggaagatgaaaaaggagatgcttcaagtgcaacgaattatgtcactctattgcgtcttgtccacacaaagacaaggatgaaggaatgaggagatgttttggatgcaacgataaggaccatatgatcacttcatgtccgctcatgaagaatcaaagacgtgcaccctccaagaagaccctcactaataanaaagaccaacaacaagtgtcatgttatgctgagcgatgcttctgctacatgcgtggtgagcatggtcatctacct

SEQ ID NO: 38659 - DNA, 163 bp, Zea mays
acctaggagtcgcatgaaataagacatgtaaatattttcccaaggagcactatgaacgggtcgaggcacatacaaaccaggtggatttaatcgcgacgtcctatattgacatggtgtgccaactagcaaactatactttccgcatctcatttcttcttgggcc

SEQ ID NO: 38660 - DNA, 362 bp, Zea mays
gagggggatagactaccaggcccgctccatgaaggtatgctacaagtgtgggaagccccgccacttctattgctaaatgtccatcatcaactgaacgggacaagggcgactaccacacggggagaacaaaggacaagaacacatacttcctcaagaagggcggcgatgcccagtgttgtcgggaaggggattcccacgagagctccatcgaatcctccgacgaccaggacgccgccaacattcgcagtcaccaagggactactcttccccaacggcggccacaagtgtctcacggcaaacgaccgcacatcgaagaaagctaaatccacctcctccactacatatgagacttctaccgatga

SEQ ID NO: 38661 - DNA, 420 bp, Zea mays
agcttatgttgagagataacacagttcttctgtatcattggtgaagtgtataagtggattatttaccttctcccaacaacttacgcttttgggtcgaatttgttattgcttccactctaacatgatatcaaagccagaggtctcgaattcgaatctcgataaaggctttatttgtctctgcacctttatttacatggttgggccttcctctctggctgcacgtgagtaggtgttgaagatgataagtggattgcctagagcctaccttatcccaacagcttaagcttttgggttgaactggttagtgcgtccactctaacaatcaccttgcaatccatgtatgcttgtttatccactctttgtgtgaggacaaagtcaacttaactagagtgttagccactactataggtcaccaaatga

SEQ ID NO: 38662 - DNA, 326 bp, Zea mays
  unsure (1)..(326): unsure at all n locations
ttctggatatcttcagactcatcggggcatatgtgatttagacttcacaaaatcgtcttctttcagaataatactcttctcccgataccatgtgcgtacaactataatcacgtatttgtggaaagatagcttcgggaggcagcaagtgccagatatcttcactccaaaatctgttcctgctatttctgttntttcggcttccaaggatttcaccttggcgggctctgaagggcccgactcacgttcaaactgggctttaatcttctgtgtcaaaggttcagtgtgcacttcggaagtttacccattctcgttggagttgtgcttga

SEQ ID NO: 38663 - DNA, 395 bp, Zea mays
  unsure (1)..(395): unsure at all n locations
acatgttatttactatttcacatgatccggccgggagaataaaacctattataatacacacgcggcggtaacatgcgaaatggctatgctacttgactcgacatataatatcatctcgcggacctatatacaaatgatgaaggggggctctccaaaagcaagcacaatgtatgcattacatgggcggataagaactgcttgcaatcatgtcaatactggtactgatcacgacgggccagaagatcaaaaaacagagacttcacatcttttgctgaaataagatgcttcctactcctgtcangactgacagaaccatgaactgcgacatgtttcaaaatatcaaccatcatcacatatgaggtcccatgcatatgcatttgcctttgaatagggat

SEQ ID NO: 38664 - DNA, 172 bp, Zea mays
acaacccgaaagaagaccctgtgctcttgtcagcaagcaaccagtgcgaggagcgcacccagctaagatgtgcgacccctatacaccacggagctgccgcgatagacctatctgacccgcccctcacaaacatagaggaagacgctcgggctacaatataaaaataccccac

SEQ ID NO: 38665 - DNA, 428 bp, Zea mays
  unsure (1)..(428): unsure at all n locations
agcttaatgcccctcctaaaagattgtctaattttgtttatggcaaggctcccatgccacaggataacgagggctatattntatatcctgctggttatcctgaggataagattaggagaattcatgcaaagaagactcattctactcaccatgcttttatttgtaagaatgaggcttctaactctaagcgttctacaaatgttaaaatgcctaaaaagaaaactcttattgcatcaaatgaacctaatgtttcatttaagacttttgatgcttcttatgtgctaactaataaattaggcaaggtagttgccaaatatgttggggccaaacacaagggatcaaagacttgtgtttgggtacccaaggtgcttgtttctaatgtcaaaggacccaagaccgtntgggtacctaagaacaaggcctaaact

SEQ ID NO: 38666 - DNA, 424 bp, Zea mays
  unsure (1)..(424): unsure at all n locations
agcttgtggcagtgtgaacatgaatggcgtcaatatctttctgtggtgaccaagtggttgtctggaatttctccggtatgttggtaacacacataatactttatgcactttaccttcactatttaacatgcaccattatggttattcaacaatgctgctgaatgactctgttttcagttttcacagaaaaattcttgagcatcataacagtgctcagtcattctaaatttgtcaaacacagtattcaaattagttgtagtgttttgttaagatccagattgctcttcttatctatgtacaagtaaattctcttcaagggcatgtcagtcatccttcattgaagagtgctactacctagatatngcggtatagacttatttnnttttctcgaacgcacaggagagctgcacatcattatattaag

SEQ ID NO: 38667 - DNA, 424 bp, Zea mays
  unsure (1)..(424): unsure at all n locations
agcttgcttacttggtaagatgaccaaagcgctctttttgttttaccggagaggacattagatttattggaactcatacatactgatgtgtgcggaccaatgagtacgacagctaggggaggattccaatacttcataaccttcactgatgattttagtagatatgggtatgtctacttaatgaaacacaagtctgaatccttataaaagttcaaagagtttcagaatgaagtagaaaatcagcgtggcaagaaaattaaagcactgcgattggatcgtggaggtgaatattngagtcatgagtttagcaatcatctaaggagttgtggaattgttccacagcttacgccgcttggaacgcctcagaggaatggcgtgtctgagcgacgtaatcggactttatnggatatggctcgatcaatga

SEQ ID NO: 38668 - DNA, 418 bp, Zea mays
  unsure (1)..(418): unsure at all n locations
agcttgcttcgaactcattcttgcttcggaggtttctttaaatagcatcaagttagttatgctttcatagagatggcaggatgaaagcatctaggtccctggttggttttagtgattcatgacaacataagattatatgtgactaacgtgtgttttgtagagcaaatggtaagtgaaagtcgcctagagggggtgaataggtgaaacctgaaatttataaacttaaacacacactaaggtcagggttagcgttagaattaaatctgagtgtggaagattgtttctcttgacacgagttgctcaaacaatgcggatgacgtttgggatcaaactcaaatcaatattagcaaggaaactttagagagaggaaagagtgaaaacaaatcanatggaaatcaacacaagtggacacggtgat

SEQ ID NO: 38669 - DNA, 408 bp, Zea mays
agcttcttttcgagccaactccgcctctgtttattctgatgtcgctgccctcggctccggctcacctcagagcggtcgagggttttctttaactaagcaagtgaagcctcgagcggcaaggccgaccgagccgagggactcctacgcctccaggatacggatacctcactcgtcaccttccgcacaaagcaactcacatttggttaagcggttcggctagccgacaggcaagttctagtgctctaaatgaggaagaaacatggtattacattcaaaaatacctacatgttcaggccccgagagccacaatgaacaaacatcggcactcaaggtgccattacaaacggaacttcggttccactcccgcaggtacgaacaaccccccacattggagggcctgcgggacga

SEQ ID NO: 38670 - DNA, 419 bp, Zea mays
  unsure (1)..(419): unsure at all n locations
agcttctagatgggcgtcggcgacctccattgttttgttcaaccacatncggggatgtttggagcgctgagtttgcgatggcacactggccgcgagcataaagctggacgagcagcagccaccgcgggagcacacgagagctaggacgacgactagtcatcgacgaccatgtgtagatgagagcagggtcgacggcgaccatgtgcgcaggtaccgttgacaacaagtatggtggtggtggggaggcccaaacatcagcttcgatcttcactagcgagctctagccttgcaggatggaacgatgggagggattgccatgccgctggagattggaggctacacgaagcgagaggaagaagaggaatagacaacaaactgctcctgtatttgggctgtattatggtttgctctgtagtgga

SEQ ID NO: 38671 - DNA, 422 bp, Zea mays
  unsure (1)..(422): unsure at all n locations
agcttggtcattttattgctaactgtccctactatgatagtgatcaggatcaagggaacaagagggagaagaagaagaactataagaaggcaaagggcgaggcgcatctaggcaaggagtgggactcggactgctcctcttccgactccgacaatgaaggactcgccgccaccgccttcaacaagtcatccctcttccccaacgagcgtcacacatgccttatggcaagggagaagaaggtgagtactcgagactccacttatgcttcttctagtgataatgagtctagtgatgatgatgacatagactattcatgcttattcaagggcttagatagatctaagatagataagattaatgagttgattgatgctttgaatgacaaanatagattactagaaaaacaagaagatctttatatg

SEQ ID NO: 38672 - DNA, 421 bp, Zea mays
  unsure (1)..(421): unsure at all n locations
agcttaagagactnttgtcacggatcaagctctttactaaaaacgatctagcaccgcgaaaggggctactgttgggtctatgcttcgtcgccgaaggtcttcaagggagaagcggctttcggctgaagctgtttgcatgaaatggccgaaggttcctttccatgaagcttcgacagtataaaccgacttaaagatagaatgactttttagtccatgaaggtctgagtccatgttgtaagcttttataaggggcatacttgtaattcctcacaggctgcgtcctgtgcctataaatagtgaacagtattctgttgctgttcacgcattctagtattttgcaatcgcatctgtcggaattcaaccttttgccaaggcaaaggtatttctgtatccaataattcaatatattaagtaattataa

SEQ ID NO: 38673 - DNA, 413 bp, Zea mays
  unsure (1)..(413): unsure at all n locations
agcttaaaggctgacaatgctcgaacaatatttattcttatgcgaatatggaaaatagcgtcttggaatactacctcatggacgagaactggatcaaagaaaataactcgtgaggcgatttcagcttttgttgtgtcacccaacggtgctcttcttgcaatgtgagaatggaaagaaccacttgttttttatagtcatcttttaaaatgttgccattcatgatatttctttggagaatgcatacataccttggtggttgtagcgtatcaccagttttttaacatcaccaagttagaatgttcctttttcctacgtgcgcgtgggtacacgtacaccatggaaggattaaaacatgtgcgtgcatatggnggcaaggttgtattcaactcaaagtcagtgtatgccattaacat

SEQ ID NO: 38674 - DNA, 408 bp, Zea mays
  unsure (1)..(408): unsure at all n locations
agcttcaagggacgttccttacatgagagagagatgttttcatctaatgccctaagttgtagtgcgcagagggccccttttgggtcagtcttggggcgtgcctgcgtgtgttgtcgtactcttggcacgacattttgtctcgtctgtctggcgtgcaagtaccgtagctcgctctacgcctgtgctgttgtagctgatgggtcccacagaatgtgctcttggtgaggttgaggtttgtgttcagtacatcttcatcttccgtcaatgcccttgcgtcaccctccagcatgttcgagcatgcactangtgtgttttccttttctttctggtacgtgggtggagacttagttgccgcgacccctcttggtactgtacgcatggcgtgggcatggtttcgtgatgacatgt

SEQ ID NO: 38675 - DNA, 364 bp, Zea mays
ccttaagtgactgagctgcaagctgtccaagacagggatggggcatctttatttttcgcgaacatacatataattttagtagtaaatctgaagttccgagcgatgttgtactattatggaatcacgtgatgctactcctttgaactatagttcaatgaaagacattcatagcattctagaactctttgagaaactcctgaacatagtacaccattgagagttgaaagccacatgaattgtctaaagagagacatgatgctcctaaagacaagaacaagggtgaaaatcttgggagatttatggtccttggacaactctataccatgaaacttgcattcaagcaagatgaaaaacattatatgaa

SEQ ID NO: 38676 - DNA, 409 bp, Zea mays
  unsure (1)..(409): unsure at all n locations
agctngctacctcgaacctcaaaactcggtgtgatttttttgcagttcccaaggcgaaggcacgttgatgtgcccaagcgggtagtctccttcgggcggcacaaagccgaaagaggagtgtatggctcgcggagctctttgagtgcgactcccaagcctaagagtgccaggggaaggagacgatgatgctgcttaccccatccaccaacacctgtcttaccctgctctctcggatcaccagatcgatgaagagcgggcgcttgcctggaagaccgaagctgagccattgatccacctgagtaaaggtgatcgaatgttctgaccatcgataccgagcgggagcactggtggccgccaccagtatctgtcgaacggtgagcgtctactgccttctggtctcttatgacct

SEQ ID NO: 38677 - DNA, 421 bp, Zea mays
  unsure (1)..(421): unsure at all n locations
agcttgacaacaccatttgacatcttaaataaaatttcttatatcaagtatatttaattcattcctcaacatgcaaaagcgggttttatcaagtggcttagtgaaaatatccgctaattgatcttccgacctcactccttctaaaatgatatctcctttcgcaacatgatctctaagaaagggatgacggatatcaatgtgcttggtgcgagattgttgaacaaggntattagcaattttaacagcactctcattgtcacacaacaaaggtaccttttctagaaccgcgccatagtctagaagagtttgtttcatatatataatttgtgtgcaacaagcacccgcgacaatgtattccgcttcggcggttgacaagacaacactatttttgcttttggatgtccatgatactagtgatctc

SEQ ID NO: 38678 - DNA, 424 bp, Zea mays
cctgaggcatgcaagcttcggcctctccgcttatccattcgaaactattttatttcgttccgcataaagatatcttccgtggaataggcgcccacgttggtgaagctagctcttatcttctccacgcagcccagggatttttcgaagcatctttctttggatgcgcgaagatcttcaactgctttttctaaatagttttttccaatattcactaatatcttggttacctctgcgagactacatttttctttggcttcgaccagctggttccgaggtcttcgatctcattcttttgaatttctgcttgagctttgaaactagcttcatcttctttcactctgtttaccaatgaaattaagaatttgtctttctcaagacctcttgttcttagttcaattacctctgaacaaaggttgtttagagc

SEQ ID NO: 38679 - DNA, 423 bp, Zea mays
  unsure (1)..(423): unsure at all n locations
agcttcagtagaccagctggacccactccatcatgtgtttattagcagagtcaaagctctttccatgcctcctcagttgcaagcaaccaacccccggtgaatgcatgttggcactgcggagatcccagtcatttcaagaacaactggtcccagctgaagccattaggacccgcctactccaactcgatgaatgaccccaagaatacctcagcatccgcccccaaggcgccctcctccatcagccagtagaacaagacccagtatcaaggaagggcacgagtgaatcacgtcgatgcccaggaggctcagcaagctccgggagtagtgctcggtgagttccttgttgaatatactctcgctaccgtactttttgattctggagcatcccactctttcatagccactagttntgtggaaaagcat

SEQ ID NO: 38680 - DNA, 423 bp, Zea mays
  unsure (1)..(423): unsure at all n locations
agctcggncattntattgctaactgtcctgataaatacatttaccacgaaaaggggaacacgagggataagaagaagcattacaagaaggcaaagggcgaggcgcatctatgcaaggagtgggactcggattgctcctcgaccgactccgacaatgaaggactcgccgccaccggcttcaacaaaataaccctcttccccaacgagcgtcacacatgccttatggcaagagagaagaaggtatgtactcgcaactctacctatgcttcttcaagtgaggacgaatctagtgatgaggatgaagtagattattcatgtttcgtcaagggcttagatagatctaagatagacaaaattaatgaattaattgatgccttgaatgaaaagaatatacttttagaacagcaagaggatctgttgtatg

SEQ ID NO: 38681 - DNA, 410 bp, Zea mays
  unsure (1)..(410): unsure at all n locations
agcttctccttttcttgctcatatttttctgactttttcagtaanncattctttaaactggcattttcggcttggacttcagccaaggagccttccatagactgaataataaagtctttcttttctaagacatctttgtgttctttagccatgatttcaaggtcttgaatggtgaagtctttcttcttcagaacaacttcgtaattttcaactttttcttctaaatccttgatgatagctttattcttctcatcttcaagatcttgttgcatttttagcacttttcttaacagtatactctgccaaaacaaccttcgtcaganaacgacataaaaataataataataaaataataatatnttttaccttaaaattagcatagagcaggctaccggcgatatgttgtcgct

SEQ ID NO: 38682 - DNA, 417 bp, Zea mays
  unsure (1)..(417): unsure at all n locations
agcttcaactccatctatattagggtttgcctttgatatagnccagcttccttcggcccttctggcagcttcctgactcccatgaatagcaataggcccttggtccgaaggtatcttcatgcagagataagctgggtgaagaattgcttcaaaagcatttagggtaccacgaccaatgatggcgttgtaggggtattccatgtcaacaatatcaaacacaatttgctcagtccttgtgttattaacaaatccgaaggttaccggcatggtaatctttccgagtgccacaatctgccgccctccgaagccacaaagagggtgcgtagcatcatgaatcttgtcttcaggctcttgcatctgtctgaaggctttggcaaatataatgtcagctgcactgcctgtgtcaactaggacatt

SEQ ID NO: 38683 - DNA, 436 bp, Zea mays
  unsure (1)..(436): unsure at all n locations
ttagagacacctgcggcatgcaagctngaatcacttttatacccctgagatatcattattctaaccgggaccctgggaaaccctaatactaaaacccaggggcttatgtgttaaagtgatgaacctttggactaaagtgcaaaaactactatgtttaaacatataaagtcatttggttcacaaatgtgtggacttgaaagccaaatgttgagttctggacttaaatgcaaaatggacctcaattagattctattctaagtctgaaatttagtgttgagggctcaactttggagcattgtatctttcaacttctagggtttctgccctagatcaccacaccaaagttgtagagcattcaaaggagaataagtttgctcaagagtacaagcctcgttcttgtgagaaatagagagataatcttgcttgaaattggact

SEQ ID NO: 38684 - DNA, 314 bp, Zea mays
cgcctgacacaggtatgcgcacgttaattcttatttctaaatcggcccataaacaacgcatccgcatgggatcgtgtccatagaccatcattattcttgttataaaaatggattcaccctattcctgacctcgcgcgagtgctataaaaataatctacttttaccgagacctggattaccataacagctactcgacctagcatactagtattcatctcaaaaggaattcttgattcatgcacctagggtttaaccaactcctacacttaagtgcacgggacaagcctccaacctttaagtatagtaaaatacta

SEQ ID NO: 38685 - DNA, 415 bp, Zea mays
agcttgcctttgactccaaagctttaatttgttttttctgctaagcgacaccctcaaatagacgtagtctcccacttcaaaactgagttcccttcttctggtgtcggcataactacgctgtctggactgcgctgcctttaaattctctcggaccattctgatgttctcttcggcttcaagcaaaatatatggaccgaacacctgtctttcaccaagttggtcccaacgcaacagagttctgtaatctctcccatagagcgcttcaaatggcgacatcttcagatcggcttggtagctgctgttgttagagaattcctcatatggtaatctctttgtccaacctatcttatcttgcaaagcacaagccctcaacatatcctccacaatctgattggttctctctgtatgaccatct

SEQ ID NO: 38686 - DNA, 427 bp, Zea mays
  unsure (1)..(427): unsure at all n locations
tagcttcaactcttcgaaccatatgcagatagttttttttcttcggatccttaaccttacaactcttgtcaacatgacccgaaacaatctgggaatcagntttaagtatggcccttcttattcccattgcttttaactttcgaagacctaaaagcaaggcttcgtactcggcaatgttatttgtgcaactaaagtcaagctttgccgcataacaagttttaaccttggaaggtgaaaccaacacagcagccactcctgctccgaaggttccccaagatccatcgcaaaacactgtccatgcttcggcatctttatttgtttctttctcctgaacccctggcgtccagtcagcaatgaaatctgctaatgcctgagactgaatcgaggatctatgaacatattcaatacagaatttgttgagttctgc

SEQ ID NO: 38687 - DNA, 424 bp, Zea mays
  unsure (1)..(424): unsure at all n locations
agcttccataactactcccataagagaattgttcttttggagggtagacattattcaaaggtgggtatctgtttacacttccaacctatacaagtttcaagtatggggcctaatggtttaagaaagattccatatgggtattatttctaaaactcgacacacaaacaggaaatgagagggcatctatcacctgcggggaaagacctgaatgtagccagtgcccccctccaggattgtgatcaattgctgctgcacgagcaacaggctaaaatacaaatgaaagacaggacacgttatggagagaagaacgggatcaatgtctgaatgaacatgagcaaaaaaaagtttctcagaactagttntaaagatactcagagagtgtaggtgcgctcatcatgcaggcacatattaatgtgcactgatt

SEQ ID NO: 38688 - DNA, 206 bp, Zea mays
gagacgaagctcaacgcagaggagaagcctcttgaagagaacactgcccgattgagacgactccaacgccaaaacgaatacagagaagattactacagaaactctgggacgcttgtctgaacatactgacgacagcgacagccaagatgtggaaagcggatgccgaaaacctcgaagaacggccctagcgaccaagccacgcaagc

SEQ ID NO: 38689 - DNA, 143 bp, Zea mays
gcgcccacagcaccgcttagcaagcgggaaacacgccgcgctccccgcaaacatgaatccgccaacgggaaccccctgcgggcgcacaaggacgaaaccaacactcaaggtggcacgcttaccaacaaatcgcagcgcacctc

SEQ ID NO: 38690 - DNA, 420 bp, Zea mays
gatcttaagtcgactgctgctgcagctttaagggaagagagttattattattttggccacttcgagaaagacaggatttgtatcgcatgccaagcaggaaagcaagctggtgctcatcatccacactagaacatcatgacgaccgacaggccgcttgagctactacacatggatctattcggtccgatagcatacataaacatcagctggagtaagtattgtcttgcaattgtggatgattattctcgctctacttgggtattctttgtgcaggaaaaatctcaaacccactagaccttaaaaggattcttgagacgggctcaaaatgagttcggtttaaggatcaagaaataagaagcgaaacggaacggagttaagaactcagacatgaaggctccttgtgagggggcataaacatga

SEQ ID NO: 38691 - DNA, 427 bp, Zea mays
agctttaagagattggagctcattggtgttacttacattatgggtatctattgcagggcggagcgaagctagatcagtcgctcgttgccgaacgaccttgttgttcctgtccaccttcaagttggccaggaatttcgcctttgcttcttggatcagctgctccttgtgctcctcgaactggagctgttcgtcagctggcaaggtttcccaagtccgctctatgatattgctagcggaaacttcagagctatcctttgaaccggccattgagggccgatcttgataggtctatatgaaatgtccccagtggtgtcacacccgattttggaaggcaaaccgaatgcgaaccatgtacgtgccaggatcagaactcacgtacatagcgattacataattggacatcatcacacaatgctcaaagtaaata

SEQ ID NO: 38692 - DNA, 427 bp, Zea mays
agctttatcaaatggacgtgaaaagtgccttccttatcttaccaatcaaggaagaggtctatgttgagcaacctcccggctttgaagacagtgagtatcctaaccatgtctataagctctctaaggcgctttatgggctcaagcaagccccaagagcatggtatgaatgccttaaagatttccttattgctaatggcttcaaagtcggaaaagctgatcctacactctttactaaaactcttgaaaatgacctgtttgtatgccaaatttatgttgatgatattatatttgggtctactaacgagtctacatgtgaagagtttagtaggattatgacacagaaattcgagatgtctatgatgggggagttgaagtatttcttaggattccaagtaaagcaactccaagagggcaccttcattagcca

SEQ ID NO: 38693 - DNA, 402 bp, Zea mays
  unsure (1)..(402): unsure at all n locations
agcttntncttgttctcatcgaccttgacattttatcttttgtttccagcctgccggccatttgcttcggtagctaattacaggaaactttgcgggtttccggtaagcaaaattgtagcaaccgaagttttcatgaagcccatcttttctggcctttgtttgataatgcaattcatgaactcgacagaaactgtcagcaaaaagcttcactgtttggctttcgagggcccaaatataaacgctaagcctaacgatagcgttaggagttaactggtgaaggtagatgtcaaacctcttcaatatctccgcaacaatctcgtgaacagggaatcttatcccaacctttaaaaagcttttgaagatgacaacctcgtccttctctggcatcggagtggtctcttc

SEQ ID NO: 38694 - DNA, 287 bp, Zea mays
ccagcgaatgaaatggcccccacaccacggtacagagcaaagatagggtaccaaccgctctaccggtgagcggcgccccaatcttcggaaaaaagaagacggctttattctataaaactcgatcggcaagtgctcgcattggatggcggccaacggtcacgggcaacgggggatgttatacacaaacacaacacaagacgtttgccattcgagtcgccgcatgcatctcgtacgtgcaactactgggtgttgtgcactgcaaaccaactcaaccttcggatagggcg

SEQ ID NO: 38695 - DNA, 414 bp, Zea mays
agcttctccaccatgtcgctgatagacaagttgttgtctttacctccatcaaggatcaaacgacatgaacgctccttaatgacacactttgtttgaaacaatgtatgtcgctgattctgctctgccttctccatttgtgcactaagcacacgctgtacaaagaggctctcataatgctctgcatcatttgcaccaatctgttctttgggtgagtccttagtgcctggcatatcaggcgcaagcaaagcaagtgtagctttatccaaatcactagcagaggaatacccaccatcgtcgtttaccaccataacacgctgattaagacaatcacgctgcacgtgtccataacccttgcatcgataacacagaacatctcttgttctacctgtggaagctactgaagaggcactacct

SEQ ID NO: 38696 - DNA, 423 bp, Zea mays
  unsure (1)..(423): unsure at all n locations
agctttgcatctcaagtagggtgcagtgctttttattgtttgtgncggcttatagntgctgagcagtagtcggtctacatgtcctcaaagggaatttgtttgtaagattcacgcgtggtcggtttctcatttctttgatgttgatctgcgtacgctgcgtgtatggctgcgtctaagccactaccacgatgatctgctcaacaactggatgctcgccgacccgctgtttcttttcaaagatggcaccgaggttggtgcgcgctggcagttattttttcaagtgttcatatgatagcagttctgctattactaataactatgttctggagtatgcagatgcattgaccatgctacagttcgtcgacgtcgcccagatcgactcctttgcctcccaccattctcaaaatatgtggcggagcgctc

SEQ ID NO: 38697 - DNA, 444 bp, Zea mays
gacccggaccttagagtgacgcggctgcagcttccaaaagccagatcatcaaattttttttcggagttaaaagttatgcctacaatacaaagtcggaattgctgaaaaaattgcagcagcatatgggatgtccggtgcagacaggactgtccggtgcagacaggactgtccagtgtgccaaatttgctcaaaatgatatggcttgaactctgtgatgtagagaatttcataagctttccaaaaagtaaaagatcatcaaagttggagttcggagctaaaagttatggccaaaatacgacaagtgggcatgggatgtccggtgtacaccggaccgtccggtgcgccatcttcggaagctccaacggctagtacacgtggcatgtctagtgcaccaccggacagtcaggtgcacctgtccggtgcgccgcagaaagctgcagaact

SEQ ID NO: 38698 - DNA, 414 bp, Zea mays
agcttatgaagattcttcatgccaacatgtgctattcggcgatgccagagccagcccatgttagtcttagcaatctatcaagtgtcgagttcagctctatcaaattctaccaagtatagctgaccctctaacactcccttaaatgctattgaatcatcacttcttctaaagacagtgacacctacatcagtaaatagacagttgtagctcattctgcataattgagaaacggaaagcaaattgtaatctaatgaatctacaagaaaaacattggaaatagagtggtcaggtgatatagcaattttacccaatccttggaccaaaccttgatttccatccccgaatgtgatagctcgttggggatcttggtttttctcataggaggagaacatattcttctcccctgtcatgtgg

SEQ ID NO: 38699 - DNA, 418 bp, Zea mays
  unsure (1)..(418): unsure at all n locations
agcttcgggnctcttgccttgctactcttattttttgtccagaaataacttgtgaatcagttttaaggattgcccttcttattcccattgcctttagtttccgaagcactaaaagaagagcttcgtactctgcaatgttatttgtacaactgaagtctagctttattgcataacatgttctgactcttgagggtgccactagaacagcagctgctcctgcaccaaaggttccccaagatccatcgcagaatatcgtccaagcttcggcatcttttgttgcttcttcactctgagcccctggcgtccagtcagcaatgaagtctgctaacgcctgngattgaattgaggatctgtgtacataatcaatggtgaagttattaagttccatgacctattttgcgattcttcctatagcttc

SEQ ID NO: 38700 - DNA, 413 bp, Zea mays
agcttccaacttcactaacattggatggctgtttccatttggatactgcttctaccttggacgagtctacttatatcccttcggcagtcaagatatgcccaaagaaggctatcttttctaaccagaattcacatttgctgagcttagcgtagagttgatgtgctctaagtctttcgaggacaatccggaggtgatgctcatgatcttcgcgactcttggagtagataaggatgtcgtcaatgaagactacgacaaacttatccagctcttccataaataccttattcatgaggttcatgaaaaaggcggagcgggtgcattggttagtccgaagggcattactgtgaactcatactgtccgtaccgggtgacaaatggcagcttctgaatatctacttccttgattctcagct

SEQ ID NO: 38701 - DNA, 420 bp, Zea mays
  unsure (1)..(420): unsure at all n locations
agctntactcgatactgaattgctgagcttgtttatttcagataaaggatttcatgcaagattttgtttcaaactgtcggcgtttcgagacaggggggtccctaagccgacgagtgagtgtgctgcatgccccagcccatatgggtcgagcgcgtgggcgagcgcggaggggggagaggcgaagcggccggagccgagcgtgagagaggtggaagtcccgtggccttcgtgttcgtcccgcgcccaggtcgggtgcgcttgcagtaggggggttacaagcgtccacgcgggtgagggaagcgagcggccccaagagagcgcctgtcccgtcctcggtcccgcgcggccaaccttctctgagaaggccctggtcctttcttttatagtcgtaaggagaggatccaggtgtacaatgcggat

SEQ ID NO: 38702 - DNA, 425 bp, Zea mays
  unsure (1)..(425): unsure at all n locations
agcttctaagggagagcacattttaggattaacttatgtttattntgagaaagacagcgattgtagcgcatgccaagcaaggaagcaaattggtgcccaccatccacataagaacatcatgacgactgacaggccaccggaactcctacacatggacctattcggcccgatagcttatataagcatcggcgggagtaagtactgtctagttattgtggatgattattctcgcttcacttgggtgttctttttgcaggaaaaatctcacacccaagagaccttaaagggattcttgagacgggctcaaaacgagttcggtttaaggatcaagaaaattagaagcgacaacgggacggagttcaagaactctcaaactaaaggcttccttgaggaggagggcatcaagcatgagttctcttctccct

SEQ ID NO: 38703 - DNA, 335 bp, Zea mays
gctgcagctgaactaaactaagggaaagtgttcttgcaccttgcggatctaacagcaccaaaacaacaagccctcatgtcaaccaaccgaatggacaactcgtccttgaaaaatcaaagaactacccaattaaaacatttaagaaagaggactaaaattcatcccaagataccaacaatatcatcttaggaaaacgaccaaaaatgtcataactttatttctcccacaagggaagaccatcaatctaccagctggaagatcataactcgaaagtataacaaccaacattgtagggagagatgcaaaaaatcataaaaagtctgaaaacaagcaaa

SEQ ID NO: 38704 - DNA, 416 bp, Zea mays
gaccctaagcaccgcggctgcagctgtcccacagctttgagctctgttttattgtattttcctggccgaagagaagaataccatgtttgggccacattcttaactgccatgacgaaagatttggccatgacagctgcattgcctccgtatgaagatatggttgcttcataactcatcaaaaactgcttctggtctgaatgcccatcatacattggaagctgaggtggcttatatgatgggggccacgggatggcctacagttctgctgccaggggagaagcatcatcaaacgtaaaggtatcatgattaaaatcatcataccatccatcgtcgttgaacaagccctcttgatgaagctccctgtgctgtggccttcagtctcgcttgtcttgagcaacgagacgtacttctttagt

SEQ ID NO: 38705 - DNA, 411 bp, Zea mays
agcttatgaagactcttcattccaacatgggctattcttttgtgccagagccaacccatgttagtcttatcaattaagcaagtgtcgagttcagctctgtcaaaatctatcaagtatagctgaccctctaacactcccttaaatgctattgaaacatcacttcttctaaagacagtgacacctacatcagtaaaaagacaggtgtggcccatttgacataattgagaaacagaaagcaaattgtaatctagggaatctacaagaaaaacattggaaattgaatggtcaggagatatagcaattttacccaatcctttgaccaaaccttggtttctatccccgaatgtgatagctcgttggggatcttggtttttctcataggaggagaacattatcttctcccctgtcatg

SEQ ID NO: 38706 - DNA, 415 bp, Zea mays
  unsure (1)..(415): unsure at all n locations
agcttcggtattacaaaccgacttaattatgattgaccttttagtccataaaggtctaagtcaatgttgtaagcttttataaggggcatacttgtaattcctcacaggctgtgtcctgtgcctataaatagtgaacagtattccgttactgttcacgcattcgagtaattgcaatcgcatcttccggaatccaaccttttgccaaggcaaaggtattattgtattcaataactcaatatattaagtaaatacaatgtaattcgtctatgatgtatctatcccttttataccttttgttntatgttatcttataatttttactaaaattttgttacgaagatttaagcttcgtaattatgctcttatcagccttcgtccaaggcccattatcctcaagggaataatgtttcgtgga

SEQ ID NO: 38707 - DNA, 410 bp, Zea mays
  unsure (1)..(410): unsure at all n locations
agctntgtaagcaaggcacgagaaactattgttttttcttacttgcgggactaagtgagccgggagattaatgaagaagcctcactcactctaagtgaccgtctgagagagggaaagggttgaaagagacccggtctttgtgaccacctcagcggggactaggttctttggaaccgaacctcggtaaaacatatcaccgcgtcatccgccttactttcttggatgatttgtttttcccctctctcccagactcggattttattctaacgctaaccccggcttgtagtgtgtttaaagttgtaagttttagtttccgcctatccacccccctctaagcgactttcaattgatatcagagctcggtacttcattagagtctaaccatttgaagtgatgtcgtgaggatccgc

SEQ ID NO: 38708 - DNA, 426 bp, Zea mays
agcttgtgaagccaatcacaagtttattaaagaatgattcaaaatttaactggtcctcaaaatgcaacgaagccttcgagcagctgaaggtgttattgaccactgctccggtgttagctgaaccggacattgaaaagccttttgatgtgtattgtgacgcatcaggcagtggtctaggctgtgttttaatgcaagaaggccgagttatagcatatgcctcaagacagttgcgccggcacgaggaacattatccaactcatgacttagaattagctgctgtggttcatgcccttaaaatatggcgtcattatctgctgggaaatatctgtcatatgtatacagatcataaaagcttgaagtacatttttacccagtcaaaactaaatatgaggcataggagatggctcgagctgattaaggattatg

SEQ ID NO: 38709 - DNA, 414 bp, Zea mays
tagcttcagcgaccaagagatcaagctcttcttttttacaaagaagaagaccctgagcatctgtttggtgaaggcaagtgtcctcagtcccattatgtcccatttaccttataattcactgtcccgcattacttaattgaaacctaaggatttactagctttctatttaccttgtccttgatttaccttttgggttactatggttagccacatgctagcgctttactttaatcaatgaacatgatgagatacaatgatgatactatggttttattctggatatgatgatatacttatggcatttaaggggactcgagcggcttcttgagtgcctctccgtaaagacctgttcgttgagagaccaccctggataacagtgcaaccatgagggtggaacggggtgcccttagctaa

SEQ ID NO: 38710 - DNA, 430 bp, Zea mays
  unsure (1)..(430): unsure at all n locations
atcttaagngactgcagcatgcaagctgctgcggaatcaacgaagcttcttttttttctgcttcctcccaaaatacttcggtggaagaatgcattaaatctccacacattcttaattatatggccagagtgtgttctaccgccacggttgagcgagaagggtgcgaaactgaagctttggatactgttcccctctccaaagccctgcaaagatccgggctggtgaccttcggaaaatatccctatgatgatgctaatacgcaaaaagcattcgttgaagtataataagaagatattgaggaaactaatcccgatgataattatctgcatcggcatgccatgcaagcccagtcactatggactttgggaaatctactgttctcaaagcagatctgatcagatggcaaagccagctttttactgactacaaa

SEQ ID NO: 38711 - DNA, 358 bp, Zea mays
agcttgccttagccatattatagcacttgttttttattcacctttgggtctcacttgaggcatttgtttcacctgtgacctaaaatagctccttaactttgaatttggaatgcaagccaaattattacctggaacggactgaacactaaacactactgaaatctgagcgacttatttgaatccatattctcttacctattactcttaagtgctccaccttgaaccaattacaactttgaactcacttgcagtttcagatttcaatcccgacggaacggaatactcatcaatgaaccgcgtatccccctaaagcttctaaaccttcctggcctcaacttcatctgcccataatatccac

SEQ ID NO: 38712 - DNA, 417 bp, Zea mays
agcttctaaagggagaacacattttaagactatcttatgttcattttgagaaagacaggattggtggcgcatgccaagccgggaagcaagttggcactcatcatccacataagaatatcatgacgactgacaggccactgcagctcctacacatggatttattccgcccgatcgcttacataagcatcggcgggagtaagtactgtctaaatattgtggatgattattctcgcttcacttgggcgttctttttgcaggaaaaatcccatacccaagagaccctaaagggattcttgagacgacctcaaaatgagttcggcttaaggatcaagaaaattagaagcgacaacgggacggagttcaagaactcacaaatagaaggctttcttgaggaggaggacatcaagcatgagttct

SEQ ID NO: 38713 - DNA, 417 bp, Zea mays
gatcctctaaacacctgcgggcatgcagcttgtgaaagtgttgccgaagctacatattttgtttgttgattacccacgcactttggggtgcagggagagaaacacgaagccgcgtgtaaaacctgtttcggctgattatgccacgcttctgcttcggcaatatctttttgcttctggatggtgacccggcatgttcttgaaatgtggcccttgtcctccaccacagaataagcagtatagttttctgggctgatacccatatctttctcccaagcccctaccgcctctgcctcttggagctggtggcctgaaaaaactctgctgctgccctgaagactgtgagctttgttgtggcccctgaaactggccttcttagtcatcactctatctagagatgtgaatagatctgacatgcct

SEQ ID NO: 38714 - DNA, 215 bp, Zea mays
tttttggcagagagagacgcctggaagagaaggcaacagatcatattagtggtggtgcgaatcatgcgttcggcccagccgttctgggtagaggtgtaggggcacgagagacggaactggacgccattagtgagaaagaaagaacgggaggcgtggttgtcgaactcgcggccattgttacactgcagggcacggaccgggcgacggaactggat

SEQ ID NO: 38715 - DNA, 212 bp, Zea mays
tgtcgcagttgttgcagccgtcatctcgtgccggcttcttgttgccgacggcgccgcattgggcacctccacgtgcaccaccctcagcatgtcctcgcgccccggcctgggcgcctccacgcgccttgcgctgcttgccgcgtttgcggcctcgtgttgaggaggactcccccttcttcttgtcaccctggcaggcctcccactgctcccga

SEQ ID NO: 38716 - DNA, 215 bp, Zea mays
tttcttctgctccatctatattatggattgctttagaatctgtccagtttccttcggcctttctggcagcttcctgacttccatgaatagcaataggcccttgatccgaaggtatcttcatgcaaagatatgctggatgaaaaattgcttcaaaagcattgagggtcccacgaccaatgattgcattgtaagggtattccatgtcgacaatatca

SEQ ID NO: 38717 - DNA, 216 bp, Zea mays
attcttcattactcaacccggtatcaatctggtaggtctgtttggcaaaaccgatattcgaacggtcgagaaacgccagcacatacagcgccaacataaacggaattaaacgcacacggtttttcttcaccacggcgtcaagcaaagcggtgctcataaaaagctccttagaatatgtgggcgttaccgttgtcacagcaacgcccggagtgatta

SEQ ID NO: 38718 - DNA, 215 bp, Zea mays
agctttggctgtcttatgcggttagcaaatctaaatctaattcctaaatttaacttggtcaaaaagtctaagtgccatgtgtgtgttgaatcaaaacaaccccgcaagcctcacaaggctgctgaggcgaggagtttggcacctctagaacttgttcattctgatctgtgcgagatgaatggaattttgaccaaaggtggtaaaagatactttct

SEQ ID NO: 38719 - DNA, 213 bp, Zea mays
tcctatccagtgtcctatttgcaaaacattaaaacaatacaacttgtttgaaatttttgcctagtgaatgtattctaggtgtgtcaaacatatgcaatgccaatgcttatgatgccatgctcaagttttagttacagtaacaccaggggtgttacactcggccccatagacttgaaagaatggcgtgaagcccgtggctcggctcggcgttgt

SEQ ID NO: 38720 - DNA, 214 bp, Zea mays
agcttaactcgggctcaaacttgacaagtcttagttttaagcttttagtacttacattcctacttactatgcaattgttggttcttgagatatgcatgaggcactacacttagggggagtattcaaaactcaaatcgttcatgaaaacccctagtgcaaagccaaaatgcaaatctcaccatttggctattttctctaaaaattatctagccta

SEQ ID NO: 38721 - DNA, 211 bp, Zea mays
tctaaagggagaacacattttaggactaacaaatgtccactttgagaaagattggatttgtagcgcatgtcaagcagggaagcaagttggagctcatcatccacacaagaacatcatgatgactgacaggccgcttgagctactccacatggacctattcggcccgatcgcttacataagcatcggcgggagtaagtactgtcttgttatt

SEQ ID NO: 38722 - DNA, 223 bp, Zea mays
gccgcatgtttttcttgcaggacgtcgccctcgtacctgagacgacggtgcagtcagtcctcgacgtgacttcatcgccgctcgtcgaccaaaaggtaccgaccgattcccatcctacgtcatttggattcagcctcaacccgcctagcgacctcgctttggcggacgctctcgtagaggcgagtccaagccctctggggtttcacatgcggtcgccttggga

SEQ ID NO: 38723 - DNA, 207 bp, Zea mays
ttcgtttggaacttccaaggcatgtacgtgcgccctgggaactcgtgggacctccgaagctgccgccagcagccagggagtccctccgagagtacatccggtgattttcaaagcagcgcaccgagctgcccaacgttaccgactcggatgtcatcggggctttccttgctgacaccacttgccgagacctggtgagcaaactggggc

SEQ ID NO: 38724 - DNA, 211 bp, Zea mays
ttcttgaacggtttggctcactccttcggcgagctcaaaaacaggctcggctcgtgaaactcgagcttttttccagccttagacaccagttcagctacaaaatcctgccagattattatatagcatgcgcagtggaattggataagctccaggtgcagttccaaagctcccgtgaacaaatggtgtctggcgatctaccacgggaatcgaa

SEQ ID NO: 38725 - DNA, 208 bp, Zea mays
taagaagctcgcccccacaaagaaaatccggaagaaaaccacgagccaaggatgccagacagaaaggaggaagaaagctcccccagcaccagctcccgccaggatagaaaatttctccgatatcgaggatatgtccctcgctagccttgatgatcttctcaaggaatttggggacactctagaaaaggaattcggtagtacctcaggg

SEQ ID NO: 38726 - DNA, 210 bp, Zea mays
atctttgtggtgatgtggattttatagttatttgtctactcttctcacttctggtagatcggaggtagataatggtaagcatgccaaagggtggaattcagtgtagttcggctacataaaccccagatatttgtccatttaggaccgacctttaccatttagctgacagtgtatatcagacttgtcaaaggactatcccgagtcaattca

SEQ ID NO: 38727 - DNA, 209 bp, Zea mays
tcgtctatctaccgctgaaggtcggctaagcgagccatcttctccttcttgcgatgcacctgttgctgaaggatctccaggttttggatctcttgattcaagtcatcctccggaggtgttggactaacagccttcctcttctggcttcgggcctctctgagggaaaggacgtcctgattagggtccagcggctgtagagtggcggcccc

SEQ ID NO: 38728 - DNA, 212 bp, Zea mays
ttcttgtaaaaatctggaatgaatcggcgataataaccagccagtccaaggaaacttcggacttgatgtacagtggttgggggtttccactccaaaatatccttgactttgctgggatccaccgcaatccctttggcagataatacatgtcccagaaattagatctcctccagctagaacgcgcacttactgaacttagcatataattggtg

SEQ ID NO: 38729 - DNA, 210 bp, Zea mays
tgagttattttttttgcaacaaataattgacgcgcaaagaagtgatgagggaataaagcacattcatgagaacatagaagctggaaaagccgactgcttccgaaaagatgatcaaggcgttgtatggttcaataaccgcataggtgggcctaaaaatgaggagctccatcagcaaattttggatgaagcacatcttagtcgctattctat

SEQ ID NO: 38730 - DNA, 212 bp, Zea mays
ttcttgtgacaatatagtctatttgatgaatgacaagcggtatttattgcctcggcccaataagaatccgatatattatattccgctaacatagacctagccatatcaatgagagttctattctttctttcaacaataccattttgttttggggtatatttggaagagaattcatgtttaatacccttttcatcacaatattcatcaattct

SEQ ID NO: 38731 - DNA, 110 bp, Zea mays
ttgtgtggagttgggagaggatttgatctctttggtgtgtcttgtattgaatgctagctcttgtaaggtgtagaagagtggaaaacttggatgccattgaatgtggggtg

SEQ ID NO: 38732 - DNA, 208 bp, Zea mays
tgcttgtgaaggttcttcatccctacatgtgctaaacggggatgccacagccagcccatgctagtcttagctattaagcatgcatctagaccggcctcctcttttgcaaaatcaactaaataaagtttggcgtctaatacacccttaaaagctagtgaaccatcacttcttctaaagacagacacatctacatttgtaaaaagacaat

SEQ ID NO: 38733 - DNA, 207 bp, Zea mays
tctaaagggagaacacattttaggactaacaaatgttcattttgagaaagacaggatttgtagcgcatgccaagcaggaaagcaagttggtgcccatcatccgcacaagaacatcatgacgaccgacaggccgcttgagctactccacatggatctattcggcccgattgcttacataagcatcggcgggagtaagtattgtcttgg

SEQ ID NO: 38734 - DNA, 208 bp, Zea mays
agcttgcaccacgatatattggtccttttcttattctggaaagatatgggccagtggcaccgacttcagttacccgaaaccttgtctgatgtgcataatgtgttccacgtgtcccaattgaagaaatgtcttcgggttcctgatcgaaccgttgaagtgacagatgttgtccttgaaccggacttgacatattctgagcaccctattc

SEQ ID NO: 38735 - DNA, 208 bp, Zea mays
ttatatcacgacgacaaagtgttcaggtctcggcggccgcgaaagacacatacatattcaaaataaactgctccggcagaatcaggcatcgcccgggggaggagctgcaccctcatcttcgtttccaccctcggcgagatccgccccgccctcggacggcggcgcaagcggaaggatctccgcctcgaaagtggacgccaacatcacg

SEQ ID NO: 38736 - DNA, 213 bp, Zea mays
ttcttgtgaacgtaggcagggagaggacgcgtcctctccgggacttgacggacacagggcgctacaaggtggggtgaaaactctaaaattcggctgcatctaactgaacttactgcccgctgtccaaactgcatcccatctattatcctcttggaactcacagtttctaacctcttggatctcacagtttctaacagcaatagggaaaccaaa

SEQ ID NO: 38737 - DNA, 212 bp, Zea mays
tgcacacatagctcatttgaatacctttgatcatatctcttctatatgctatgactaatgtgttttcaagtctatttcaaaccaagtcataagtatattgaaagggaattggagtcttcggcgaagacaaaggcttccactccgtaactcatgcttcgccatcactccgagcaactctctattccttggggagaaatgagcatcaaagaaaa

SEQ ID NO: 38738 - DNA, 212 bp, Zea mays
ttcttcccatcgtttttgtgctcatcagaagcatgccagctcataagtttggcatcctcagggttagcgaacaaacacctcaatcgattgacgacggggaggtaccacatcaccaaagcaggaatctttttgagcgcataatagtctacttcttctttttctttgctcgtggattttgaagtcttctttttggctttctttcgctttttcct

SEQ ID NO: 38739 - DNA, 212 bp, Zea mays
tgttccaaaggcctgaagactcttaggactttcttttgtatctatctgtagaaaacttagggtctctttgcattacttgacaaggaattgtaattgttagttgaacaaaatattgtacaaatttgtgaatatcttgtaatataattgtacctttttgctcctgtatgaattgctttgatatgaacgaaaccaacacttgcaatttttgagcc

SEQ ID NO: 38740 - DNA, 215 bp, Zea mays
ttcttgcataatctacttcatcatcactagactcatcatcacttgaagaagcatacgtaatagtacttcgagtatttaccttcttctccttttccatgaggcaggtgtgatgctcgttggggaagagagctgacttgttgaaggctgaggcggcgagtccttcattgtcgtagtcggacgaggagcaatccgaatctcactcctttccaaggtgt

SEQ ID NO: 38741 - DNA, 216 bp, Zea mays
acttcatggacactttctcaagaggacagaaacaccgagctgggtgatcccaaaaggcaacaaccttctccaggaacccaggaaacttaaaccaaaaactttccaaatgaaaactgcgcttcccccttaggttcaccttgagcttgaaagccaagggacattgatcagaggtttcaggggcattactatagagcatacaatgcagaaaaaaaattc

SEQ ID NO: 38742 - DNA, 216 bp, Zea mays
agcttgtaggggttgtgatgtcgccacttacttgatgctaacaagacatttccttcaccaaagccatcttcaacacttcgcccataaaaaagatcaattctcattttcaattgcgtgcaagacaagtgataattgcaataagtaaattataatctacatttatataatctagactaccaaacaactacatatagtagattataatctagattatat

SEQ ID NO: 38743 - DNA, 214 bp, Zea mays
tgagttatgttattacagaccagagctaatagtgagtgcagagtagtaatattatacaaaccaagggaggcacaaactcctcccgataagtttaataaacaaaagatcctaagtggcggaccgagtcctcccgcacttcagtcttgtttttcttcttttggaaccaccttggcacagaagcagcaaaagtctgctacttcctcacctaaaaaca

SEQ ID NO: 38744 - DNA, 213 bp, Zea mays
agcttgtaccatcatggtggtggcagcagcaataaaggtgttattaatagactccgccatgatgcatttgaaaccatagtttgcaatagactcaacagagttaataaacttcaatgaaaaaatatatctataaattaaggagacattctggcttcatttgttagagcagggacggacacaccttcaaggcaacagtggggaaaggaaatccgg

SEQ ID NO: 38745 - DNA, 211 bp, Zea mays
tgacattgtctcccctttggaagccaatgccatccttgatgccagggcgtctcccattatacagcatgctacgagcaaatttaaatttctcattttctaagttgtgctcggcaattttagcatctagtttagctatatgatcattttgttgtttaattaaagccatatgatcaagaatagcattaacatcaacatctctacatctagtgca

SEQ ID NO: 38746 - DNA, 211 bp, Zea mays
ttcttcggcactgtttccaatctcacaacatcatcatactttcatcataacccttgaaggacatcataagaaatagagaagcctcggggaagataggaaaatgggcttcgagctcaatgagtttgtcatcgattttgtccataggtcagctatccaatctcaggcattggtagattttgttactgattggacttctggctcataggacgaa

SEQ ID NO: 38747 - DNA, 208 bp, Zea mays
ttgtgcatctttacgctcgcctaagccaagaagataaggcggtcatgctcaaacttctagaaagagcgagagagcaaagcgaagctcgtcaaaggctagaagatattctctccatgaaaatgctacactttgacgagttgactaaagaacatgaggagctaaagtgctctcatgttgatttggtccaaaggtatgaaactatttcaat

SEQ ID NO: 38748 - DNA, 211 bp, Zea mays
tgcttgccatctagtctcaaactcttttgtagtctctgaatcccatacacacgaattaatcatttttctaaactcgtcgtcctttagtagatgagcatcaattttctcaggcaacttcttcataatgtgccacatgcacaatctttgtattgtgttaggaagaacaatagcaatagaagctctcatactagcatcctcatcggtgacaatt

SEQ ID NO: 38749 - DNA, 208 bp, Zea mays
tgacaacaccatttgacattttacataaaatttctgagatcaagaatatttagttcatttctcaatatgcaaaagcgggtcttatcaagtggcttagtgaaaatattcgctaattgatcttccgacctcactccttctaaaatgatatctcctttagcaacatgatctctaaggaagtgatgatggatatcaatgggcttggtgcaac

SEQ ID NO: 38750 - DNA, 216 bp, Zea mays
ttatgcttgccggtcgcttcaaatccaagcgccctcgtgcagacgatgctgactacactccaaccactgattcagaggcccaatcttcagctggggacagtgaatctatggacacagaagacattcctcatacacatcctgactacccaattgacattacaggatggacatttccaaagaggtggttttctatggctgaatactgctcccggagaa

SEQ ID NO: 38751 - DNA, 210 bp, Zea mays
tgtagttatatttgttactcttggagccttggttcagccggctagagcgctgcccatggagctttccatattgtgttgtagccttgggaagtttgtaatccatctattcaattgagtaagaaacactcatatcaagagcttgctcttttgacttgagaatgaggatacagtttgagtaacccaagtcgtcaggtgatagttagggataca

SEQ ID NO: 38752 - DNA, 212 bp, Zea mays
agcttgcctttgataagcatcttcatttttgtatatttgtaaatcaggagggattaagctttattcttccttgtgctgttacataagcatatagactgaatgcctctttattcagagcagttggatactgtaaatatgataatgatagcaatggatgcttttaagatctgttctgatttgccaacacgagttgtggtcaaagatgatttatt

SEQ ID NO: 38753 - DNA, 208 bp, Zea mays
tctgcgcgtttatccgtcctccgtccgagcaggcgctgcgcccttccacgggatcatccctgggaagcgcgtccagcccctcgggcgactcgacctcccagtctgcttcggaacaccctccaacttccgaagggagaccctgacgttcgaagtggtcgggttccgaggaacctaccacgccgtgctagggaggccatgctacgcgaag

SEQ ID NO: 38754 - DNA, 213 bp, Zea mays
tttcttaaccgaaagaaaagaatgtttttatacctcttcttctttggttcatcgtctacatcaggttggcctcttttgcatgttctccaacgatgacctgtaccttggcatatagagcattttgatggtgccctctttttaccccctcatgacttcctttgtatctttgtatttttggcctccctgcagttctccttaggatgggtgggtgta

SEQ ID NO: 38755 - DNA, 208 bp, Zea mays
tgcttcggccgaggggtccttcgtatcatcgatggagaaggcagcttcggtctgggccaaggttttaacatgttcgcaacctaccttctccagaatggctgcaactcccctcgcaccagagaatgcacagacgtccctgcggtcactcaaaatctcttcaaaagcttcggcttcaccgctgatccactcgattacgccctcaggatcg

SEQ ID NO: 38756 - DNA, 208 bp, Zea mays
agcttgtgaaggttcttcatccccacatgtgctaagcggcgatgccacagccagcccatgctagtcttagctattaagcatgcatctagaccggcctcttcttttgcaaaatcaactaaataaagtttgccgtctaatacacccttaaaagctaatgaaccatcgcttcttctaaagacagacacatctacatttgtaaatagacagt

SEQ ID NO: 38757 - DNA, 207 bp, Zea mays
taataaccaaaccatttgagcacacatgtaggggagttatcactaatagcctgagatacttgggacatggtggtgaagtggcttggatttgttgcaatgatcaactagtttgataaaggagctcatttcacatgagacatgacgaggtggcataaggtggagaagctcaataggcatgacttggctatgaaggacttggttgctagt

SEQ ID NO: 38758 - DNA, 213 bp, Zea mays
ttcttcagcagagaaggcagaaaaaccgagtactgaaggaccgaaaatattggaaattttaagtccttcagcaagtgttgagacaataaaaagccaaaagggcccagcggtgaccccaaaaagaaaaagaatggtcactgtgctagatgttctggagataattgagtcctcaagcacgacgccgaagaaggctgttgaaacttccgaagcaga

SEQ ID NO: 38759 - DNA, 211 bp, Zea mays
tgaggaaggttcaaactatgaaactagttctgaatatatttaatcaaacatattttatatacttattgagaatgcaactgtacagatattggtggccttaccatttcgaaggaggggactactattgaatcttgataatggtatgggaatttatttcacatagttggatggtgtataagtgtattgatattgccatattgttaagcaggac

SEQ ID NO: 38760 - DNA, 212 bp, Zea mays
ttcttttcttctgacgaagtagacactaaactggagcttcgtctgattgcgagagtcaagcttcggctatgggtaaaaattttggcagcaaaacagtgcaatagcaatgaatgctgtggtaacttcacacctacccgtctgtttatatagtactgcaggtaagaaggtgaatcgtcaggatttttacaccaggcaaacagctgctcacaccc

SEQ ID NO: 38761 - DNA, 214 bp, Zea mays
taatgggcggtttaattttacactaacatctgggcaaatggtggccgagaaatagctcacgaaattatgaagaagagcgaaaaagatattcatgacgcccgagtacaagctaagcaagctgaagaagctgtagagcgcgagaggcgcataggtattgtttcgcggcatctagcttcgacatttgtttttgtgacctcgaactgattaatttttt

SEQ ID NO: 38762 - DNA, 205 bp, Zea mays
atcttggctcgaagcagccaagtggctgctcggtctgggtgcaccagacagtgtccggtgcgccaagctagggtctatcaacaggttgctctcggaattcaacgacggtgtacagctataattcaccggactgtccgggggtgcaccggaatgtccggtgagccaacagacggtcggaccaacggtcggccgcataattcacgct

SEQ ID NO: 38763 - DNA, 212 bp, Zea mays
tagcaagtctctagatccgaaatttttactcaccgtcactggccgtcgtggttagctagctatctcacggggggaaaatttttttctttagcaacgtggttacacacgctgacacgcatggcgaaagcagaagggacaaacatagaaaccgatagcaagcagatagcttcagagatcactactgttggaaatatgaagagggggaggaaaag

SEQ ID NO: 38764 - DNA, 216 bp, Zea mays
agcttatgaaggttcttcatccccacatgtgctaagcggcgatgccacagccagcccatgctagtcttagctattaagcatgcatctagaccggcctcttcttttgcaaaatcaactaaataaagtttgtcgtctaatacacctttaaaagctagtgaaccatcacttcttctaaagacagacacatctacatttgtaaatagacagttatacccc

SEQ ID NO: 38765 - DNA, 214 bp, Zea mays
tataaagattcttcatcccaacatgtgctagacggtggtgccagagccagcccatattagtcttagctattaaacatgcatctagatcagcattatcttttgagaaatcaactaaatagagcttgtcatctaatacacctttaaaagctaatgaaccatcacttcttctaaagacagatacatcaatatttgtaaataaacaattatagcccat

SEQ ID NO: 38766 - DNA, 214 bp, Zea mays
agcttcttgtgccgcaaatcaccgaatgctaagggatggtaatttaatcgtgattttccaaagtttaatgccaaaaaggcactttctactgccttgctatttgacacatgtcaaacaccagatttcatatttttcctaagttcttaataataaaacattaattatcccaaggtttggggtgttttcaccttggggcattatttataagggtatt

SEQ ID NO: 38767 - DNA, 212 bp, Zea mays
tactcctccctgggtagggccgttcatcatcgccaagattttgaagcccgggacatacaagctggccaacgatcaaggcgaggtctacagcaacgcttggaacatccaacatctacgtcgcttttacccttaagatgtttcaagtcgttcatatacctcgttctctttacatacacaaatagaatctaaccatcaaggaagggtcagccttg

SEQ ID NO: 38768 - DNA, 215 bp, Zea mays
ttctttcttcaacaacaggggctgccgctctgcagccgctggaccccaaccaggagaccctctctcttcgggaggcccgaagccaaaagaggaaggccaccagtccaacgcctcaggaggacgacttggatcaagagatcagaaatatggagatgctccatcaacaggtgcaaaagaagaaggaaaagatggctaggctagctaacctgcaaagg

SEQ ID NO: 38769 - DNA, 204 bp, Zea mays
tggtctttttattgctaactgtcctgataatgaaagtgaccaggaaaaggggaacaaaagggagaagaagaagcactacaaaaaggccaagggcgaggcgcatataggcaaggagtgggattcggattgctcctcctccgactccgacaatgagggacttgccgccaccgcctttaacaaatcggccctcttccccaacgagcg

SEQ ID NO: 38770 - DNA, 211 bp, Zea mays
agcttatgaaggttcttcatcccaacatgtgctagacggcgatgccacaaccagcccatattagtcttagctattaagcatgcatctagaccggcattcttttttcgaaaagtcaactaaatagagcttgtcgtctaatacacccttgaatgctaatgaaccatcactccttctaaagacagatacatcaacatttgtaaacagacaattg

SEQ ID NO: 38771 - DNA, 209 bp, Zea mays
tctaaagggagagcacattttaggactaaccaatgttcattttgagaaagacaggatttgtagcgcatgccaagcaggaaagcaagttggctctcatcatccgcataagaacataatgacgaccgacaggccactagagctcctgcacatggatctattcggcccgattgcttacataagcatcggcggaagtaagtactgtcttgtta

SEQ ID NO: 38772 - DNA, 213 bp, Zea mays
ttcttgtacagagtccgcttgaactaatcttcggagaaacccaaccccagtgcaatatgacaccagaaggtccaacccaaacggtgctggctgaattcagaattattgcagagcacattggcactagggatttggtgcaggaattcctagctttcaaagtatttccaactatgaaggaatgggctatgccgaagcttaaaggagagaagaaag

SEQ ID NO: 38773 - DNA, 211 bp, Zea mays
tgagaaaggagaaactgaaggctgcaccagactccatctaaaacaagaacaaggaaaaaggtgaaaattaaagtataaatgttgtttgcactaatgatctttctatgacctccaagcacaaaaagaggattagaaagaggagatgcttcagatgcaaggagctaggccatttcatagcttcatgtcctcacatgaagaacaagagccttgc

SEQ ID NO: 38774 - DNA, 213 bp, Zea mays
ttcttttaatgattaaagccatctcctcattgtcgagcttggaggcgtcaattggttgtctacttggtgtagactcctccttcttttcctctgtcgccttgaaggccaccggttgcgcctcggacgtggagggttcgtcaagctcgttgatcttctttgatcctttaatcatacattcaaagctcacaaaattcccgataacttcctcggggg

SEQ ID NO: 38775 - DNA, 210 bp, Zea mays
tctaaagggataacacgtgataggtctaactaatgttcaattcgaaaaagatagaccttgtgcagcttgtcaagcagggaaacaggtgggaggctctcatcacaccaaaaatgtgatgacgacatcaagacccttggagatgctgcatatggacctttttggacccgtcgcctatctgagcataggagggagtaagtatggtttagttat

SEQ ID NO: 38776 - DNA, 212 bp, Zea mays
agcttgtgtggcttgcatgcggcttgcatgcagtgggaggttgagcagcttgtgcggcttgcatgcagggaggttggtgcatgcgacgcgcgagcggggggcacgacagtggtctacgttagcgtcttaatagttatagagattcttattattcactatgcttctgtttcagaaatatccaatctcaagtcacatcagtcataagtgtagtt

SEQ ID NO: 38777 - DNA, 208 bp, Zea mays
tcttctcagcttctctgaagtagcccagttttatcataatgggcatatcagctttagacacaatagatttttcaaaatccaagtggccgggttttgacgagatcagaatgctataatcctcttcttcttcatcaccgatttcttcatcaacatcttgttcagcttcggcagcaggtgcacctttttcaatggctccctctgtcacaac

SEQ ID NO: 38778 - DNA, 207 bp, Zea mays
agcttgtgaaggttcttcatccccacatgtgctaaacggcgatgccacagccagcacatgttagtcttagcaattaagcatgcatctagactggcctcctcttttgcaaaatcaactaaataaagtttgtcgtctagtatacccttaaaagctaatgaaccatcacttcttctaaagacagacacatctacatttgtgaataaacag

SEQ ID NO: 38779 - DNA, 206 bp, Zea mays
tgaaccgaggtcccgcatcaccggaatagcgaaaccgtgctcgccggagttcatcaccccgccggcgcacgtggaccgggtaaatcactgcgccatttttcgattcaatgcacagatagcctctacatcaccccaggaagctcaccgtgccgttggattggattaggtcgtcgtggtttggccggcacacccgccgccgacgagga

SEQ ID NO: 38780 - DNA, 207 bp, Zea mays
agctttcccgtggcttgtagtaggcttgtcgccggtttccatctccttcttggcgtgatctcccgacatcacttcgagcggttaggctctaatgaagcaccgggctctgataccaattgaaagtcgcctagagggggggggggtgaatagggcgaaactgaaatttacaaagttaatcacaactacaagccgggttagcgttagaat

SEQ ID NO: 38781 - DNA, 207 bp, Zea mays
tgtacacctcaccccacatatgtttccttgccatagatcacattcttggatttctggtggagaccatttcttgctcaaaaatccatacgtgttatccttcggtattattgaaaatggtcgttcatggctattttcgacaaaaatgggggttgtgtggccattgatcatcgaccagaggctcgtacacctcaccccacatatttttcc

SEQ ID NO: 38782 - DNA, 211 bp, Zea mays
ttcttcggcgatggttaaaaattttggcagcaaaacagtacaaatagcaatgaatgatgtggtaacttcacacctactcgtctgtttatatagtgctgcaggtaagaaggcgaagcgccagaatttttacaccaggcggacacccgctcgcactcgctgcatggtggaccgcagagaccgaacagtaactctgcaaggtggggccgttaca

SEQ ID NO: 38783 - DNA, 212 bp, Zea mays
ttgatcttcctactactcttgctggctcggtcactttagaggtcagtgatccgagtgttgatgatctgctgcacgctgttgaagctaaggtcccactaggtgtcgccttgggcatgagatttaatcctcctctagggctcaagtctgctctcaatattgcctccaccagtgtctcgtcatttgatggcacctcagcacctccggctttggga

SEQ ID NO: 38784 - DNA, 217 bp, Zea mays
tgcaggtcgaagattttctctttaacattgacaggaaaaagcaaagaaagagaggatgcttcgcatgtggggagaagggccacttcagggacaactgtccaaatatggccaaacccaaaaaggagaggagcaaaggcaaggcgctaacaagtgttagaacgtgggatgattcttcaagtgaagatgaacctccaaggacgcgcagccaccggtcctc

SEQ ID NO: 38785 - DNA, 211 bp, Zea mays
ttctttacaccttaaggatttaactcttagagatctaaattatgatcttatgaaaaactctatgtttgttgactggttaagtgttataaatatataatggtggttacacaaaatatttaggaagcgaagaacatcgataagtctattcctgtgaaaacccaaggactattagtggagaatgcgcataagcgggttagatctttggttgttt

SEQ ID NO: 38786 - DNA, 213 bp, Zea mays
ttccaaaaagtcttggatcactctttttggtggtcagaagattaagttataggtgtttaaagtgtgaagactgaatctgtccagttctggacagcaaagccttctagtgtcttttactcttgatacatgttaaatcaactgaagatgttcataaatgatttgtacaaaattttattatctttccagaaagtttaggatcactttgtttggatg

SEQ ID NO: 38787 - DNA, 215 bp, Zea mays
agcttgaccttctagtgtggtggaaggcatctgagcaaaggtttccgattctatctcgcttagctcgtgatgtgcttgctataccaatctcaagtgtagcttcagagtcagcttttagcacaggtggacgcattttagatgactttcgcagctctcttactccattcatgctagaagctctagtctgtacacaggattggctaagatggacaata

SEQ ID NO: 38788 - DNA, 213 bp, Zea mays
tataaacccatcgatatagtaagggtttctttagcaaattagcaaggcttctagtaaaaggtttcacatgtagcttctgtggcttttcgaagaagtctcccaaacaatcacatgcgagaacaacttgtgaagtcaaaatcaagcaaaaaaagtgatgaagtgaagcagttttggtctagaagccgaagccacaaaaaatgtacagcctgttcg

SEQ ID NO: 38789 - DNA, 213 bp, Zea mays
agcttgagcaagtctcacggcctcaccaggaagctatctgagggcttggatcgaacgtaggaggacgggagaggggctggccacgatggttgctctcgggcggcactggcgggtcgcggggaggtcgccggagctaatggctggctcgggcaagtccggcgaggtacggaggaggtaacggggaaggcagccaagcactggggcgggctttat

SEQ ID NO: 38790 - DNA, 212 bp, Zea mays
tgacaacaccatttgacatcttacataaaatttctgagatcaagaatatttagttcattcctcaacatgcaaaagcgggtcttatcaagtggcttagtgaaaatatccgctaattgatcttccgacctcactccttctaaaatgatatctcctttagcaacataatctctaaggaagtgatgacggatatcaatgtgcttggtgcgagagtg

SEQ ID NO: 38791 - DNA, 213 bp, Zea mays
tctttcttatgaagattcttcatcccaacatgggctagtcggcggtgccagagccaacccatgttagtcttagcaattaagcatgtgtcgagttcagctctataaaaatcaactaagtatagctgaccctctaacacacccttaaatgctattgaatcatcacttctaaagacagtgacacctatatcagtaaaaagacagttgtagcccatt

SEQ ID NO: 38792 - DNA, 210 bp, Zea mays
tactctttcctgggaagagccattcatcatcaccaagattttgaagcccgggacatacaagctggccaacaatcaaggcgaggtctacaacaacgcttgcaacatccaacagctacgtcgcttctacccttaagatgtttcgagtcgttcatatacctcgttctctttacatacgtaaataaagtataaccgtcaaggaagggtcagcct

SEQ ID NO: 38793 - DNA, 213 bp, Zea mays
ttcttccatagcccaccaaggtgctgaaacgagagcaaagagggtatgaacagacctggaaatggcggtccacgacgcgacggctcacggcggcgcggagaaccgaattgggggaagaaagaaattatggcgctatggtggctaatcggagacaggggcgggtgctctagcttcgtgacaacataacggagctagcggcaccttcaatttata

SEQ ID NO: 38794 - DNA, 209 bp, Zea mays
tggaagaaaattttgcggataaacgacgtcgacctttggtctttcaagtcaaagattatgtatacctaaaagtatcaccgatgaagggtgttaattggttcagggtaaaaggaaagttggcaccccgatatattggcccatttcccattcttgaacaatgcggaccagtggcgtacaaacttcaactgcctgagtcattatctgcggta

SEQ ID NO: 38795 - DNA, 213 bp, Zea mays
ttcttttacatgtcacttgaaaagagggggaaaagaagattttgtgatcacagacaaacatgcttgccaatgaagaggtactttgatttgaacatttggtaataataatcgtatcttcaggcttggaaaacagtatgctaatgagaagccacaaatcatcttcattgtggcgcacaagaagcatataactaaatctagcatgaatgaggtgat

SEQ ID NO: 38796 - DNA, 208 bp, Zea mays
tgcctcgagactctgttctggtagttctagtgaggactaagtctccttcctggaactctctggggatggcggtgttgtcgcgccatgccttagtctatgcttggtatttgttcagttcctctagggcaaggacacagtctccgtcgatgaggtccttggaggttggctcgtcgacgtcaggagtgggtgtggggcttgctcgtggaga

SEQ ID NO: 38797 - DNA, 211 bp, Zea mays
agcttggtgccaatggagaagcaaaaatccttgaagtcttggctgtcaaactacttgccgttgtcaactgttagttcagacggtactccgaagcggcaaacgatattttgccaaaagaatttctgggcagtttttgacgttattgtggaaacagcccttgcctcgatccatttggtgaagtattcgacagcgacgaaggcgaacttaaggt

SEQ ID NO: 38798 - DNA, 207 bp, Zea mays
tcgacacaatgatagatctcaagacgaagggccgaaccgacttgaagatggattgacttaaagacccatgatgtttttgtcattattatagtcgattgtaatggacataaatgtaattttacgcaggttgcaccctgtgtctataaataggtgaacagtaccccgacactgttcacgcgatcctgtaatcactggcacattacgctt

SEQ ID NO: 38799 - DNA, 217 bp, Zea mays
tttttgcatatcttgccttcagctcagtatatcacccgcaggtccaacggagttgcggaacatagccactgggaaaaattttgacagctcgtcaaaaagatgctcctcgaccaaaaaaagggcaagtgggccgatttgctacctgacgcggtctgggaccctactcaccagtgattgcccggggaccggtttccccccctttacgacttatatatgg

SEQ ID NO: 38800 - DNA, 207 bp, Zea mays
tggctactatctcgccctttgcgagtcgtatcaaaaacaggatggcaagtgatatggaaacaatcaacatgaaaaatacactattccatcctctagttgagatgtaacccgtaagcaagggacccagagctgcaccaacagaaccagtgccgtcaattatcgcagaaaccgtcgccagcgcccgtgaatttcccttgatagcgtctt

SEQ ID NO: 38801 - DNA, 140 bp, Zea mays
ttgtcatgcaagcttagaagcactttcgtttcttagtccccccgacatgatcttttcctcacgcggttaagcgttagaacgaggattaggttctgataccaattgaaagttgcctagagggggggggggtgaataagcaa

SEQ ID NO: 38802 - DNA, 207 bp, Zea mays
tgtggcgtcctcgagcgtcctgccgcagccgaagtaccaagtctcccacctggaagcctcggggccgaacccctcgggcgtggtagcgtcgcagagactgctgataccgcgccgagtgtagtgaggccacgtcccgagcctcttcgagctggtccagagagtcttctcggctggcctggttgcttcggtcatcgtacgcctttgtcc

SEQ ID NO: 38803 - DNA, 211 bp, Zea mays
ttctttggccccacttgcaggctcgtatcctcccctgaagtgggcccgggggccactatcggtaccctgaatcaggggtaccccttactatagtatgaaggcgtggagtccatgtggctatctctagtcacatggcaaaatagcgcccgaccccaccgcgtgggtggctccagggccgccacgtagccagaggagacgatatactccaagg

SEQ ID NO: 38804 - DNA, 213 bp, Zea mays
ttatcaaatggacgtgaagagtgccttcctcaaaggaccaatcaaggaggaggtctatgttgagcaacctcccggctttgaagataatgagtaccctaaccatgtctataaactctctaaggcgctttatgggctcaagcaagccccaagagcatggtatgaatgcctaagagattttcttatcgctaatggcttcaaagtcggaaaagtcga

SEQ ID NO: 38805 - DNA, 213 bp, Zea mays
ttcttagtcatggcaattctatgtgaatttagtgccaaccaatcatttttagccaaaagggtgaactaacaattaaatgagtgcttgcagatttttgggacagcagcacaacagttacttgttttaatcataacttttcaaatattaatgcaaacatagcaaactaggactttctggaaagcttaaaatgttatctacaactttggtattttc

SEQ ID NO: 38806 - DNA, 213 bp, Zea mays
ttaccctagtgtttttcgagaattggtcatcttaaaagtaggaataatgttctctattagtaaactcaactagttaaccagattcaatttgtcactataggaaactaatataatttgtagaaccgaagaggcaccgtggaagttgtaagggtgaaaggtcatctttactcccacttcaaaaccattgatgagtgatactttttgtgtgctccg

SEQ ID NO: 38807 - DNA, 215 bp, Zea mays
ttttttagcgattaatccactgatagaagaaagttgtagttcaaggcacccctctacgctaaaacctgataattttgtacagagtaaacccttaactttttaagccccaatttttgagactgagagttatatacctgtgagaagctactgcaatatttacagaagttttggaaatttataaagctatgttgtagttcaagcccaccctaaaaata

SEQ ID NO: 38808 - DNA, 213 bp, Zea mays
tccattcttttgatataagcttcatcattcaaaagacaattgccttgcaggaaagatacaatctcagtccttcaatcttcactatgcactgttgagattgtaagtactgctcgctccatgagctcgaccgaaggtgcttttattgtttcaaaaaatacttccaaaggtaatgggagcccctgtgccgctgacttggctaataggtctgcatgt

SEQ ID NO: 38809 - DNA, 216 bp, Zea mays
ttttttataggaagttatagtattgtggcacaggatgaagcttctattctagtgattaccaaaagatgtcaattgaagcaaactatcatggctaccaattgaaagatcatttatcatcatagcttcatgatatttaaggataagcatctagtattaccaaatattatagagcatgagcaatctaaaaatatgcaattactcatgacttaagatacc

SEQ ID NO: 38810 - DNA, 212 bp, Zea mays
ttgcatcaaatttttttttctcttgttcgaatctttttgatttcgtggagagttcattgtttaatctagcaatctcggcttgggcttctgctagcgaaccctccattgtttgaatcacgaaatccttcttctccagagcagcttcgtgatctttaattttgccctctaagccctcaattatgatctcatttttcttgtcttcgaggtcttgt

SEQ ID NO: 38811 - DNA, 211 bp, Zea mays
tttttctcgttagccttggggacgatgactggattggccacccatactaggtgatggacctcttcgatgaagccagtgtccagcagcttccggacctccttacggatgaaatcctaccgctcaacggactgtctccgtggcttctgactcaccggtttggcgtcagggtggatcttcagatggtgctcgatcacctccctgggaatcccag

SEQ ID NO: 38812 - DNA, 211 bp, Zea mays
tggaggcgtctatggggagcctacttgatgtagactctactttcttctcctccggtgctttgaatgcaacgggttgcacctcaggtgtggaggtgccgccttgctccaagttgatgatttgtttggagcctttgcttatcaattcaaagctcacaaactttcctataacctcctcgggagacattagcttgtatctaggatcaccacgtat

SEQ ID NO: 38813 - DNA, 215 bp, Zea mays
tcttttctttatcaaatggacgtaaaaagtgccttcctcaatggaccaatcaaagaagaggtctatgttgagcaaactcccggctttgaagatagtgagtaccctaaccatgtctataaactctctaaggcgctttatgggctcaagaaagccccaagagcatggtatgaatgccttagagatttccttatcactaatggattcaaagtcggaaa

SEQ ID NO: 38814 - DNA, 210 bp, Zea mays
tctaaagggagaacacgtgataggtctaaccaatgttcatttcgaaaaagatagaccttgtgcagcttgtcaagcagggaaacaggtgggaggctctcatcacaccaaaaatgtgatgacaacatcaagacccctggagctgctacatatggacctcttcggacccgtcgcctatctaagcataggaggaagtaagtatggtttagttat

SEQ ID NO: 38815 - DNA, 211 bp, Zea mays
ttcttgcttacttggtaagatgaccaaggcgcccttcacgggtttaccggagaggacgttagatttattggaactcatacatactgatgtgtgcggaccaatgagtacgacagctacgggaggattccaatacttcataaccttcactgatgattttagtagatatgggtatgtctacttaatgaaacacaagtctgaatccttagaaaag

SEQ ID NO: 38816 - DNA, 209 bp, Zea mays
tcaaaaggctttgtcaggcgactgaagcagatgcgccatggtacagtaacctgaaaggattagaacgccagcgcggcttgctcaccgccgacggattcctccgccgtgattcgggtcaccggcgtttggattcgtgcaccggacttgtggatagcgccgtggggttaaaagatcgtcgtcaccgctggactggaagctaccccgatcgg

SEQ ID NO: 38817 - DNA, 210 bp, Zea mays
tagtcttgaaaggaaatgctgctggctcgatctgcaggggcaacagagttttgtaaagtagattgaggccttgactcgaatggagtttgtagtatcatcgatgagatcgtttggataaatttacctatcgttcttcacatccttaaatgtctatctgctgattggaaatgttgctggttggatctgcaggggcaaccgagttttggaaag

SEQ ID NO: 38818 - DNA, 211 bp, Zea mays
  unsure (1)..(211): unsure at all n locations
tttttcttcctcngatgatgctaaccgcttgagcattgcaatgcacttcttgcatcatttctggcgccatctcttctccttgggtgggcttgttcatacctatgttaataatctcccaaagactcagatgcacaccgattagatgcgacttcatcttgtcggcccactcatcatagttcaactcactaagagtcggaagctttccgggtgg

SEQ ID NO: 38819 - DNA, 210 bp, Zea mays
ttatcatatgtttcttgaaaagtgccttcctcaatggaccaatcaaggaagaggtctatgttgagcaacctcctggctttgaagatagtgagtaccctaaccatgtgtataaactctctaaggtgctttatgggctcaagcaagccccaagagcatggtatgaatgccttagagatttccttatcactaatggattcaaagtcggcaaaa

SEQ ID NO: 38820 - DNA, 212 bp, Zea mays
ttctttttgcgcacagtttttcaactgatctttgggaacacgaccgagctcggatcccccatctgtggctccaaactctgtaccacgatgctcccgccacttccaaatctgccaacgcagctcataccttggcggaactcgaaaggcggataggtattacttaatggcttttaactttgttgtttatttttgtgactttgaactgatttacg

SEQ ID NO: 38821 - DNA, 206 bp, Zea mays
tctaaagggagaacacgtgataggtctaactaatgtaactttcgaaaaagatagaccttgtgcagcttgtcaagcaggtaaacaggtgggaagctctcatcatgccaaaaatgtgatgacaacatcaagacccctggagttacttcatatggacctcttcggacccgtcgcctatctaagtataggaggaagtaagtatggtcttg

SEQ ID NO: 38822 - DNA, 207 bp, Zea mays
ttcttgtacaggtttgggccgcgtgagaggcgtaacaccctacgtcctgcggtggtcttagtattgggatgagattaaaagctgtgaactatgagaacggtgggttgaggtaagatgataatggtaggggtgcctcttagccttatatatgcgaccaagggtagctatccccgcacaaatgaccaacgtaatccattcacatatctc

SEQ ID NO: 38823 - DNA, 207 bp, Zea mays
tcgacaacatttgagttttggcggatactagtcatggttcaatttcggagcgcaatgagtatatcaacaacaggtacgaccaactaatgatccagtgaaatataatcagttgcaggttgatctaatccaccaccactgggtgcggcttggatctggagctgcttaagtatgaagtttatgcctgccatgtgttaagtatgtttgtca

SEQ ID NO: 38824 - DNA, 209 bp, Zea mays
tgctttaaaactaaagactcagggaattttaacgcgcaaaagctaaaaatcgagtgatcgagagcaattgacaagagagcgtaccaaataagctcgcggtatgctcttatttatacgctcagtgcggtaaaaattgaaagaccccgcctgtcagtgaatgttgctattctagcaaagggaaggtgttttttcggaccttcggcttaaag

SEQ ID NO: 38825 - DNA, 206 bp, Zea mays
tgtggaaagacaccgaacctaaagtgcatgtcttaagtgaagggcaaggtggaacggagggaaaacgggaggaggcgcgcggcgacgggcggcagggctgttcggccttgcgtttgggctgaaaacgaggggttcgccatggcgcacgggccgaaaattgaggctggggcacgaccccgaaaataagctaagtccaagcatgtgga

SEQ ID NO: 38826 - DNA, 214 bp, Zea mays
ttcttctaaagggagaacacgtgataggtctaactaatgttactttcgaaaaggatagaccttgtgcagcatgtcaagcagggaaacaggtgggaagctctcatcatgccaaaaatgtgatgacaacatcaagacccctggagttacttcatatggacctcttcggactcgtcgcctatctaagcataggaggaagtaagtatggtcttgttat

SEQ ID NO: 38827 - DNA, 213 bp, Zea mays
tgtgtatgtgaactacaacttgaggatatgcctaaaggatgcaattcggttcatggtggtggtgctagtgggtatcaaatggctctgatacatttcacatgtaccattacatttagttctaaataaattagtgatttatgtctaaccatgttttcataactatgtagtggagtcccagtatgaatacactacacaagaccaagataacgacac

SEQ ID NO: 38828 - DNA, 213 bp, Zea mays
ttcttgaagaattttattatcatgaatagaatgcatcatggttatcaaccgctttcacgttgactcagtattttcgcttataactgggagttttaagttcaaaacttaagagttttactctcgaatatggagatgcgtccaccaatgaacttcatgccaggtttttagactgtctccagcaacgttctctatatacatcctctatatccgtcc

SEQ ID NO: 38829 - DNA, 213 bp, Zea mays
tgaggctgtgtatatattaccgccctcttaatgcggtaactatcaagaacatgtatcctttgcctcgtattgatgtcctttttgaccagttggtcggggccaaggtgttttccaaaatagacctttgctccggctaccatcagatcaagatacgagcaagcgatattccgaagatggcattctcaaccagatatgggttatatgaattcttgg

SEQ ID NO: 38830 - DNA, 212 bp, Zea mays
ttcttgaacccggctattccatacgtgaaaagacaaccgcgcactgggcgtgggagatggtgggagtagcatgtaccctcctggctagaggctggacggaggagtactgtgctcccgggtagcgcggaccggttcacgttgtggaggatctgtgggaatggttgacatatgcaagggttaagtgctacatatgtcgtgtggttagagatcct

SEQ ID NO: 38831 - DNA, 212 bp, Zea mays
tcgccatggtatggctggtaaccatcgccggacttaggttgctcccctaccccaccatcctctgcttttggagccttcgtcggggtcgacagcttgtattaacaccttcgcgtccatcacttggtactactcgtcgtgtggcgtcaggttgccgtgcggatcaggcaccgtgggttggagtgggtcctccagtcatgacgctccaccgcggt

SEQ ID NO: 38832 - DNA, 214 bp, Zea mays
atcttcactagcctttgaggaagctaatggtgaagctagattgagcggagaggggctagggtggtcggaccatggtggccgaggcttggcgagattgtgggcggcaatgcgctcggttttctggcgatcaccgacgttcaggcttcggtgagggcatgaggcatgcaggagagcaaggccgagggctgggccatcttataggcgaaggcatggg

SEQ ID NO: 38833 - DNA, 212 bp, Zea mays
ttggagaagaggcaagttcttaagtctgcatcttctgaagtgaaatccactaagtagagattgctgtatctaaatcccttgaacaccattgattcatcatccatctttgatacaataacctctattggagtgaataagcattgaagtccaagatcacagagttgacccactgataataaattgaagctcaaaggtgcaaccaagagaacatt

SEQ ID NO: 38834 - DNA, 214 bp, Zea mays
agcttccttatagcttctaatatgagatcattgagcctggaaaaatcagaaatacataaagtcacatggacgaccaagcatcaagaggaaatgctaacatagttaaataaactaaataataaggcaactgctgaacagatatgctaacatagttaaataaaccaaataataaggctacatctgtaagaaattgaacattagaaagggcacaaca

SEQ ID NO: 38835 - DNA, 211 bp, Zea mays
tctaaagggagaacacattttaggattaacaaaatgttcattttgagaaagacaggatttgtagcgcatgccaggcagggaagcaagttgggtctcatcatccgcataagaacataatgacgaccgacaggccactggagctcctgcacatggatctattcggcccgattgcttatataagcatcggcgggagtaagtactgtctagttat

SEQ ID NO: 38836 - DNA, 214 bp, Zea mays
tattcttgggaatataacaactgggttttcttccagatcaggggcaccactgtctactccaactctgacaataaacatggcactaaaataactgcccctcatggcatcaatatgactctacttgaaagcccatttttcgaatatagaatggtttgggcgccactaccgatcctcagaggattcatccccactttccacatcataacaatcactg

SEQ ID NO: 38837 - DNA, 208 bp, Zea mays
ttgccatggatttacgctgcaactccgaatgaagctcctgactgcccattaaactgagagccttgggatccggcctgatttcaaactcactccgtgggagataatgactccaactatccacaggcatatttagaccgattaactccttctaatagatggaaagcttttgattggaaactcccaacgccttgctcaagaaagcgattgg

SEQ ID NO: 38838 - DNA, 211 bp, Zea mays
ttcttatggacttagaaatggagtcttttattctcacgctaatcctttattctttttttgcagggcttaatccttagcaacgtcctgagggcgcaaaagaacgctgaagacgagagctgcactatagctctcagcaaccttcgatcagaggtcatcagactgagaaatgaagccatggaaaaaacaaaattctactttcattgttggataa

SEQ ID NO: 38839 - DNA, 210 bp, Zea mays
tcaatgacagatcaacaagattttctaggccttcaaataaaacatcttttttttatgtcagtaataaagttacccaactgcaattcaagttttagtaaattggtaccaaatatgtcctttgaataaaaatcagcaagtctgcttaacttctgtgcatcaaaagaagcaaatgagtctttaggattgaatgccgacatacaagaaagtaac

SEQ ID NO: 38840 - DNA, 216 bp, Zea mays
tctttcttgaaaaatatctagacacggtccgaaaagtcgaagcttccttcgaaggattttctgtcaaaaatatccctcgaggacaaaatgagcatgctgatttgctagctaagtcagcagcacaggggctgcccttacctttggatgtgttcttcgaaacaataaaagcaccttcagtggaacttcttgaaagagcagtcttcaatatatctcctg

SEQ ID NO: 38841 - DNA, 209 bp, Zea mays
tcggggcagcttcaaagctcttgtcggccgccagctccaagaggcagaggcgccaggggcttcagaggaaggtttggggatcagcctagaaaaatttattgcttattctgtggtgaggacaagggccatactacaaggacgtgtcatgtcaccattcagaaacaaaaggaaatagcataagccacagctcagcagaaccagccgaagca

SEQ ID NO: 38842 - DNA, 211 bp, Zea mays
ttcttcacgggctactggcggagctagccgaagcactggctgggcttgagggtggctggagtgggctagccttggtggccgaagctctggcggcaatggcgggcggaattaagctcgccggagctaaggaaggtggctggccggagagggtgagtgcggggcgaaaagaggtgcgcccggggaggctttataggcgcgggcgggcacggcc

SEQ ID NO: 38843 - DNA, 208 bp, Zea mays
tcggctatggttaaaatttttggcagcaaaacagtgcaatagcaataaatgttgtggtaacttcacatctacttgtctgtttatatagtgctgcaggtaagaaagtgaatcgtcaggatttttacaccaggcaaacagctgctcgcacccgctgcgcggtgggccgcaaagaccaaaatagtgaacctgcatggtgggaccgctacgc

SEQ ID NO: 38844 - DNA, 215 bp, Zea mays
tctttcttgaagccatggtaaggagcataggctaataatatatgaattgactcaagcctagctacgggtgcataggtttcactgaaatccaaaccttcgacttgggagtatcccttggccacaagtaaagctttgttccttgtcaccacaccatgctcgtcttgcttgttgcggaagacccatttggttcctacaacattttgattaggacatgg

SEQ ID NO: 38845 - DNA, 207 bp, Zea mays
tgaaccaaggatcccgcgtcaccggagaagccaaatcgcgctcaccggagttcaagaactcgccggcgcacgtggaccgggtaaaccccttcaccatttcccgattcgttgtgcgcacggcctctgtgtccccccgtgaagctcctcgtgcaccctaattgacctatgccgccgtggtttggccggagcaggcgtcgccgtcgatcc

SEQ ID NO: 38846 - DNA, 208 bp, Zea mays
ttcttgagacgggaacaaccgtggcatgcactaaatcccttgaacaaaatggcaaggacttgaggattgccaagaggaggaagcaaaagaagaaaatcaattcctcttccaaaagcctcaaccatacctccataaaaggtaacattcaaggtaataatcaagtcacacttcatacaaatagaaataacaagtgtagtgaatgctttga

SEQ ID NO: 38847 - DNA, 207 bp, Zea mays
tctatagacaaccacctcgtcggcttcgggcagagggacattattctcccctccagccctcacaatagaaatgtcacgaaagtaccttcccctcattgcatcaatttgtccttgcttgatcgctgacttcccgaagacaacatggcttggtctcctgggccgatcttcggcaccctcattctcactttctgcatcaaagtcttcact

SEQ ID NO: 38848 - DNA, 209 bp, Zea mays
ttctttaccaaatggacgtgaagagtgccttcctcaatggaccaatcaaagaagaggtctatgttgagcaacctcccggctttgaagatagtgagtaccctaaccatgtttataaactctctaaggcgctttatgggctcaagcaagccccaagagcatgttatgaatgccttagagatttccttatagataatggcttcaaagttgga

SEQ ID NO: 38849 - DNA, 204 bp, Zea mays
tgagaaggatacgagcctgcttctgacaatgtaggaatttggtcgtctgctggaccagcataaagttgtccagaataaaccgtttcttaataaaagcggtttgattgggggaaaccatattttgcagccggcctgctaaccggttagccaacaatttagtcaccaacttcgcgaaactatgaaccagacttattgggcggaaat

SEQ ID NO: 38850 - DNA, 214 bp, Zea mays
atcttttctctttttctttttactttctaattcctatttcccattttgccccctttcttttgaacaaattattttttggatactctaagtgtttagaaaatagaatctaagtgaggtgctttgtgatcaaacaaaatgtatgcatatgaagaaagaaaaactagtggaggtcttggaattagaggatgaaaggaggggaaaagggtagattagg

SEQ ID NO: 38851 - DNA, 213 bp, Zea mays
tctagtcataactatatgcatggatgcacaagttttactgttagttggtaataaaccttttccctgccttttgaaaatgattatatatatatatagtttatatattaagagccctgtgcttttaataactatagaaagatcaggtcggatggtgcaatccggtcaagtcatactaggtccggacatctataaaacaagatctgtgttagggtt

SEQ ID NO: 38852 - DNA, 214 bp, Zea mays
tgcttgtgaagattcttcatcccaacatgtgctagtcgacgatgccagagccagcccatgttagtcttagcaattaagcatgtgtcgagttcagctctatcaaaatctactaagtacagctgaccctctaacacacccttaaatgctattgaatcatcacttcttctaaagacagtgacacctatatcagtgaaaagacagttgtaacccattt

SEQ ID NO: 38853 - DNA, 213 bp, Zea mays
tcacatctctggactaactcggcggcatcattcttcgctgttagccaatagaaaccagatctaaaaacttccccaaccagagttctcgatgcagcatgtactcagcattgtccggcatggatttcctccaatagttgcttcccaatagccgagtgaatgcacttcatgaggactcctatcgcacctcttctgtacagtgtgtcccctatgagg

SEQ ID NO: 38854 - DNA, 215 bp, Zea mays
tttcttatctaccgtgtcaccgtaattcgtttgagccatcccatcagcgttaaggagtttgccacgccgtaggccacgtaaccgcgcgccaagcttcttcctcccctccggccgccaacgcatcgcggtcaaattgagagccaccgctctcggagtctataaattgagcccccctcggcttcgctatgtattttactagctatcgcacccgctcc

SEQ ID NO: 38855 - DNA, 212 bp, Zea mays
tggcgactgccaattttacctctggaagcagtactacgtggccgcatgcgtcactgcgttgggcaagccccgccgcagctgccgcttggacgtggtccagagcggttgcaccgcgctgtccatctcaaacagggggacctcatggtcgtcaccaacgccagcgactcttgggttgttctgggcaccgcatccgacaatggcgccgtcacacc

SEQ ID NO: 38856 - DNA, 217 bp, Zea mays
agctttcccagtaggaggaaacaaataaaaagcttgtccaaacaagctggaagcaaactcatctattgaatcatcattccttgatggtttgttatgtttaattcgagaacccattcgatgtacctagaacaaaaggccgtgcattgagtctgccaaaaatgaatttgctatacaagcttctggataagttttattacgaacatatgactttagcttt

SEQ ID NO: 38857 - DNA, 210 bp, Zea mays
  unsure (1)..(210): unsure at all n locations
tggncgtttgtgtatggacgacaagcggttttaggctacggacagggagttgtaccgtcaccaaggtgccattgtcagaatgcctggtcccgaggttgagctgcgccaaaaccgagtctaacggattcggtttgagttcaaattttcccaaaatgtgttcaaggtaatttggcacgactttgatatttggatcttctggctttgagtttg

SEQ ID NO: 38858 - DNA, 214 bp, Zea mays
agcttttacgattgatattgtgtagggtatatatgctcaagtgctcaaccactagacagcatgcatgcaccatgcatcccacgtatgggaactcaggagatgcagtgtacagagacgcgacgaagaatgcagtgcgttagtgatctcagctcaggtgtcaccaatcatcagatacgcactagcaaagctagctgatgtcctaattaatctttga

SEQ ID NO: 38859 - DNA, 210 bp, Zea mays
ttgcaggggaaaggatatgatatgaagctttgaaggtgcttgagtgagttaattcaattcttattaacttgagctatcaatcttacaatgttttatatctctaaggttgacccaaagttattttgaattattatatctaaaactcatatcatctcgagcaagatattgatgttgtagggaataaaggattatcctgtgtggaaaatcaaa

SEQ ID NO: 38860 - DNA, 212 bp, Zea mays
agcttggagacgaatcgtgatctaatcgcaacgcgaagtgaagacgaacaagcacaagcaaacaaacatatgtatatgcataagaacattacactatacaagataaaatattataaatgcgaacaatataaaatagagagtgcctctacggttacgcgaggaaaagaaccacgatagacaaagctatggtcgaggggttagcacgtttacgc

SEQ ID NO: 38861 - DNA, 210 bp, Zea mays
tgtgaaggttcttcatccccacatgtgctaagcggcgatgccacagccagcccatgctagtcttagctattaagcatgcatctagaccgacctcttcttttgcaaaatcaactaaataaagtttgccgtctaatacacccttaaaagctagtgaaccatcacttcttctaaagacagacacatctacatttgtaaatagacagttatacc

SEQ ID NO: 38862 - DNA, 213 bp, Zea mays
atcttcggcttagcgaccttcggcgccatcatcctgcagaaaaacaaggtataaggtaatcagaaatttaataaggaaaaaacaaggtaaaaagacaaaggtaaagtttcatactgagttaagcagctttcgtgcttcatccccagccaattcacgcccgccctttgcccaaatttgggtaataaatctatttcctatacttcggcctcagtt

SEQ ID NO: 38863 - DNA, 209 bp, Zea mays
tgaagccatggtaagtagcataggctaataatatacgaattgactcaagcctagctacgggtgcataggattcaccgaaatccaaaccttcgacttgtgagtatcctttggccacaagtcgggctttgtttcttgtcaccacaccatgctcgtcttgcttgttgcggaaaacccacttggttcctacaacattttgattaggacgtgaa

SEQ ID NO: 38864 - DNA, 213 bp, Zea mays
tttcttggccatgtgaactactccctgctcctcctatgtggcctcgatcgaacaaatagttgtgcaaagcaaaacaggcaattacattcttcacttgcccgcttctttcatacattgggagtcctcatagcacatgccaccttgatttgagaaatccaaaagcccattcaactacatttcgcaggcttgagtggtggaaattgaactttttgt

SEQ ID NO: 38865 - DNA, 209 bp, Zea mays
tcatcagcaatttccttccctttccccgacgctgcagtcacggcctcttcggcggcggtggtagcttcttccgcagccatatctagcagtattctgtcaatattttcgattgtgctctccaggttcaaattttcagctgaggcagcttcggcagccgcgacctccgaaggtgtaatttcaatatctgtcccttcagcagacgctggtgt

SEQ ID NO: 38866 - DNA, 211 bp, Zea mays
ttcttctaaagagagaacacattttaggattaacaaatgttcattttgagaaagacaggatttgtagcgcatgccaagcagggaagcaagttggcactcatcatccacacaagaacataatgacgaccgacaggccactggagctcctacacatggatctattcggcccgatcgcttacataagcatcagcgggagtaagtactgtctagt

SEQ ID NO: 38867 - DNA, 209 bp, Zea mays
ttaccaaatggacgtgaagagtgccttcctcaatggaccaatcaaggaagaggtctatgttgagcaacctcccggctttgaagatagtgagtaccctaaccatgtttataaactctctaaggcgctttatgggctcaagcaagccccaagagcatggtatgaatgccttagatattttcttatcactaatggcttcaaatttggaaagg

SEQ ID NO: 38868 - DNA, 208 bp, Zea mays
tgcttgtaactcgtaacattgctggttttcagttaacaggcggctccgcctacagaacaagaccttgcttgctctgccagtctgcctcatgtatatagggaggacatatcctgtgcaatcactcattttggtgcaagcgtgcaatcaaactattcagagcatctaatctagatccaacggtttcatatgaaaggggttaaaagtaaaa

SEQ ID NO: 38869 - DNA, 206 bp, Zea mays
tgtgaagattcttcattccaacatgagcaagtcggcgatgctagagccagcccatgttagtcttagcaattaggtaagtgtctagttcaacattgttatcatcaaaatcaactaagtatagctgaccgtctaacactcccttaaaatctattgaattatcacttcttctaaagacggtaacacccatatcagtaaataaacaattg

SEQ ID NO: 38870 - DNA, 208 bp, Zea mays
agcttgtcaagcatattccagcaaatagaggagggtgaatcttatccttcggatgactgcttatttttttgttttacgtactttctcagtccaagtttttgttctctttgtcccacgctttttgttgtctttttgtttgagctttcactacttgtttttctcttgttttggtctttcttaatattgcccgtgtcattgttttcaaacc

SEQ ID NO: 38871 - DNA, 207 bp, Zea mays
tgtttgactgcttcggcaggagagcttccgagcgtgatgactcgttcggtccacggagtcgctttatccgagcgcaagttacttatcgcagaaggtgatgagtgaggtatccgtatcccggaggcgtaggagtccctcggctcggtcagccttggctgcttacgtgtacctcgtcgtttccaggatccgctttccgaagtagtcaag

SEQ ID NO: 38872 - DNA, 208 bp, Zea mays
tgcttgtccctttcaattcattcattcatgaaaacaacaatgtttcaggctgtaatatggtagttcggtgacaagacaacagaaaaagaaatgagttgttaacagggaaaagaagaaagaaacaagacacaaagaaaaaccgaatgtcatgtcaaaatttattacagtataaaacacaaaacgtagctaatttaagaattaccatgtg

SEQ ID NO: 38873 - DNA, 206 bp, Zea mays
  unsure (1)..(206): unsure at all n locations
tanaaaaatccggtatgaatctgcgataatacccagctagtccaagaaaactccggacttggtgaacagtggttgggggtttccattccagaatatctttgaccttgctaggatctaccgcaattcctttagccgataacacgtgccccaaaaattgaatttcctccagccagaacgcgcacttgttgaacttggcatatagctga

SEQ ID NO: 38874 - DNA, 212 bp, Zea mays
tttttcttactcagcaatgttatttgtgcaactgaaatcaagtcttgttgcataacaagttctaactttggaaggtgctaccaacacagcacctgctcctgctccgaaggttccccaataaccattacaaaataccgtcccaacttccgcatctttactggttaattcttcctgagcccctggcatccagttatcaatgaactctgccaacg

SEQ ID NO: 38875 - DNA, 213 bp, Zea mays
tcagtttccttcccctcgcgctcaaccctggcggtagagcggactctggccattcaattatgaacttgtgaaactttaaaattttcttcctccgaagcaggtttcaaactggagcttcgttcgtttctaacagacaagcttcggcgatggttaaaaattttggcaggaaaacagtgcaaatagcaatgaatgctgtggtaacttcacacctac

SEQ ID NO: 38876 - DNA, 214 bp, Zea mays
agcttgagcagtgaccggcttcgtctgaaacccttgaaagctggtgatgagcatgtccttcagcttttgccacgatgtgattgttcctggccgaagagaagagtactaggtctgtgcaacatttttaactgccatgacgaaggatttcgccatgactgcagtattgccaccatatgaagatatggttgcttcgtagctcatcagaaattgcttt

SEQ ID NO: 38877 - DNA, 212 bp, Zea mays
tgcttagttccagacaggacaatttcatgaacaagacaatatttcagtttcttttggttgtcaatatagcgacgccaaaattgggtctgaaatttccctgtaggcacagttcctcctcatgataaaaatcctaggtttacataaatttagtgaaactagtgcagccagacctagcaattgcaaacccaccaacttactccagagcatgagct

SEQ ID NO: 38878 - DNA, 214 bp, Zea mays
ttcttgtgaataagtggtactggtaaggcatacctacgatgttctgctatctgttgaggaacatgattttcttttggttgacagaagcttggcgagttcgatctcccagtcctccctcggtccctggttgtacgaccccttgtgcttctccatgtcttggctagctgtttctctagttggatgtataggctctggtaaacatatctgcaaaaaa

SEQ ID NO: 38879 - DNA, 211 bp, Zea mays
tcaaaaggtgacatcttcagactggtttgatagctattattgtatgagaattcagcataagggagactcttatcccaacttcctccatgctgaagggcacatgctctcaacatatcctccaatacttgattagtcctttcagtctgtccatcagtctgagggtgataagctgtactaaaattcaactttgtactcatgttctcatgaaagc

SEQ ID NO: 38880 - DNA, 208 bp, Zea mays
agcttgaagccatggtaagtagcataggcaagtaaaatgcgaattgactcaagcctagctacgggtgcataggtttcactgaaatccaaacattcgacttgtgaatatcccttggccacaagtcgggttttgttccttgtcaccacaccatgctcatcttgcttgttgcggaagacccacttggttcctacaacattttggttaggac

SEQ ID NO: 38881 - DNA, 205 bp, Zea mays
tgtcaatctgggctaatctgggaactctacctgcatatatagaggcaacgaaatttgtatgtttttgtgtctgtagtacaacagctttgaaccatccatacattggctgaacaacaaaagctgaactactactatcaagttgaagattactggctactttgatcctgaggtgaagaatgatccgcccaggctcaaaggactcaca

SEQ ID NO: 38882 - DNA, 213 bp, Zea mays
ttttcttgtcctccttcgtccttcctctagggcggggcggggcggggcaatgaagtggtgcaggattattcaggggattgagcaggggaactaaggtgctcagaggatggcggtttattgcggctagctcggggccgcgcgcggggtattgaacttggggcgaagcgcgcacgaccgtgcgggcgtttgcggcgtggggttcgcggcatggct

SEQ ID NO: 38883 - DNA, 210 bp, Zea mays
  unsure (1)..(210): unsure at all n locations
tgtgattttttcaaattcanaagggagaaagcagcttcagcagatcagccgaagcctatgctcttatgtgaggacatagcagagcagaaggtgctgttaggctctcaattatccgaagagcaggagagaaccttgataaggtttttgttcaacaacaaagatgtttttgcatggtcagccaatgatctctgcggagtaaatagggatgtt

SEQ ID NO: 38884 - DNA, 212 bp, Zea mays
atcttgcaaatgatcaccaacatacacatgtgatgctagggaatagaacacagattggtgatgctctaactagcagtagcttttttcatattgcattgattgaatgcaacaactaaaagacactagttacattagtgcgattctacttcacacacaaacacaacaccatgcatacacactaacttcctcactacacacgatcagatcatgct

SEQ ID NO: 38885 - DNA, 209 bp, Zea mays
ttagatgagctaagatagtgatgtcacacttgttgtgccagtgaatgggctccttcccatttttgggtgctactttgatgactctcctgcagaaccgacaaccttattgcctccttcacctgaatcactgctaagatttttattctctaaagtagcacccataatggtgctaaaagccaccaccatagctaccctttagcattacggtc

SEQ ID NO: 38886 - DNA, 215 bp, Zea mays
tctttcttgaaaaatatctagacacggtccgaaaagtcgaagcttccttcgaaggattttctgtcaaaaatatccctcgaggacaaaatgagcatgctgatttgctagctaagtcagcagcacaggggctgcccttacctttggatgtgttcttcgaaacaataaaagcaccttcagtggaacttcttgaaagagcagtcttcaatatatctcct

SEQ ID NO: 38887 - DNA, 208 bp, Zea mays
tcggggcagcaacaaagctcttgtcggccgccagctccaagaggcagaggcgccaggggcttcagaggaaggtttggggatcagcctagaaaaatttattgcttattctgtggtgaggacaagggccatactacaaggacgtgtcatgtcaccattcagaaacaaaaggaaatagcataagccacagctcagcagaaccagccgaagc

SEQ ID NO: 38888 - DNA, 215 bp, Zea mays
tcttttttaaagccatggtaagtagcataggccaataatatgcgaattgactcaagcctagctacgggtgcataggtttcaccaaaatccaaaccttctacttgtgaataccccttggccacgagtcgagctttgttccttgtcaccacaccatgctcgtcttgcttgttgcggaagacccacttggtccctacaacattttgattaggacgtgg

SEQ ID NO: 38889 - DNA, 208 bp, Zea mays
ttatcaaatggacgtgaaaagtgccttcctcaatggaccaatcaaggaagaggtctatgttgagcaacctcccggctttgaagacagtgagtatcctaaccatgtctataagctctctaaggcgctttatgggctcaagcaagccccaagagcatggtatgaatgccttacagattttcttattgcaaatggattcaaagtcggtaaa

SEQ ID NO: 38890 - DNA, 209 bp, Zea mays
tttcttctctggagtgggtgattcaattttgcttcgagcatcttctgtgtcaactttcaacttgtgcacagttgcaggactactcgaaccatcatcattagacacttgcggtgatcctttctcaagggcaagctgagtagcatccccctcactcattttcaggtcactgcactacaataatgggatcataagtaatatactctaaacaa

SEQ ID NO: 38891 - DNA, 206 bp, Zea mays
tgtgatttatccaatttaaaacaagcaccatctcttaacatatattttctatggataaactcaacacaagagatggcattagtagcacaagcactagtttcttatttatcaacccttttttatgtggaaggcaggtgagttgctaaaaataaagaaacctcataatatggactaaatttctcttaatcccttatacacaatacatt

SEQ ID NO: 38892 - DNA, 208 bp, Zea mays
agcttggtgccgatggagaagcagaagtccctaaagtcttggctatcgaattgtttgccattgtcaactgtgagctcggacgggactccgaattggcagacaatgttttgccagaagaatttctgggcggtcttcgttgttatcgtggatactgctcttgcctcgatccacttggtgaaatactcgacggcgacgaaggtgaacttga

SEQ ID NO: 38893 - DNA, 207 bp, Zea mays
tgtgagcagtacaagtacagaagagagaagactgcttcggctaatcagccgaagcccatgcttctatgtgaagacatagcagagtagaaggtattgttggggtctcaattatctgaagagcaggagaaaactttgatatggtttttattcaacaacaaagatgtttttgcatggtcgtccggtgatctctgtggtgtcaacaaggat

SEQ ID NO: 38894 - DNA, 214 bp, Zea mays
tttgcaagctttggacccacataggacgcactcaaggctcaattatgcccatcgaaggcccaactagaacccaattacaagtataactccattcccctccgtcctcccgcatcaactcgaaccgaagggacgaccgagcggagtctagactcgagagcaacctcgacctcccggatctctctcccacccacgcctcgtcggcgccgtcgtctgc

SEQ ID NO: 38895 - DNA, 206 bp, Zea mays
tctaaagggagaacacattttgggactaaccaatgttcattttgagaaagacagggtttgtagcgcatgtcaagcagggaagcaagttggtgttcaccatccacacaagaacatcatgacgaccgacaggccgtttgagctactccacatggatctattcggcccgatcgcttacataagcattggcgggagtaagtattgtattg

SEQ ID NO: 38896 - DNA, 276 bp, Zea mays
cctcagatctctttgggaaaccatgtacagattgcgcattaaattctcctctgctcaacctagaagccatctacggtgcgacctctctttttacctggatctatgaatcttttccctatgaatcatgttgcggccttatcatctgaatctctggatcattcatcgagacctaccctgagatcttgttatcttctgaaacccactctaaactattaaagcggatcagccgtatctgtcatttctaaacagtctcatgccccttcgtcagagaacatg

SEQ ID NO: 38897 - DNA, 302 bp, Zea mays
  unsure (1)..(302): unsure at all n locations
catgatcaaaggcatagaacatgttgtggaccttctgttttctaangtcctcaaaaacaggatttaacagtatttctggagtataatgtgtgaacaggtatcttcggactcaagtcggcatcacagtagaccagaataatacgaaggttgatacagcgccgaaggtgtgagcaggaaagcttcggcgcggtatcaaaaagtgaaaccgacttatagatgataagggctattagacctcgacagattactatagaattattatcaagtgtaaagggcatgaatgtatatttgtgtgagttgtg

SEQ ID NO: 38898 - DNA, 501 bp, Zea mays
tatagatactaagctgcgccgggttgggtgctgcgtctgatgtagtacaggcactctttctagctgtagtactggtcagcttcttggccaggccaggacatggccgtcggcgttgtctgcttctgctcgttgccagagtactgcacgccgagcagctggaccattgcctcggagtcctccacggcgactgacggatcaaacgagtgccaatgccagctcgccttggaggactccacttgtattcctttatttacgggactagttgcttagatggtatgatggccaagctactggtaaatggggacgggcgagtctgaatttatagtagcaagctaacagcactactagcacacggcagaatttctagtgttcacgtcattcatgtattaagggaatggttccgcgtacaaatctgaccatttgcgccttatacatcacactggcgggttgtttattctaagcacttccagttggagatgccatctagacagctcaataaca

SEQ ID NO: 38899 - DNA, 313 bp, Zea mays
  unsure (1)..(313): unsure at all n locations
tctanagggagaagcacatttgggactaacaaatgttcactttgagaaagacaggggttgtagcgcatgtcacgcagggaagcaagttggtgttcatcatccacacaagaacatcatgatgactgacagaccacttgagctactacacctggatctattcggcctgatagcttacataagcatcggcagaagtaaggactgtctaactattgtggatgattattcttgcttcacttgggtattaattttgcaggaaaaatctcacacccaagaaactttgaaaggattcttgagacgggctcaaaatgagttc

SEQ ID NO: 38900 - DNA, 253 bp, Zea mays
ccttgtgcagcttgtccagcatgtcaacaagtgggaggagcgcactccatccagaatatgatgaccacttcaagacccctggagctgctgcatatggacctcttctgacccgtcgcctatctgagcatacgagggagtaagtatggtctagttattggtgatgactattcccgcttcactagagcgttctttatgcaggataagtctgaaacccaagggacgctcaagcgcttcctcatgagagcttataatg

SEQ ID NO: 38901 - DNA, 333 bp, Zea mays
  unsure (1)..(333): unsure at all n locations
gcttatcatctgaaaacagtgccctaatgaaggatactatttctatcctccaatcttcactatgtacaggtgaaattttgagcactgctctttccatgagctcttccgaaagtgcttttattgtttcaaaaaatacttccgaaggtaaagggagcccctgtgccgctgatttagctaataagtctgcatgctcattctctccccttgggatattttttacagaaaaaccttcaaaagaggcttccaaccttcggactacatctaaatactnttcaagcttcgggtctcttgccttactagctttgtccacatgtccggagataacttgcgaat

SEQ ID NO: 38902 - DNA, 449 bp, Zea mays
  unsure (1)..(449): unsure at all n locations
tctncgccagtctgagcagttcgaacaagataaacaagatctctatgcacaacttgaagccgaagctcagcaaaattcggatttgagaaaactactgacaaatcttcaagaaaaatgcctggaatatagtaataagtgcattcaacgactaagaaagatttttcactcagttggagccagcagcgaaaaatttaccccctcagctgaagatctatcaaaaaccttcgaacacattgagggggagattgacgagctcgacgaagtcatagctgggcatggcgacttctgtgcctgngtggcttctcgagggactgctgcagccttcctgaaggctggctgtgatcatgggaaaatggtcaacaggccaaatttcactttgtcaccatcaatcctggatgacatccctgatctcgcccgaagcatctcgaatcgatttgtaaaatgatatg

SEQ ID NO: 38903 - DNA, 354 bp, Zea mays
  unsure (1)..(354): unsure at all n locations
aactcaagccctaaagggagaacacacnncgggacgaacagacagccatcttctttaaacacaggacctggcacgcatgtgaggcaggaaagcaagtaggcgttcatcatccacacaagaacatcatgacgactgacaggccactcgagctcctacacatggacctattcagcccgatagcttacataagcatcgacgggagtaagtacctgctagctattgcggacgactattctcgcttcacttgggagtctttttgcagaaaaatctcaacccaagaacctaaagggattcccagaacgcccacaatgagctccgctaaggaccacgaaaatagaagcacaacggaacgga

SEQ ID NO: 38904 - DNA, 433 bp, Zea mays
  unsure (1)..(433): unsure at all n locations
tcaagacgaagctaanacgcttcanaactccctagaataaatgagactaaaataacatccttgaaagagaaattagccgaagctaaaaaagaaagaacaagtggaaaattcataatgatgaaaaaagggaaccgacttaaaagggaaaaggctatttagacctcggtggactaccttaaagtcattatcaaatgtgaaggtcatggatgtaattttacactggctgtgtcccgtgcctataaatagatgaacagtacccccgtactgttcacactgacttatactcatttttgcgtcacgcttgtactttcattntctgtcaagccgaaggtacaaatataattcaatattgncattattcatttgttcatttatgaatatataataagaaatgtgtatgatgatngtatantgtttgtcacattatccctta

SEQ ID NO: 38905 - DNA, 437 bp, Zea mays
  unsure (1)..(437): unsure at all n locations
gttgcttatcgtcatcaaccttgacatagaaccactcttattttcacnctgctgcccatntgcttcggtagctgatcacaagaaactctgtagttttccgataagcaaaattatagcaaccaaaattgtcatgtaatccatcctttctagccttcgtctgatagtgcagctcgtgaactcggcaaaagttgtccgcaaacggctccaccgcttggcttctgagtgcccaaatataaacactaagcctaacgatagcgttaggggtcagctggtgaaaatagataccgaacctcttcatacctctgaataatcccatgtgggggaatcttaacccacctttagaagctcttgaaatacaattcatccttctcggctttggggagtccttctccccgaagcgaatagctctgatttagataaagctgacttaccatctg

SEQ ID NO: 38906 - DNA, 358 bp, Zea mays
acactatcacaaactcaagcttagctaattccactacgctctccaacataaatcaccataataattctggtactaaaagcagccatgtaagtaatacgactggaatgtgtctcactgcaacaatcattaaactcaataaagtgcagatcactaacagggttaaaacagtcccatctatagtgccgctaatgagcgcggttagactatctccttggtgtatgtcaatcaatatactctgcttccatatgcaattgacggatattgtgttcttctctaaacgaatatattttttgcaataaagaatcccatccatcatctctaaccttttgatgttttagcttcgtcgactgcacctcta

SEQ ID NO: 38907 - DNA, 430 bp, Zea mays
  unsure (1)..(430): unsure at all n locations
accttaaatctcagctggtataggccttcttctttttctccatagcgagaactatactggtatactaccccacttaaaaagaatgagggtagaactcttgaatcttggggatttgaactccttgaagtacctcataacaagggtgttacgagtccttcttctgtcgttgctgcttgagcaggctgcggagagatgactgacacacggttgattctgggagaaccttcttcttatcttctcttcgctattttattttcactgaccctntctttctctttactcttcccactggaggattctatcaaagagtattaccatcatacaaaggaggaaagcaaagactatgaaccatgtacagcagtattcaacccaagaatcaccaagcattgtgatcttatgggcaatggagtggatagtggagttgcttaat

SEQ ID NO: 38908 - DNA, 449 bp, Zea mays
  unsure (1)..(449): unsure at all n locations
gacctataaaactaagcttctnagggagaacacgtgataggttngactaacgtatatttctattaagatagaccttgtgcagcttgtcaagcaggtaaacaagtgggaggagcgcatcacagcaagagtgtgatgaccacttcaagacccctggagctgctgcatatggacctcttcggacccgtcgcctatctgagcataggagggagtaagtatggtctagttattgttgatgactnttcccgcttcacttgngtgttctttttgcaggataagtctgaaacccaagggaccctcaagcgcttcctcaggagagctcaaaatgagtttgagctcaaggtgaagaagataaggagcgacaacgggtccgaattcaagaaccttcaagtggaggaatntcttgaggaggaagggatcaagcacgagttctccgcttcctacacaccaca

SEQ ID NO: 38909 - DNA, 424 bp, Zea mays
  unsure (1)..(424): unsure at all n locations
ttttcttgaagatccattngcaacctatagagtgacaaccataatgtctgtcaacgacctcccaagttccattagacataatagattccatctcactccttactgcttccttccataagtcagcatcaggagaggaatatgcctcactaatggtagttggtgtgtcttccacaaggtacactataaagtcattaccaaaggattttgcaaccatctgtctcttgctctttcgagtgactatagtgtcatcctccttaaggatgtgcacgtgagaatcctcagcatgatctatatgaatcgacagctcgtgctcatggngaattatagtctcatgacttatatcactangtgtattcttcataggaaactcattctcaaaaaatgatgcgtctcttgatttcatgatagtatcaacatacatatc

SEQ ID NO: 38910 - DNA, 320 bp, Zea mays
  unsure (1)..(320): unsure at all n locations
acaaactcctcccgataagtctaataaacaaaagatcctaagtggaggaccgagtcctcccgcacttcaatcttgtttttcctcgcttggaccaccttggagcaaaagcaacaaaagtttgtcgcttcctcacctaanaacaacaaagggataaaccctgagtatggaatactcagcaagtcttacccgactaatgaaagactctcaacggtatgctggataaatatgagtcaacgagaagcttatcaaaataacttatacttttgcagaagtagctactaaagtgagccctactctcatctttaacgcatattaagata

SEQ ID NO: 38911 - DNA, 324 bp, Zea mays
  unsure (1)..(324): unsure at all n locations
ctataaaactaagctgctacggccttttcttttctcatagaggaaccttgttggacctaccccacttaaagaatggggtagatctctcgatctgnggattgaactcttgaagacctcattcaagggtgtacgggccttctttgctgtgcttttgacaggctgagagagatgactgtccagggttgatttttggggcgaaggcaagacccacccttcgctgaggccttcgctgcagtcgctagttaacagagataaacggcagggacacccttcctcgatcggcctagacaagcctgnacagcgtatccacaggcagctccccac

SEQ ID NO: 38912 - DNA, 426 bp, Zea mays
  unsure (1)..(426): unsure at all n locations
tcacctanagagattcactngaaggccgctaacagaattcttttatatttgaagtatactcccaatattggtctatggtatcccaaaggtgctcaatttgaattaattggatattcaaattcggattatgcggggtgcaaagctgatagaaaaaacacctccggttggtgtcaatttcttggtagatctcttgtttcatggtcttctaaaaaacaaaattcggttgctctctctaccgctatatcggccggaaattgtgtgttcaactattatggatgaaacaaactctattggattatggaattattttcaagaatgtgcctctcatatatgataatgagagtgcggtaaaatnggctaccaatccggtccaacactcaagaactaagcatattgatatacgacatcacttcttaatggatcatg

SEQ ID NO: 38913 - DNA, 485 bp, Zea mays
  unsure (1)..(485): unsure at all n locations
tgccagaattgttntgaagaactcaagataaggttaaccatttctctaatanttggaatgccagacatccacaagggatttgatgtgtattgcgatgcatcacaccttggacttggatgtgtgctaatgcaagaaggaaaagtgatagcttatgcctcaaggcagttgagaaagcatgagaagaattatcctacgcatgatttggaactagctgccgtagtgcatgctttgaagatttggaggcactatatgattggaaacaagtgcagaatcttcatggatcacaaaagcttgaaattatcatattcactcagaaggaactcaacctaagacagagaagatggcttgagttgatcaaggactatgatttggaaatacagtatcacccgggaaaagcaaatgtagtagctgatgtttcgagccgtaggggcaagtgaataacatactactcatttgtgtccaagaatgtgttggaaatgaacaac

SEQ ID NO: 38914 - DNA, 428 bp, Zea mays
  unsure (1)..(428): unsure at all n locations
ttgcctcgggcagactaatactagaataagataacacttctttttagtgaagagatggcaagagtagcgtgtaccctccgtggcaagaggctggacgatggtgtatctatgctctcgattggcgtgaacctgatctggtcttaagaaccccggtggcgagttgacatatgcaagggttaagtgctacatatgtcgtgtgattggagatccccagctgggtattaatcgattcggatcgccgntacttctcggacatgaagacttggtcactgccctgcaatctaagtcatggatggaatcttaatgagcaaaaatcatgttggattgattaatgtgatggtgaaattagactatatgccaataanggctattaatacttaatctagcattaaaatgttgaaagtagcgactcactttagtaagctatt

SEQ ID NO: 38915 - DNA, 456 bp, Zea mays
  unsure (1)..(456): unsure at all n locations
ctaagctttgggtgctcgngagagtcaattcaattgttattaactctttctctctatcttcaatgatctatatccaagattgacccaaagttattttgaattgatatatctaaaactcatatcatctcagggaagatattgatgttgtaggaaataaaaaattaatcctatgccgaaaagtcaaggcctacaacatggaggaaagccaaaggatggtaacaattatgctttaaagtgcaagtatcttaaattatcatttattatgtgtcttgtgtagtcacatacaaaaagaaagcacttcaaatgtttctaaattatgtcaccattctttgaggaaattcctctcatatggtagattgtatatncatcatttctataccatggcaatctatatgccttataatgttgtaagtatttcatggcatgctttacactaatcatcctattattaccatg

SEQ ID NO: 38916 - DNA, 166 bp, Zea mays
atttggtgaaatattcgacagcgatgaaggcgaacttaaggttcccctgagatgtgggtagggacccgacgatgtctaagccccagcgctggagaggccatgtgtgggcgatcagctttgtatattgcgaaaggctgccaaatcgatgggaaaacttctggcacgc

SEQ ID NO: 38917 - DNA, 390 bp, Zea mays
  unsure (1)..(390): unsure at all n locations
ctaagcttgagctgtgttagaataccgccctcttaatgctgtaactatttatatcaagtatnctttgcctcgtatcgatgttctctttgaccagttagtcggggccaaggtgttttccaagataaaccttcgctctggctaccatcagaacaaaatacgagccagtgatattcccaagacggcattctcaaccacatatgggctatatgaattcctggtgatgtcattcgggctgacaaatgcaccagcatatttcatgtatctgatgaattctgttttcatgccggaattggacaagttcgtggtggctttcatcgatgatattctggcgtactcaaagaacgaagaagaacatgccgggcatttgcatgtaatgctctaacgtctgcg

SEQ ID NO: 38918 - DNA, 345 bp, Zea mays
  unsure (1)..(345): unsure at all n locations
ctaagcttcttctattatgcataaagagagtgatttgtttaccatgattctctgtgtccttatcaaattgccatggtctaccaaataacatatagcaagcttgcataggtaccacatcacaatcaatataatcatggtatgaaccaattgtaaattccacacggaccatacgtgttaccttaagcttaccactgtcgttgaaccattggatgtactangggtgtggatgtggaagcgttttcagcccaagcttctctaccatggtggtgcttgctaagttgttgcagcttcctccatcaattataatacgacaagatcgctccaaaactacacatttaatttgga

SEQ ID NO: 38919 - DNA, 467 bp, Zea mays
  unsure (1)..(467): unsure at all n locations
ttaaccctcgcgagacctttcccccgactctgtctaacttttgttaattcattatcggatgtcatattctatgcatgtttaatctacttgttctcttgtatggtgtactgttagttttctaatttcaacggatggatgtatgtatgtttgcactcgcatataggacgatccggctgaagagcctgaagtattcgcacgagaagcccctgagcaacagtctgttggtggaagcaagagtcctttgacctatctctgtactattcattctttaattcacctcccgctctacacatgtatacctaaggattgagtagcttttgctatccatgtacttcgttacctatttgggtgggattattattgtttagctntatgctattgttaactctaataattgacatgatagatatctatgatacgctgttcccttctttattatgatgttgacttgtggccttaaggggctc

SEQ ID NO: 38920 - DNA, 390 bp, Zea mays
  unsure (1)..(390): unsure at all n locations
tagaagcactntcgtttcttagtccctacgacatgatcttttctctcgcggntaagcgtnagaacgaggattangctctgataccaattgaaagttgcctagagggggggtgaatatgcaagttaaaactttttcaacaaaaactagaagcaaactgggtaaaactgaattgatctcgaaattcacccacttaactttggaaatgagatgttctaaatgatccacagggttaaaagtagtagatctgagaatggcacttctcataatccacacaccaaaaagatataaacaaatcttccacgcaatggtgagagaacgaagaacacaaaccaacacaatgagcaagaacacaagagacacaagaattatcccgaggttcggtcacaccac

SEQ ID NO: 38921 - DNA, 396 bp, Zea mays
  unsure (1)..(396): unsure at all n locations
ctaagcttgacatgaggagatggcactcgtcatcaagagctttcgttttattctcaaacaaaggagggggaaagactacaagtcccgctccaagaaggtttgctacaaatgtggtaagcccggtcattttattgctaaatgtcctctatcaagtgacagtgaccgacgcgacgacaagaaggggagaagaaaagaaaaaaagaagtactacaagaagaaaggcggcgatgcccatgtttgtcgggagtgggattccgacgaaagctcaagcgactcctccgacgacgaggacgccgccaacatcgccgtcaccaaaggacttctcttcccaacgtcggcacaagtgcctatggcnaggacggaaacggaaaaagtaaatctaactctcactaatat

SEQ ID NO: 38922 - DNA, 486 bp, Zea mays
  unsure (1)..(486): unsure at all n locations
tagccatcttaaagatgttggtagggtagctgctcacaatgtgcaaaaccatttaatcttcgctccccactatttctgtgtggtcaggaaggggggaaaccttacatgcatgtaaattttgaggacatcatgtgctgttgtatattacgaatacctttgcatttgctggtgcgacacctaatcttcctgtctattaacagagttatttggccatgtatcatgaacatcattgtaggtttttttaagatttctcactgctgtttgtggcgctgtatttgtagtttacaaaacttctagaaagtagaactctgaatattgactaaagcagcttgaactaaatcgaactgtaggttagattctaatttaaaaagtatattcgtctctctataattcccangttccgcaagcaagaatatcacaaccatagatccaagttctagttataaatcccttgttctcagtctctggtggagttcaatgcagtct

SEQ ID NO: 38923 - DNA, 294 bp, Zea mays
  unsure (1)..(294): unsure at all n locations
cacatcagtacggtccttaatcaactcatacggagacactacactaagactctnttctcgtgcaagtcacccgcccggtctcagctttattatttaaacccaaagtgtggtacttggcagaggtacatcttgtccgatgttgaacccatcacggccatgatggatccaccatcaagtcttattttcgaacacatacccttccctttgaagcatcacctttggtttaaaacaaaacctttttgttttctaaagcaggactaagcatcagaaaacctttaaataanacaggtaatc

SEQ ID NO: 38924 - DNA, 466 bp, Zea mays
  unsure (1)..(466): unsure at all n locations
tactcagctgcatngctgttaaatntcttgtattgcatctagggcttgtctaacctagttgagataaccgccaacaaagcgagtgaaaaagcttaactcggatcaaacttgacaagtcttagttttaagcttttagcacttgaattcttactttntatgcgattgttgcttcttgaaatatgcatgaggtactgcacttagggggagtattcaaaactcaaatcactcatgaaaacccctagtgcaaggccaaaatgcaaattttaccatttgcctattttctctaaaaattatctagcctatggcaaaatatttgaaaattatgagaaaatatatgagggtgccaatacctgtcccaacaagtgttattttgtgtgattataagttgggaattggtttggttggaaattagatagaanaattcanaaatttcaaaacttccctctgtctaggctcaccggacagt

SEQ ID NO: 38925 - DNA, 469 bp, Zea mays
  unsure (1)..(469): unsure at all n locations
taagcatnntctcctgaagttctgtaaggatttctgcaaatttgagtatttatccacttcagctntcaggcttgtttcaaaatatttcttttcttgctcgaatttttctgattgacggagcaattcattctttaatttgtcatttttagtttggacttcagccaaagagccctccatggtctgaataacaaaatccttcttttctaatgcaccttcgtgctctttgaccatgatttcaagatcttggattgcgaagtctttctttttcagattggcttcgtagttntcaaccttttcagccaaatcttgaatgacgagctttattttctcttcctccagatcttnngtgnattttagaaccttgcttaataatattgctctgtgaaatgatcttcgttagaacacgacccacaagttaataataacagtaataaaataacaaaagtattcgttacccttgaagtagcat

SEQ ID NO: 38926 - DNA, 268 bp, Zea mays
cccattatgattatccgcgtatttcatttccacactgcaaaaactaatcagtattttttattcttcctcctagagcgactatggtaactcaatgagagcttgccgggacttcaattctaaaatgttcagaaagttgcaggtaccctggctgcaacacattttttttttcgaacgcgcaaaagagttgcgcctcattatattaagagaggaaaaacaatccaaagaggaccaaagcacaatgcctatagggcaagcataagactaaacc

SEQ ID NO: 38927 - DNA, 249 bp, Zea mays
agcgcatgccaagcaggaaagcaaagtggaacccatcattcacacaagaacatcatgacgaccgacaggccgcttgagctactccacatggatctattcggcccgattgcttacataagcatcggcgggagtaagtattgtctttgtatagtggatgattattctcgcttcactcgggtattctttttacaggaaaaatctcaaacccaagagaccttaaagggattcttgagacgggctcacaatgag

SEQ ID NO: 38928 - DNA, 301 bp, Zea mays
tgtgatcaaattggcacgaagatttatttgtttcattatgcacccagagtcaaatggacttgtccaaagagcaaatggtattataatgacaggaataatgaagctaatctttgatcagcccacaagaaagtggccagaggagttgattaaagtggtgtggaaaaacaatacgactgtatcaagatcaacaggttttacgcaattcaagttattatttggtgacgaagctaataccccacaagaagctaaagcggggtcaataagaacaacagcttcggcagaagacgaagctgatattacg

SEQ ID NO: 38929 - DNA, 509 bp, Zea mays
  unsure (1)..(509): unsure at all n locations
acacataaaactcaagcttggtacgtncctcctctcctccgccaactgacacctgatgttctccttctcggcctccgcagccgccagcctctccgccagcctgcggctcttgttttccgcagccgacttgtcccgaacagcatccacatgctgcgctcggaggcgctcgatcctacactcaagtcgttgcctctcggcagcgaactccgaagacatggcgcccgacgcaacatggtcggtgaatgcggacgcctgccacagaaaaaacatcagatttgcaaccacattaaaacaacgaaccaacaaagtctaagacgacttacatgcttcagctgctaggacacaatagcccgccacgtcctagcggcggcggccgacgaaatctcgccgctggcgcagaatttggaccatgggtnctgcgaagtgcccttcgcttcaaacaccgtcgcaggcgaagtggccgcaccggagacgggacattccagctacccgatccgacctactcatat

SEQ ID NO: 38930 - DNA, 372 bp, Zea mays
  unsure (1)..(372): unsure at all n locations
tcgcgagagaggggttgaccttgaagtgggccgtctgattttctcttctncgcgcgccttgggaaggccctgggcattccctcttataaatataaagggatggcccacctgtacatatgggggtgtagctatatgctaacgtggccacccgagaagtgcttgaaccctgtataagcgtaactggcggtgcgggcctgggtccctgtgaacgttctttgccttactatagagctgagaacaatcgacgtcatggacgcatgcatgataccatcattacctgttgccggagtaatctagatgtgacaccggtcttgttcttcgtagcctgaggcggctagctaggggtagggtaatgatgtatcccctgtatcg

SEQ ID NO: 38931 - DNA, 368 bp, Zea mays
  unsure (1)..(368): unsure at all n locations
tctanagggagagcacattntgggactaacaaatgttcattttgagaaagacagggtttgtagcgcatgccaagcaggaaagcaagttggtacccatcatccacacaagaacatcatgacaatggacatgccactagaactactccacatggatctattcggcccgatagcttacataagcatcggttggagtaagtactgtctagttattgtggatgactattcttgcttcactagggtattctttntacaggaaaaatctcagaccctagagaccttataaagattcttgagacgagctcaaaatgagttcagattgagaatcaagaagataagaagcgacaatgggatggagttcaagaactctc

SEQ ID NO: 38932 - DNA, 478 bp, Zea mays
  unsure (1)..(478): unsure at all n locations
tctaaagggagagcacactttgggactaacaaatgttcattttgagaaagatagaatctgtagcgcatgccaagcagggaagtaagntggtgttcatcatccacacaagaacatcatgacaactgacaggccactcgagctcctccacatagacctattcggctcgatcgcttacataagcatcggcgggagtaagtactgtttagttattatggatgattattctcacttcacttgggtgttctttntacaggaaaaatctcaaacccaggagactttgaaaggattcttgagacgggctcaaaatgagtttggcttgatgatcaagaaaattagaagcgacaatggaacggagttcaagaactctcanatngaaggctttcttgaggagganggcatcaagcatgaagtctcttctccctacatgccacaacanaatggtgtagtggagaggaagaatagaactctaccggacatg

SEQ ID NO: 38933 - DNA, 243 bp, Zea mays
gactaacaattggtcatttttaaaaacacacgatttgtagcgcatgtcaagcacggaagcacagtggtgttcatcatccgcacaagaacataatgatgactgacaggccactcgagcttctacacatggacctattcgggccgataggctacataagcatcggcgggaagaaatactatctaagtatttgggatgaatattctcgcttcacttgggtgttctttttgcaggaaaaatctcata

SEQ ID NO: 38934 - DNA, 489 bp, Zea mays
  unsure (1)..(489): unsure at all n locations
tgcacaatttctccccctttgtcataaatctccaaattgttacatataatataaaggatagaaattatgattaagcgagatgtgaacacactatcatgaaagggatccttatatggcacaaaggtaatggataagtgtcataagtgatgtacctttgcgttttaccttttcaaggggtttccagacttgtgttggatttataattcatttgcaagctcttgttggcataattgtgacataggtccaagatatcaaatgaagattgtcatactaactgaaagataaatcttgatacctggagtctagatgtcacctagcattgtcttatcacaacaagaggcaacatgaaaattgcacaagtatggattatgcaactagtgatcatgtatgaaaaatatcgattgaaaaacaccaattgatacaattngatagattaatagatcagtaatagcatattacactaagttcttctcaagtgtagtgccacat

SEQ ID NO: 38935 - DNA, 380 bp, Zea mays
  unsure (1)..(380): unsure at all n locations
tggacatganaagtgccttcctcaatggaccaatcaattatgaggtctatgttgataaacctcccggctctgaagatagtgagtaccctaaccatgtttataaactctctaaggcgctttatagactcaagcaagccccaagagcatggtatgaatgcctaagagattttcttatcgctaatggcttcaaagtcggaaaagctgatcctactctctttactaaaactattgcaaatgatttgtttgtatgccaaatttatgttgatgatatcatanttgggtctactaacaaatctacttgtgaagagtttagtaggataatggttcanaaattcgagatgtctatgatggnggagttgaagtattttctatgatttaag

SEQ ID NO: 38936 - DNA, 326 bp, Zea mays
  unsure (1)..(326): unsure at all n locations
ctaagctnttcaccaatatagcaggcctaacgaaacttcggagaattatgtctctttatgctgaaacttggtcatcaagcagtatgttgaccttctgaccagtcaacactaaagtaggccggctgccttcctgagagatctgattaagtcggccttataagcattggaaactagacttcaatagatttccaaaatatacttatgggccttcatagtttttgggaatcaaaagatatgactgtttcttttggacgcttctgtcacgctggactgattacagcataatacttctctctgattcgcccttgatagtgtttgacctttct

SEQ ID NO: 38937 - DNA, 289 bp, Zea mays
cacacgcccatcctcggtctttttctcctaccaactagggaaaggcggacgggtccggacaccgtggctgcactgggggacgacagacacccatatcgcaccccctgtcttcacccgccaccggtgaaattgctctgccaactcacgggacacggcaagctcgcgacactcaggcaactcgccggaatcggactcaactgcgtactgcgggagctgcgatcagcggattaacacgcacacgcaaatacatcgagataccgtctccgacctgcgacggagacggccaatc

SEQ ID NO: 38938 - DNA, 393 bp, Zea mays
  unsure (1)..(393): unsure at all n locations
tcacgcctttcgccttgagacatcggaatgtcacttcaaggtcggtaaggaggtcggaggctntcctcgtcttgactacgatgtcatcgacgtaggcctcgaccgtccggccaatgtgttcgccaaacacatggttcatgcaccgctggtacgtcgcacccgcattcctcaagccgaacggcatggtgacatagcagtacatgccgaagggtgtgatgaaagaagtcgcgagctggtcggactctntcatcctgatttggtgataccctgagtaggcatcgaggaaagacagggtttcgcacccagcagtggaatccacgatttgatcgatgcgaggcagagggtanggaaccttctgacatgctttgtntagaccagagtagtctacacaca

SEQ ID NO: 38939 - DNA, 448 bp, Zea mays
  unsure (1)..(448): unsure at all n locations
ntaccanatggacgtgaagagtgccttcctcaatggaccattctatgaagaggnctatgntgagcaacctcccggctttgaagacagtgagtatcctaatcatgtctataagctctctaaggagctttatgggctcaagcaagccccaagagcatggtatgaacgccttagagactttcttattgcaaatggcttcaaagtcggcaaggccgatcctactctattcactaaaactctcgacaatgatttgtttgtatgccaaatttatgttgatgatatcatatctgggtctactaacgaatctacttgtgaagaatttagtatgatcatgacacaaaaattcgagatgtctatgatggatgagttgaagtattttctacgatntcaagtcaagcaactcctagagggcaccttcattagccaaacgaagtacactcaagacattcta

SEQ ID NO: 38940 - DNA, 337 bp, Zea mays
acatgtgctaaacggcgatgtttctttcttccatgctagacttagcaattaagcatgcatctagaccggcctcctcttttgcaaaatcaactaaataaagtttgctgtctagaacacccttaaaagctaatgaaccatcacttcttctaaagacagacacatctatatttgtgaataaacagttatatcccatattacaaagttgactcacagacaacaagttatatccaagcgactcaactaagaacacattagaaatagagtgcttggatgaaaatagcaattttcctaaccctttcaccttgccttggttcccatcaccgaatatgattgaatc

SEQ ID NO: 38941 - DNA, 442 bp, Zea mays
  unsure (1)..(442): unsure at all n locations
cttccaaaatctggaggtaaactatgatcctctattcttatgatcttcttcggtacaccgtgtagagacataatccgagccatatatactctgccaattgagatcccttataagtagtcttgaccggaatgaaatgagcaactttggtcagtccatccacaataacccatatagaatcgtatgctttcgaggtgcgaggcaatccagtaatgaagtccataccaatctcttcccacttccactcaggtatcttcagtggatgtagtagtccggctggcctctggtgttcagccttaactctntgacacacatcgcacgtagccacatgcgcagccacatctctcttcaatccataccaccaatattgttgcttcaaatcctgatacatcttagtactcncagcgtggatagaataaactgaatcatgtgcctncttcaatat

SEQ ID NO: 38942 - DNA, 260 bp, Zea mays
tgtcaaaagagttacgcagacaagcgacgacaaccctttttcttttagttggagattatgtctacctaaaagtttcaccaatgaagggtgtatcacatttcggggttaaggggatcttgcacctcgatacattggtccttttcctatcctcgaaagatatggaccagtggcataccgacttcagttacccgaaaccttgtctgcagtacataatgtgttccacgtgtctcaatcgaagaagtgtcttccggttcccgatc

SEQ ID NO: 38943 - DNA, 470 bp, Zea mays
  unsure (1)..(470): unsure at all n locations
tcgcccgcccttngcccagatttgagtaacgaatctgtttttattcttatgctaagccggngatgtcatccaagtctgctggtgacaggctgaagtttggtctgtttacaatgtttccatgtgtatagccagccttcatgaaagcaacagctgtgcctcgagaagctagcagggcacaaaagtcaccatgtccagctataacttcgtcgagagcaacaacttcaccttcaatatgatcaaatgtgcccggcaggtcttcaatcgaaggtttaaacttttcagaacttgctccaactgagttgaagacctgcttcagccgttgaatgcaccgggtgccgaagcctaaacatctttcttgaagatctttgagtgatttctgcagaattgaacttctttcaacttcagcttcgagattcgtttagaaatctttcttctcttgccanagctttttgacttcatggaaagtcact

SEQ ID NO: 38944 - DNA, 501 bp, Zea mays
  unsure (1)..(501): unsure at all n locations
tctaccaacacgtgggtatatgcgtgcgacatcatcaagcttatattccgactgactctggctaggattcgttgccggacttcgcgggtgtagtcgatctgcaccacgacggcgctagggctcactgccactagaaagcaggtgagaagcttcccatgttgtctgccaccatctattcttcgtgtaaaatcaatcanggcagggaataggacaccagagccccaggaggacttcactctggcgatggtgctccacgtgggccgcgaacgtcgtcgtgatttgtgatgggatgggagagataacctcctggccgtctgatagtctatgtgcggccgagatcagttcgcgggtatcaactcagccaaaatcgagatgtgacgtccgatcgggatccatggaacacgatcgaatctcgtgaattaaatctcgtccgcgatctatcatcagcggcagtttggataccggtcgtaatctagaactatcccaccgacgatcaacatt

SEQ ID NO: 38945 - DNA, 503 bp, Zea mays
  unsure (1)..(503): unsure at all n locations
tgaaaaatcatcactgccatagctccatcatatctcaagataatcatctatgatcaccaactattatagagcatgagcaatctttaaatatgcaactactcactactttagatatcaattactcacaactttagataccaattactcgactcgtggaggtacccaagtcctgattgatccatntcttgctcatcctcctctttccaccttgagactatataggatcactcaagaaacagatagtctcaaaagacacaagttatgtgtgctccctctaaagttgtgcatcaagtatttgaatgacttgcaccttgcacattctaacatcctcagaactagaggggatcacaacataccttggtctacgcacaatatatcaattgcatcatacaaagataccacatggatataggtgacataatacaacttatgactagtggaaacaatgcatgccgtaagatatataacactttaaaagcaacttaagcatgcttcacacatga

SEQ ID NO: 38946 - DNA, 356 bp, Zea mays
ttgaagaaccatacgcaacctataagttgacaaccatattgtctgtcaacaacctcccaaggtccattagacataatagattccatctcactccttactgcttccttccataagtcagcatcaggagaggaatatgcctcactaatggtagttggtgtgtcttccacaaggtacactataaagtcattaccaaaggaatttgcaaccctctgtctctcgctctttcgagtgactatagtgtcatcatcctcagggatgtgcacgtgagaatcctcagcatgatctataggaatcgacagctcgtgctcatggggaattatagtctcatgacttgtatcactacgtgcattcttcat

SEQ ID NO: 38947 - DNA, 452 bp, Zea mays
  unsure (1)..(452): unsure at all n locations
tcgtatttggtaccccaattgaatagagtcctctgagaatatttttttagccttgagtacccacacaatccttattgtggcctttctctttgtgtaggcacccacatatacttgacaaccatcttacatggtgtcaagtcaatatttaatcacatagataaaaactagagttaagaataggagtcttttctccttttcttgatacatcattgtgttgccttcttgatgatgaacctagcttgaccttgggtgcacctagcttatcaagggtagtcgcacaagcattcatatcanaaagacaagttatgcatggaatttacaacttagtgatccaattcaatgtgaagcatatggataccgattgaagtagatttctagatatcaaaatatgggtttccaaatgtagaaagatggatcataattgtcctttacaagttaaaatatatcatgta

SEQ ID NO: 38948 - DNA, 230 bp, Zea mays
gatgccgcatgcaccccacatagccctgcatggacctcctccagaagctgcaccccagaggacgggagaacgcacctcatgagaacacctgaggcaccccttccgtataatacctccccaatgagagcgtagtgagccgaccgtctggcaaagcgccccgccgagttcttgacatccggctcctccccacgcgttatatacgtaatgagcggccctctccacgtcgcaaa

SEQ ID NO: 38949 - DNA, 479 bp, Zea mays
ccatctccccaacctgaaactctcttacttgttttctccgatcagccaattgtttcatccaatgttgagctcgagcgagttgttctctaagatgagttgagaaagcaaccctatcagccagccaatccgttactgacccctcctccggaacaccagattgaggtaacgccaacattggagcatcatatccatatagtgctttgaaaggagtacaacccacactattatggtaagtagtattgtaccaaaattctaccaaggccaaccacaacttccatgtagacggctgagcatttactgcacatcttatatatgtctccaaacatagattcacccgttcgctttgaccgtcagtctgtggatgataggtagtggaaaacagcaacttgacatccataagttgaataggtgtttcagaaagactaatgaaaatctgtcttgtcggatcaatggacttggaggtcatgtacttcaccact

SEQ ID NO: 38950 - DNA, 469 bp, Zea mays
  unsure (1)..(469): unsure at all n locations
tgactctcgcaagcagacgaagctccagttataaagcctacttcttcagaagaaaaagcttcggaagaaaaagttctttatttcccaagaaatttagaattaaatggccagagtgcgctctaccgctagagttgagcgtgagggaggcgaagccgaaggagcggagactgttcctatctccgaagcaatgcaacgatccggactggtgacctcagaaggaatccgtactgccgagacagagcaaactgctgccgagacagaagaagctgttgccgaagcggaagaaggaaatattgaggaagctgattctgatgatgattaccatattgccgtgccaagcaagcccagccacttggacttcgggaagtcgactgtctccaaggctgatttcttcaagatggtgaagtcnggttatttcaatgagaatgagaagaagctacttcgcttngngggggaagaaactaccccg

SEQ ID NO: 38951 - DNA, 501 bp, Zea mays
  unsure (1)..(501): unsure at all n locations
tactaagcttctaagggagaacacgngacacgtttaactaatgtgcanattcatatagatagaccctgcgcagcttgtcaagcaggctaacaggtgggaagctctcatcacaccaaaaatgtgatgaccacatcaagacctctggagatgctctacatggacctcttcggacccgtcgcctatctaagtataggaggaagtaagtatggtcttgttatagtcgatgactcttcccgcttcacttgngtattctttttgcaggataaatctgaaacccaagggaccctcaagcgcttcctaaggagagctcacaacgagtttgagctcatagtgaataagataaggagcgacaatgggtccgagttcaagaaccttcaagtggagaagtaccttgaggaggatgggatcaagcacgagttctccgctctctacacaccacagcataatggtgtggagagaggaaaacaggacgctatagacatggcaggacatgcttgagag

SEQ ID NO: 38952 - DNA, 326 bp, Zea mays
  unsure (1)..(326): unsure at all n locations
ctctctganagacctcnctgngcactcacattggtatgtactgtgttataaagnatactcaaaccagaatgtttctatgcaatctttaaatgttctcaatctcatgtatgcatgtgcgatgtgctggtggcctggagtgtgtgcacgcctactatcttttgagtgtgtgtgtgtgtgttggttttcctttttgtacggatctggccatgtgcctttttttcttctcctattgatacaaagatacacacctgtcctgcgtatttgagaaaaaaaatggtgtatatatgctgcgaattntgtatgggttggcacttactttcattgaa

SEQ ID NO: 38953 - DNA, 385 bp, Zea mays
  unsure (1)..(385): unsure at all n locations
ggtagggagcactcggtccttatgcagatcaagggtgtgtgtcacccttgtgtgggtgctccaatgaggattagtggagaatatcgactaccgtgacaagaggaaacacttgaaaatcttttaaatccttggataaatttccacaattatatttctaaaaatttacattcttagatttttcatgatagcatagtattggaatttatgcacaaattttttgtatacacattangcactcaggtgaagttatgctaataaatatgataagcatatgtattgtcacgaagaaatcatgaagataaataaacatctagtgaagaattcaaattaaaatagactntnttctacgcccctcccatccccacctgatgggcctatttgacac

SEQ ID NO: 38954 - DNA, 414 bp, Zea mays
  unsure (1)..(414): unsure at all n locations
tcagctccatctatgttatggattgcttctgagtctgtctttttccttcggcccttctggcagcttcctgacttccatgaatagcaatgggtccttggtccgaaggtatcttcatgcaaagatatgctggatgaagaattgcttcgaaggcattgagagtaccacgaccaatgattgcattgtaagggtattccatgtcaacaatatcgaatacaacttgtccagtccttgtgttgttgataaatccgaaggttactggcattagtgattttccgagtgctacaatctgccttcctccaaagccacaaaggggatgtgtggcatcatggatctttgcttcnggctcttgcatctgtctgaaggccttagcanatatgatatcagctgcactggctgtatcaaccaaaacactat

SEQ ID NO: 38955 - DNA, 456 bp, Zea mays
  unsure (1)..(456): unsure at all n locations
actaagcttcgcattgnagaaattaccctgaaggtaagaaatgatctcggttctccaatcttcgctaaaaacaggagatatattaagaactgctctttcaagaagttccaccgaaggtgcttttattgtttcgaaaaatacatccgaaggtaaaggcagcccctgtgctgctgacttagctagcaaatcagcatgctcattttgtcctcgagggatatttttgacagaaaacccttcgaaggaagcttcaactcttcgaaccatatccagatattnttcaagcttcggatccttagccttgcaacttttgtcaatatgacccgaaacaacctgngaatcagttttaagtatggctcttctgattcccattgcttntaacttccgaagacctagaatcaatgcttcgtactcagcaatgttgtttgtgcaattaaaatcaagctttgccgcataaca

SEQ ID NO: 38956 - DNA, 429 bp, Zea mays
  unsure (1)..(429): unsure at all n locations
tactcagcttctaaagggagagcacattttgggactaacaaatgttcactctgttatagacaggatctgtagcgcatgtcaagcagggaagcaagttggcgttcatcacccacacaagaacatcatgacgaccgacaggccgcttgaattactccacatggatctattcggttcgatcgcttacataagcatcgacaggagtaagtattgtcttatgattgtggatgattattctcgcttcacttgggtgttttttacaggataaatctcaaacccaagagaccttatagggattcttgagacgggctcaaaatgagttcgacttaaggatcaaaaagattagaagcgacaacgggacggagttaaaaactcacatagaaggcttctttangggagggatcaacatgagtctttctcctacaccccaca

SEQ ID NO: 38957 - DNA, 445 bp, Zea mays
  unsure (1)..(445): unsure at all n locations
tactaagcttggggagntgctgattacatgaagggacaatacgatgctcatcttatttgtaaagcaatgcaagtaagtattttttaaaacttcccttgcatgtactgaactgtgatcgagattaacttgaattcttaaatagatatttgaacatggttatttttttcttagatatttgtgcccatctgccaagagaaccactggacgctttatgttgttaacaaaaaatatggacaaattgatatattggactcctcacccacggcagtcaatgataagatgaaatatcaccaaagcatcgcagctaaagtgaggcaaaggctgaatgctgttcttttgagaatctccaaggaagaacacatcgatttcattcgattttcaaagtgggggtttgcattgatacctaaaatacgtatcgctcatcaggacagaaacagtatggact

SEQ ID NO: 38958 - DNA, 352 bp, Zea mays
  unsure (1)..(352): unsure at all n locations
tgcacgggcggaagccagtctcgcccgccaacgcgccgaggatctgtaggcgcggctcggcagcctacgcaaccgcgtggacaaagtcgaggcctcgacgcgcgcggaggttgagcggacgcatgcgtagctcgtggatgcgtaacgggagctaagtgtgcggaccgccgccttcgaagctcccggccaagaggtgggcctncgcttccttgagtggctgcaggaggagctgggggtgctgccaacaatcgtgacaggcctcatgtccttcacctccctcgttacctgcgagggggtcgtgaatgctttgtcccacgaggggtgcgggcatttcgaggtctntgaccagtcg

SEQ ID NO: 38959 - DNA, 344 bp, Zea mays
  unsure (1)..(344): unsure at all n locations
ttctgaanatgaccaacttggttcgttgaatcgacaatatgttctgccttgccaaagaatgtgtgcacaccagtggcaatgacaacggcctcaatctcaccctgtttgcaagtggagccagaatacactccatcaccacggcctttggtgactggaagggattctccggtgagtgcagactgcgagcaactcataagtcaggagaagcacaatnttatatcaaaccacaaaatccacatagagaggaacgctctaatttgcattacctgatcgattgtcagtggatccccttcaagcagacgagcatcggctggaatgatgtccccaagcttcacactgatgat

SEQ ID NO: 38960 - DNA, 413 bp, Zea mays
  unsure (1)..(413): unsure at all n locations
cagcaagacatgggcagaacatctgcagcatgtgaaacaagtcctccaagtcctacgcgacaacaagttattcctgaagcgctccaagtgtttcttcggggaagaaacagtgtcttatctatgacacatcatttccaaggccggcgttcccatggatcccgcaaaggtcgaggcggtggaggcatggcctcgcccgcagtctctacgggcgctgcggagcttccttggcctcaccggctactaccgcanattcatcgctggctatggcgaggtggctgccccgctaacagccctcttgaagaaagaggcctttcggtggtcggacgctgcggatgcagcctctctacaacttaaacattcattgatgacagcaccacttctccaaatgcccgacttctccaagcgcttcatgg

SEQ ID NO: 38961 - DNA, 432 bp, Zea mays
  unsure (1)..(432): unsure at all n locations
ataaaactcagctngctcaggccttcttctttttctccatagcaggaaccttgctataacactaccccacttaaaatggatgagggtagaactcctgaatcttgaggatttgaactccttgaagtacctcataacaagggcgttacaaggccttcttctgttgttgctgcttgagcatgctgcggagaaatgactgacacagggttgattctgggagaaccttcttctcatcttctcttcactantttcttttcacttctcacttctcactgcttctttctttctctttgctcttcccactggaggattctatcaaagagtattaccatcatacagaggaggaaaccaaagactatgaaccatgtataacagtttttaacccaagaatcaccaagcattgtgatcttangggcgagggagtggaaactggag

SEQ ID NO: 38962 - DNA, 476 bp, Zea mays
  unsure (1)..(476): unsure at all n locations
gtccacccaggagtttaggtgggtgcagtgggagaaaatgtcatcactagtggtatcaagtgtgtggagatatccggtcatgtagactatggtggggtcatcttcagtaggatctcttcctgacagggcttggagtcttttcctctaggtaagagtgttcttgtagctaggtggaaagtaacgaaggggtgtctcacagacttccctgctgtagttttggcatagctgtcagagggcttttcgggcaacattttggcaagtgtctatgaagcggtgtccagtgaaggtgacttggaaaggagggtggtttgggtagtttcggctttctcccaggtagactgccatagagcatctttcagttccattctcgcggtattctttccagatatactccgacttcttgcggatccccatgcgaagcgcgcactccgcaaangtgaaggaatcttcacctctgacagangatgtctaatgac

SEQ ID NO: 38963 - DNA, 388 bp, Zea mays
  unsure (1)..(388): unsure at all n locations
tcacgggctactggcggactagccaaacactggttgtttgtatgtgggctggantgggctggccaccgcggccgtaactctggcggcaatggcgggcggaaatgagctcgcctgagctaaagaacagtggctggcccgtgagggcgagtgcggcgccaacacaggtgcgccccgcgaggctttatatgcgcgggcgggcacagtcaaaggcgtgggcgcgcggcggacttgaccggacgccggagtgagcgcgcgcccgggttgggcgaactctggcgncccaccaggtcgaacacttggcccgtcgttctgccaactctgggcgtgtggcctcatccgacctgtctcccttggcagtgcacaaaactctttcctcctaaagcacatt

SEQ ID NO: 38964 - DNA, 403 bp, Zea mays
  unsure (1)..(403): unsure at all n locations
tggccaggtcatccgcgagcgggaccaacctctgagtcattctaccgaagccgngagccgggctaatgtccccgcgggacagctggctgatgctacggagcgaccaaccgaggtgtctgcttgggccggtgtcctggcggagacccgggctgtgagggtccaagcgaggtgctggcgtcctccttcgaggtggagatccttccgcccatgtcgccgtccgaggctgggccagattccgccgaaagtggaaacgacgccacgggtgttgctgctccctctgctgatgtttgaacctgcaagaacagtttgtctgtagtatgcgtatgtnttttgcggcagccgaggcctaaacatcttattgtcgtattataaagcttgcgcttcttttctcttgtttcgagta

SEQ ID NO: 38965 - DNA, 509 bp, Zea mays
  unsure (1)..(509): unsure at all n locations
attacggacacttaaaactaagcttattgcccaagaattntttaattatgtaaagggcaatgtctccatggttcaggatagtgaaggttacattttatatcctgcaaactatcctgagcataagaataggaaaattcatgctagggaacctcatactatttctcaccatgcctttatgtataaaaatgaggcttctagttctagacattccactcatgttaaaatgcctaaaaagaaaattcctaatgcatcaaatgagcataacatttcatttaagacttttgatgcttcctgtgttttaactaacaaatcangcaaagtagttgccaaatatgttgggggcaaacacaagagtcccaagacttgtgtttgggtacccaacgtactctgttctaatgtgaaaggacccaagaaccgttgggtacctaataacaaggcataaagtngttctgacggttatgcatncggtggatcaagttggattatcgatagcgggtgacacaccacat

SEQ ID NO: 38966 - DNA, 482 bp, Zea mays
  unsure (1)..(482): unsure at all n locations
cggacactataaaactcagctatgctcttcttngcattatgaatgtgtaaccttntattttatttagnngtataagaaccttctggtctatgcattgtttggtcctccattgntttntgtgtaaatgtattacgtaatccattaaaagttatcgatattaaaaaccatttcatgatcaagggcatcgctacgttactatgtcacattggagtactaatgaaaggacaaaaacattgtctttcttggtgttcaaatatttgcaatgcttttttcttgcaataataatcagtcaactttgcattgtgctggttctcttttctgggacttgtaaaatgtaaattagactgtcagttatcataacttggatgggacagaaactctangttttcagtacacatatataacatatngtaatggttngcattatcatgatcctagatatattcttctctatcttttgtctgaaatgctagcaacacaat

SEQ ID NO: 38967 - DNA, 439 bp, Zea mays
  unsure (1)..(439): unsure at all n locations
gaatagcatgcaactgttgggacactcttttattcttctcatatgncatcccaagagcagccaacatcttctttgcgaagtacatattctttggcaacttatgattctccgggagaaccttgcccataaattggacgatgtccgctgaagcactgtctgaaatgctgtgcttcgactttatcgccattagtcttgcgagagtcccaagaactgacatctgagtgtgctcgtgcagtgtctcttctctcgcggagagtaaccggaagaattcttgagcatcgcgtggaagctgctccggctcctcagcgttcatttcaaccttcctaccaagatcatgcaacatatcgcccatcctttcatgatcgtcatatagctccacctccgccgtcacgtgtctaatagactcttcatgccggtaccatacaatgtatcttcgcat

SEQ ID NO: 38968 - DNA, 459 bp, Zea mays
  unsure (1)..(459): unsure at all n locations
ggctataggccttcttctttttctccatagcaggaaccttgctagaacactaccccacttaanaagaatgagggtagaactctcgaatcttgnggatttgaactccttgaagtacctcataacaagggtgttacggggccttcttctgctgttgctgcttgagcangctgcggagaaatgactgacacagggttgattctgggacaaccttctcatcttctcttcgctatcttcttttcactgaccctttcattctcttttctcttcccattggaggattctatcaaagagtattaccatcatacagaggaggaaaccaaagacgatgaaccctgtacaacagtcttcaacccaagaatcaccaagcattgtgatctcatgggcgagggagtggaaaatggatttgctcgcgattttgaagggggatttatcaagtggtgctttgcatggatggaactg

SEQ ID NO: 38969 - DNA, 417 bp, Zea mays
  unsure (1)..(417): unsure at all n locations
gctanctcttgtaaagtgtaggagtgggaaaacttggatgccaatgaatgtgggctagttggggtatttatagccccaaccaccacaaagtggtcgttggaaggctgcagtcgcatggcgcaccggacagtcaagtgcgccaccggacactgtccggtgcgccaaccacgtcagcagaccgttggggttcgaccgttggacatctgtcttgtgggccctgtaagctgtccggtgtgccacccgtgcgtgctctgcttctctgcgcgcgcaggcgcgcatttaatgcgttgcagtcgactgtagtgcgcgaagtagccgttgcttcgctgtcacaccggacagtgcggtgaattatagcggagcggattcccgaagctggcgagttcagagtcgctctttcttggtgcaccggacact

SEQ ID NO: 38970 - DNA, 505 bp, Zea mays
  unsure (1)..(505): unsure at all n locations
ccttaaatactcactaggccctcaaagacttatgctggactgtgaccttttattaggagcggcacaacttcgtatgaaattacatatatgcacacaaagtttacacacatagtttacaaatattgcaagggcatcgntgnctttttctttttctttcttgctactcaaatcttcaacggtttccctttcccttgcttcgagtgcgaagatttcctgatgccgagggtggtggcttcggtgcacaccttcgttaggtgcatgttcaaatcgaaaaccattacaggttgctccggccgaaggccggcttcgtctgtccttcatgtagcacctgaaacatgctttctctagtcaaagataaggtgatttgagaatcttcggcaaagtaggtctcaacatatttcgcttgctaaaattaacactacacttttttgctaagtatagctcgtgtaaaaccaacaagctgactaaagtttgtgctaaatatacactcattacactttaacct

SEQ ID NO: 38971 - DNA, 382 bp, Zea mays
  unsure (1)..(382): unsure at all n locations
taagggacagtggatagctgcacactatgtatttcttgaatcttcaaacgacgaagacacttcgttcgacatagctgctcggctagggtcccaaattgagggggnnncaatccttgacaaagtggtaccaagttctttactaaatttagttctgttaattcaatgcattatgtcttgttntgtgcatcctaatgttctaacttgtgaatagggaaactctatgctcgtantctgtgttgaacttgagcgcatctcacagagaacttcagacagtactacactttcgttactaccagtgagtatgaatgtttagaagcgaacatgtttatttgtatgttctaacatatgtgtgaaatcatctttcaatacatanggtatcacg

SEQ ID NO: 38972 - DNA, 496 bp, Zea mays
  unsure (1)..(496): unsure at all n locations
cgatcgccaagcatataagattctgtatgttatgtgatcacccaagctttgttgatgaagcaccagaagaccaatcaaggaaggaatccatgtgggagttcgcaagagaaaggtttgcgtgttggcatcgatgcttcttcaataagctagctgccaagcaaaagttagaagtctgaagatgatctttgagtagccagaatcagcgtttgcaatcagcaaccggatgctcctgaaaggccagatnttgttgaagttccatctcctcgaagagtctgcaaagtgaagatatgtagctgaagtaaagctatacccataacccttctaagccgaatctcgaggacgagattccttttaagtggggtagattcgtagcatcccacanattcatatcctaaaactttctcacactcgctctaaattcaaaatgaatttaaatctcatttcacaatgttcgtctgcagttgatatcaacaaataaactatagtggtctatatt

SEQ ID NO: 38973 - DNA, 494 bp, Zea mays
  unsure (1)..(494): unsure at all n locations
ttggggtgcttgagcgggttaactcaattcttatctcaagctatcaatcttacattggccatcctttaagaatgacccaaagatgaattgagttgntatatcactaacttcatattcatctctagcaagaacttgtgttgtagggaataaggattaacctttatgggaatcaagcaaaaggcctacaaccaagtgatatccaaaggatggtaacaattaataattaagtgcacattgcttttaattggtatattcgtttgtgtcttttgtagccacataggaaaaatgaagcacttgagaatgaacttaagagatnttaccttgctttggaaaggatctaattatatggtagatngcaagttcatattnttatattgtaacaatctacatgctttaaatngattatatgtatcttgtggcatatttcaaattaatttatcgtgtatcgccatgacctanacataaagaggaaatatccatgttcttaaatgaat

SEQ ID NO: 38974 - DNA, 348 bp, Zea mays
tgccaagccctccgacccggccagacttcaccggatgtcctatatcgacctcaccggacttcggtcttccgctgccgcgcgtggaccgagctatccagtgagtctccgtccaatcccttgcgctcatatcttctctggcatcccatgaacctctctgacccgtccaattgaactatctcgccgtgagcaggccggactcctcgccgtcgacgagcatccccgcctgcgcacgtggaccggccaactccgaccatctccgacggcgacccgcacaccgttgtgatccccgagacttccccttcgtcctcgaccacttcaccggagcaatctccccgccggtaagcccct

SEQ ID NO: 38975 - DNA, 480 bp, Zea mays
  unsure (1)..(480): unsure at all n locations
tgngagagaagaaagggaagaggcagtaaggagcatctattatattgtaaaaaccagagaagcaaaggggttatttatagaaaggaaaggcaaccgctcacttctaaccgcggtcactgaacagtcgcaaggcattcaataagcacttccacccacccgaagacacgtcagacggcggacgccgtttcatgcaacactacacccattgggactccagtcaacagcgcaaaggatatgattacactagccgtcccatcgcattactactcagaggcaaccggctaaaacactcagcgtaccaagccgtccctttgccacacccattgtgggggacgcccaggaattatcagtatattgttcaaacggtcacatccgtgcagggcatgcagtgaatacctcaagacanaaatgagatatcattaacgatcagaggaaagccaaatataaccagcaaagtacaagatatggncgacagaagcg

SEQ ID NO: 38976 - DNA, 492 bp, Zea mays
  unsure (1)..(492): unsure at all n locations
ggttcgtttcagccaggattgaagacaggtctgatatctgcttcgcataccattctatgcattgtagttcaattcgtttccattccatgcagtcaaaccagtgcaaaaccagagcagcataccattgcgccatcctagaatcctaaaattgcaggatttcagcacatgtacacaatcagaatgcactcaatttcttcaaatcaatttaatacatacagtaataacaaaaagacctgcaattattcacgcatactcgccaagaaacaattatataagtaatcagctatataagcaaatacaataataacaatggtcacacatacggagttgtcttcccaatacttgacaatacacataacanagttgctaagacataacatagcttgctagaacagcaattcaaagctggctagacatcaaagttttgacttccaatactcgacaatacacattagcaattcacttggttgacagcaactcacattaacacat

SEQ ID NO: 38977 - DNA, 506 bp, Zea mays
  unsure (1)..(506): unsure at all n locations
tggaagaagtactacataacatttataatcaccaagaagtgattctatgttttaccaaatcaaataattcagttttcgaaatctgttccgtcagtggacagaacacagcaaccattttgtaaaattcataactctttaattatcaggcctatggttatgaaattttaacacaagcaagataagaaaagcatctacaactttcttataacgaccatgaacaggttgtaaacttaacgtaagcaaacaattcactctctgaaatctgtacagaaattggacagatttagttactgaatttgtgaaaagcacaacttctaaacgatcagacttatggcctgttgaatttaacacaagtaagataataaagttatctataactttcttataatcatcttaagggtatttggtgattaactggctcgaacatctcanacaaacattgctatttatgtntggacagatntcaacatgcaactnntaatagtcatgaataaagttctatatat

SEQ ID NO: 38978 - DNA, 373 bp, Zea mays
  unsure (1)..(373): unsure at all n locations
actcagcttgtaagggagaacacattntatgactaacaaatgttcattttgagaaagacagggattgtagcgcatgccaagcacgaaagcaagttggcactcatcatccgcataagaacataatgacgaccgacaggccactggagctcctacacatggatctattcggcccgatcgcttacataagcatcggcgggagtaagtactgtctagttattgtggatgattattctcgcttcacttgggtattctttntacaggaaaaatctcaaacccaagagaccttaaagggattcttgagacgggctcaaaatgagttcggcttaaggatcaagaaaattagaagcgacaacgggacggagttcaagaactc

SEQ ID NO: 38979 - DNA, 264 bp, Zea mays
  unsure (1)..(264): unsure at all n locations
tactccacactgaggaaaagcatggagggatatttgttccaactataagggtcaagaaatcctgcaaatactcctatatcatcccttgacttacctctgctgtctagcttttattttaaaagaagatcaacactctaccttgactatgttttatccaggtcgaacaaaactacgatattnattccctcatgcaagttgtttgtattttcaaccacaaacccttttttgatttcatttggccctcctaccaattttcggaagaat

SEQ ID NO: 38980 - DNA, 288 bp, Zea mays
tgtgatgttctaacactcacagtcggatttcttttacttcagacgtaccgttggaatcaaattaattaatgcgacgtctactcttttaaagatacagtattatcgacaagatccagatggagtttatacctccggagcaactccccaatataagtatgagctgctccgctattgtttctgacctgacagctagtgtgtctctaacaggaaactggtgatctacagctacctagaaattaagtgtgtaggatagagttcatataactgtggatgtcaaggtctaaccgt

SEQ ID NO: 38981 - DNA, 157 bp, Zea mays
atccctgcaccagctccgctgctttaataactgcttacgcttttgaaaatatagtgcgtaccctaacagactctttaacacctctggaacatttcattctatgctcgtaaatttcaaacttaatctgaataggtttgatgactgctactactgctgt

SEQ ID NO: 38982 - DNA, 359 bp, Zea mays
tttttttggaaataaaaaatgggggttttttaaagataagttgaatgtgttaataaaaaatttgaaaaaaaatttttttatttaagaaatttatagtggttattaaaaaatgagagtgttaaatgttttaagtgtgaaaatttatattaagagaatttttgtgaaaaaaaaaaaataatgtattttaaagttttaaagtgaaatgaattaattgtttgtaaaaataatttatgtaaaagatttggattgtgttttaaattggggtttttttgaaaatataagtttgtaaattttttgaaaaaatttttggaagtatttttgtttgtttttttatgggagggagtatttgataatttttt

SEQ ID NO: 38983 - DNA, 75 bp, Zea mays
cactggtcactaagtctagaccaagtcactcagctctagatcactaatcctatcaggaactaatctctaggagac

SEQ ID NO: 38984 - DNA, 166 bp, Zea mays
ttcccaacattaacgcgcgtgactctcctgatatacacgtctactgcgagagatgctgatagagaattctctggttttggaaacactaaactaagattgacgctaagatgtgataaaaacatcgacgtaacttatagtttggcagtactattttgacttggttggt

SEQ ID NO: 38985 - DNA, 318 bp, Zea mays
taaaattggtgatgaaagataaaaaaaaaaagggaagtatgtaatgaataatggagagtgtatgggaaaaattttggtgaaaggaatgtattgggaggataaaatagatagggaaagatgggggaaagtaggataatgtgtaagaagggattgtggatgaaaaagaagaatgatgaggggtgaaaataatagaaggggatttggtgggaaaagaagttaagggaaaaaaatagagggggatttggggtgttaatttaaaaaaaaaatttttaaaaaaggggggaataaaagaagaaatgatggaagttaaaaaaaaaa

SEQ ID NO: 38986 - DNA, 151 bp, Zea mays
ccccgaagactcggaagtcggtcttgtttaccaaaagcaatattctctacttctattatacgtaaactatagaggtagtaacaactgctcttattttttaatacatactcctttacaaaccatacactccagggcttttctgcccactgct

SEQ ID NO: 38987 - DNA, 118 bp, Zea mays
tacaaactgctctcgatttattctctccctaccctgctcatgaataattcagctaatgacagtttcctatcatgaatatactcgccattcatcgctgtcttttttattttacgtcata

SEQ ID NO: 38988 - DNA, 100 bp, Zea mays
gtgtcctcacggctcctctggttgacagaaatatggggggaaaacaattgatgtcgacctattcgttgcacaagctcaaataaaagcgtaaaaatgtcga

SEQ ID NO: 38989 - DNA, 92 bp, Zea mays
taactacgatttgtgtttgccgcattaaacaataacattagggagcgttaatgctgtctgtattccgctattggataaaaagtgcttcttat

SEQ ID NO: 38990 - DNA, 237 bp, Zea mays
  unsure (1)..(237): unsure at all n locations
agcacgcgctgcactacgacatcacggcgtgcgttgttaactctgtttaacctgccacaccctgttaaccagcctactattctgactggtggtcttcgttgcataattgagatgatgcgactanatcactgtggtcacactggcactctgcatacgaaaggactggatcctgttgcacattctaaccttttaacaatatcggcttacacatctgctggccctgtatatttacagata

SEQ ID NO: 38991 - DNA, 273 bp, Zea mays
aaccctaccctgctagcaccaccatctttttctattcctcaggaaccacgctcatgaaacttctatattaacccgttagcgtggatggtgatttctatactatattggcttacaaatagtacagtacagcgaggaaacacaggggggcgtcccccccctacctcaccataacggtcacccatatgcttggaatatcctaatccattctcgatgctactcttactaaacttttcgcttcaacaccccccacaattttcccttcgctctgccttc

SEQ ID NO: 38992 - DNA, 260 bp, Zea mays
ttattaattcacactgcattcctactttactgtcttagataccatttgtcttcttagattcaatctccttcataactgagtaatacacttagcgacatttgctcgacatgggagctgctgtctgttttataaacatcttaatcaactctatatcattctacatatttggaggaagtgcttctcttatggtgcagtttatatcttctcttatatggcatgccaaccacattcttcactctctctgacctcggatactctac

SEQ ID NO: 38993 - DNA, 251 bp, Zea mays
ttttcacttgcagtcgcctaaccacctcgccagaagatggctacaggcttcaactcgcctttgtgagctccactgaactgtaaatgtatcttgctgcacattccaaagagacttagtttaatcaggctggaatcccaattcagatcttacatgcacgagtcacagcatttttactggtacactttgctcctcaggcagcagctggagtgatccaatttgttttgagcagcccagtgctcattacatgacat

SEQ ID NO: 38994 - DNA, 91 bp, Zea mays
tcatgctagctctcgtgttgtacaatcacttctggaccctgccagcacttgtctgacccctctgttgtgtgcgaacccttgtctcacattg

SEQ ID NO: 38995 - DNA, 260 bp, Zea mays
caacttccttttctactggaacatatcgaggattttgcattacttatgcctcgagggactgtgttctattgatgatggagatgatgttgcatccattagacatccgttgaagccgagaacccagagagccctacacacgcgtggtgagcaggtcctgactatttgctattatcttattactccgcttccattatctaggatgacacttgtatctatctgtaccattggtgatatattgtacttatgcatgctcctaacat

SEQ ID NO: 38996 - DNA, 236 bp, Zea mays
atgtacccgcacagtgaaacctgtttatgatgctcttgcgcatgaagggaattctgcccagacctattatgttcaatttatctttcagatttctcagccttgttactatattaaatggtactaatgtcttttacaaaagcgctgctctgtgaaccgacgaacttgtacaattgctggtgcctcgcacaatgcggcgacaaactctggacgcacatcttcactgggacactggggat

SEQ ID NO: 38997 - DNA, 165 bp, Zea mays
tttgcacagcgctcgaatgctactggatgcttttgctttgtaaaactgaaaagtaagtatctattgaaagccactctaaaagtccgacaacgatgccttttcttgggacatttctaagttccataaggcgtggttcggtaagaactgcccatatggcttcttttg

SEQ ID NO: 38998 - DNA, 225 bp, Zea mays
gctttttcccttgatacacaacgacatttgcgtacctgctccagctaataacaggataatctaatactgatatccttatgggaggagttatgcagcacttctcactctaacaaataatacctgagtaaggaggaccccccacagctattacgctgagcaagtgcatgcctaacctagcagactaaactacctgtccatatcgcgataattctcccctcagtttta

SEQ ID NO: 38999 - DNA, 187 bp, Zea mays
tctctgtcaaaaatattcctcgtggagaaaatgaatacgctgatctattggctaaatcagtagcccaggggctgcctataccttcggaagtatttcttgaaacaataaaagcaccttctgtcgagcttcttgaaagagcaatccttaatatatcctctgttatagtgaagattgagaactgagatca

SEQ ID NO: 39000 - DNA, 443 bp, Zea mays
agcttaggtcatggtaagaaagatttgggcatagttatactccatcccagatggtgaatcctgattcatttcgagatctatgttggcttttatcccccatttatgaaattgagcagattgatctactccttctccgatcctggtgttttccttttggggacaggaagatttacttgtaattggtattcaccttctgcaagcatgatagttaaaggttagaccatatttatgagatttctttagtaacctatgattgctagaacaagaaaacctcttgcttgtgcttctaatgcgctatgtgagctatgtcaagtagaagtcaaaggaggagtgacatgcacaagcaaaataagaattgcctagagattggactgcattgtattcaggtaaaaaggcaaaggtatggaactgtgcacttcatttagtctctatatgagtaatta

SEQ ID NO: 39001 - DNA, 440 bp, Zea mays
agcttgtgtcctctcataataaatttatggattcacatattatgatagaaatggctcatgaggttgtgttaactaatttgaaatcataccaacctcacatatgcacatgtactcatatagaaactatattatcatgtgctaacaaatgttgctctcaagaaagccaatcttccattgagctagaattttcaggaacaagtaatgtttcctatgcaaaagaaaacaatgagctcaaggaagaaaatgagaggctaaaaaggagcttgactcaattgaagggaaaatgtcatgctcaaccttctcaagataaccgtgataatatggtgaaaaagcttgagaaggggacaaccgtagcatgcacaaaaccccttcaaaagaatatcaagctttccaaaaaaggcatgagcaaacatcaagagaagaaagactaagctcatgac

SEQ ID NO: 39002 - DNA, 417 bp, Zea mays
agcttgggttggtaaggggagagtacattgttgaccacaatgctggtactggaactattttcttcagatttggtgagattttgagtatgcaacatttcgccattgtggaaggcacttttgaggcactctgtttagcgatgcttgtggagtgtcataggactcaatcggcaatggagctccgctgaaataatggatgctaccgcaggaggtccgtttatcgccgacttcaagcaacgagtgacgagtctgacccaagctggtactggcgtaacccaactcggtgagctgctcgtgcagctgctgctgctcgcaaatcccagtgccgccctgtccaacgccaagcccgccagcatccatacgtccggccaacattcagatggcgtgagagaggtgttaggctccatactccatccgaca

SEQ ID NO: 39003 - DNA, 441 bp, Zea mays
  unsure (1)..(441): unsure at all n locations
agcttggtacctggcagatgtacatctttttcgattgtgaacccatcacggccatgatggatccaccatcaagttntgttttcaaaaacatcccacccacttttgctatatcatcttttgtaaaaacaaaacatctgtttttctaaagcaaggctaagcatcaaaatcttttgtaaaacaggtgatcaaggaaagtaatcacattcaatgaaggtaatgcaggaattgttttatcaatcaactcctatcacctaatgcaacaagcaagtgataaagatctttaaatcacaaggaggtggcaaatgcaccggggcttgccttcatttataggtgagtcaggctcggatccgcagatgtcaaagtaaaagcaattccctgcctgatgttccgcaggtggtggtggtgaagtcttctcctcttctacctcaacctcttcttcgt

SEQ ID NO: 39004 - DNA, 376 bp, Zea mays
  unsure (1)..(376): unsure at all n locations
cctggcagatgtacatcttnttctatgttgaacccatcacggccatgatggatccaccatcaacgtttgttttcaaaaacatcccacccacntttgctatatcaatctttgtaaaaacaaaacatttgtttttctaaagcaaggctaagcatcaaaatctttcgtaaaacacgtgatcaaggaaggtaatcacatccaaggaaaggaatgcangaattgttttatcaatcaactcctatcacctaatgcaacangcaagtgataaagatctttatatcacaaagaggtggcaaatgcaccggggcttgccttcatttataggtgagtcacgctccgatccgcagatgtcaaagtaaaagcaattccctgtctgatg

SEQ ID NO: 39005 - DNA, 354 bp, Zea mays
  unsure (1)..(354): unsure at all n locations
agcttcctcaatctttattggtgcttattaaatatacttcaatgtttataattggcccaagccatgattctaaatttttcatactcttttccccattttcttgaattttgttcatagggctcaattagggtttttgttggggttgcacattttgcctttttgaaaaccccatttgttttgatcatggagcttttatgtataagcttagtgggttcttttattcttaaatcaacttgataatcatgctcaattttgctcacataaaatgatggttcttgggttagcacttgagagaaaccctangtgacactggggtgtcacagccttcctcccttataggaatctcgtcccgag

SEQ ID NO: 39006 - DNA, 444 bp, Zea mays
  unsure (1)..(444): unsure at all n locations
agcttctaaaggagaacacgtgataggtttaactaatgtgcaattcgaaaaagatagaccttgtgcatcttgtcaagcaggtaaacaagtgggaggagcacatcacaccaaaaatgtgatgaccacatcaagacctttggagctgcttcacatggacctcttcggacccgtcgcctatctaagtataggaggaagtaagtatggtcttgttatagttgatgatttttcccgcttcacttgggtattctttntgcaggataaatctgaaacccaagggaccctcaagcgcttcctaaggagagctcaaaacgagtttgagctcaaagtgaagaagataaggagcgacaatgggtccgagttcaagaaccttcaagtggaggagtatcttgaggaggaagggatcaagcatgagttctccgcttcctacacaccacagcaaaatgg

SEQ ID NO: 39007 - DNA, 420 bp, Zea mays
  unsure (1)..(420): unsure at all n locations
agctngacaacgaggagatgactcttatcattaatagttaacgccgaatcctcaaacaaaggaagggaaaggactacaaaccccgttccaagagggtgtgctatatgtgtggtaactccattcactatattgcaaaatgtccatatacaagtgacagggacagggacgacgacttgaaacggaacaagacaatggagaagaataagtattacaataatggtggcgaggcactcatggtgccggaatggaactctgatgatatctaccccaactcctcttcatgatgatgccgacgacattgccttcaataaacggcacctcttacacaacatcatccacaggatcctaatggcttgtgactacaggaaaaagaacgtacgttctagagatacgcctaaatacactacatctgatgatgag

SEQ ID NO: 39008 - DNA, 429 bp, Zea mays
  unsure (1)..(429): unsure at all n locations
agctttctttggcggcaagacgaaagtcgatgcttgcccaaggtggtcaaaaagggttcaccggaggtgggcgccaatgttggggacttattctcaaatgctatgaattaagaacaaggcaacacaaaagggggttaaatgattaatgtccttcgtccttcgaagcattatttcccttgggatataacgatcttcggacgaaggtcatgaaggacataccttcattattacggtacatgatagtgaaaatgagaatcacatgaaatgcgaaagataacatgaacatttatatatcattattagctcatttctattttattaacatggaaaaatagaaatgacattaagttacaaatgtaccttcggcttgaaagaaggcaaaagtacaagcgtgacgcanaagcaaatgccaagtcagcgtgaacagta

SEQ ID NO: 39009 - DNA, 449 bp, Zea mays
agcttgacaatgaggagatggcgctcgtcatcaagagcttccgccaaatcctcaagcaaaggagagggaaagactacaagtcccgctccaagaaagtttgctacaagtgtggtaagcccggtcattttattgctaaatgtcctatatctagtgacagtgaccgaggcgacgacaagaaggggagaagaaaggagaagaggaggtactacaagaagaagggcggcgatgcccatgtttgtcgggagtgggactccgacgagagctcaagcgactcctccgacgacgaggacgccgccaacatcgccgtcaccaagggactcctcttccccaacgtcggccacaagtgcctcatggcaaaggatggcaaacgaaagaaggttaaatccaactcctccactaaatatgaatcttctagtgatgataatgttagtgatgaggaggatagcttg

SEQ ID NO: 39010 - DNA, 443 bp, Zea mays
  unsure (1)..(443): unsure at all n locations
agctntaatgaactctgtagctttcattcaaatagcttagttctcttcctttttgtagaagcatatttttgctagcaaaaaagatccggcatgtttacgcactcttatgctatttctcttttactcctaatctctatggtatttctgcagccatggactacaatgttgatgaatgcagactataccactcttgttgattctatcgccaccttggagcaaacaggtggtgaaaccgagaccaccttggagcaaacaagcggtgaaattgtggccactttggagcaaacaggtggcgaaactgaagagccagccttcgatcccaagcaccgtctccgcgcaatggcgctgcgcgtcgcggagttcttcttcgagccgagactctcccgtgccgccaaccctcgatggggatgccgtgcccatggcggcgggacgaccgcgttcct

SEQ ID NO: 39011 - DNA, 439 bp, Zea mays
  unsure (1)..(439): unsure at all n locations
agcttggtgccaatggagaaatagaaatcctctaagtcttggctgtcaaactgcttggccgtgtcaactgttagttcggacggtactccaaagcggcaaacaatgttctgccagaaaaatttttgggcagtcttcgatgttattgtagaaacagccctcgcctcgatccatttgctgaagtactcgacagcgacgaaggcgaacttaaggttcccctgagcggtgggcagaggcccgacaatgttcangccccagcgctggagaagccatgtgtgggcgatcagctttgtgtactgtgaggggctgcctgaccgaggggaaaacttctggcacgcttcgcaggaccttgtgacccattttgcggcgcatatcattgcaggccaataaaaaccctggcggatcaccttatcagcgagggcccttggccctgcctgtgaac

SEQ ID NO: 39012 - DNA, 430 bp, Zea mays
  unsure (1)..(430): unsure at all n locations
agctntatgccaccagtggttatgtctttactatnggtggaggtgcagtatcatggaggtcatgccagcagaccatcttgacaaggtcaaccatggaagccgagctagctgcacttgacacagcaaccgttggggcaaaatggttgcgtgaactcttgatggacttgccggtggttgagaaaccaataccagctatccttatgaactgtgacaatcagatagtgattgctaaagtgacaagttctaaggataatgggaagtcatcaatacatgtcaaaatacgattgaagtctgtcagaaagtgagaaacttcggagttataagtgtgacttatatttcaacagataaaaatctggtagatccttttacaaagggactaccacgtaatgtgatagaaatcgcatcaagagagatgggtatgagacccgca

SEQ ID NO: 39013 - DNA, 438 bp, Zea mays
  unsure (1)..(438): unsure at all n locations
agcttcagctccatctatgttatggattgcttttgagtctgtctagcttccttccgcccttctgggtgcttcttgacttccatgaatagcaatgggtccttggtccgaaggtatcttcatgcaaagatatgctggatgaagaattgcttcgaaggcattaagagtaccacgaccaatgattgcattgtaagggtattccatgtcaacaatatcgaatacaacttgttcagtccttgtgttgttgatatatccgaaggttactgngcattgtgattttccgagtgctacaatctgccttcctccgaagccacaaagaggatgtgtggcatcatggatcttgtcttccggctcttgcatctgtctgaaggccttancanatatgatatcagttgcactgcctgtatcaaccaaaacattattgaccacaaattctttgat

SEQ ID NO: 39014 - DNA, 406 bp, Zea mays
agcttaccgcagatgaagcatgatctctttccttggtcttggccctgcttggctggttctttcaacactttaacgccgcctcgaatatcttgatgatgagagccatctcttcattattgtgcactgccgcctcaacttgctccacctcgctaagtagcgactccatgctccttggtgcctttaaagcaaagggatgaggctctgggagaggaccgttcaacgccgccgctacccatattgcgtcccttgattataattcgcccgctcacgaatattccaagtactttctcgggcgtcatcatcctgtacctgcgattctcacgaatattgttcacgagatgaggatccagaacggtgaaggacctgagcatatgcggacgacgctctgatccgtccaacgcgtgct

SEQ ID NO: 39015 - DNA, 337 bp, Zea mays
tgcttaccgcatgagaagcaggatcttgttctcttggtctttggccttgcttgggatgtcacttttcaacctcttaaacaccatcttgcaatctctctgatgactgacaagccatcttcttcattatgtgacgcacggccggctcatcttgcgccaacttgctaagtagcgacttctcgctccttgtagcctttatagcaaagggttgaggctcccggagtggacccatcaatcgcgagccgacaaatcttgtgtccttgaatatcatccgcccgctcagaattttccaagtacttcctcgggcgttatcatcgcgtacctgggattcttacgaata

SEQ ID NO: 39016 - DNA, 428 bp, Zea mays
  unsure (1)..(428): unsure at all n locations
gctttaacccctgcgagaacttcccccgtttctttctaaccatggtaaatgtaatatcatatgtcatattctatgcatgtgtaatctacttgttctcttgtatggtgtactggttgtttcctaatttgaatggatggatgtatgtatgtctgcactcgcatagagaacgatctggttgaagagcccgaagaactcgcaggagaagccccagagcagcagtcggttggtggaggcaagtgtcccttgacctatctttgtcctatacattctttaattcacctcccgcattacacatttatgcctaaggattgactagctttgttatccatatccttgtttacctaattgggttggattattatngcttagtcttatgctatngcttcactctaatcaatgaacatgatgagaatgatccatgatacgtt

SEQ ID NO: 39017 - DNA, 417 bp, Zea mays
  unsure (1)..(417): unsure at all n locations
agcttcataccatctccttttcctgcatagcttgtcaagcatatnttggtacccattgcttgatgggtccattaaggctagtcaacacagatctagaaacccaagtgtcctttttgttatcatttggtaaactcatcacctttctagcacaagttgcaattttgggttgcctagttacatgagaagtaattgacaagctagaggtgggatagttacccatgggacaatccttgcattgatgtcccttctttcgacatatgtagcaaaggcgatcttcaagtcttgaagatttcttctttccttgtttcttggatgctacatggttacgtaataatttcttttcaacactatgcctttttgtttaaatanggcaagacttattaagtgtcctttttgacattataacaagatatcatc

SEQ ID NO: 39018 - DNA, 388 bp, Zea mays
  unsure (1)..(388): unsure at all n locations
agcttggaggcgtctatagggtggctacttggtgtaaactcctccttctnttcttccgtcgccttgaatgcaacaggttgagcttcggatgggtcgccaagctcgttgattttactccagccttctatcatgcactcaaaacttacaaaatgcccgataacttcctcgggggtcattttagtatatctaggattaccacgaatcaattgaacttgagtgggatttataaaaatgagagatcttagaataacatttaccacttcgtggtcgtcccacttcttgctcccgagggtgcgcacttggttcaccaaagacttgagccggttgtacatatgttgtggctactcccctttgtgaagccggaaccgaccgagctccctctcgatcg

SEQ ID NO: 39019 - DNA, 354 bp, Zea mays
gcttggaggcgtctattggttgtcgacttggtgtaaacctcctcttcttttcttccgtcgccttgaatgcaacgggttgagcttccgatgggtcgccaagctcgttgattttcctcgagccttctatcatgcactcaaaacttacaaaatgcccgataacttcctcgggggtcattttagtatatctaggattaccacgaatcaattgaacttgagtgggatttagaaaaatgagagatcttaaaataacatttaccacttcgtggtcgtcccacttcttgctcccgaggttgcgcacttggttcaccaaagtcttgagcccggtgtacatatgttgtggctcctcccctttgt

SEQ ID NO: 39020 - DNA, 262 bp, Zea mays
  unsure (1)..(262): unsure at all n locations
agcttagtttcgtgcttgtgccttanaggtctgcatttcaatttgtaggattttgaactacattgggtgcaccggacgcgcacccaatgggtgtagcctccgaacttcgagtagatttttagaaaataatctgcttcaaagtcttctccaaaaattatttccattagtgctcctgccgtttggatgacagttggccttttaatcttgtcccacgccttagaagtcggcactatcctgccttggaatgataatccatggggtg

SEQ ID NO: 39021 - DNA, 393 bp, Zea mays
  unsure (1)..(393): unsure at all n locations
attatcagtgggtcaactctgtggtcttggacttcaatgcttattcactccaacagaggttattgtaacaaagatggatgatgaatcaatggtattcaaaggatttaggtacaacaacctctacttagtggatttcacttcagaagatgcagacttaagaacttgtctcttcaccaaagcttcacttggatggctctggcatangaggcttgcacatgttgggatgagcacactcaagaaggtattaaagaaagacatggttagaggattaaaagatgtggtgtttgaaaaagataagccatgcagtgcttgtcaagctggaaagcaagttgctaagacacatcctactaaagctttcatgtcaacatcaaggccactggaactacttcatat

SEQ ID NO: 39022 - DNA, 323 bp, Zea mays
  unsure (1)..(323): unsure at all n locations
agcttatcaagttagctntccaatgcaaccattcctacntatttgaagttcctagaagaagttattgtcaaaatactgaaggctgcgcagaagtcaaacagccacacggaaatcagctctgcagatctcccgaagaggctccttcacattagcacgtgaaaatacttttgtttcgtgtttatacctcgctaaggctggttgttactagtataaataccccctatgtctatgatgtaaggcagcttatgataatctaaaacagaacccctttgttcagctgtgtgctaacaaatattgagagtgatctctaccccttttgctct

SEQ ID NO: 39023 - DNA, 434 bp, Zea mays
  unsure (1)..(434): unsure at all n locations
gcttctaaagggagaacacgtgataggttngactaacgttcaattcgaaaaagatagaccttgtgcagcttgtcaagcaggtaaacaagtgggaggagcacatcacagcaagaatgtgatgaccacttcaagacccctggagctgctgcatatggacctcttcggacccgtcgcctatctaagcatagggggaagtaagtatggtttagttattggtgatgacttttcccgcttcacttgggtgttcttcttgcaggataagtctgaaacccaagggaccctcaagcgcttcctcaggagagctcaaaatgagtttgagctcaaggtgaagaagataaggagcgacaacgggtccgagttcaagaaccttcaagtagaggagttccttgaagaggaagggatcaagcacgagttcttcgcttcctacacaccac

SEQ ID NO: 39024 - DNA, 437 bp, Zea mays
  unsure (1)..(437): unsure at all n locations
agcttcgggaaatacagtttcatcagccttgttacataaaagggaaccttttttgcgaagcatggatatttttgcaaagcatggatctttttctttacgaagcatgaaaagaagggaaggtgttttttcgccgaaggctcaaaaacagtatgtatgtaaagtttcatgcatcgcanagaaatgaattacaataatttacattttcgattcaaagttatacacttcaaaaattacaatcttgttacaataaaagtacaatatccagtgtctcatacattgaccatctcaaaatgtttntacaataagtcctattcctctttaaggactttctcttcaacttcgtgcagtaatttgttaacaacttcatcaacaacggattcagccatgtttataatgtccaacgcttccttcatttctggatncgctacgggatcaaa

SEQ ID NO: 39025 - DNA, 438 bp, Zea mays
  unsure (1)..(438): unsure at all n locations
agcttggagagagcagcaccttgtttcttgttccttcttcatatntctcagagcaagtactgagagtgcctggaaatgtcagcatatctggagtcattctgaggtttcagcagtcaaatccagattacagctcaccaaatcgcaaaccattggatagagctcacccatcttctgcaagtaattntaacactgatgtaagaaattgtgaagatctgcatgcactgagaaggctcaatccttcagatatcagcacattccctcanggtccagattatgtctgctcatcangtggaagctataccccagcanatgcagattttattccgccctataagccacagagtgctcctccatatgtcgtccctcaatcaccgcaagaaaggccgccagcggagctccctatgggtattgcacaaggccaacaccagcaactcccaa

SEQ ID NO: 39026 - DNA, 381 bp, Zea mays
  unsure (1)..(381): unsure at all n locations
agcttatctcggaacgccctagctatttcttctctcactatatcaatgacagccggtgcgagaccaccggctctctggtcaaacataagtggggttgactggatattaacatgttgccttccccccattggtttgagttatgtggtgcattactatttgccctatatggttcatacgattgaccgttcctttccggtcttctatgcggngccagaaaatattcgctcccatgggcctgagactccatattaatgggctggtgcattgtatagtttgatgggaagtgttgctangacgggtgagggtttangtagcgatcttcctccatcatccctatgtcggaccgtccggtccgatatgcggaccgtccatgatcatatg

SEQ ID NO: 39027 - DNA, 439 bp, Zea mays
  unsure (1)..(439): unsure at all n locations
agcttatctcggaacgccctagctatttcttttctcactatatcaatgacagccggngcgagaccaccggctctctggtcaaacataggtggggttgactggatattaacatgttgccttccccccattggtttgagttatgtggtgcattactatttgccctatatggttcatacgattgaccgttcctttccggtcttctaggcggngccagaaaatattcgctcccatgggcctgagactccatattaatgggctggtgcattgtatagtttgatgggaagtgttgctatgacgggtgagggtttaggtagcgatcttcctccatcatccctatgtcggaccgtccggtcggatatgcggaccgtccatgatcatatgcggacggtctgtctgggtggtttaaggtttgtgtaacatgtggcggctcggacgcata

SEQ ID NO: 39028 - DNA, 441 bp, Zea mays
  unsure (1)..(441): unsure at all n locations
gcttgtcagaattgttttgaagaactcaagaaaaggttaaccactgcaccaatattggtaatgccagacatccacaagggatttgatgtgtattgcgatgcatcacaccttggacttggatgtgtgctaatgcaagaaggaaaagtgatagcttatgcctcaaggcagttgagaaagcatgagaagaattatcctatgcatgatttggaactagctgtcgtagtgcatgctttgaaaatttggaggcactatatgattggaaacaagagcaaaatcttcacggatcacaaaagcttgaaatacatattcactcagaanaaactcaacctaagatagagaagatggcttgagttgattaaggactatgatttggaaatacaatatcaccccggaaaagcaaatgtagtggctgatgctttgagccgtaagggtcaattgaac

SEQ ID NO: 39029 - DNA, 444 bp, Zea mays
  unsure (1)..(444): unsure at all n locations
agcttctaaagggagaacacgtgataggtttgactaacgtacaattcgaaaaagatagaccttgtgcagcttgtcaagcaggtaaacaggtgggaggagcgcatcacagcaagaatgtgatgaccacttcaagacccctggagctgctgcatatggacctcttcggacccgtcgcctatctgagcatagggggaagtaagtatggtctagttattgttgatgacttttcccgcttcacttgggtgttctttttgcaggataagtctgaaacccaagggaccctcaagcgcttcctaaggagagctcaaaatgagtttgagctcaaggtgaagaagataaggagcgacaacgggtccgagttcaagaatcttcaagtggaggagttccttgaggaggaanggatcaagcacgagttctctgctccctacacaccacagcaaaatg

SEQ ID NO: 39030 - DNA, 391 bp, Zea mays
  unsure (1)..(391): unsure at all n locations
gggatcttaagtcacctgcggcatgcaaccttgccgagagatggctggcgcacactcnacatagaggaatatctttgtcgagtgcacctaaacactcggcaaggcgccatctccgctattatgcgatgtgacagcctattttctctgccgagtacctattgacacatcccaaagtctttgccgagtgcccgataaaaaatactcgacaaagaagtccttgctgatgtactgtttgccgagctctctttgccaagtgtcacactcaggaaatacttctgcgagtgtttttatgctatacccgcacttggcaaagagcccgattctggtagagtgggtactaggtaccttggtgtgccaggacccttccgcgaggcccttgatgtccatgttg

SEQ ID NO: 39031 - DNA, 406 bp, Zea mays
aagctggtgccgatggagaaacattaatccttgaaatcttggatgtcgaactgcttgcccgtgtcaactgttagctcggacggtactccgaagcggcaaacgatgttctgccagaagaatttttgggcagtctttgatgtaattgtggaaacagccctcgcttcaatccatttggtgaagtattcgacggctacgaaggcgaacttaaggttcccctgagcggtgggcaggggcccgacgatgtccaggccccagcgctggagaggccatgtatgggcaatcagctttgtatattgcgaggggttgcctgaccgaggagagaacttctggcaggcttcgcaggaccttgtgacccgatttgcggcgcagatcattgcgggccagtaaaacccttgtcggatcacct

SEQ ID NO: 39032 - DNA, 413 bp, Zea mays
  unsure (1)..(413): unsure at all n locations
agcttgtgaaggttcttcatccccacatgtgctaagcagcgatgccacagccagcccatgctagtcttagcaattaagcatgcatctagaccgacctcctcttttgcaaaatcaactaaatagagtttgtcgtctaatacacccttaaaagctaatgaaccatcacttcttctaaagacagacacatctacatttgtgaatagacaattatatcccatattgcataattgacttacggataacaaattatatccaagcgactctactaagaatacattagaaatagagtgctcggatgaaatagcaatttttcctaaccctttaccttgccttggttccatcaccgaatatgaatgaatcttgngggtccttgntcttgacgtaggaagagaacatcctcttctctcccgtca

SEQ ID NO: 39033 - DNA, 437 bp, Zea mays
  unsure (1)..(437): unsure at all n locations
agctnntgggttcagaacaagctccacacgtcgcttcttccattcagaaaccaacaagcttagtgcatgcatggaccatcggtacgcataccttgttcgggttactgaaggagttctcgtccatgacgttgccagacgtgaggacggtggcggttgatcccagcgcgttgacgctggccccgagtccgctcgtggagaccgtgaggttaacggtgtccgacccgaagttcacgacctgcacagcagaagccacttgagaacgaaacacctttagccgcgcaggctangacggatgcgatgcgacagactctactacttgccttcactctcaggaagctattctctgcatcctgccacgtgatcgcagacgcggccagcgaactcgagtaccgggaactgatattaaccggatgaatcatggcgccgcttgactcgcg

SEQ ID NO: 39034 - DNA, 220 bp, Zea mays
gctgtcttagttgcaccttccaaagtcagaacatgctatgcaataacgcttgaattcacctgtacaaaaaatattgctgaatacgaagctctacttttggggcttccgaagataaaggcaatgggaataagaaaggcggcccttaaaaccgactctcaagatatttctcggccttgttataaaagtcgcaacgcaagaaatcctaagcttgataaatacc

SEQ ID NO: 39035 - DNA, 431 bp, Zea mays
  unsure (1)..(431): unsure at all n locations
agcttgacaacaccatntgacatcttacataatatttctgagatcaagaatatttagttcattcctcaacatgcaaaagcgggtcttatcaagtggcttaatgaaaatatccgctaattgatcttccgacctcactccttctaaaatgatatctcctttagcaacatgatctctaagaaagtgatgacggatatcaatgtgcttggtgcgagagtgttgtacaggattattagcaattttaacagcactctcattgtcacacaacaaaggtaccttttctagaactacgacatagtctagaagagtttgtttcatatataaaatttgtgtgcaacaagcacccgcggcaatgtactctgcttcggcggttgacaaggcaacactattttgctttntggatgtccatgaaactagtgatctaccaagcagat

SEQ ID NO: 39036 - DNA, 435 bp, Zea mays
  unsure (1)..(435): unsure at all n locations
agcttggccactgggccagggattgtctgctgtcacgacgtggccaggccaacgtcgcacatgcggatgcggaggaagaggccctgctcctggcacatgcaagcatcgagccatctccagcggcaccggccgcagcggcactcctccaccttgatgagtcgaaagcacgcgctttcctcggcgacggctccaacaaggacatgatcgaaggatggtgcctcgacaccggcgccactcatcacatgaccggccgacgggagttctttaccgagcttgactctagcgtccgaggctccgtcaagnttggggacgccttcggtgtagagatcaagggcgccggctcantcgtcttcaccgccacgtctggtgagcataggctgctcaccggagtctactacatccncgcgttgagaaactctatcatcagcttgggac

SEQ ID NO: 39037 - DNA, 437 bp, Zea mays
  unsure (1)..(437): unsure at all n locations
agcttcgcanaggtgaacgaaaatatatattttgataatggaattagggttcaaatgagtcaagttgatgtgataaaaatcaaggaggccacggaaaaaaggagatatgggaaggccgacgccgcggagaaagaaaggagcgtaaactactgactcgtgggtatcttcggttgggacggtagtcccgtggcaaactcgccaagaacagagttcccgcggaggaagaaccccgatggagacaagacggaggagcttatcttcggaaataacagacgtatggttacctgcgaagggtaactgactgttggggtcgattgcggggatcactgcagcagacgagttcgcagttttcctcttgggcgccatcttgcttctcgctggcaaacagagtangaggcgagtggcggagaagattcagatgcggaaatgcaagaact

SEQ ID NO: 39038 - DNA, 385 bp, Zea mays
  unsure (1)..(385): unsure at all n locations
gcttcgcaaaggtgaacgaanatagagattttgagaatggaattanggttcaaatgagtcaagttgatgtgataaaaatcaaggaggccacggaaaaaaggagatatggtaatgccgacgccgcggagaaggaaaggagcgtaaactactgactcgtgggtatcttctgttgggacggtagtcccgtggcaaactcgccaagaacagagttcccgcggaggaagaaccccgatggagacaagacggaggagcttatcttcggaaataacagacgtatggttacctgcgaagggtaactgactnngtgggtcgattgcggngatcactgcagcagacgagttcgcagttttcctcttgggcgccatcttgcttctcgctggcaaac

SEQ ID NO: 39039 - DNA, 437 bp, Zea mays
  unsure (1)..(437): unsure at all n locations
agcttacccaactaaacccaactcacatgctttccctgtccatagcgtctccatcatgtcatgtgcacatcctactgtcgctcatgttaaattctcgcacgccctcgcagtcacaggtgacacaggacacgcccacagctttcagctcatcaaaatggctaatgggaacgcacatcaaataaagatgcatagaacatcggtcaagatacagcgacatcgatccctcgaatgttntcaccaaaaccaaacaaagaccacgtgctgtacttgaataaaaaaaacggactcttcagttgcaagcgaattcctgctgtaataatacatacatcctatatacagctntggattcaaccaacgctaaaacatcggtcgatccatcgtcgtcacagctcacaacaacaggtacttaattaacaacaacggnggtgacgcttgac

SEQ ID NO: 39040 - DNA, 435 bp, Zea mays
cagacacatcttctgaaagagacttcatctaaacaagtcaagcgacaataaggaacttcaaagattttcagtggaatatagaagtaaacagtccataaagatgtctgaggtaaacatgttcatgtctttgcatttcataatatgtcagctatcaagttttcaacagaacatggcattacacatctacaaagttacgtggaagccccaaaattcatgaatttgtggacaagttatttatgcaactagattagatgtgcctaaacataaagtgctaaaaaatattaacatgtgcgatatcctcgggaatcatgactttgtcgagacagcagatatactagaaaacataaacccttttgatattagacaaaaatcaagacatgctgcttcctcaaagtgaacgaaagaatctggtagcttaaatcgttgaaatgaact

SEQ ID NO: 39041 - DNA, 377 bp, Zea mays
agcttcggtaaattacaacttcattttcctcatgggcagggacgttgttgtctccaccagccctcacaatagacaagtcccgaaagtaccttcctctcatgttctcaagatgactctgtttgatggtcgattttctgaagattgaatgacttggccgctaaggccgatcctcaaaatcttcatccccactttccacatcatagctatcgctgtcaccagtatctttagataaaccttccagtatctctttagtaattttctctgtgtttgtttttgctattgactcaacaaatccagcaacataaggatctacaaccttcttctcctcaaacagcttcgcctcttcagtcagcctcgtctctgaacaaccttctttt

SEQ ID NO: 39042 - DNA, 431 bp, Zea mays
  unsure (1)..(431): unsure at all n locations
agcttgttagttagttcaccattatgttntggaaagagtttccattnttattttagtttatcattttattaattagttgttcatgtgtacgtgagcttgcactagcttcaagttgcttaattttattagttagctcaacattaaaatttgtaatgtttcatattgttaaagaaaagttttctaaatcttttgtgagattaataactttgattttagcactnttaatttatgttttgcttagtgcaagcttctttaaagaatttgacagcatgggcaagttcttgattatagtgtttctcatcattactatcactactaatattactctcactagaggatgagtatttagcgttatctcatgctaaaagaaattgggagaagaatgttgtcagcatccctcggtacgggtatcttatgcgctatgcataata

SEQ ID NO: 39043 - DNA, 439 bp, Zea mays
  unsure (1)..(439): unsure at all n locations
agcttgtgaacagtacaaattcataatggataaagcagcttcagcagatcagccgaagcctatgctcttatgtgaggacatagcagagcagaaggtgctgttaggctctcaattatccaaagagcaggagaaaaccttgataaggtttttgttcaacaacaaagatgtttttgcatggtcagctaatgatctctgcggagtaaatagggatgttattgaacactcgctcaatgttgatccatccttcagagccagaaagcagaggcttcagaaaatgtcagatgataaggccgaaggtgctcataacgaagtcaaaagactcctcagtgcaggagtcatcagagaagtaaagtacccagaatggctagctaacactgttatggtaaaaaaggccaatggcaagtggcgaatgtgtatcgattntacagacctcaacaag

SEQ ID NO: 39044 - DNA, 447 bp, Zea mays
  unsure (1)..(447): unsure at all n locations
agcttgcctgcagctntgtaattggcaccattatcagtaacaacttgtacaaccttgtctctcccaatctcatcaacttttttctcaagcaaatcagcaagcatgtatgcatcatgtacttcactagatgcatcaacggactctaaaaagtaagtgccctctgggctgttcactaagaagttaatgagatggcgtcccctcctatcagaccatccatcagacatgagtgtgcaaccatagtgtttccatgcacgctcatgttcctccctcattgtagttgttgacttcacagcctcttgtagcaatggctcgcctagttggtacggtgttggaggcttataccctgaaccaaactgtgctgtggcctcaattgcaatctgaaattgcctagctgccgcggcattgaaaggtacaccgcactcatagaagaacaaagcccactgcatg

SEQ ID NO: 39045 - DNA, 446 bp, Zea mays
ctgcagctgacccgggaccctcgtcaccggagtattctattcatgctcaccggagtgcaagaacccgccggcgcacgtggaccgggtaagcccctgcaccgttttccaattccttgcgcgcatggcctctgtgtcaccccgtgaagctcctcgtgccccctaattgagctatatcgccgtggtttggccggagcaggagccgccgacgacccctgccgcctgttctcgtggccagtgtagctccgaccaccttcgacaccgacccgcacatcggcgtgaccgtcgcgacctcccggacgtcactgaccaccccgccggagctctactgccgccggtaagccccaccgccgtaaactatgccgcgggtactgtttaaaccggtcagggagcgcgggttagaatttagttaagtccggggggctttgcgcaatgtcagtgacccaagc

SEQ ID NO: 39046 - DNA, 264 bp, Zea mays
tctcctgtccatgtgtctcctgggaaggccctggacatccccttttatagatacaaggagacagtccagctgtacatgggggtgtagctatgtgctaacgtggctggcggagaagtacttgagccctgtagaagcgtagctggcggtgcgaccctgggtcctgctgacgtttctttggcttcgtagagagctgagaacaatcaacgtcatgcacgcatgtagggaaccatcattacctgttgctggagtaatctagatgtgaca

SEQ ID NO: 39047 - DNA, 417 bp, Zea mays
  unsure (1)..(417): unsure at all n locations
agctgtgaaggttcttcatccncacatgtgctaagcggcgaagccatagccagcccatgctagtcttagcgattaagcatgcatctagaccgacctcctcttttgcaaaatcaactaaataaagtttgccgtctagtacacccttaaatgctagtgaaccatcacttcttctaaagacagacacatctacatttgtaaatagacaattatatcccatattacataattgactgacagatagtaaattatatccaagagactcaactaaaaacacattaaagatagagtgctcattggatattgcaatcttgcctaaacctttcaccttgccttgattcccatcaccgaatatgattgaatcttgggaatccttattcttgacgtaggaggtgaacatcttcttctcccccgtcatat

SEQ ID NO: 39048 - DNA, 417 bp, Zea mays
agcttgtgaaggttcttcatccccacatgtgctaagcggcgatgccatagccagcccatgctagtcttagcgattaagcatgcatctagaccgacctcctcttttgcaaaatcaactaaataaagtttgccgtctagtacacccttaaatgctagtgaaccatcacttcttctaaagacagacacatctacatttgtaaatagacaattatatcccatattacataattgactgacagatagtaaattatatccaagagactcaactaaaaacacattagagatagagtgctcattggatattgcaatcttgcctaaacctttcaccttgccttgattcccatcaccgaatatgattgaatcttgggaatccttattcttgacgtaggaggtgaacatcttcttctcccccgcatat

SEQ ID NO: 39049 - DNA, 382 bp, Zea mays
  unsure (1)..(382): unsure at all n locations
ggcattgaataatcccttctatttcttccctttcaatcaaaatattcttgacataaaaccattcctccatccaggctctgggccaccttttttgaaagggttgaacgggataactcacatcagagtgaggaatgaagccctaacaacccgaaagttgtgtgatattgctctttacgagtggccttccgctctcgtacagtagttcgtgcatgttgcaaaaagaacttcatgctcggctccagcccttggctcctcacggcccaaacaaaaataaccattttgattatagcttanggagtgaattgatgaaggaagatttcanatgtcttcaaaacttcaactaaaaatttgctcaatgggaaccgaagacctgccttcataa

SEQ ID NO: 39050 - DNA, 429 bp, Zea mays
  unsure (1)..(429): unsure at all n locations
agctngcacacatagctcatttgaatacctttgttcatatctcttctatatgctatgactaatgtgtnttcaagtctatttcacaccaagtcataggtatattgaaagggaattggagtcttcggcgaagaaaaaggcttccactccgtaactcatacttcgccaccactccgagcaactctctcttctttgggggagaaatgagcctcaaagaaaaggactctatccttgggggagagagtaaaagctcaaaagcaaaaggaccggacctcgtctttggtataatcttaactcatttacttatgaccaaaggggaggaacttacttcgggggctctaatgattccgtttttggcgattcatgccanaaagggggagaaatgagcccaaagcataaggaccgcaccaccaccaccaaattcaaaaactt

SEQ ID NO: 39051 - DNA, 410 bp, Zea mays
  unsure (1)..(410): unsure at all n locations
agcttgtgaagattcttcatcccaacatggtctagtcggcggngccagagccaacccatgttagtcttagcaattaagcaagtgtcgagttcagctctatcaaaatctaccaagtatagctgaccctctaacactcccttaaatgctattgaatcatcacttcttctaaagacagtgacacctatatcggtaaaaagacagttgtagcccatttgacataattgagatacggaaagcaagttgtaatctaaagaatcaacaagaaaaacattggaaatagagtggtcaggagaatatagcaatttacccaaacctttgaccaaaccttgatttccatccccgaatgtaatcgctctttggggatcttggtttttctcgtatgaggagaacattcgtttctcccctgtcat

SEQ ID NO: 39052 - DNA, 363 bp, Zea mays
ttgctatcagaaaattacagaattgaccagcttattacacacatcatgcggtgataagcggaacaatccttcacaatcatatcctttaccaacaaacgtaccatgtttcgacacaacacatttattagactcaagaacaactttgtgtccatcttgacatagcatagacgcgctaacgagattcttcttgatagagggcacatgctgcacgctcttcaatggcaccgtctttaccgaagtaaacttcataatgactgtaccaacaccaagaacatgagcacgcgacccatttcccatctacaacgcgccagacctcccgacctggtaggaagtgaacatacatgcatcagcacacacatgaat

SEQ ID NO: 39053 - DNA, 403 bp, Zea mays
  unsure (1)..(403): unsure at all n locations
agcttctaaagggagaacacgtgatatgtttgactaacgtacaattcgaaaaagatagaccttgtgcagcttgtcaggcaggtaaacaggtgggaggagcgcatcacagcaagaatgtgatgaccacatcaagaccctcgagctgctacatatggacctcttcggacccgtcgcctatctaagcataggaggaagtaagtatgggttagttattgttgatgagttntcccgcttcacttgggtgttctttttgcaggataagtctgaaacccaagggaccctcaagcgcttcctcaggagagctcaaaatgagtttgagctcaaggtgaagaagataaggagcgacaacgggtccgagttcaagaaccttcaagtggaggagttccttgaggaggaagggatc

SEQ ID NO: 39054 - DNA, 443 bp, Zea mays
  unsure (1)..(443): unsure at all n locations
aagcttctaaaggagaacacgtgataggtttgactaacgtgcaattcgaaaaagatagaccttgtgcagcttgtcgagcaggtaaacaagtgggaggagcgcatcacaccaaaaatgtgatgaccacatcaagacccctggagctgctacatatggacctctttggacccgtcgcctatctaagcataggaggaagtaagtatggtctagttattgttgatgactnttcccgcttcacttgggtgttctttttgcaggataagtctgaaacccaagggaccctcaagcgcttcctaaggagagctcaaaaagagtttgagctcaaggtgaagaagataagaagcgacaacgggtccgaattcaagaatcttcaagtagaggagttccatgaggaggaaggaatcaagcatgagttctccgctccctacacacctcagcaaaat

SEQ ID NO: 39055 - DNA, 446 bp, Zea mays
  unsure (1)..(446): unsure at all n locations
agcttagcaaaagaaatntctagaatcaagaatattttatctcatgcctaagtctggtaaaagattgttcatcaagtggcttggtaaagatatcggctaattgatctttagtattaatgtaagaaatctcgatatcccccttttgttggtgatccctaagaaaatgataccgaatggctatgtgcttagtgcggctatgctcgacgggattgtcggccattttaattgcactctcattatcacatagcaaagggactttggttaatttgtaaccgtagtcccgcagggtttgcctcatccaaagcaattgcgcgcaacaatgtcctgcggcaatgtactcggcttcggcggtggaaagagcgaccgaattttgcttctttgaagcccaagacaccaaggatcttcccaagaactggcaagtccccgatgtgctcttcctattaatt

SEQ ID NO: 39056 - DNA, 446 bp, Zea mays
agcttgcagagtagcttctgccaaagaaggagcgtcttatcatcaaagaagatggaggcggcaaggatgaagctaacctgtgcggtacatgtggagggatgtactcggaaaatggagtattctggatttgctttgacatttgcgacaagtggtaccatggtgactgtgtctgcatcacacctgtggaggcaaagcacatcgatcagtacagttgccccgcttgtagcaacaagaggggcagagagtgagtgagcatgggtcgtcggcgcccctagttgatgtagttagggtagtaagcactaatattaggctacgtttggcgcactgatcgtagtcgttgttactcctgcttagtatgagtactgagtaggctcgcagcagctgctactcttatagtgcactagtggattcttaaacgggcaaactctcctcgcgtgatgtggtcg

SEQ ID NO: 39057 - DNA, 410 bp, Zea mays
  unsure (1)..(410): unsure at all n locations
agcttgggtaatgctttggtccttggcatttctttactcactcatgcttccaaggtcttaagtgctccctctcctccaagttttaaccacatgtgataataagtatatgtgccattaagaagccaacaccttggtaacacctagggtgttacagccctccccccttaaaggaatctcgccccgagattattgggggtgctacgaaggtgtgctggtgtgttacccttttcttttacccaggtttctcttgttaactgctcttcgaatgtcattctctttgcaacttcagaaggaagtcctttntaagttaaaaccacaacttagactatccttgntatctaagtttttcttataattgtattcaaagggcaggtgggggtggnggttttgaggtttacgtaccgactccc

SEQ ID NO: 39058 - DNA, 440 bp, Zea mays
  unsure (1)..(440): unsure at all n locations
agctngcacgtgcagaccgtacgacaccgctgtattcgccggctcccgcttccgggaaacgcccgcctccagcgcggcgggtggcgtggcatgcgccggcggcgggcgcagatactcccttcgcggaacaacacgagcacgcaggtagcgcagctgctggctgcttctgctgaagccgtcaggttgtttccccgtaccgtaccgaaccatcttctaccggctggtttggccgccgtgcggcttcngcacgggacacagtggctacctgataatcaggaccacgctgctccagccaaaaatatccaccgtgacaaaacggcgaccccacgaccacatgtgcttcttcttcttggttcaagtctgcggtgacgatgcgtactgtctttntctcttgtggccgtgccatatcacgacaaggacaacgcagaggtggaggagct

SEQ ID NO: 39059 - DNA, 445 bp, Zea mays
  unsure (1)..(445): unsure at all n locations
agctttatcacacccnttggcacactctgttttcgttcgaatgccagaaggactcanaaacgtcggatcaaccttttctcgcctcaccaagaaggtcctcgaaagtcaagtaagctgcaacattttcacctacgtagacgacattgtcgttgcaagcaaaaacaaagaggatcacctggtcgatctcacagaaacattcgctaacatgtgcgatgcacgactccggctcaaccccgataagtgtgtcttcggagttcgctaggggaagatacttggttgcctggtatcgcaccgagggatcgaggccaacctaactaagatccaagcgatcatcaacatggcacctccgtagtccaccacggatgtccagcgactgacaggcagattggctgccctgaacagattcatctccaaatacgcatagcgtaatctaccttttctcaag

SEQ ID NO: 39060 - DNA, 432 bp, Zea mays
  unsure (1)..(432): unsure at all n locations
agctntatcacaccctttggcacacacttgtttttttcgaatgccagaaggactcaaaaacgtcggatcaaccttttctcgcctcaccaagaaggtcctcgaaagtcaagtatgctgcaacattttcacctacgtagacgacattgtcgttgcaagcaaaaacaaagaggatcacctggtcgatctcacagaaacattcgctaacatgtgcgatgcacgactccggctcaaccccgataagtgtgtcttcggagttcgctaggggaagatacttggttgcctggtatcgcaccgagggatcgaggccaacctaactaagatccaagcgatcatcaacatggcacctccgtagtccaccagggatgtccagcgactgacaggcagattggctgccctgaacagattcnatctcaaatacgcatagcgtagtct

SEQ ID NO: 39061 - DNA, 439 bp, Zea mays
agctttgacaaaacaaaaactctattctactattttcaaaatctctcaagtggtagctgatccatttatcactttggcctttattttctccccctttggcatcaagcaccaaaacgggattaatcttggcctcttaaccccattgcctcaccaaagtcttcaattaagagcaaatggcaataagatttcatgagatgaacttggaattagttaccctctcatcggagtgcagtggaagtctttcatggtccaagtccaccttttccctttcaatcctccttcgagactaaattatcaaactcaagcacatggttagtctcaaagggtcaagttgtaacacatctccccctaaacatgtgcatcactctgcaacggacttgtgaggtccagggagtggttgtacaacttgagcaccataataagcaacaaaatgcaaaaa

SEQ ID NO: 39062 - DNA, 471 bp, Zea mays
  unsure (1)..(471): unsure at all n locations
tctcccggatccttaagtcacctgcggcatgcaagcttgacattgtctccctgttggaagcctatgtcattcttaatgccagggcgtctcccattataaagcatgctacgagcaaaattaaacttttcattctctatctcatgctcattaantttagcagttagttgagctatgtgatcattttgttctttaattaaagctaggtgatcatgaatagcatcaacattaatatatctacatctagcataaatagaaacatgatcaacactagatgtagaaggtttgcaagattttaattcatcaatcttagcatgcaaaatggtgttctcatttctaagattggaaatagagatattgcacacatttaaatctttagccttagaaattaattggtcattttcaattttaaggctagaaagtgattcattcaatttatcaatcatagcaattaaactagcattatcattttta

SEQ ID NO: 39063 - DNA, 201 bp, Zea mays
agctttgcgtcagctggactcgtatcccactggcctacaagcaaggcgactggcaagatggcgacagtatgctgcacactatagggacttaggctagcacggcgagtctctgtcctctacatcgctgtgactcattctgagcctaataaccccggatgctactccacatatgcaatggttaacagctacatatattgtgtg

SEQ ID NO: 39064 - DNA, 433 bp, Zea mays
  unsure (1)..(433): unsure at all n locations
agcttcacatctctggactaacttggcggcatcactctttgctggtggccaatagaaaccagacttaaaaactttcccaaccagagttctggatgctgcatgtattccacattgtccagcgtcgatttcatccaatagctgcttcccagtagttgaggaaatgcacttcatgaggactcctgtcgcaccccttctatacagtgcgccccctatgagggtgtagtgggccgactgtctcgcgatgcgttctgctacagccttatcatctggttcttcttcattctttatgtacctgatgataggctctcttcagtcattanggtccaattctggttggctcaaggtgttgcattcttctccctgatctgatggaatacttgggtgtgatacttcttggacgaaaactccgggtgggacctangcccgactggat

SEQ ID NO: 39065 - DNA, 415 bp, Zea mays
  unsure (1)..(415): unsure at all n locations
agcttgaagaactgaagtcaaacatggtggtattatggaaggaagctatctcagcaatgtcagcggttgagactcagcagcaacggttgaccttacaacgtctcattgcattggtaatcttcaatggcaccttgacaacatttttcttatccttcaggttcctgtatttcatgtttactaatcattcttattgtgggtttaaggttgaggctgagaggttaccatcagagagttctggagatacttgaccagttggaagaagtatgtatgctaccagctttatcatttgagcatatttatatattangctgctctgttggaacggtttttactgcaatctgaacttctgaagcatacagaatcttgtgtatatccatttgacgatatgttataattgatagatggtgtctgaccg

SEQ ID NO: 39066 - DNA, 427 bp, Zea mays
agcttataaggacgagcgcggtgcgcggatgtcgttctcctgccatcatcggctgccaagtgaagtcaacgttgtatttcccagcggcgtcaacgcgcgacggaaaacaggatggcttgacttgtaatgtggcgggaaatatgcgagatgggggaggacgggacgggacgggaccgtccggtacggtacggacggtgcgatgcggacatgcgacgcagccgtgagacgccgcggtaatgcagatactgacagccgtgccgacatgagcgttcgcggccccgacgtgaacgggtaccggaaaggcgccgaaatttcctgccaaacactccggcgtgccgcagcgccggccacggataagggatgagaggctctaccgtttcgctgcggctgcaaaagttcacgtctggtcagttgagttcgtctctgc

SEQ ID NO: 39067 - DNA, 437 bp, Zea mays
agcttgaaaatagtgccgaagcttcctggatgtcttcttacagcatacagtaccttctccaactctgtataatttttctttgataaactaagaacctcggatacaaaatatattggggcctgcctcttaacttggccttcaagcttctcctgaacaagtgctgcacttaccgctgagtgcgaagctgccatatataataacaaaggagcccctggcgtaggtggagttagtgttgttagatctatcaaatactgtttcagctcttcaaaggccttctgctggtttggtccccattgaaagacttcggccgacttcagcacttcgaagaatggtaagtttctctctgctgatctggatatgaatctattgagagatgccagcctttctgtcaatctttgagcccccttttttgtacttggtggctccattcgaagtat

SEQ ID NO: 39068 - DNA, 429 bp, Zea mays
  unsure (1)..(429): unsure at all n locations
agcttagcctttatttggggagcctcaaattcttaatacaggatataatagcaaatggcaacccactgtaatttttacagaatttttggaaattattacaccactgtcgtagttcaaacctcactagaaaccctaagtagaaataaaaaaagggaaaaggaaaatggtaattaatgtcatcctaaaacccttgtaatttgtccactggaatatataaagacaatacanatccactatgttatccncaatgaaaacctaagcctaaagagtaataagcctaacccactagaaggcccgcatgactaagaaaccctaagttacttcttggcttagttttctttttaagcataatgtattaaatcctgcataatcataacatacatgattcattgcattcgatagactgtaatcttgctgacggagagtaca

SEQ ID NO: 39069 - DNA, 441 bp, Zea mays
  unsure (1)..(441): unsure at all n locations
cagcttgngtagtctacttcatcatcactagactcattatcacttgaggaagcatacgtaatagtacttcgagtacttaccttcttctcctttgccatgaggcaggtgtgacgctcgttggggaagagagacgatttgttgaaggccgtggcggcgagtcctttgtcgtcggagtcaaatgaagaacaatccgagtcccattcttttccaaggtgtgcctcgcccttagccttcttgtaaaccttcttgttctctctcttcccattcttttcttgttctggtcactatcattatcgggacagttagcaataaagtgaccaatcttaccacacttgaagcaggagcgctttcccttcgtcttgcttttgttgggatgctccttgcgacctttgagcgccatcttgaagcgcttgatgatganggccatttcatcctcattta

SEQ ID NO: 39070 - DNA, 428 bp, Zea mays
  unsure (1)..(428): unsure at all n locations
agctntctcaagcttgagccgaggaccagccccatttgaacagtgcgatcacgctcgccggaattcgtaaccccgccggagcacgtggaccgagtaacccactgaaccatttctcgattccttgcgcgcatagcctctacatcacccagaggagctcctcgtgcactttgattgaaccctatcgccgtggtttggtcggagcaggtgccgccgccgacctctgtcgcctgcgctcgtggccagagcagcttcagccacctccgacgccgacccgcacaccgacgtgacctccccgacgtcaccgagcaccccaccggagctctactgccgtcggtgagcctcgccgctgtgatcttttgccccgttactgttccagccagccaaggatcgcgggttagatatatgataagttcaggggggttatgcgt

SEQ ID NO: 39071 - DNA, 403 bp, Zea mays
cgggatcttaagtcacctgctgcatgaagcttctaaaggagaacacgtgatattggttttcttacgtgcaattcgaaaaagatagaccttatgcagcttgtcaagcaggtaaacaagtgggaggagcacatcacagcaagaatgtgatgaccacttcaagacccctggagctgctgcatatggacctcttcggacccgtcgcctatctgagcataggagggagtaagtatggtctagttattgttgatgacttttcccgcttcacttgggtgttctttttgcaggataagtctgaaacccaagggaccctcaagcgcttcctcaggagagctcaaaatgagtttgagctcaaggtgaagaagataaagagcgacaacgggtccgagtcaagaaccttcagtgg

SEQ ID NO: 39072 - DNA, 439 bp, Zea mays
tgcaagcttctaaagggagaacacgtgatatggttgtctaacgtgcaattcgaaaaagatagaccttatgcagcttgtcaagcaggtaaacaagtgggaggagcacatcacagcaagaatgtgatgaccacttcaagacccctggagctgctgcatatggacctcttcggacccgtcgcctatctgagcataggagggagtaagtatggtctagttattgttgatgacttttcccgcttcacttgggtgttctttttgcaggataagtctgaaacccaagggaccctcaagcgcttcctcaggagagctcaaaatgagtttgagctcaaggtgaagaagataaggagcgacaacgggtccgagttcaagaaccttcaagtggaggagtttcttgaggaggaagggatcaagcatgagttctccgctctctacacaccac

SEQ ID NO: 39073 - DNA, 440 bp, Zea mays
  unsure (1)..(440): unsure at all n locations
agctntccatgttgtgcttgaacattccaattcgagcccgcatctgaccgtggtgaccgtcacaagttggtgttcttctgcagtccgaatccagcatgttcaaatccttttccctttcggtcttctccctgattcctaagcaaaacaagagtgcacgggtctccatggtctaaatatgatggacatgaactcaagagtgtaatcacctgatggttgagttgacgagcacgagcgcgagtaatgggaccagaaattggtacttgtattggtatagatgcatcagtagtgtggatgtcttcatcagtgacgtgcggcaacgaaattgtgcgaaaccacccccaaacatgagttttggacctaaagtagtggattgtgcatgttcgttgcgaaaaacaaaaaaatggttccggtggcgaaaactcatgctttgtatgcacccc

SEQ ID NO: 39074 - DNA, 437 bp, Zea mays
  unsure (1)..(437): unsure at all n locations
agcttgtgaagattcttcattccaacatggttctattctgcgatgccagagccaacccatattagtcttagcaatcaaacaagtgttgagttcagctgtgttttcattaaaatcaattaaatatagctgaccctctaacactcccttaaatgctattgaatcgtcacttcttctaaagacagtaacacctatatctgtaaaaagacagttgtagcccattttacataattgagaaacagaaagcaaattgtaatctatagaatctaaaagaaaaacattggaaatagaatggtcaggtgatatagcaattntaccaagtcctttgaccaaaccttgatttccatccccgaatgtgatagctcgttggggatcttcatctttctcataggaggagaacattcttttctccncagtcatgtgaattgtgcacccgctat

SEQ ID NO: 39075 - DNA, 428 bp, Zea mays
agcttaaaggatactattcaactaaagtaagatgaagttgataagaggccaaggtatgaaaacttcctctccttcagttgttttagtattttatccttagtggaatgtaccatagtataggttaaattactcgcaatataaaatgttcaatagtgcatataactttgacatcaactatatgtgtgcactaatttaaagaaatttagtctatccttttgggtttcaataatgatgattcatttgccatccatatatcaggatcatcatttgtgaaaccctcccttgtgtttctaatgctctcttttctaagtgtttcaataaggtccttccaagtgctttcaagatggattcaaaatctacggatataagagtcttggttgtttcaattttgagtttcaattgatctcatatcaagtatgatcgaatca

SEQ ID NO: 39076 - DNA, 440 bp, Zea mays
  unsure (1)..(440): unsure at all n locations
agcttgagtntatttattacagaccagactaatagtgagtgcagagtagtattatacaaaccaagggaggcacaaactcctcccgataagtttaataaacaaaagatcctaagtggaggaccgagtcctcccgcacttcagtcttgtttttcctcgtttggtaccaccttggagcaaaagcaacaaaagtttgtcgcttcctcacctaaaaacaacaaagggataaaccctgagtatggaatactcagcaagtcttacccgactaaggaaaagactctcaagggtatgctggataaataggagtcaaggagaggctttagcaaaatcaacttatacttttgcagaagtagcttactaaagtgagtccttactttcaatcttttaacgccatattaagtattaatagactccatttgcatctagtctagtttcacatcaca

SEQ ID NO: 39077 - DNA, 376 bp, Zea mays
agcttgtcatgcacaattgtaattatgagcttagtctctcttttccacatttaaagtattccgttgtcttaggcattttctttggtttgttttattgtttatatttcttctctttaaatgtttgagagccaataccattcccatccaatttcatgaaaatgttaatgattaattcactttggaggtattgcactttggtgaattagctcttgatttctaccacttctaattcttttctaagtttctcatttgtttcttggtttgatcaatctcatttagtgcctttgcttttagtttctttctctagtctttcaaccaaatcatcgcatgatgttgctatatcaatattaacaatttggttagcaacatcatgtgt

SEQ ID NO: 39078 - DNA, 447 bp, Zea mays
  unsure (1)..(447): unsure at all n locations
agcttatgaagattcttcatcccaacatgggctagtctgcggtgccagagccaacccaagttagtcttaacaattaagcatgtgtcaagttcagctctatcaaaatctactaagtatagctgaccctctaacacacccttaaatgctattgaatcatcacttcttctaaagacagtgacacctacatcagtaaaaagacagttgtagcccatttgacataattgggaaacagaaagcaagttgtaatctaaagaatcaacaagaaaaacattggaaatagaatggtcaggagatatagcaattntaccaagtcctttgaccaaaccttgatttccatccccgaatgtgatagctcgttggggatctttggttttctcatatgaagaagaacatcctttctccccggtcatgtggttcgtgcacccgctatcgagtaccaacttgagc

SEQ ID NO: 39079 - DNA, 447 bp, Zea mays
  unsure (1)..(447): unsure at all n locations
agcttgtgattntaccaattgaaagagcacaatctctacttatgaatttcatgaaatagcttanaagagattgtattagtaacacaagcaatagtttcctatttagcaacctctagtatatgaatgacaagaaggttactaaaacaaggaaacctcatgatatgaactaaattacccttacaagcatcatgcataacatcaattgtaaaaaagataaaagtagcatgattatttaattaagtttacatggcaagtttaattcatagcatggtgagtgattaatatagaagactcaaaaccaatttaaacaagaatgaatacatcacatagtattggttcgatcttcttggaatgtttaatgacacactccagttgggaaacacattctcatgttgtgaaactacataaacacttagataaaaacattagtctcacaactctagtcat

SEQ ID NO: 39080 - DNA, 443 bp, Zea mays
agctgacgcctttcgccttgagacatcggaatgtcacttcaaggtcgaaaaggaggtcggaggcttttctcgtcttgactacgatgtcatcgacgtaggcctcgaccgtgcggccaatgtgttcgccgaacacatggttcatgcaccgctggtacgtcgcacccgcattcctcaaaccgaacgacatggtgacatagcagtacatgccgaagggtgtgatgaaagaagtcgcgagctggtcggactctttcatcctgatttgatgataccctgagtaggcatcgaggaaagacagggtttcgcacccagcagtggaatccacgatttgatcgatgcgaggcagagggtagggaaccttcgggcatgctttgttcagaccagtgtagtctacacacatccgccatttctcccctttctttctcacaagcacagggttggcaagc

SEQ ID NO: 39081 - DNA, 445 bp, Zea mays
agcttctatagggagagcacaatttaggactttcttatgttcatgttgagaaagacagggtttttagcgcatgtcaagcaggaaagcaagttggcacccatcatccacacaaaaacataatgacaacggacaggccactggagttactccacatagatctattcggccagatagcttacataagcatcggcgggagtaagtattgtctagtaattgtggatgactattctcacttcacttgggtgttctttttgcaggaaaaatcacaaacccaagagactttaaagggattcttgagaagggctcaaaatgagttcggattgagaatcaagaagataagaagcgataatgggacggagttcaagaaccctcaaatcgaaggctgtcttgaggatgagggaatcaaacatgagttctcttctccctacacacctcagaaaatggg

SEQ ID NO: 39082 - DNA, 381 bp, Zea mays
  unsure (1)..(381): unsure at all n locations
agcttggaccaggtcgtcccagttggagatctgtcctggaggcaggtgctccaaccaagcgcgagcggtgtcngagaggaacagggggaggttgcggatgatgaggttgtcatcgtccgttccacccagttggcaggccagacggtagtccgtgagccacagttccggtctcgtctcccccgagtactttgtgatagtagtcggggtcggaaccgggtcgggaacggcgcccgtcggatggcccggctgaaggcctgcggaccgggaggttcgggcgagggactccgatcctccccgctgtcgtagcgtcccccacgcctgtggtggtagcctcggcgcaccctctcngtgaggtgggcccgacggtcgcggtgatggtgc

SEQ ID NO: 39083 - DNA, 383 bp, Zea mays
  unsure (1)..(383): unsure at all n locations
gcttcttcaaagctgggcttcagttcctcttttctatnttgnggctgaagttttaaaagtatatcaggtttaccttcatcaaattactcccgaagcaatcataagaatgggaatcttcgtctgggccgtgaggagctatggcttggagccaaatgcaaaaggtttctgcagtatgcatgaactattatatgagacgaaaccttgtggcaaagagcaataccataacaattttggctgctatagcttcgttgctcgctctgggtcaagttgccccgtgccgacttttctgaagagatggcccgaagattggatgaaggaatggttctatgtgaaaaatgacttaaaagcacgagaggatattaangagatcatcatgcgcccta

SEQ ID NO: 39084 - DNA, 354 bp, Zea mays
aatttgcgggtgaagctttaaaagtatatcacgcttaccttcatcaaattactcccgaagcaatcataagaatgggaatcttcgtctgggccgtgaggagctagggcttggagccaaatgcaaaaggtttctgcagtatgcatgaactattatatgagacgaaaccttggggcaaagagcaataccataacaattttggctgctatagcttcgatgctcgctctgggtcaagttgccccgtgccgacttttcggaagagatggcccgaagattggatgaaggaatggttctatgtgaaaaatgacttaaaagcacgagaggatattaaggagatcatcatgcgccctatctgac

SEQ ID NO: 39085 - DNA, 428 bp, Zea mays
  unsure (1)..(428): unsure at all n locations
agcttgtgaaggttcttcatccccacatgtgctaaacggtgatgccacagccagcccatgcaagtcttagcaattaagcatgcatctagaccggcctccgcttttgcaaaatcaactaaataaagtttgccgtctagtacacccttaaaagctagtgaaccatcacaccttctaaagacagacacatctacatttgtgaataaacaattatatcccatattgcataattgactaacggataagaaattatatccaagcgactcaactaaaaacacattaaaaatagagtgctcggatgaaatagcaatcttccctaaccctttcaccttgccttggttcccatcaccgaatatgattgaatattgnggatccttgttcttgacataggaagagaacatcctcttttcccccgtcatgtggtttgtgca

SEQ ID NO: 39086 - DNA, 438 bp, Zea mays
  unsure (1)..(438): unsure at all n locations
agctntatcaaatggacgtgaaaagtgccttcctcaatggacctatcaaggaagaagtctatgttgagcaacctcccggctttgaagacagtgagtatcctaaccatgtctataagctctctaaggcgctttatgggctcaagcaagccccaagagcatggtatgaatgccttagagattttctcattgcaaatggattcaaagtcggtaaagccgatcctacactctntactaaaactcttgaaaatgacttgtttgtatgccaaatttatgttgatgatattatatttgggtctactaacgagtctacttgtgaagagtttagtaggattatgacacagaaattcgagatgtctatgatgggggagttgaagtatttcttatgattccaagtaaagcaactccaagagggcaccttcattagccaaacgaaataca

SEQ ID NO: 39087 - DNA, 432 bp, Zea mays
agcttgtgaaggttcttcattctttacatgtgctaagcggcgatgccacagccagcccatgctagtcttagcaattaagcatgcatctagaccggcctcctcttttgcaaaatcaactaagtaaagtttgccgtctaatacacccttaaaagctagtgaaccatcacttcttctaaagacagacacatctacatttgtgaatagacaattatatcccatattgcataattgacttacagataacaaattatatccaagagattcaattaaaacacattagatatagagtgctcggatgaaatagcaattttacctaacccttttaccttgccttgattcccatcaccgaatattattgaatcttgggaaatccttgttttgacgtaggaggtgaacatcttcttctcccccgtcatatgatttgtgcatccg

SEQ ID NO: 39088 - DNA, 375 bp, Zea mays
ctgcagcttctaagggagagcacatcttgggactaaccaatgttcactttgagaaagacaagatttgtagcgtatgccaagtagggaagcaagttggtgttcatcatccacacaagaacatcatgacgactgataggccactggagctactccacatggatttattcggcccgatagcttacataagcatcggcgggagtaagtactatctagtcattgtggatgattattctcgcttcacttgggtattctttttacaggaaaaatgtcaaacccaagaaactttgaaaggattcttgagacgggctcaaaatgagttcggcttgaggataaaaaagataagaagcgacaatggaacggagttcaagaattctc

SEQ ID NO: 39089 - DNA, 436 bp, Zea mays
  unsure (1)..(436): unsure at all n locations
tgtcaagtatattntggtacccatcgcttgatggagtcatctatgttattcaacaaagatctatgaacccaaaagtcctctgtgttaacgcttggttaactcattacctttgtagcacaaattgcaattttgggttgcctagttacatgtgaaataattgacaagctataagtgggggtattaccaatgggacaatgcttgcattgatgtcccttctttctgcatatgtaacataagcgatcctcaagtcttgaagataacttctttccttggttctttcttgctacatgggtagtgaatattttcatttctaacactatgcctttttgtttagatggggacaagacctaaacaagtggtccttcttggagcatttaaaacaaagattatcatccctcgtaataatcaagtcatttctaatatagggacatgacct

SEQ ID NO: 39090 - DNA, 419 bp, Zea mays
  unsure (1)..(419): unsure at all n locations
tactcaagctnaaccatagtcatctaacgagtcggctagctagagaaacgatatatttcgttgtacattacacgcgtcgactagtctattattatcgatatccgtaacacatcatgtatatgacaatcacttaagcgagatcgactcctacttaacatgagatggttaatcgcagttatggacttagcgaaccattatatacatcacaacttcaaaacatgggttggagcagattaatcagcttttcctaatcattgctcaactcaaagctgttactacgcacggcacttacaaaggcacatatttgggatccaacatagagacagttactcattggattgaactatataagacttacactgggtactgaaggagctacagcacttatgtgtatatcttagcggactgttcttcaattt

SEQ ID NO: 39091 - DNA, 280 bp, Zea mays
ccatgaataacgatgggtccttgactcaatgtatctttagcactgaatgtcagatgaataatcgcttcaaaagcattgagtgtgcctcgaccatcaattgcatcgtaagggtattccatgttatctaatcctaacacaacctgctcaatcaacgtcgttgctgaaccctcatgttatctgtcttggagatctttgccagcgccacaatctgtctttcttcgatgcctccgggaggatgctggacatcatgaaatctactcttcggctcttgctatcgtct

SEQ ID NO: 39092 - DNA, 458 bp, Zea mays
tcagcgatgggtataaaatttggcagcagaacagtgcgattatctatgtatgctgcgagaacttcacacctactcgtctatttatatagaactgcaagcaagaaggcgaaccgccaggatttttacaccacgcggacgcccgcttgcactcgctgtgcgagggaccgcagagaccaaacagttactcttgaaggcgggaccgctacgcgctgggaaatagattcgttcttgaaactagctcagggaaagagatttttggaccttcggctccctgaagcttaagagacttatttcacggatcaagcttgttacgaataacgatctattaccgcgaaaggggctactgctgtgactatcctcatccccaagacttaaagaagaacggcttcggttgaactgttgataaatggcgaagttctcttcagaatttcggatacaaccgattagaaagaatgacc

SEQ ID NO: 39093 - DNA, 383 bp, Zea mays
  unsure (1)..(383): unsure at all n locations
cctataaaactcagcttgacatgaggagatggcgctcgtcatcaagagcttncgttcatatnctcanacaaagagagggggaaagactactaagttccgctccaagatagtttgctacaaatgtggtaagcccggacattttattgctaaatgtcctatatcaagtgacagtgaccgaggcgacgacaagaaggggagaagaaaggagaaaaagaagtactacaagaagaaaggcggcgatgcccatgtttgtctggagtgggattccgacgaaagctcaagcgactcctccgacgacgaggacgccgccaacatcgccgtcaccaagggacttctttttcccaacgtcggccacaagtgcctcatggcaaaggacggcaaac

SEQ ID NO: 39094 - DNA, 421 bp, Zea mays
  unsure (1)..(421): unsure at all n locations
cgaagtgcgcgatctactgtgagtgcacttgagaaataatatatnttcacagttaagaaagtctatattgatgccacgtggtgctggtccatataagattgtgtagaaaataaatgataatgcatattacactcgaggttgcttcccgagttccgggttagtcctacatttaacattgcagatttgaaaccgcatttgggggaagaagatgagcttgagtcgaggacgactccacttcaagaggtggaggatgatgaggacatcatttctatacatacaataaatggaccgataacacgatcgcgtgcacgacagctaattctccaggtacattctacactagtcaattgtggttcacagcttacgcttggggccatcgacgttctaatgattacgaaccttggagaggaccacctaggac

SEQ ID NO: 39095 - DNA, 463 bp, Zea mays
  unsure (1)..(463): unsure at all n locations
ctatataaaactcaagctttaactctcngcgagaccatctgcacagtcccgttctaatcatagttatctcatttataggggggattctatgcatgtttaatctacctggtctcttgcatggggaactggcggtttcctaatttcaatggacggatgtatgtatttttgcacccgcttatagaacgatccgcgcgataagcccgaagaactctcaggagaaacccctgaacaaccatcggctggtggaggcaagtgacccttgacctatctctgtcctattcattctttaattcacccccccgcattacacatttatacctaaggatagactaccttgtgttatccatgtccttgattacctatctgggttggattattagtattattcgctaacttcatgctattggttaactctaattaatgaacatgatgagattatctatgatacgctgctttcccttct

SEQ ID NO: 39096 - DNA, 362 bp, Zea mays
actggaataatgccattctcctttccattggccttcttcaccataacaagattagctagccactctgggtatttgacctctctgataactccaacgctaagaaacctccttacttcggtctgagcaccttcagctttgtcatcagacattttccaaagcctttgttttcttggcctaaaagatggatccacactgagtgaatgctcaatgacaactctgttggcaccacaaagatcattggctaaccaagcaaagatatctttattggtgaataaaaattttatcaaaatcttttcctgttcttcagataactgagaccccaacaataccttttgttctgctatatcttcacatataagcat

SEQ ID NO: 39097 - DNA, 422 bp, Zea mays
  unsure (1)..(422): unsure at all n locations
tgctgtctcctaatacaggagaaacataatggaacgaatttcttaacaacaaggatggaattctttctgtggccattgcataaggttcttagtaaattcagtttgatacggtaaatgtggaaaaactactctcaccgcaaaatctgggttgtagtagtcttccttgtgaaatgtctgaagagttcgaaatagagtgtgctttggtgtatcatatcggcctccacatagatcaagtcctcccacaaaagcaacaatcttccttctatgattcccagcatcagcatccaagatcactgtcttctggtgatgagtaaagatagtgcctgtttcctggaaacgatggntattaccatcagtgcagattccagatggcagtgtgcttatgtggttgtcagatatcacaatagcttaagctgaagtat

SEQ ID NO: 39098 - DNA, 334 bp, Zea mays
  unsure (1)..(334): unsure at all n locations
tatacaacatacagcacaattgcatcctcctgcctaagagatgtgcgaaactctttagtgtctctagcgctagtgctcttgttggagggctcanaatccctggcatctatgtgacatcctcagattttgacctttcagacttatctttggcaaccttcatttccattaactcaaccgatagtgccttccgccatatggctggctctacagtcctttgcacgggaggaacaatttctcttgaatcagtagccgaagaagcctccgcgtcaaactcatgcaccacagacgggtcaatgttaccccgccggtgggaaggaccttcattgttttgccg

SEQ ID NO: 39099 - DNA, 278 bp, Zea mays
acaacatcccgttaagacatgagatccaacctgatataactctcaaggcttatggctaagcagcccaaaacgagaagaagctcgaacttcaatacaatggatcaatcaaaagccgactcacttacaaactctgaaagatgttcgaccaattagtaagaataattgggcacaacagctcatggaaattatagacatgccacaagcagagcatatgggagtgagattctagatcagaagcactcaaaggacctctagccacagaactcaaatttaacagt

SEQ ID NO: 39100 - DNA, 376 bp, Zea mays
tatgttgatgatgtggtgattaaaacagaacactcagaatactttattgaggatatgcagctgtgcttcaacagcctgaggcgataccgcgggaagctcaatccacaaaaatgtgtctttggagtaccaccaaggaagttgctcggattcattgtcagccaccgaggaattgaagctaacccggaaaaaatcgaggctgtcatgagaatggaagcaccacgatcacagaagaaagtgctaaggcttactggatgcatggcagccttgagcaggttcatatcaaggctaggagaaaaaggcctaccattatacaaattgctcaagaaggtacacaagttccagtggaccacagaagcacaggatgctctcaatgcac

SEQ ID NO: 39101 - DNA, 186 bp, Zea mays
gagctacctcccggctctgaagacagtgaggatccttaccatgtttattagcctttctaaagcgctctatggggtcaaacaagccccaagagcatggtatgaatgccttaaagatttcctattggtaaagggctcaaaacggaagggcgatctacttaattactaaaactttgaaaaaaatcggtt

SEQ ID NO: 39102 - DNA, 433 bp, Zea mays
cgacattttgctttcctgctggaaactaatgccattcttattgtcagggcgtctcccactatagagcatgcttctagcgaaattaaaatattcattctcaatttcatgctcattaatttgtgcagttaattgagctatattatcattttgttgtttaattaaagcaaggtgatcatgaatagcatcaacattaacatctctatatctagtacaaatagcaacatgttcaacattatatgtagagggtttgcaagcatttaattcatctatcttagcatgtaatattgcattctcatctctaagacaggaaatggaatcattgcacacatttaaatctttatccttggaaactaagctagcattctcagtcctaaggctagaaaaagattcattcaatttatcattcttagcatttaactatcatttcatttta

SEQ ID NO: 39103 - DNA, 174 bp, Zea mays
cttcagaatatctttgaccatgctaagatctaccgcaattactttatcctgtaacacatgctccataaattgtatgtcccccagccaaaacgcgcacttgctgaacttggcatacaaatgaggttccctgaagcgcgtcagtacaataccgaaatgctgagcatgggcctcttc

SEQ ID NO: 39104 - DNA, 487 bp, Zea mays
  unsure (1)..(487): unsure at all n locations
tttaggttttctcaacttgggttaagtattacccctttaattactatttattggttaagcctttaaccagggttctatttgcagaacattaagacaatacaacttgttngaaatttttacctattgaatgcactctaggtgtatcaaacatatgcaatgccaatgctcatgatgccatgctcatgttttagttatagtaacaccaggggtgttatagccatggtgcgaattgcggccgaaagaacgtcatacttatctacatcatcaagatcaacttgctctcttggagagccattagtttcatcaaatacaacatcgatagagactccaaccaaacccgatgaattggtgaagactctatacgcctttgtatttgagtcataacctcagcaaaaacccttctacagctttgggaagcaaatttggaattctacctttcttactaaaatgtacatctactcccaatacacgcaaatataaacggtgg

SEQ ID NO: 39105 - DNA, 427 bp, Zea mays
  unsure (1)..(427): unsure at all n locations
cactatgccgacgaccaaccctgtcctcgcctctgccaatggtttgatcttccattgntctgctgtagagctctttcgcttagcatcttatcgaagtaggactagagtgctgggtgtctacctcactcctgtcagtgtaagatcgcctctgttaacaccattgccgtcgggcaatggcgaggggtagaagatgaacctggggccattggatccgagactaacgacctggatcagatcatgctctcattaaatcttgatcgttgtgatcataatggacgactgatattccaagtataggtaccgcttctatggttaaattctggtcgtcaatcaatccatggacgacgtacattatttcaaacatacccctttggccctgataaaccacggtccgtgggatcggatccgatggctcacagtatatcat

SEQ ID NO: 39106 - DNA, 331 bp, Zea mays
acgggatcatccctgagaagcgcgttcagcccctcgggcgactcgacctcccagtctgcctcgggacaccctccaacttccgaagggagacccttgacgttcgaagtggtcgggtttcgaggaacctaccacgccgtgctagggagggcatgctacgcgaagttcatggtcgcccccaactacacctacctgaagctcaagatgccgggccccaacggggtcatcaccgtcgggcccacgtacaaacacgcggtcgaatgcgacgtggagtgcgtggagtacgccgaggccctcgccgaatccgaggccctcgtcgtcgacctggagaacc

SEQ ID NO: 39107 - DNA, 427 bp, Zea mays
tggacctatctaggaagaggtctatgttgagcaacctcccggctttgaagatagtgagtaccctaaccatgtgtataaactctctaaggcgctttatgggctcaagcaagccccaagagcatggtatgaatgccttagtgaatttcttattactaatggattcaaagtcagaaaagccgatcctactctattcactaaaactcttgaaaatgacttgtttgtatgccaaatatatgtcgatgatattatatttgggtctatgtaacacccgggtttaaaggacaagccgggtgcatctcatacatgcgccaagaagacaacatatattataacagagtgtatagagataaatgtcataaaacatcagagtagttattacatagcggaagacttattacataattaaagtataaacatgaaacgaact

SEQ ID NO: 39108 - DNA, 384 bp, Zea mays
tatgaagattcttcattcaactgggctaggcggtggtgtctaaccaacccaaggtagtcctagctattaagcaagtggcgagttcagttctatcaatatccaccaagaatagctgaccctctaacactcccttagaagctattgaatcatcactttgtctaaagacaaggacacctacatcagtaaatagacaggtgtagcccatttgacataattgcgatacggaaagcaaaatctaatctaaagaatctacaagaaaaacattggaaatagtatggtcaggtgatatagcaattttacccaaaccttggaccaaaccttgatttccatccccgaatgtgatagctcgctggggatcttggttttctcatatgaggagaacat

SEQ ID NO: 39109 - DNA, 399 bp, Zea mays
cttgtaactcaagcatcaacttcaagaacttatactgattgacccaagtattttccaatactatatcctaaactcatatcactctccacgagagatatcgatgttgtaagaaattaagaattatcctgtgccacaaagtcactacctacaacatggaggaaagccaaacgatggcaacatttatgctcttaaggatatagatcttaaaacatcatttattatgtgccttgtggagccacataaataatcgaagcacttcacatatctgtagactatgcccgcatcctgtgagataatctctcatatggagattgatattcatattctatacttgcaaccacatgcttaataagacccatgcatgttacacaatatcttatatgcatgattacatataaa

SEQ ID NO: 39110 - DNA, 396 bp, Zea mays
tctatcaagcctcaatgagccatatatcccagattgacccaaaggtatctttatttgtactgtctaaaactcatataatctcggggaagatattgatggtgtacgaattaaagaattaattctatgccaaaaaattgatgcctacaacattgaggaaagccaacggatggtcacaattatgcctttaaacgcaaggatcttaaactatcattctctatgtgtcttggtagtcacataaaataagagaacactctaaacgttctttaattatgcaccattctctgagaaattcctctcatatggagaatgatattcatcatctctataccatggcaatcttcatgctctaaattgttgtaagttctcatggatggtttacactaatcatttataatg

SEQ ID NO: 39111 - DNA, 402 bp, Zea mays
tctatagggagaacacgtgataggtttgactaacgtacaattcgaaaaagatagaccttgtgcagcttgtcaggcaggttaacaggtgggaggagcgcatcacagcaagaatgtgatgaccacatcaagacccctggagctgctacatatggacctcttcggacccgtcgcctatctaagcatatgaggaagtaagtatggtttaattattggtgatgactattcccgcttcacttgggtgttcttcttgcaggataagtctgaaacccaagggaccctcaagcgcttcctcaggagagctcaaaatgagtctgagctcaaggtaaagaagataaggagcgacaacgggtccgagttcaagaaccttcatgtggaggagttccttgaggaagaacggatcaa

SEQ ID NO: 39112 - DNA, 283 bp, Zea mays
tgcgccttgtgtgtgcgccgcgcactctgatgagccggagaagccgactaatgcgatggccatgtccatggactcggctgacgatgagctcaatatcgatgtcgcggtcgaagagcggtggctcgaaccacataatgaggcataagatgctcggtgcctcctccttgtgtccggtaccatcgatctggacggtcccgggactcaaccaacccgtacatacacggtgtccacaagcccaaccgccgacgctgagcacctctgtacctgtgcatgatacacgctc

SEQ ID NO: 39113 - DNA, 193 bp, Zea mays
  unsure (1)..(193): unsure at all n locations
gaaactcaagctntaataatatctntaccttcgntattgagagcacctagatgtgtgtgtgattangcgatcctgcacaacttaaaacttaaagccacaaacttgatcgagtgctacagcacataaagccaagtggctagagaggagttcttgtacggcacaattaccacacacatatcaacacacagaggca

SEQ ID NO: 39114 - DNA, 378 bp, Zea mays
ttaaggagaccatttcggtaccgaggcatttggtaaacaggttggtccctgccatgcagaagcaatttgacccatattccacataaacatgataccacaggcaaagggatctaccatggaacattcgcccgaagcttactatagcatcgggggaggaggccggctaatatatggatgactaatctccttacctgggattcttttgagggaaactcaacccacagacataaaggattctgaaacggtcaaagagaccggttaggatcagacataaaacgacacggacggagtaaaactctcaatgaaggttcttgagaggaggctcaacatgagtttttttctcacccaaacatatgtgtgggaaggaaatctaccttt

SEQ ID NO: 39115 - DNA, 483 bp, Zea mays
  unsure (1)..(483): unsure at all n locations
tggtaccaacagtaagatacacatgtcccatgagacactcattagttccaaactggagataagaagatacagacgtaccatgatccaatgattctaaaaccaccaccaggaccacccaataccattcgacgaccaacagtgaaacataagaaccttcaagacatcttgctctggcccctgacacgaacaagggagaactaacttgggatacataaaataaaaagactataaccacctggtaacctgattaagacgctcaactcatatttctggaacagccttcatgatgggggctttgagtggngacaccttgcttgccctggacctgctttcttttttcccttgcctgatttgcaccttcataaatgctcatctgctcttgttaaggggtttgaaaaacgctttaatcttgtcagtcaaattacatgttattggaagggaagcacttaacattggattgatggtgcagaatattaactttgc

SEQ ID NO: 39116 - DNA, 386 bp, Zea mays
acaagcgccgcacttaccgctgagtgttattctcctacatatactgagagcacctagaggagggggtgaataaagtgatcctgtaaattcaaacttatagccacaaaaaccttgtcaagcgttaacacaactgatgcccagtggctagagcgaatatcttgcacaagatgataatcacaagaggttcaacacagagaagacacagtgatttatccccgggttcggccaagaacaaaacttgcctactccacgttgaggcgtcccaacggacgagagttgcactcaactcctctcaagtgatccaatgatcaacttgaataccacagtgttatgcttgtcttcttcataatcccgttgcgaggaatcatcacaacttggagcctctc

SEQ ID NO: 39117 - DNA, 399 bp, Zea mays
  unsure (1)..(399): unsure at all n locations
ttggaagaaaatttgagcgaccacggtgacgtctgttggggcgaatgcgaaaacgccacccttcgctcgaggccttcgccgtggtcgatggtccaacggagacaaaacaacgggcagggacacccttcgctccgtacgacatcggacgaagacctgggacgaggtcatcccatcgtgcggcctcgtccagcatggagacccacgtgtgatccagcccattgtaacaggccctacgtggccgttgcgtgttacgggcctaatttgtaaaggcgcctctgtaattacagtctgtaaccccgttttatgggaatattctggtgataacctatgtgtctgagggcacatgcatccttaacacaagacgctgggcgctccgatacctantatataccccgcaca

SEQ ID NO: 39118 - DNA, 485 bp, Zea mays
  unsure (1)..(485): unsure at all n locations
atagaaactcagcttctaagggagaacacgtgatgagttacctaacgtgcaattctaaaaagagagacactgtgcagcttggcaagcacgtatacaagtgggaggagcacatcacagcaagaatgtgatgaccaccttaagacctttggagctgctgcatatggacctcttctgacccgtcgcctatctgagcatatgaggaagtaagtatggtctagttattggtgatgactnttcccgcttcaattgggtggtctttttgcaggataagtctgaaacccaagggaccctctagcgcttcctcaggagagctcaaaatgagtttgagctcaaagtgaagaagataaggagcgacaacgggtccgagttcaagaaccttcaagtggaggagttccttgaagaggaaggaatcatgcacgagttcttcgttccctacacaccacaacaaaacggtgtggagagaggaagaaccgacactcatgata

SEQ ID NO: 39119 - DNA, 461 bp, Zea mays
  unsure (1)..(461): unsure at all n locations
ttgaaaatcccatactnttagctatctctcaacatactgtatatttctctgtggtccgagagatagtataggaaatcatcttcgttagtgcccttaaacactaaggccccttttggatattttagattttgggcatagtgtgtggcttccaagatttcttattctgataatattttccccgaagcatgtcgaagaatgtaatcaacatcttcgactgaagcttctgaggcagaggatatttctttttctaccataccctgccctgctgtcatgccgctatctgaagtttgttgatcagctntgtattcagacgcgacagccttcttctcattgggcactacaggcccatcttntgtgtctgcctgaccttggcaactttcgaactttcttaatgtgaacagggtaagggctttgtgtctcatacagcgtctaccgctggcatctctcgctgggagtgcgca

SEQ ID NO: 39120 - DNA, 431 bp, Zea mays
  unsure (1)..(431): unsure at all n locations
tctanagggagaacacgcgataggcttgactaacgttcaattcttataggatagaccctgtgcagcttgtcaggcaggtaaacaagtgggaggagcacatcacagcaagaatgtgatgaccacctccagaccgctggagctgctgcatatggacctcttctgacccgtcgcctatctgagcatatgaggaagtaagtatggtctaattattgttgatgacttttcccgcttcactagggtgttctttttgcaggataagtctgaaacccaagggaccctcaagcgctttctcatgagagctcaaaatgagtttgagctcaaggtaagaaagataatgagcgacaacggctccgagttcaagaaccttcaagtggaagagttccttgaagaagaagggatcaagcacgagttcttcgctctctacacaccac

SEQ ID NO: 39121 - DNA, 369 bp, Zea mays
  unsure (1)..(369): unsure at all n locations
gggataagaaggcatccttaatctgcttacagtattacggcccatcgcaagcagacaccagagatccaagcttgagagatatctcgatacaagtcgacaaatggaagcgtctctcaaaggcttttctgtaaagaatatnccaagaggagaaaatgaacatgcagacccattatccaagtcagcgggacatgggctcccattacctttggaagtatgttttgaaacaataagagcaccttcagtcgagctcatggagtgaggagtgcttacaatctcaccagtgcaaatgaagattggaggactgcgattgatcttttctcaaggcaattgtctttcggatgatgaagtttatatcaaaagaatggaagc

SEQ ID NO: 39122 - DNA, 415 bp, Zea mays
  unsure (1)..(415): unsure at all n locations
cgaacccaaactatagaagataaaccatgaggaatcctatctcaagacacataaagtcaattggtaaaagcaaaatgctagaatgagtgcaagattataactctgagtcaatggtatgtccttatgaaataataaccccgacaacagacctaataagatcacattgagggaaaataagagcagtgttcgaaactagagaagtatagacgcaagccaatctcactagtgataaaaggacatgagttccgcacgggcacagagccatggagaaagtcaggggctcagggtggccgcttggggatttttgtttcgtgagttnttatggtcgattcaagtggatggatacatgctaggacatctaaagaacatctatatcaactaggtcgggtattcttttttcttgtgagcatgaagt

SEQ ID NO: 39123 - DNA, 444 bp, Zea mays
actgagacctatctggctgggtcatgtctagcctatgtttgtctgtaaatgatggctgagctcaactgatagagtcctgggtgactaaggtttgactggacaacttgttgataatttttggtttggagttttccagaatacccagacttggtacccaatggatgtgtatgtcgtcttgtccgcacagcagtttcttaagctgataggacgcaatgatacgtgtgagtagttcaattattgaactctgatgctgagttacgctatgttttgcaagaagcgtgtcgtttcttggaagtttaaatgacccttgatggcttacgactgttcgttgtatggacgaaagacgaaagggcacccttctgagccaaccgtctggtatgtacttcttcactcgtcattgcttcactttcttgctatcactttctacacctgaaaactctaatg

SEQ ID NO: 39124 - DNA, 258 bp, Zea mays
gaggagcgcaccacagcacagaacgagatgaccacttcaagacccccggagctgctgcctatggacctcttcggacccgtcgcctatctaagcatagggggaagaaagtatggcctaaccatagttgaagacttctccccgcacacttggagggtctcttagaggataaagccgaaacccaagggaccctcaagcgcttcctcaagagggctcaaaatgagtttgagctcaaagtgaagaagagaatgagcgacaacg

SEQ ID NO: 39125 - DNA, 376 bp, Zea mays
aactcaactctggccaggaggactttatagctagcggtgccgcgaccatattttgtgctcagaagagggtgcccaaataggtccctgctggtacaatgcaagctgcttcggagggcgacctcatgccaagtcatcaattgatctctcacgatttgggagaacctccgcgcttcttccatctccagatactgtgatatattccggcctgactcttacactgaacgaactgctgtcaatacgctcatctagtctccatatcaagcattggtggacaggatggctatccagctgaagatgcaaggtgcttctgttcataaagagctctttatctggcacgttggaatccggagttcgttcaacatcaagtctctgattt

SEQ ID NO: 39126 - DNA, 298 bp, Zea mays
acacgaaacggagaaacgatcctccccggcgatccgactacgatcggacagaatccaaaccctgcaaagatcaccctggcagcatacaaatgctgcaagcaaaggcattataccgctccaaatgccaaagaggaactaaacctaagcccgcagctcctacatttgtggcacaccattatacataaaatacacctcggatgtccatgtactcgcgaccgaaagcaggagaaattgggaatatgtactatcagacgatacactgagctgtggtcaatcggggatggagttcttgcctgga

SEQ ID NO: 39127 - DNA, 365 bp, Zea mays
  unsure (1)..(365): unsure at all n locations
actcagccggagagatgggcaagcgagagcccatttaattgacgagtatgaactgcctacgtcctggggaaatctcccaaccccaggctttccgaaactgaatgcttcctccctttttggcggacgcattgtcagctccaatgtacacaaccatcttctggagcagtctcccaagattgcggggttcctggcaagactggctgaagcgccggacaagcccttaatcatggccaacgacatntattggcactgttgggcttggccctcaacgcagaaccttcgacgacgccggaggtccttcgtgagctggtacactgaaaaaacttgacaggactgcttcgctgaaccctagaactagaaaacaa

SEQ ID NO: 39128 - DNA, 124 bp, Zea mays
ctgtggaattggagaggattcatcacttgggtgtgtctataattgaatgctcgagctcttgtcagcggttggaagctgagaaacttggatgacctgaatgtggggtcgaccccccttctcctcc

SEQ ID NO: 39129 - DNA, 371 bp, Zea mays
taccgggatcggtgtagaaccgcgcattctaatctcattgccttctacttgcgaagacccgaaagcaaagctttcacttagccatattaaatgcaacttaaatcaagtcttgttgcgtagcaagatttcaacttggagggagcaaccaacacaacaggtgcttctgtcccaaaggttcaccaagaaccgtcacaaaataccgcgcatacttcaagatcattaattgtgtcctctccttgagcccctggcgtccaatcgacaatgaaggctgctaacgcctgggaatatattgaggatctgcgcacataatcaatgctgaactcattgagcttcgcaagccacatttcaatctgtcagtagctttctattcc

SEQ ID NO: 39130 - DNA, 384 bp, Zea mays
acggaataaaatactcagcttaacatctttacctgtagagaagaatatttccttgttgtacaacgaactattacctgagatttagaaagcgtgctttattacacagaacataatactgaatggaatatactactcattaaaggaggatatttgtcaataaatgtgctttgactttggcacagagctattgactgtgcgagcttcagactgttctctgaaataccttctgtgttgagcaaattggcccccttctaacttgctggctcggtgcaacgttggtggatgcggaagctgttgccaggaaacttgaggttgactcgcccgagcaacagaaactgcaaggtggatgcctacatactcctgtgatataacgcgaatgatacc

SEQ ID NO: 39131 - DNA, 464 bp, Zea mays
tcgtactcagcaatattatttgcgcagctaagatcaagtctctctacgtatcatgttctgaatttggagggagcaactaacacagcagctgctcctgccccgaaggttcctcaaggaccgttaaaaaataccgtccatacttcggtatctttagttgattcttctccttgagcccctggcgtccaatcagcaatgaagtctactaacgcctgggactgtattgaggatctgtgcacataatcaatgctgaactcattgagctccgcagcccactttccaattcttccagtagcttctctgtttctcatgacatccttcacaggttgtgacgaagggacaattataagatatgcttgaaaataatgtcgaagcttcctggatgccattaagacggcatataagaccttctccaattctgtataattctttcttgatagactaagaacttcagagacgaagtatat

SEQ ID NO: 39132 - DNA, 287 bp, Zea mays
cttactcatttgtaggttgttttgagtatctttttttcttggcccttctggaagattccagacattcatgaatagcaatggtggcttgatcctaaaggatcttcatgccaaagtaatcaggatgaagaattgtttctaaagcattgaaggtgccacgacacataatcgcattggtagaggattcattgtaacaatgttaaacacaacttgctctggtttggtgttgttgatgaagccctaagtcactggcatggtgatcctggccaaagatacatttagtttcctcc

SEQ ID NO: 39133 - DNA, 389 bp, Zea mays
tatgaagaggcttcatcccaacatgggctaggcggtggtgccatagccaacccatgttagtcttagcaattaagcaagtgtcgagttcaactctatcataatataccaagtatagctgaccctctaacactcccttagatgctattgaatcatcactttttctaaagacagtgacacctacatcagtgaatagaaagttgtatcccatttgacataattgtgaaacagaaagtcagatgggatctaatgaatcaacaagaaaaacattggaaatggaatggtcaggagataataactatttaccaagacctttgaccaaaccttgatgttcatacccgaatgtgatagctcgttggggatcttggtttctctcatatgaggagaacatc

SEQ ID NO: 39134 - DNA, 424 bp, Zea mays
  unsure (1)..(424): unsure at all n locations
tgtgaaccgcactaatncataagggagaaagcagcttcagctgattatcctgagcccatgctcttatgtgaggacatagcagagcagaaggtactgttaggctctcaactatccgaagagcaggaaaaaactttgataagggttttgttcaataacatagatgtttttgcatggtcagccaatgatctatgcggagtttatatggatgtcattgagcactcgctcaatgtcgatccatctttcagacccagaaagcaaaggcttccgaaaatgtcagatgataaggccgaaggtgctcgcaacgaagtcaaaagactcctcagtgcaggagttatcagagaagtaaagtacccagaatggctggctaacactgttatggtaaaaaaggccaatggcaagtggcgaatgtgcatcgatttcacag

SEQ ID NO: 39135 - DNA, 299 bp, Zea mays
actagtgtcctggaggctcgactgtactccacattgctctgcatggacctcctccagaaggtgctttctacgggacggcagaatgcaccttatgagaacacctgacgcacccattctgtattaattcttcccaatgagtgtgtagagagccgactgtctggcactgcgctctgacgaattcttgcagctggatcttctatcgtctgtatgtacttaatgatcgcgctcctccagtcatcagagactgactcgggttgatctacgatgctgcactctactgattgatctattgagatact

SEQ ID NO: 39136 - DNA, 324 bp, Zea mays
  unsure (1)..(324): unsure at all n locations
tatcccccttctttgcatatttaccattcgaacccgtgcgaaacatttactatcctggggtcaacgacataacctttacatgaaggcttaaatatgatctttattacatgaaaagacgaaacttcgntagagaagactcctatcagagcaggatacttgcaatagatgtgcttcactccggcacagtgtattaactgtcaagcgttggactgtctctgaaacccgttgattttgagataatggcctcttcggctgttgccttgattagcagtgcgggtgcagaggtgctgtcaaaacctgagctactcgcgaaccacagaactg

SEQ ID NO: 39137 - DNA, 296 bp, Zea mays
  unsure (1)..(296): unsure at all n locations
tatcatggtgtttaactttctctccgtgaaaaaacctgaacttggaactgtggngttaagactgtatgcggtcttttcagatggccgggaggcagcttcttggtcaaaacgagcgcgtttctccatcgtcgccaccacctttcactttgctggagctcatggttcaaccgaatgagatcctgaggcagctggctcaacgtcatccaccacctcagcattatggtggcggagaccacctacgtcaccccacggaggcttcataccaagaatatcttagcacccagccttcattgtta

SEQ ID NO: 39138 - DNA, 308 bp, Zea mays
  unsure (1)..(308): unsure at all n locations
ttgtagcgcctgccaagccgggtagcaagttggcgctcattattcgcacaagaacattatgactagtgacaggccactggagctccttcacatggatgtattcggcccgagtgcttacataagcatcggcgggaggaagcactggctagttattgtgggtgattattctcgcttcacttgggaggtcttttttgcaggagaaaactcatacccaagagtccttaaagggattcttgagacgagctcataatgagttcggcttaatgatcaagaanatcagaagcggacacgggacggagttcaagaac

SEQ ID NO: 39139 - DNA, 442 bp, Zea mays
  unsure (1)..(442): unsure at all n locations
ttagccaatgccactataaacttatgtggatccaattcttatcgnaagagctaagtattcatgcacctcttttctaaactatggagtgatattattggagctacttatctaacatcctacccagtgcttcatgcatgtagccaacacattgaaattcaaaatcattgtcggagataatctcataaagattactcaatgttcaaatcatattaactaatgactaggtggcagacaatttcatccagagcttaggaggaaaaagatcacaagtgatagtcgcctacaatggggtgaataggtggcatctaataattcaatacttaaaaagaacttaatcccgatcaagtggtagaacgaaagggatattatccaagctggcgaaaagaagtcgccttccttgttgctcctataagcgcaaaatagataaagagcacaccaggag

SEQ ID NO: 39140 - DNA, 456 bp, Zea mays
  unsure (1)..(456): unsure at all n locations
actaactttcttgctaacaacatcctcaataaatcttcttttttttacaaggntctaacattacttttgagagggtgtccaatctgaaattctatcaaaaataagataccaattgaaaaactcatcattgtaaaacctttncttaactcaaattttgaaaattggcggtggtgccggccttttgctttgggctaatactctctccccctttggcatgaatcgcccaaaaccgatacttgactgaaatagaagcccttgttactacttctctcccctttggtaaacaaaatatgagtgaagactataccaaagttggagagttgctcggagcgaccgcgacaggcgagtaatttgatggaacgcatgggaagcctctgtcttctccgaagactccaactccctttcaatatatgacttcgtttgaatatacttgaaaacacttagtcatacatttaa

SEQ ID NO: 39141 - DNA, 337 bp, Zea mays
  unsure (1)..(337): unsure at all n locations
cgtggcagcaagactacgaggtagaaagacaactatacactaggtttattttctactccatatggatacgcctgagaataaggctgtaattctcacgaagtcatacctcgtcactatgaatagaggaacactaccattcataggagacgttattttcggagacggagctgagctgaatcttttcgnctacgaaattgttatgcttgtctttcattacatgtgttggtttaaagcgcggaggtataactataatctcttctgttgataaaggaatatagaagaattatactcatatggtcgagatgagttgttaggtatactttcattttcatactct

SEQ ID NO: 39142 - DNA, 318 bp, Zea mays
  unsure (1)..(318): unsure at all n locations
tggacccacgctgtggttcttattgtagcaaaaagatctagaaccaatgtctttggctagcgctgcaaatcattgcctttctagcacaaggtgcaatattgggttgcctagttatacatggatcaaatgacaagctatgagaggaggaggtaccaatgggacaactcttgcactgatggcccttttcccggcatgtggagcataggccgtttccaagattcgaagaatacttctttccttgggtggtgcttgctacatgggtaagaaaaactgtctcntctaaccctatgccttatgttttaaatggggacaagaatt

SEQ ID NO: 39143 - DNA, 432 bp, Zea mays
  unsure (1)..(432): unsure at all n locations
gtcctgcttgcaccttcggcgcttcaccaaccttcgtattattctggtctacagagatgcctgactcgagtccgaagatacctgttcacacattatacctcagaaacactattaaatccttgttttgaggaccttccgatgccgataggtcccaacaccaaccttcccatacggctggtgtgtgcgagataactatggtttcaatggcagcggttgcacgaccctgcccagatccacaagagagagagagagagatggtggggctgcagtacgatctcgtctggaacccattggacgcggttcgcgccaccttctagaggacggccgctgccgctgcggtggagtctggaggagccgaccctgtggcggcgttccgtggcaaagactggngtgcccgcgacctcttacgctccttcctcctcgagcaagact

SEQ ID NO: 39144 - DNA, 465 bp, Zea mays
ttaaatctcactgaacaatatcaccgctccgatgtcacacattgtctttattctattttattccaacttcaaggaaacaacttttctctaacttttattgtttttaataacatagatgttctctaacgaaagttatttgtttgtagaatatgctgctgagcaaagctttaaaaatgcagcaagacttataaaataaaaagcacgaagttataattgagaatttggagagcaagataaaagagcaatcagttgctatcgaaaagaaagacatcgagcttcaaacatccgaaggcttattagaggaggctgaagctaaaataacagaattaaattcgaagcttctctctcaatcagagaacttcgaacaagaaaagctgaagcttaatgcagaactcgaggccaaagtccacaaaagttcagagctgagaaaatcattgacacgccttcagaatagatgtctggagt

SEQ ID NO: 39145 - DNA, 425 bp, Zea mays
gtctacattaccacggaattaggctctgtgctttatctttctagcttagaaggtaagaccgtgcatagggttacaaactacattgtataggtctttatggtagagatagtaacatttagtcaaaatcagcgttacatataagataatttatttattgcgtatattttgactactaagattagaatttcctcccaaatattggcagtatacgaaacgactggaaacctaagtaacggtcaaattgcgctaaagggcgagtaggaacagtaagaacattctttgacatatagagcgactacctacgtcccgatccagggttactagtctacaccaacttggctgatattagataatagggaatatttgcttcaacttagtccaactctttctaattttatcttaatttaagagagagaatatattac

SEQ ID NO: 39146 - DNA, 357 bp, Zea mays
gaccgcatatgaagcacgagcgctgtcccctggtcttattcttgctcggctggccattgcgaccctatagcaccgtcttgaagcgcttaatgatgagagccatttcttcatcattaatgcccgccgcctcaatttgcgccccttgcttggagtgcctccctgctcctcgatgccttgagagcaatgggtcgaggctcgtggaatggaccgttcaacgcgtcatcgacgtaccttgccttcttgatcataatccgcccgctcacgaatttttcaagtacttattcgggccgcatcatcgtgtacctggggttctcacgaatatttgctcacgagatgaggatcaagaacgggtaatga

SEQ ID NO: 39147 - DNA, 460 bp, Zea mays
gcaagcttgcagattcaaagtcaacttaatgaaactctttacaaccgatgaaccaaccctgttgttcttgctagcctcttcttgaatctcgagggcgagaatctgttaagggggttagatctgtaacaccctgaatttgggggtataaaatatcttttccaatatccaccacattcaggtgttactctctcagttcttcgctttcctctccttttcctaaaaatggagaattatttctatatataagctttaagcttagtaaataaaaatctagagaagcttcgattgttgcattcatgccattgcatagtgtgtatgagtgctaagatttctcgaaacatgttgaattatctcaagaaatattgtcgtgaacttctgaacaacctttggaaagattatcgagtgttaaatgtgagcttcagcctttcttgtatttctttatttcaagacataatgttgc

SEQ ID NO: 39148 - DNA, 439 bp, Zea mays
  unsure (1)..(439): unsure at all n locations
cctatanatactcaactnctaagggagaaacgtgatagtcaaccaagttattttttaaagatagaccttgcgtagcttgtcaagcatggaaacaggtgggaagctctcatcacaccaaagatgtgatgacaacatcaagaccgctggagctgctacatatggacctcttcggacccgtcgcctatctgagcataggaggaagtaagtatggtctagatatcgtcgatgactttttccgcttcacttgggtgttctttatgcaagataagtctgaaacctcaaggaccctcaagcgctttctcacgagagctcaaaatgagtttgagctcaaagtgaagaatataatgagcgacaacgggtccgagttaagaaccttatagtgatgagtccttgaggaggaaggatcagctcgagtcttcgttcctcacaccacagaaat

SEQ ID NO: 39149 - DNA, 358 bp, Zea mays
  unsure (1)..(358): unsure at all n locations
ccataaaactaactctcttgtctctttgagggaggtgccaaagacattttgcggcctatctctttgctctttttttcttgaatccggtcatcttccgggtgaggggacacgggttctccggtaacaatcttgtcctatcttgagaagaaacctgctggggcctaaagttgccttttacgcttgcccactttttagagatttccggaagcttcttcttggggaccgtatcgatgtgaattcttttcactgctccgatgaatggtcccaacaaacacgatcacgtcgaggcatctatgtggagatgaggccatgactacttgatctcnaccacccctattggcggcactatcggttggac

SEQ ID NO: 39150 - DNA, 375 bp, Zea mays
gagctagtggcgtccttcggcgttctgccgcattttattattaaatctcccacctggaagccttggggccgaaccccttcggcgtggtaacgtcgcagagactgctgataccgcgccgagtgtattaaggccatgtcccgagcctcttccagctggtacagtgagtcttctcggctggcctggttgcttcggtcgtggtacaactttgtccttggggaaccgtattctaagtctgtgggtaagatagcctcggccccatagactataaagaacggcgagaaacccgtggctcggtttggcgtcgtcctcagactccagaccaccaagggtagctctttcatccaccactcgctgaatttgtgatgtcggtgagat

SEQ ID NO: 39151 - DNA, 360 bp, Zea mays
cttctctgtcaaaagtcattgttatttcttatgtattcatacatcttctgaagcagcttctccaaagtctgagggggcttcctggcaaagtattgggctgaaagttccggccgaagccccttaatcatggcctcaatgacaatttcattgggcactgttggcgcttgtgccctcaggcgtaaaaaccttcgggcatacgcctgaagatattcttcatggtcttgggtgcactggaataaggcttgagcggagaccggcttcgtttgaaacccttggaaactggtgatcagcatatcctttagctgctgccatgatgtgattgttcctggccgaagggaggaataccaggtttgtgcaaca

SEQ ID NO: 39152 - DNA, 353 bp, Zea mays
agctatgcggttcaaggacctggcctctgcctcatggaggacctttctgtcataagaaaacggcttctgtattgtccggacccctaccgttgaccccgggcccttaagggccgtggtggtctgaccaccaccttcttctaagggaacctcccgactcccctgggaatgttgctctgtccttttgacgaccagcaccatgctcaccacctttgtagccgctgcaatgtacaagtacagtggctcccctggcttctgagctaccagtattggtatggacacaaggtgctgcttcaactcttggaaggcttactctgcatctttggtcaagagaatggaccggacttccgtaagag

SEQ ID NO: 39153 - DNA, 283 bp, Zea mays
caggcttgggaactatgcccgatacaatctgcctgatctctgtactatagcgcttgccagatgccaccgtgtcggtcgaacacgaccagcacccaacataagacttgcctaagtatttagccaagaccagagccatgatatgtctcatggtagcactggtttcccgggtggtcactccatgcttcaattaatatgcaataatcctgtttaacccatcgggtaacaacaatgatggtaaacttaccatctgaacattattattatataggagtgactgcattaa

SEQ ID NO: 39154 - DNA, 450 bp, Zea mays
  unsure (1)..(450): unsure at all n locations
tcgcacctccgaactaactcggcagcatcacttttcgctgttggtcatatagaatcccgacctgaagaccttcccgattagcgtcttggacgctgcgtgtattccacattggccagcatgaacctcattcagaagttgcttcctagtagacgatagaatgcatttcataaagatgcctgatgcgccccttctgtatagtgtctccccaatgagtgtgtagtgagccgactgtctggcgatgcgctcggctgcacttttaacgtctggctcctcttcattctttatatatctgatgatcggtcttctacagtcatcagagctngactctggctgattcacgatattacactcttcttgctgatccctagagatgctcggttgtggtatttcttgtacaaagactccgggtgggactttgagtcgactggatcctaacttggacatgcatcg

SEQ ID NO: 39155 - DNA, 465 bp, Zea mays
acttaagcacgcgcatcaccggaaggactaagtcggattttccttttgtataatagacacgacttttactacactcataatgttcctattttcaagccactggaacaactgctgaatttgaatagctgaaaatggttacatgtgtgacacatcaagacgtgtgacaaatgtgaggataatacacctttccctccatttagacactataagtgctatgttgtacaagttgagcttttgacataacgtacttatcataagttaagtgtcccaacgtgtctagtgctagatgctcatggaaaaaaaacctcgcctttggcattgttgttggactacatggtcgagtctgtgtatgttgtatctaccggacattcataattattatttccaaccctattatcctttgttgcaccttctctattaagtcagacacctatagctgtggtggtcatcacttggagattataa

SEQ ID NO: 39156 - DNA, 397 bp, Zea mays
gctggatctctaaaacctactgatattggttactcttctatcgccgatgaagttagtgatatgatagcatcgacaccgctattgaagatgctaattcatatctaaaaaacaatgcacatgctaaatcctaagctactgaataaaacttcaccttttcaacatgctacatgttattagaaaaatacttgacaatctaaatattaactcttagttatcatagcacagaaacatatgttcttgaataaaatgtcaaagctaccagaatgagcatatctaatttcaacattaattatactgggccgcaaagaagtgacattgtacagcaatactgaatttgaaagtggaaacattgctagataccatgtgtgaggttattatatcatatgacaacctaatc

SEQ ID NO: 39157 - DNA, 436 bp, Zea mays
agcttgtcagcaatataagcacacaagagagaatgctgcttctgcagatcatccgaagcctatgctcctgtgtgaagatatagcaagccaaagggtactgctgtgatctcagttatctgatgaacaagaaaagactctactaagattcttgttcaacaacaaagatgtcttcgcttggacatataatgatctctatggtgttaataaagatgtcattgagcattcactcaacgtggatccatcttttatgccaaggaagcaaagacttcggaaaatgtctgaggataaagccgaagatgcttggaatgaagtaaagagacttctcagtgctggtgttatcagagaagtaacatatctagagtggctagttaacactattatggtgaagaacgccaatggtaaatggagaatgtgtattgatttcacagatctcaac

SEQ ID NO: 39158 - DNA, 332 bp, Zea mays
  unsure (1)..(332): unsure at all n locations
gctgggaaccaccgcaatccccttggcagataatacatgtcccaaaaattggatctcctccagccagaatgcgtacttactgaacttagcatattattggtgctctcttaagcgcattaacacgatccgcaaatgccgagcatgctcctcttcattcttggagtatattaagatatcgtcaatgaataccaccaccaatctgtccaactcgagcataaatactgaagtcatcacatatgtgaagtgggcacgagcatttgttagtccanaagacataaccaaatattcaaataatccataccgcgtagtgaatgcggtctttgtatatcttc

SEQ ID NO: 39159 - DNA, 457 bp, Zea mays
  unsure (1)..(457): unsure at all n locations
agctttctcgcgcgcagcttcgccgctggtttaatccttcattccaatcctgctttccatacagtatatgctcttaacccgagaccgaaggtacctattcatatgtcacacttggaaaatattgttaaatcatgtttttgaggaccttctgaggacgaaggcccccaatagtagcccctcgcattattaatttgtttaaaataacgaattcagactacgacatggacgaagggcttaagccgaaggtccgaaaaaacaccttccctttgctagaatagcaacgatcaatgacggacggggccccccaatttggggcatgctgagcgtataaataagaactcgcaccaaccacatttgatacgctgcttgtgccatttgctntattttctcaatttcataactcttgctcactaacgctcgctagttattcatgctttctgagcttcgattaaaaaag

SEQ ID NO: 39160 - DNA, 393 bp, Zea mays
  unsure (1)..(393): unsure at all n locations
tgtacgatcaacagtactatgccagaatcaaagcacatattctgagcgatatactnttatgttctatgccattttgctttttaataaggaacaagccatgtaaatttagttttaatttcttgtaatgatcttgcttctatcagaatggaatatatcttcttcacagacttacgaagcttaaaagttacgaagctcaaaagttacgaagctcacaagtcgttcctaagggaatgcagagctaaaattgccgaagctacaaaaagtcattcctaagggagcgcagcgtaagttttctgctcataagtcgttccaaagggaatgcagagccaaataccgccgaaatataaggcgaagaagttcaaaagtcgttcctaaggggatgcagaacttata

SEQ ID NO: 39161 - DNA, 408 bp, Zea mays
  unsure (1)..(408): unsure at all n locations
agctctangggagtagaataaaatgtttcttgaattaactngaatcacatttatacccctgtgataccaaaaacccatttgaaaccctggaaaaccctaagtccaaaccctatgggcctatgtgctaagacagtgcacatttggactaaagtgtaaacactacaatgtcaagacatataaagccccatggttcacatttggaaaggtttacaagccaaaccctaagttttggaatgatttgcaaaaaggaccccaattgagaatttactctaagtctgaatttcagatttgtgggctcaacttttgagtcttgtaactttcaaatactatggtttttgccctaggctaccacatcaaagttatagacctaacatagaagaacaacttttcttaagagcataagcatag

SEQ ID NO: 39162 - DNA, 310 bp, Zea mays
  unsure (1)..(310): unsure at all n locations
atagaccacgtgcatataataggtctctttcttggccacaccagtgtgcactacataatgataaatgtgatctatatatctagtagtattcaccacaaataccttctcatgggggtatggaatcatcatactgatgcgtgtaccataccacacaatgtgagctcctgcttcatttgacccagatatgcttggtagagcaggccactcttgcatggtccataactaaagtttttctaatcttgtggagtcgatctgtatcanaatgagggatgacatctaattagaaccacacttgtgttatcatgctttc

SEQ ID NO: 39163 - DNA, 253 bp, Zea mays
  unsure (1)..(253): unsure at all n locations
agcttaaagccatggtaagtagcatattctttaatatgcgnaatgactcaagcctagctacgggtgcataggtttcaccgaaatccaaaccttcgacttgtgaatatcctttggccacaagtcgggctttgttccttgtcaccacaccatgctcatcttgcttgttgccgaagaccccacttgtttctaccacattttgattaagacgtggaactaaatgccataacttcattccttgggaaaatgtagagct

SEQ ID NO: 39164 - DNA, 438 bp, Zea mays
  unsure (1)..(438): unsure at all n locations
ttgagcttaattatctctggatttgtcttaacaactgatctctcattcttaagcaaagntgttctccttaggttggtctacacatttgatgtggtgacctagggcaaaaaccctagaatttgcaagatacaatgctccaaagttgagccctcaacactgaatttcagacttagaatagaacctaattgaggtctaatttgcatttaagtccaaaatccaatatttggcttacaagtccacacanttgggaaccaaaggacttgagatacttatttgacttggtttttgcactttagttcanaagtggactaattttgcacataggcccctagggtttgtgtttaggggtttccaggattccaattacgggttctggtatcccaggggtataaatgtgattcaactntattcttcgggatagtttataactatttccct

SEQ ID NO: 39165 - DNA, 453 bp, Zea mays
  unsure (1)..(453): unsure at all n locations
agcttatgaagattcttcatcccaacatgggctattcggcggggccagagccaacccatgttagtcttagcaattaagcatgtgtcgagctcagctctatcaaaatctactaagtatagctgaccctctaacacacccttaaatgctaatgaatcatcacttcttctaaagacagtgacacctacatcagtaaaaagacaggtgtagcccatttgacataattgagaaacagaaagcaagttgtaatctaaagaatctacaagaaaaacattggaaatagaatggtcaggagatatagcaattttaccaagtcctttgaccaaaccttgatttccatccccgaatgtgatagctcgttggggatcttggtttttctcatatgaggagaacattcttnttctcccagtcatatggtttgtgcacccgctgtcgagtatccaacttgagcccccg

SEQ ID NO: 39166 - DNA, 374 bp, Zea mays
  unsure (1)..(374): unsure at all n locations
tgcatgagaatatgaatacacaggtgaatgttagtattgcctatcaccctcagactgatggacagactgaaagaactaatcaagtattggaagatatgttgagagcctgtgcccttcaacatggaggaagttgggataaaagtctaccttatgctgagttctcatataataatagttatcaggccagtctgaagatgtcaccattcgaagctttatatgggaggaagtgcagggctcctctatattgcgatcagactagaggaagccagttctttgggcctgaactgattcaagaagcagaagaacaattccgtataattcaagagaatttgagggtagctcanaccaggccaaagagctatgatgataataga

SEQ ID NO: 39167 - DNA, 352 bp, Zea mays
  unsure (1)..(352): unsure at all n locations
aattacagctggttgaagtgtgatctcttgatctgtccaacatctggacagcaaagcctcttttcatgtctttttgacttttgaaggtattgaattaacctgagatgtttataaaggaaatggtaacaattctatgagtaacactggggtgttacaggcttctcccttagaggaatctcgtnctgagattcgagtccggatccttaagggtgaggaaaaggttatggcttgttttcatggcgtgggtttgttactaaagtcctttaaaacctgctcttcgaatgtcattctctttgcaactttagaaggaaagcgcttttgatttagttttataacctaactcggtttatgt

SEQ ID NO: 39168 - DNA, 386 bp, Zea mays
gtgcggccagctcgggaccgtctcggccgaatctccacggtctataagccacgccctagccgctagttatccgctctgcgcacccaactcgtgacccaggagatagaggagggagacgagcacaactgtgggcaggatcctgttccaccgccgaccggtgcgtggggctgggttaaggagctccgcctgaaccccctgatcgcgcttgcggcgaacgcagggagggaggatgtcacacccggtttcagaaggcaaaccgaatgcgaactatgtacatgccaggattagaaactcacgtacacagtgattacatagcatagtcatcaagatgttcaagacatccaccaagtctattacatagcatagtcattaatattatcaaactg

SEQ ID NO: 39169 - DNA, 442 bp, Zea mays
  unsure (1)..(442): unsure at all n locations
atactaagcttgtgaagagtattgtggcccttgctgctgactccctgtatcgttattttgagtagagntatgaattgacctaacgcttctcaggtgaaatctttctccgaagcccccggtcatttcagagaacctgaatgcttcctcccttctttggcgaaagtcattgtcagctcgaatatactcgtccatcttctggagcagcttctccaaagtctgtggtggcttcctggcaaagtattgcgctgaaggtcccggccgaagacccttaatcatggcctcaatgacaatatcatagggcactgttggcgcctgtgccctcagacgcagaaaccttctgacatacgcctgaaggtattcttcgtggtcctgcgtacactggaatagagcctgagcggcgactggctttgtctgaaatacttggaagctggttattaacata

SEQ ID NO: 39170 - DNA, 285 bp, Zea mays
ttttttttaatctgaggtcctcaacggacagcaacagagcaactatataccaagtgggaccatagcaaattatgaccgctcggaagaaggcctcgaacccctgtatttaattttttaaacatgaaaccagccagccgactctttctcagaagggtgaagttaagggggaacctttaaaaagaacaaagtccccaccataatctgcgtcaaacggtaaacaccccgatttacacaagtcggacgtacacagcaaactcctgcacgtgtgaaacaagagcctaagcc

SEQ ID NO: 39171 - DNA, 336 bp, Zea mays
  unsure (1)..(336): unsure at all n locations
atctgtnatgcgcacanaatcgncacagagcatattccgtgtcttatttctaatgtcatcgatgatgagatctctactagtgagttatacactctacagaggttgcacatctttacccacgaatcgtgttacccatttgccacagggttgatcggaccccatacacctttaccaaggaagagaggcagggttccactacaaggcctttatcaagatccactatctttagaaaacccgctatagtttctaagaagctctagtgcagggatccctcgcctgaccaccatcgcagttaaatcaacccaaggaccttcctacactgaccactcccctaat

SEQ ID NO: 39172 - DNA, 449 bp, Zea mays
  unsure (1)..(449): unsure at all n locations
agcttcttcggncaccgaagctgaacaggctatcttgttgccaaaaactgcagaggtggccgaagcaccatccacagaaaaaatggaagaagcgaaaaagccgactaaggaaaaaacattataagttttgagtcctgcagtaaatattgaaacagcaaaaaaccaaaaggggccatcagtgaccccaaaaaggaaaagaatggtaaatgtactagacgtcttggagacaattaagtcttcaagcacaattccaaaaaagagtgttgaagttgctgaagcttctactgaagcttctgctcaacaagctgaagctgaagctgggccttcagagccctacaaggagcaaccttttgaagcctgaacaataaaaattccagaaccagtattatgtgaagaaactgacgccgccatccccgaagcacctgccagcatgcgtgattacatgatac

SEQ ID NO: 39173 - DNA, 329 bp, Zea mays
agatcacagtgcacaagagctattttattgattgtccggagtggctggtcagaaagcgtgcaaaataagtttgcggtatggccgcatttatacgcttgatgcgttgaaagttgaaagaccccacttgtcattgaatggtgctattctagctaagggaaggtgttatttcggaccttctgcatagagccttcgttcatatcgcaatctgaatttattatttcaaacaaattaatattgcgaggggctactgttgggggccttcggctttcgaaggtcctcaaaaacatgatttaacaatgtttctggagtataatgtgtgaacaggtatc

SEQ ID NO: 39174 - DNA, 270 bp, Zea mays
cttccaccacccgctgaataatagtggccacagggaaagtgaacgcaaacttcccatagacaacattgccgccccgccgatgggggcccaaacccaaaatggaatcgcagacacgtgtcccgccgcaggggggcacctcgactcggatattaatcgtgctcacacaagccacggagggtgttcatacttcggcactcgaacctagaacttttcacgatcaaggtgtacaaaacagctaacttcaagggtaccgtggggaagctcacccaa

SEQ ID NO: 39175 - DNA, 390 bp, Zea mays
  unsure (1)..(390): unsure at all n locations
agcttcattgaggaatacagatgattcagtgttcatgataatngacctctttagctgaagaatcttccagatcgcaggaaggaacccactcgactacaagttttctttccatagcaactgatgcatgcaaaagagcctgtaataaggttaatttcgacaagttagtcagcacgaagagtaagattgtcatggtgtgcaacttagttgtttgttctgctagcaagaaagagtattccagacacaactccattcaattaagagcataaccacaatttaaacaagcttcaaactgaaaacagcaccatgtaagaaaactgaaactcttcaagcaggttccagtctcttctcaattcctcaattctcatttgcacctcgttatggtaagtttat

SEQ ID NO: 39176 - DNA, 465 bp, Zea mays
tcgagcaaatccattcattagcattagaagtgatagcgtttatctcacggccaccaatatttccctcactgccattggaccaaatatgcatttctgtggctgccatttccgtcacttgcaaattgcaatttgcaaccccgttagatgatggtatggaaaaagccttttgctttcactctattttcaagtcgcaagccatctgaagctctgaacgctcgccatcgggaatcagctaagcctgcgctacaaccaaactaatttcagatgtaatattacgtaaacatagatgctaaactctgatttactatggatccatatgatattgtagccactacaacacaacgagacacgagactacaggaaatgattacagtagctagctagaaatacacagttagacactaataaaaatatctctattgtctatacgaatcttatctatagctacaacacactactggagaa

SEQ ID NO: 39177 - DNA, 418 bp, Zea mays
  unsure (1)..(418): unsure at all n locations
ngcttatgttgagaaaaacacatctctccgttatcattgnngaagngtataagtggattatttaccttctcccaacaacttaagcttttgggtcgaatttgttattgcttccactctaacatgatatcaaagccagaggtctcgaattcgaatctcgataaaggctttatttgtctctgcccctttatttccatgtttgggccttcctctctggctgcacgtgagtaggtgttgaagtgtataagtggattgcctagtgcctaccttttcccaacagcttaagcttttgggttgaactggntagtgcgtccactctaacaatcaccttgcaatccaagtatgcttgtttatccactctttntgtgacgacaaagtcaatttaactagagtgttagccactactataggtcaccaaatg

SEQ ID NO: 39178 - DNA, 334 bp, Zea mays
gcagcactcgaaaaagaaaacaaaattttattccaccccaatcccaagcagacctacgaacctgcccacttaaaggatggggagcactccgatccgggggtaactcctgagaccccaacaaagggacagggctctatgtgtgcgctgaacagtgcaagaatgacgaccacggtgatttggagaaccttctctactaccttcatatcttttacctctaccaacactgcctacttctcttgtctccactgaagatcctacaaagagaataccatcgtatagaggagaaaaccagaggctatgaaccatgtgcaacaggcttcacaccaagaatcac

SEQ ID NO: 39179 - DNA, 378 bp, Zea mays
  unsure (1)..(378): unsure at all n locations
atcctctnagtcacctgcggcatcaagcttanngaaaaatactgcttaatcttgttactgnggtgttcattaattttaaacaggataaccactaggttagggtctccactatttttttcaaccctggtctaacaatatttccattttccctttattaatggactatgtgcagttttcttatttaattcaaaactctgtaaaacattacaggaactggggggtttatgatttttgcctgatagtctatatttcacaaagtctaacaaaattggtctgacaaattttggatgattattcttcaagttatgcatttattaagttctctgcaatatttaaagaataataaattcaaaaaggaaaagagttacaggtttgcgc

SEQ ID NO: 39180 - DNA, 411 bp, Zea mays
  unsure (1)..(411): unsure at all n locations
atcattagaagccttgtgagaggtgggttgtttttgaccttgttgataactagaacctaaaacccccctgccctttgaaatcctttactgactccggaaaccgtaagttgtcggagtttcgtgaaggaaagttgtattcaagacttagataataaacctttattatctttgcactctcatgagcattacatggcattcattcttatatatatatacctatatggctatatttagaaaacaaagaagagattgaattgaccaaagagaagacaccaccaccttcggattctcaggtcaggaattgtttctacttcgatatctgcgggaccgagcctgaatcacctactaacgaaggcaagccccggtgcatttgccaccttccttgatgtnttaaacatcttctcacttgat

SEQ ID NO: 39181 - DNA, 317 bp, Zea mays
tgacatctgttccctggtggaagccagagcacttctttatgtctgggcatctcccattatagagcaggctcctagcagaattaacttttttcattctctatctcatgctcatcgattatagcatttagttgagctatgtgatcattttgttgattaattaaagctatgtgatcatggattgcatcaacattaatgtctctacttctactactaatggaaacatggctaaccggcgatgtatagagcctgcaagcatttaattcatcaatcttagcatgtagcatgacattctcatttttaatattggaaataaaaca

SEQ ID NO: 39182 - DNA, 304 bp, Zea mays
catcccaatagacggctccagagaacactctaaaaggggagcatgtggtcaaccaccaagaatctaaccaagcggctagctttgaaccatgaacaattcactctctctcgaatattcaacatccattgcgcttctttcttgagatgacccaaaaaagctcggcatgaatcaatacattctacgaacctcgggcagtgaatcgatgaattggaggacagaccgcttttactaggtaatcttgcaggggtcttgggcaatcaagaccagcccgtgactcaatgaggaagggaaaaggggatagcta

SEQ ID NO: 39183 - DNA, 244 bp, Zea mays
  unsure (1)..(244): unsure at all n locations
aagatggacacatctacattagtgaatagacagntatatcccatattgcataattggctaacagataacaaattatatctaagagactcaactaaaaacacattataaatggagtgctcagatgaaatagcaattttacctaacccttttaccttgccttgattcccatcaccgaatattattgaatcttgggaatccttggttttgacttaggagggtgaacatcttcttctccccgtcatat

SEQ ID NO: 39184 - DNA, 464 bp, Zea mays
  unsure (1)..(464): unsure at all n locations
tactaagcttntaataaatatcacttggatgtatgtatagtatccttagttataacaatatatatactctgcgtactaatgcatattcatttatgctttcagaaattgaatatccgctgtattccttatgatgttattgtctcaacttggataatgagcgatcggcagcgtgatgcagtcgctaggttgggattttccagcatatttgaattgcgaactcatgccttagagagcagatctctcatcaggtggttgatggacaaattggatccacatgacatgaccatacgcccaggggctggcaaggaactgaagataacaaaagagacagttcgtcttattttgggtttgccatgtgctggagggggcacgggagttacttgatggtatggtgaagtggatgctgctgcaaaactgagacgtgatctcaaaatatgcanagaagaatttgatgttgtcaagct

SEQ ID NO: 39185 - DNA, 390 bp, Zea mays
ggaaccagagggagaagaagaagaactattagaaggctaagggcgaggcacatctaggaaaggagtgggattcggattgctccttctccgactccgacaatgaaggactcgccgccaccgccttcaacaagtcatgcctcttgcccaacgagcgttacacatgccttatggtaatggagaagaaggtatgtactcgagactctacttatgcttcttcaagtgaggatgaatctagtgatgaggatgaaatagattattcatgtctatctaaaggcctagatagaaccaaggtagataaatatatgaaataattgatgcctgtatgataaaacatgcttctaacaaacaagaagattggtgatgaaaacatgacaaattgtaaacacaaaa

SEQ ID NO: 39186 - DNA, 450 bp, Zea mays
  unsure (1)..(450): unsure at all n locations
atccttaagncacctgcngcatgcaagcttagctgacgccaggaaacaatcatgactgtttctaactcagttccaaaataggggattctgaacctggacaacacgggtaagtagtagacaaacaattttatcaaacaagtcatcactgtatggttgttttaaccagctaaggttaatgaatgaatgaatgtttagtctaaaacaaattatattttggaacggagggagtagatagtatcagaacatctttccccctagacatggtatgtactaggtttatgttactataaagctatctcattcgtcattccctatcccaccttctattttaaactccactctaaacaatactatttacaatgcaaaacaagtgtttacacgacgattgctggacacagcctaatgcctaccatgcaactcgttcacatttgtcgcagctgatacaagaaa

SEQ ID NO: 39187 - DNA, 398 bp, Zea mays
  unsure (1)..(398): unsure at all n locations
tactaagcttaccaatggactaagagtgcttcctcatggaccattattgtatatgctatgncgaacaacctctcggctatgaagattgtgagtaccctaactatgtttacaaactctctatagcgctttatgggcttaagcaagccccaagagcatggtattaatgcctaatagattttcttatcactaatggcttcaaagtcggaaaagccgatcctactttatttactaaaacacttgcaaatgatttgtttgtatgccaaatttatgttgatgatattatatttgggtctactaacgaatctacatgtgaggaatatagtatgatcatgacacaaaaattcgagatgtctatgatgggggagttgaagtactcttaagaattcaagtgaagcaac

SEQ ID NO: 39188 - DNA, 366 bp, Zea mays
tctaaaaggagaacacgtgataggtctaacaaatgttactttctaaaaagatagaccttgtgcagcttgtcaagcagggaaacaggtgggaagctctcatcatgcccaaaatatgatgacaacatcaagacccctggagttacttcgtatggacctcttcggacccgtcgcctatctgagcataggaggaagtaagtatggtcttattatagttgatgatttttcccgcttcacttgggtattctttttgcaggataaatctgaaacccaagggaccctcaagcgcttcctaaagagagctcaaaacgagtttgagctcaaggtgaagaagataagaagcgataatgggtccgagttcaagaacct

SEQ ID NO: 39189 - DNA, 131 bp, Zea mays
  unsure (1)..(131): unsure at all n locations
agcttgccacatatggcagcagcatgctctttgcgttttcttccgttggnagcgacgcccacacacatttcaagcacagtgccatatagcgatacatcacaataatgaattggatagggacttcaccatga

SEQ ID NO: 39190 - DNA, 370 bp, Zea mays
cagctggggaccaagaacccatccgtagccagccggaggatctctctgtcatagcccagcggcctccggatggttcggacccgcgcaggcaagcccgaaacctcagactcccggtcttacagcaacatcgcggtgcgcggaccaccaccatcctctaggggaacattctgacaaccctgtggatgttcgcgtacgactatctgcgaccaccaccatgctcaccgccactgaaaccgccgcaatgtataagaacaacggatcctctggctctggagctaccaccatcggcaaggacacaaggtgctgcttcaactcttgaaaggctcgttcggtctcttccgtccacgagaaagaccagacttctgcaaca

SEQ ID NO: 39191 - DNA, 370 bp, Zea mays
  unsure (1)..(370): unsure at all n locations
ggatggactatcacaggtcagaattcagatttactttggtaaagcgacaatgcttgccactttttcttaaacaagtgaatggggtatgaagtgggatgtttaagactctggtctcatgtacatttgtcctcaacttgtgttgtgggggttacagccctgggcaattcctttccccttatatataaaaaatggggacctcatgtttaacttcattntaacttactcnttgctttaactggatattaactttttggcttgtatgaagatctatatagctaccctaagattattctcatgtgactgattattcactgaaatacttgttaattggcagaatggatttgcacctagaatgcactntctgaaatgt

SEQ ID NO: 39192 - DNA, 133 bp, Zea mays
gtagccacgagggccgcagggaggcggacgttttttatggagccggccgaccgaaaagaatggcgccacaccacattgctgggcctaaacaccacaaaaactcaccgtggacaagagaggaacaccgacacac

SEQ ID NO: 39193 - DNA, 388 bp, Zea mays
tagcttgaagtcttgcagatgctcccaatattatctgtctctgatcaggctgtacactcgatcagaacttcccacaccccctgagtcacccttgcacagaggactatctctggtgtatggaatactctgccgttgaggagcattggcaaatgtctaactagagctgtaaacatgcctatgaatgtgttgattttagaaacgaggaacacatcatgtattctggcccttggatgaagctcgcagttgtaggagacagagcccaccctcgatagcacttgatatggcccagaaaactttgggccgattatgatgggtgtagcataagtgacaccaactgctgcgcgctgatgaaagcgcatccatacccaatcgccctcatggaactcca

SEQ ID NO: 39194 - DNA, 483 bp, Zea mays
tcgcatctctgaactaactcggctgcgtcgatcttcgccgtttgtcaatagaatcctgacctgaagaccttcccgactagtgttctggaggctgcatgtattccacattgccctgcatggacctcctccagaagttgcttcccagtggacgggagaatgcacttcatgagaacacctgatgcaccccttctgtataatatctccccaatgagtgtgtagtgagccgactgtctggcaatgcgctctgccgagttcttgtcgtctggatcttcttcgttctttatgtacttaatgattggcctcctccagtcatcagagtctgactcgggttgatctacgatgttgcactctttctgttggtctattgagatactcggtcgtgtaatttcttgcacgaaaactccgggtgggacctgagttcgaccggatccgagcttggatagtgtatcagctgctgtgttacgatcccttttcacatgatga

SEQ ID NO: 39195 - DNA, 422 bp, Zea mays
  unsure (1)..(422): unsure at all n locations
tatggctcacaaggaagngataggacagatggtgagctctgttttcataaaccaaggccccctacgacaagcacggagaacagcgcgccctccacacccaatgcgcaaccccgtagcaaccaaatcgaccgacgagaagaaacaatagtctacacccagtaggctccccatcgacgccttcaagctcgacaacgaagaaatggcgctcatcataaagagcttccgcccaatcctcaaacaaaggagggggaatgagtacaaaccccgctccaagaaagtgtgctacaaatgtggtaaggccagtcatcttattgctaaactgccattatctagtgaaagagacaggggcgacgacataaacggaaagatgaacgaaaagaaaagatactacaagacgaaaggcggcgatgctcatgtatgcc

SEQ ID NO: 39196 - DNA, 365 bp, Zea mays
  unsure (1)..(365): unsure at all n locations
agcttacaacataactgttccttctttcaatctctgaaggatattatgaggaaccgagaagctactggaaggattggaaaatgggctgcagagctcaatgaattttgtattgaatatgttcatagatcttcgattcagtcccaggcgttggcagacttcattgctgactggacgccacgggctcaggaggaggaaaccaataaagacaacgaagcctggacagtgttttgtgatggatcttggggaaccttcngagcangagcagctgctgtgttggtttcacctttcanagtcaaaacttgttatgcggcaaagcttgattttaattgcacaaataatattgctgaataccaagcattgattct

SEQ ID NO: 39197 - DNA, 302 bp, Zea mays
  unsure (1)..(302): unsure at all n locations
tggtcaagcatatttggtacccatctcttgatgggtccatctttgttagtcaacaaagatctaggaacccaaacgtcctttgtgttagcactaggtaaactcattacctttctagcacaagttgcaattntgggttgcctagttacatgagaattaattgacaagctatgagtgggatagttaccattgggacaatccttgcattgatgtcccttctttcggcatatgtagcataggcgatcttcaagtcttgaagatttcttccttccttgtttcttgcttgctacatggttagtgaatat

SEQ ID NO: 39198 - DNA, 436 bp, Zea mays
  unsure (1)..(436): unsure at all n locations
agctnntaaaaatctggtatgaatcggtggttataaccagccagtccaaggaaacttcggacttgatgtacagtggttgggggtttccactccaaaatatccttgacattgctgggatccaccgcaatccccttggcagataatacatgtcccagaaattggatctgctccagccagaatgcgcacttactgaacttagcatacaattggtgttcccttaagcgcgttaatacgacccgcaaatgccgagcatgctcctcttcattcttggagtatattaagaaatcatcattgaataccaccacaaatttgtccagctcgggcataaataccgagttcatcagatatgtgaagtgggcaggacgcattgtcagcccgaaagacataaccagatattcaaataatccataccgcgtggtgaatgcggtctttggta

SEQ ID NO: 39199 - DNA, 451 bp, Zea mays
  unsure (1)..(451): unsure at all n locations
tcagcactattttcaatcccacaacattattgtgccatcattttaaccactcaaggatatcataagacatagagaggcttcgagctgaattggaaagtgggcagcataactcaatgagtttttcatcgacttcgttcatagatcatccatccaatcccaagcattggcagatttcattgccgattagactcttgccccgaaggacgaggctacctcgttagacgaagctgtctagagatttttatgtgatggatcgtggggatccatcaaagcaagtgctgcaacaattattgtttcactatccaaagtgagaacttcatatgctgccaagctacagtttcagtgtacaaacaatatagcagaatatgaagccctactccttgggctgaggaagctaanagcaatgggcgtaagaagggtagtatngaaatcagacttcccagtcatcaca

SEQ ID NO: 39200 - DNA, 366 bp, Zea mays
  unsure (1)..(366): unsure at all n locations
agcttgngaagattcttcattcctatatgtgctattcggcgacgccagagccagcccatgttagtcttatcaattaaacaagtgtcgaattcagctctatcaaaacctactaaggatagctgaccctctaacactcccttaaatgctactgaatcatcacttcttctaaagacagtaacacctatatccataaaaagacagttgtagcccattttacataattgcgaaactaaaagcaaattataatctaaagaatctacaagaaaaacattggaaatggaatggtcatgtgatatagcaattttacccaagcctttgaccaaaccttgatttccatccccgaatgtgaaagctcgttacggatct

SEQ ID NO: 39201 - DNA, 295 bp, Zea mays
tttgagaaagacaggatctgtagcgcatgcccagcaggaaagcaaagtggtgttcatcattcacacaagaacatcatgacgaccgacaggccgcttgagctactccacatggatctattccgcccgattgcttacataagcatcggggggagtaaggattgtcttgtaataagtagatgattattctcgcttcactcgggtattctttttacaggaaaaatctcaaacccaagagaccttaaagggattcttgagacgagctcaaaatgagttctgcttaacgatcaagaagatt

SEQ ID NO: 39202 - DNA, 479 bp, Zea mays
  unsure (1)..(479): unsure at all n locations
tactaagcttctaaagggagaacacattntaggactaacaaacgttcatttttataattacagggntngnagcgcatgccaagcaggaaagcaagttggtgtccatcatcaacacaagaacatcatgactactgacaggccactggagctcctacacatggacctattccgcccgattgcttacataagcatcggcaggagtaagtattgtctttgaatagtggatgattattctcgcttcacttgggtgttctttttgcaggacaaatctcanacccaagaaaccttaaagggattcttgagacgagctcaaaatgagttcggcttaaggatcaagaaaataagatgcgacaacgggacgaagttcaagaactctcanatcgaaggctttcttgaggaggagggcatcaagcatgagttctcttctcctacacccctcacaaaatggtgtgtgaaaggaaaatcaactctattgacat

SEQ ID NO: 39203 - DNA, 460 bp, Zea mays
agcttctaaagggagaacacattgtatgactatctttatgttcatttgagaaagacaggatttgtagcgcatgccaagcaaggaagcaagttggagttcatcatccacacaagaacatcatgacgaccgacaggccgcttgagctactccacatggacctattcgacctgatcgcttacataagcatcggcgggagtaagtactgtcttgttattgtggatgactattctcgcttcacttgagtgttctttttgcaggagaaatctcaaacccaagggacgttaaagagattcttgagacgggctcaaaatgagtttggattgagaatcaaaaaaactagaagctacaatggaatagagttcaagaattcacaaattgaaggatttcttgaggagggcatcaagcatgagttctcttctccctacacacatcaacaaaatggtgtagtggagaggaagaa

SEQ ID NO: 39204 - DNA, 371 bp, Zea mays
ctgctgactccctcgatcttcattttgagcagagttatgaatcgacttcacgtgccttgggtgaaatcttcctcccaagcccctggtcatttcagagaacctgaatgcttcctcccttctttggcggaaatcattgtcagctcgaatgtattcgtccatcttctggagcagcttctccaacgtttgtggtggtttcctggcaaagtactgcgctgaaggtcccggccgaagccccttaatcatggcctcaatgacaatttcattgggcactgttggcgcttgtgcccttagacgcagaaaccttctgacgtacgcctggaggtattcttcgtggtcctgggtacactgaaataaagcttgagcagtgactg

SEQ ID NO: 39205 - DNA, 456 bp, Zea mays
  unsure (1)..(456): unsure at all n locations
agctntgtgcaactctacgctcgcttaagccttgattataatgcggtcatgctcaaacttatagaaagagcgagagagcaagacgaagctcgtcaaaggctagaaagtattctctccatgaagatgcaacactttgacgagttgactaaagaacatgaggagctaaagtgctctcatgttgatttggtccaaaggtatgaaactgtttcaattgagcatgataacgctttacattgtatcgctcaattagtaaataggaataccttgcttaaggaccaagtagaaaagctaaaagttgaaaatctagcttttcaagaaaaatatgatatgcttctatgttctcatgaaaatcttatggatgatcatatcatattaaacattgctcatgaggtcgtgatagaaaacttaaaatcccacaacctcactcatgcacatgtattccaattgatactatat

SEQ ID NO: 39206 - DNA, 237 bp, Zea mays
  unsure (1)..(237): unsure at all n locations
tctaggcgcagcatgctcgactataatttttcattggtcgtctttttgtatcttggtcctatggacagttttatttatgcttcgtgctggccaccatagggtgttttttgtactggtcctcttggaccttaatntcccttcttaatataaagatgcgcagaagttntatttatgcttgttgctggccaccatagggtggtttttgactggtcctcttggaccttaatttcccttctt

SEQ ID NO: 39207 - DNA, 415 bp, Zea mays
  unsure (1)..(415): unsure at all n locations
agcttgcagcatcacgcacgtccgtccgctagttatcgagctctgctgccaccacgaagaagcctccatatacgttttcccagctggacacacacacacacgcatgcatgcatgcgtacacgaggggagagcatatatcagcagcatgcacatgtatgtatgtatacatacaagctagcgtacgcgcgcgcccggaataaggctcgcgggagaggccgccctcgtgagcgcgcagctntggcgccatccctcccgtgctcgcatactacaggcctcccgtgatcagccaggccagagcaccgccccacggcccgcagagcccatgcacgccggccgcgagccgcccgttgctaggtcaggtggctggctctggctccatcatcanggtgagggtcgcatcttgcttgctggatgc

SEQ ID NO: 39208 - DNA, 384 bp, Zea mays
  unsure (1)..(384): unsure at all n locations
tactcagcttggtcaaacatgagggcacagagcgacccatggttngcagaatatttgttgcgcgtcggtggtggaactgaggaagccaacaacgatggtgatgttcgtcttccagatgaggtatgtgtgccatatactggtaatgatcacgaccttgatagactgatagatgacatttatcccaatctaaatgaaaacatgtctaacacaagctacatcacttcaagagcaatattgtctacacggaatgactgggtggatatgataaatatgaggatgatcgatcgtttccaaggtgagcagatgatgtaccatagttttgacaccgcggtggatgatcctaataactattacccattggagtttctaaacacgctgactcct

SEQ ID NO: 39209 - DNA, 384 bp, Zea mays
  unsure (1)..(384): unsure at all n locations
taagacacctgangcatgcaagcttgtgaaggttcttcatccacacaagtgtttatcggttatgccacagccagcccatgctagtcttagcaatttagcatgcatctataccggccttctcttttgcaaaatcaactaaataaaggttgtcgtctaatacacccttaaaagctagggaaccatcacttcttctaaagacagacacatctacatttggaaatagacaatcgtttcccatattgcatatattgactaaccaatagcaaggtatatcccagagactcacttaaaacacattagagatagaatgctcaattgaaatagcaatttatctaatactttaccttggcttgattccatcaccgatatattgaattttggaat

SEQ ID NO: 39210 - DNA, 447 bp, Zea mays
  unsure (1)..(447): unsure at all n locations
agctnggcttccgttggcagagatctggtatttatatcctttcacactgcgttggggtgttctcctttcaaagctttatatggatatgaacctccttttgctgcggcaccaatgctctctgcggatacaaaccaggatgtggctcagttgcttgctgacaggagtgccttttctagcatgctgcaagagcacttggctgctgccagaaacaggatgaaaatgcaagctgatcgtgcacgcactgaaagacaattccaagtgggggagatggttttgctcagacttcaaccgtatgtccagccttcggttgtgaatcgaccgtgccccaagttagccttcataatttgtgtgccttacaaggttatggagaatgtgggcgaggtcgcatatcgtctggagttacctgctgatgcccagatacacccagtgtttcacgtctctcaattg

SEQ ID NO: 39211 - DNA, 305 bp, Zea mays
  unsure (1)..(305): unsure at all n locations
agcttgagacgggagaaaccgcagcttgtgtttatctccataagaaggatgntcctgaagcaataattgaagcaatcaatatgaacaaggaaaaagggtaaaattcaattagtcatgttgtgtgcactgattgtctctctatgtcatccaagagcaaaaagggaagaggaaaaagaaggtgcttcaagtgcaaggaattatgccacttcattgcatcttgtccacatatagacaaggatgaaggaacgaggagatgctttggatgcaacgataaagaccatatgatcacttcatgtccgctcatg

SEQ ID NO: 39212 - DNA, 364 bp, Zea mays
  unsure (1)..(364): unsure at all n locations
tctcgtattagggatgatgagcatagtgcgccgcgcatctatgttgcactgtntgacgatggatcggacatgcgcgccgtctgcgagatggccctatctccgcctgccagtggagtggacaggacacattaaatgctgagggggcacatcgcctgtcaacagggtggacaggctgcccgttctctccacaataaatgcagagaccgcgcggcctagaggccttacgtcaagctccgatcgctggcttatgtcacgggcaacaagccacatggcaacaccgggctccgcctaaacggtgagcgcaagcgcacaggataaggcctatatacctgttagtacctgacccttgcttatgccagggtct

SEQ ID NO: 39213 - DNA, 367 bp, Zea mays
agcttctaaagggagaacacgtgatatgttttattaatgtgcaattcgaaaaagatagaccttgtgcagcttgtcaagcaggcaaacaggtgggaagctctcatcacaccaaaaatgtgatgaccacatcaagacctttggagatgcttcacatggacctcttcggacccgtcgcctatctaagtataggaggaagtaagtatggtcttgttatagttgacgacttttcccgcttcacttgggtattctttttgcaggataaatctgaaacccaagggacccttcaagcgcttctaaggagagctcaaaacgaagttgagctcaacgtgaaaaaaataaggagcgacaatgggtccgagttcaagaa

SEQ ID NO: 39214 - DNA, 307 bp, Zea mays
  unsure (1)..(307): unsure at all n locations
tttttgaatgctgngggaacttcacacctactcggctgtttatatagtactgcaggtaacaaggcgaagcgacagaatatttacaccaagcggacacccgcttgctctcgctgtgcggtggaccgcagagaccaaacagtaactctgcaaggtgggaccgctacgcgcttggaaattgaatcgtttctcgacaacgagctcagggaaggtgttttttggagcttcggctccccgaagcttaagaatttttttttcacggatcaagctcgttacgaaaaacaatctagcaccgcgaaaggggctacta

SEQ ID NO: 39215 - DNA, 362 bp, Zea mays
  unsure (1)..(362): unsure at all n locations
agcttgcgctntagtgtacggaccattctatctgaaagtgtcggctaccttctcgtgctgacaggttgcaacatagagctccatggtttcattgaaagagtgagggtccaattaaattgagacgggtgtttcatatatgttgcataattttatctcattctataagacattgcagtcttgtaaacaacacaataaaatttctcgtttagtctgtcctaatagaacagtcaagatgctagggcccaatttaaagtgagaatggcgaagacatctactattatttgttggtaaaaacacaattgaccgaattagcttaattgtaggtggacgacgaaagtgagtctcagaattattccacctta

SEQ ID NO: 39216 - DNA, 447 bp, Zea mays
  unsure (1)..(447): unsure at all n locations
tcgcatctctgaactagctcggctgcatcattctttgctgtttgtcaatagaatcccgacctgaaaaccttgccaactaagggtnnggatgctgcatgtattccgcactgccctgcatggacttcctccagaagttgcttcccgggggacgggagaacgcacttcatgaggacgcctgacgcgcccctccgatataatacctccccaatgagtgtgtagtgagctgattgtctggcaatgcgctctgctgagttcttgtcatctggctcttcttcattctttatatacttaataatcggntgcctccagtcatcagagtctggctcgggttggtctatgatgttgcactcttccctttgatccatcgagatgcttggctgaaggatttcttgcacgaagaccccgggcgggacttgagttcgaccagatccgagctntgacagtata

SEQ ID NO: 39217 - DNA, 454 bp, Zea mays
  unsure (1)..(454): unsure at all n locations
agcttgttagcaaaggaaaaatctgttgtttttgggaaacgaaactcttcatccaataatgacaatagccctagatgtttctgcgatgcaacaaaaggtgactacagcagtacatatacagatcttagaaatctaaatagtacagcttataatattaatatgacatgatatcatgataaattgataacggcacattttccttcagtgattccacttaaacaacagtcactttcttttttagtcatatatatagaacaaaacatggagtaactccacttaaggatatttccacctgttccaacttttgtttcacattntgtataggtaggcgcttgtttccactgtaatagctcaaaaagtaaagcattctagtaacttggcataactgaaagggcanagcacagaacatttgcagatcaagataactattangggtgaaaactgtatatactac

SEQ ID NO: 39218 - DNA, 415 bp, Zea mays
  unsure (1)..(415): unsure at all n locations
tgtgaagggtcttcttccncacatgtgctaagcggcgatgcttcagccagcccatgctagtcttagctattaagcatgcatctagaccggcctcttcttttgcaaaatcaactaaataaagtttgtcgtctaatacacccttaaaagctagtgaaccatcacttcttctaaagacagacacatctacatttgtaaatagacagttatatcccatattgcataattgactaaccgatagcaaattatatcctagagactctactaaaaacacattagagatagagtgctcattagaaattgtaattntacctaaccctcttaccttgccttgattcccatcaccgaatatgattgaatcttgggaatccttattcttgacgtaggaggtgaacatcttcttcgtccccgtcatatg

SEQ ID NO: 39219 - DNA, 384 bp, Zea mays
  unsure (1)..(384): unsure at all n locations
agcttgctcaacaactctatatttttttacatcaaaagttattaagggttcatgtagagagaatgccaagaaaatgtcgagaaaataccccgattgccttaaaatataatttgaagctttataatgatgctaccttgaccaaacttgaacatttaattatatttaagatatgaggtttgaactttaataaaagttatagaacatgtgttatacaacaaantttataattaaaccaagccttgattcaatatctaagtatctcaaacaggggcatcaagacagaataacaatatgatttcaggattcgaattcttcaaagtctggaatcagtgtagttcgggtcgacgtctcgcgttcccaaatttttgttgaacaacctcagtt

SEQ ID NO: 39220 - DNA, 346 bp, Zea mays
caaaatgacttgagcattagaggagttgccttggtagtttctaaacacttagtgcgtgatctctcgttgatttttaatccactagaaaggatatgaagagacctttccaacaagggcttatttgttttaaacaaccatgggagttgaaagaatatgccctcttaaacatgcacttgccgcaggtacacaaatcatgtagggtgcaactgcgttttattggcttgtgacttctacacttcaagatggttcacctcccacacacctgaccataatatattcgagcaaggctgtatacctctttaaagaagaatagcttagagatagcttcacagcaataaagagttac

SEQ ID NO: 39221 - DNA, 460 bp, Zea mays
tgcggcatgcaagcttaacgcacaagtcgaagctcacaaagtctattgtttgttgattacagaaaaaacttgctgaaataaatgaaaatttcgaagttgcgaaggctaagcaagaaataagtgaaacagaaagagccagggtgcagaagaatattgaagaacttcgggattctaaagaaagatgctatgaagtatccatggaatgcgcgaagaggctggaagatagcttcgcaaaggtgggagcatattaatcagagcaaaattttatctgtggtgatcccgaaggggttatctagtggatcggcaaagaggtcgaagcctttgaagaaattctcagcgaccgtggagacttttgtgctttcgccggtgcgcgagggatttgcagcaatttggaaaaaactggctgcgaacatgttaaggctgcagcccaggcagaagccatcctctcagcagacgacac

SEQ ID NO: 39222 - DNA, 460 bp, Zea mays
  unsure (1)..(460): unsure at all n locations
ttngaagagatcctcagtggatcgggggacatttatgcctttcccggtgctctaggggntgcagcaattctggagaaggctgtgtgtgaccatgttaaagctgcaacccagaccgaaaccgccttcttcgcagacgacacaagagacccctcggccgaagctactctagtgggcggaaaaatttattccgatgtctgggtgaatggtggccgagaattggccaaagaaatcataaagaagaatgaaaaagaaactcatgatgcttgagaagaagctaaacgagccaaagaagctgccgagcgcgcaaggcgtataggtattattcttgaatttagcttcagtggttatattctggcttcggactaactggttgtctactacagctgaactctcaccgctgctcgagccatatgaccactatgccgatcccgtcatgaaagaagcgcttgacgtaatgagc

SEQ ID NO: 39223 - DNA, 441 bp, Zea mays
tgggcttcgatatcccttttttattttgttatcgaggcacagaaaacatttcaaatctttctgcatcaaattactcccgaaaccatcataagaatgggagtgtttgtctgggctgcgaaaagccaatgtttggaaccaaacgctaaaagcttctgcaatattcatgagttattatacgagacgaagcccttgggaaaagagcaataccacaacaactttgggtgctacagcttcggcgcccgctccgggtcaagctgccctgtgccaacctttcggaagaggtggttcggagctcggatgactgaatggttttatgttaagaatgaccttacgactcaagagaatgtgaagagtatcattatgcgaccagtctggcaacacttcggtctttgaaggccgaatgtcgaatggacgaacttgcgaagatgccaaaggcctttg

SEQ ID NO: 39224 - DNA, 459 bp, Zea mays
  unsure (1)..(459): unsure at all n locations
tatgttaagagaacacactncccaagtaaaaatctagcttgtttattctctcttgagaggacaaagtcaacttgactatagtattggtcactaaagtcaccaaatgggtntctcacttactaaagaaaatgatggctatgtcaaaagctaccgcaaagtccatgactttctctccctcttgcttcctactactatacccaaaatctccatggaccgcctcaaaacctgcacttgctatacctatatgcccattaagatctcttatgaaaagtttctcactgataggtataattctaatcatgccatcaaagtttttctagaaaagtctcttagcactctcatcatgtctacaagttaattacgcttaagaccaaatcattcatgacaagcgngactaaagtgaatctatctccttgctccgaccctatatatgattttatatagcataccacaatacca

SEQ ID NO: 39225 - DNA, 450 bp, Zea mays
  unsure (1)..(450): unsure at all n locations
agcttcataaatgaaatttcatttggaagccttctgtttcacatcatgtgcacagnttgaagatcggaacacatgtcatgagtccacagagcatttaagaactcccaatctgcctcaaaactctgatcgatgtcctgcgacttcatcaatataaggaaatcagttgtaaacaaggagatgaaccttcatacagtgtcatagagatatcccaaattaaggcagcatccagcattatattactacctctatttctatgccctgaaggttgcgacagctccttagcaaggtaaacatgaacaaaatggagtccatttcaccgaagttcagacataacttcaagttcttcaggttataaaaggtgaatggaagtgtgtaccgcatgttaacatcggcagcctgtgacaaaagtggataaagccatacagggctagaaatatgatgggattctgc

SEQ ID NO: 39226 - DNA, 448 bp, Zea mays
  unsure (1)..(448): unsure at all n locations
tatagaatactaagcttctatagggagagcacagtttatgactcacaaatgacatttttttgtatacaggatatcgancgcatgccaagcatgagagcacgttgggtcccaacatccacaccagaacatcatgacgaccgacaggccacttgagctactccacatggatctattcgacccgattgcttacataagcatcggcgggaagaaggattggcttgaaatagtggatgatgattctcgctgcactagagtgttctttatgcaggaaaaataccatactcaagagaccttgaagggattcttgagacgggctcaaaatgagttcggcttaaggatcaataaaattagaagcgacgacgggacggagttcaagaactcacaaatagatagctttcttgacgaagagggcatcaagcatgagttctcttttccctcactccacaac

SEQ ID NO: 39227 - DNA, 292 bp, Zea mays
agctttacctagttgatgttgcagaagaagatgcctttctatacgcatgcttaatggctaagacttgcatgggctggctgtggcatcaccgcttaccacatgtggggatgaagaaccttcacaagcttctaaagggagaacatgtgatacgtctaactaatgttcatttcgaaaaagatacaccttgtgcagcttgtcagcagggaaacatgtgggatgctctcatcacacccaaaatgtgatgacaacatcaagacccctggggctactacatatggacctcttttgaccc

SEQ ID NO: 39228 - DNA, 457 bp, Zea mays
  unsure (1)..(457): unsure at all n locations
ctcgcgcaactctatgctcacctaagacaagaagataaggcggttatgctcaaacttctanaaagagcgagagagcagggcgaagctcgtcaaaagctagaaaatattctctccatgaaaatgcaatgctttgacgagttgacttaacaacatgaggagctaaagtgctctcatgttgatttggtccaaaggtatgaaactatttcaattgagcaagataacgctttacattgtatagctcaattagtaaataagaataccttgcttaatgaccaagtggaaaagctatatattgagaatctagcttttcaagagaaatatgatatgctcctatgctctcatgagaatcttacacattgccatatgaccataaacattgctcatgagggtgtaatataaaacttaaaattccaacaaccttcctcatgcacatgtcgtcatattgatactacattac

SEQ ID NO: 39229 - DNA, 233 bp, Zea mays
cgagctcagcccgaacaaaagggaccaagaatagccgacccgcaaacacaccctgaaaggctactgaatcatcacgactgctaaagacagggacacccacaacaggaaaaagagcggcgaacccatcgacacgggggaacagaaagaagcggaatctaaagaagcaacaagaaagacaggggaaacagaaggatcaggagagagagcaagctcaccaagaacctcgaccaaac

SEQ ID NO: 39230 - DNA, 392 bp, Zea mays
acttctttccgcctgatatggtgaaagaaactgaagaacaggttcagaggataattcatactttgaagaaagcccaagctcgtcaaaagagatatgcagacaaacggtgaatgcccttatactttcttgtgggagactatgtctacctgaaagtttcgccaatgaagggggtatcacgttccggtgtaacggaaacttgcaccccggatattggtccattccctatacttgagcaatgtggaccagggataccaactcgagttacccaaaccttgttgctggcataatgtgtccagtgtcacaattgaaaaggtcttgggttccgatcgaaccgtgagtgaagatttgccttgaccggcttgacatatctgacacctattgagttggatcaa

SEQ ID NO: 39231 - DNA, 369 bp, Zea mays
atgcagcttctccccatgtcgctgctagcttagttgttgcagctacctccatcaaggaacaaacgacatgaacgctccttaatgacacactcttgttgaaacaatgtatgtcgctgattctgctctggcttctccatttgtgcactaagcacacgctgtacaatgaggctcttataatgctctgcatcatctgcaccaatctgttcttcgggtgggtccttagtgcctgcatcatcagccgcaagcaaagcaagtgtagcttcatccaaatcactagcagaagaatacccaccatcgtcttttaccaccaaaacacgctgattaggacaatcacgctgcacgtgtccatagcccttgcatcgataacac

SEQ ID NO: 39232 - DNA, 236 bp, Zea mays
aattcgtgtacatcgctccgccggaagcgcccggcaattaaaaaatgccgcacgaacaaaggttaggaaaatattgcactcaaaaaacaaggaatatgcccatggaacttgccttgagcaagtgaaaagaccgcaaaagcaaggctcgcgcacgacttagaacaaatatcaacaatgctcagttgcctgcaaatgaagccagaacataaagccaagggcaaaaagaagttaatgaa

SEQ ID NO: 39233 - DNA, 434 bp, Zea mays
acctgcggcatgcagcttgcatcttgaactactcggtttattgttcttaccggcgccaatagaatcctgacctgaagaccttcccgactagagttctggatgctgcatgtactccacattgccctgcatggactttcttcagaagttgcttccccggggacgggagaacgcaccttatgaagacgcctgacgcgcccctcctgtataatacctccacaatgagtgtatagtgagtcgattgtctggcaatacgctctgccgagttcttgtcattaggttcttcttcattttttatatatttaataatcggctgtctccagtcatcagagtatgtcttggcgtgatctatgacgttgcactctttgcttgatcattgagatcttggctgcacgatttctgcccaaaactccgagtggacctgagtctaccggatc

SEQ ID NO: 39234 - DNA, 328 bp, Zea mays
tgatatgtgatgagcgaatattttttttatcatatgagaactcacgatacacggcccctgatgtgatcttggctggccaatactccctgaagagcgacgtgtacagcttccgagtcgtcttgctagaacttctgactggcccgaaaccgtttgacaggtgaacacagattaatccactgcagcacaccatcctttttctcgcacatttattctgaactgcgctcgaaacatgggaattgttctgaagtaccacaagaacaatctgagacaacttacatgtagttgtagcaacacatacactagtcagcacttgctctctgaacttttg

SEQ ID NO: 39235 - DNA, 346 bp, Zea mays
  unsure (1)..(346): unsure at all n locations
agcttcgccttcactagaccagacgatctatttatatggnggctgagtaatctattcactaggatctttctctggcaaactctggaccggttcctactttccttttttgaccacgattgatccagatctgagtaactactagatgaccagcgaaccacaggcaggacgggtgtcatgatttgcacctgctgatgtgacgaaagagattggactctttgtctggccctatgaatttaaccttccaatttccggtgttatttcttatgacacagtacaattaagccactggcaagcctgaacatggtcatctaaagcaaggctattatgtgcagaagcagaactgatg

SEQ ID NO: 39236 - DNA, 342 bp, Zea mays
  unsure (1)..(342): unsure at all n locations
taatatgcctggccacaagngngtcatcaccggcggccttatattattacacacgttcgaatgcgcgtggagtgcgtggtacacgccgaggccctcgccaaatatgaagccctcatcaacgacctacagagcctctctaatgacgtgccacacgtgaatcgccacgccggaaacttctatccgcggagacagttagaacgtcctctataatcccagcggcgactccttcaagcagatccggatcggctctgagctcgatcccaaattggaagcagtgctcgttgactttctccgcgcgaacgccgacgatttcacgtgtagccctctgacataccccgcata

SEQ ID NO: 39237 - DNA, 292 bp, Zea mays
  unsure (1)..(292): unsure at all n locations
ggcttcattccttagtctgatcacctctgaccgaagggtttcaagtgcaattgcccagctttcgtcttcagcattcttttgtgcccttaatgcattgctcaagattaagccctacaaaaaagggggggatcagcacaataataaaagatacaaaaataatctatttataagtcaaaacttctttaccttcagactgttataagtgaggttgtccacaaggtcatccttcgacattgcagataggccaagctcgagcttcggaaaccctatgntccttgccatctcccgataa

SEQ ID NO: 39238 - DNA, 272 bp, Zea mays
gaatggcacatgtattaacgatgtggcacctgctgccttgggaatggtgcccaaacgcattgcttctacgcgcctggacaaagacgccttgcctgatatcaattggttggctgatccgaggggggctatttctgttaccgcccttgctaatcacatggacctttgtgacttgctagaggggatggctctccacccggatgttcccgacgtgcatgcctggaggttcactgaatctggtgaatactacgctagctcaactacaggactttgct

SEQ ID NO: 39239 - DNA, 352 bp, Zea mays
  unsure (1)..(352): unsure at all n locations
agcttactcctacctaagaaggtttctttcattatcgccacagaatcgaagcccggaacatacaagctggcctacgatcaaggcgatgtctacaacaacgcttggaacatccaacaaccacgctcggtttaaccttaagatgtttcaagtcgttcatatacctcattttttctttacatacatcaaataagtctaaccgtcaaggaaggatcagccttgccttggcaaaactcgaccctccctggggggctagaaggaggaaccgcctctgcgtcaaaattctcctcggaaaattcttctaccaagaaagattntctacccaaacgactttcatgccttcccgactatatct

SEQ ID NO: 39240 - DNA, 351 bp, Zea mays
  unsure (1)..(351): unsure at all n locations
gatgttgaacgagtcttctgagccccgccattnatctccccccttttcggaaggtcctgggcattntcttttataggtgcaatgaggtgatccaactgaacatatgggggtgtaactatgcgctaacgtggatggcacacaacagctgagccctgtacaagcgtggctggcggcgcagtcctaggacccgctgacgttcctttatttcatagagagcctaaggaccgtctacgtcatgggtgcatgcctgcgatcatattaccctgttactgcagtaattgatgtgacaccggcttgttctttgaaccgacgcgctagctagggaaggaaccttgatccatgtccataaac

SEQ ID NO: 39241 - DNA, 333 bp, Zea mays
  unsure (1)..(333): unsure at all n locations
tttagttcctgacagcatgaaatccacgcactctgtaaagttatagcttatatggaaagatattcatgggaaattgtcgcatcaaattaacaggatgagaagaatgtagcctagttacttgtcaacagaccttattgaagcattggtgtgcttctagaactgacttgaggttcatcatgggctcacccatccccatgaacacaacatttgtcaccctgtgtttgaacgtctcctcgatggccaacacctgcaatggcataatatttaacgttgcattgagggatgaagaaagacagatngggtgctgagggaggacctgttcaacaatctcat

SEQ ID NO: 39242 - DNA, 308 bp, Zea mays
  unsure (1)..(308): unsure at all n locations
gcttgtcagtgctcgtctgaggcgcncttgccgaaccaatcagtctgatccttctgttgatgagcagaagaagaanagaagacgcctccggcgagtatccagttttgatcaggacgctggtacctcaattcctgctattgaagaagtgcctgcgactgganttactgacgctgaccccaatgggtgtacccaatccgctgttgatcccatagtgtgtgccccatctgttgctgatcccaatgggtgtgctgcttgtgttgcccatgtggatgatgatgaagaggaaaatgagatttctttgactctga

SEQ ID NO: 39243 - DNA, 408 bp, Zea mays
  unsure (1)..(408): unsure at all n locations
agcttcaaccatgggcaagaacaacaagcgcatgcgttatccgactcctccatcggaggagtttggtgactcggaatactcagaggaggagttctcctctgagtccgaggggtctccggctcccatccccctgcgtgagtcgtctgatgactcagacgactcccaggggcttgcggcagaggtctggacgtacatccgggccgtcgagcgctccgggctcgaatgctcggatgagtcggagtactcctcggatgaggaggactcggacggcggcgacgagggtgaagacgacgacgacgacgacgacgacgatgacgactacggcgacggtgactgcagcggcagtggcacgggcggcggctaccgctacanggacagcaccaatggcgacagcagcatgggcatcac

SEQ ID NO: 39244 - DNA, 304 bp, Zea mays
  unsure (1)..(304): unsure at all n locations
taccgcatggcaagcaggaaagcangttggtacccatcattcacacaagaacatcatgactacggacaggccattgtaactactccacatggatctattccgcccgattgcttacataagtattagtgggagtcagtactatctagtaattatggatgattatcctctctctacttgggtattcttcttgcaggagaaatcacatacccaagagaccttatagggattcttgagacgggcttcaaatgagtttggattgagaatcaaaaagataagaagcgacaatgggatggagttcaagaac

SEQ ID NO: 39245 - DNA, 366 bp, Zea mays
acaccactagatagcatgggcatattagtcttgtctccaccttctaaagaagtaccatgggaccaatcattataactgagctcctacaaatctattccactgctatacttgacaccggtgggtacaaaaaaactgatgggtgaatacatgtggtaacttggttaaccctggttggtcttggcttatgaatctttctaggcctttaattggttttggaggaactatatcatagattgtggctacttcgcggatgcttaattttaatttgcatggagttggacatcgcacaactaacacatgtgggtgaaaaaaattcatgccctatcttgatgttaaggagattgttaataaccagaagtgggatac

SEQ ID NO: 39246 - DNA, 365 bp, Zea mays
ctatgcagcatgtcaatcaaagaagcaagtgggagcaagacatcacaccagttggatattgcttcctggcctccctggctaaggtcctgctataatctctacttgaatgctcttgaataatcccaccagcaaaatgcggataaagtgcaagaacttttctctacccttaatctatttaatctagatttctgagctaacatcacatttgggattcaaggttttatttaatttgtgaatggtaggtgtcacgtgttcaccatgctctaagtgactatcaagaaagctaagaaaaggttcacctatgggagtcgcctctactatagacaccatctaatggtcagtcctaggctagagcatatgtgtat

SEQ ID NO: 39247 - DNA, 443 bp, Zea mays
agcttccacaacaatccaacacacagtggagtatgttattacgttccggcggcccgaaccactctaaactctcgcgtgttcatgtgcttgatgttcgcctaacaggacaggcaaaacacttaagccccttcctcatcttaagatttagggcaggtgcactccgccacccatccggagaattccctctccgacaaagtccattcttaatggagggatgtcttccaatagcgaatgcattcctagcaattttaactttctctgcttcatttttgcaaagtttaaagttgaacatttaattgaacaatttcatcattcaactttgcaatagtagaggtacgattactacaagcattaaaatcatggtctttacatttaacacaaattaaaacatgctcaatggatgaactatcaacacttaatttctctatcatagcattcaaatc

SEQ ID NO: 39248 - DNA, 327 bp, Zea mays
tctcctggacaagtgctgcacttaccgctgagtgcgaagctgtcacatataataacaaaggagcccctggcgttggtggagttaatgttgttaaatctatcaaatattgcttcagttcctcgaaggctttttgtcggcttggtccccattgaaagacttcggctgatttcagcacttcgaagaatggtaaatttctttctgctgatctggatatgaatctattgagagatgccagcctccctgtcaatctttgggcccccttttttgtagttggtggctccattcgaagtatagcttcaattttacttggattagcttcaattccct

SEQ ID NO: 39249 - DNA, 446 bp, Zea mays
  unsure (1)..(446): unsure at all n locations
agcttgttnttacttattcatatattgtgtttgtgttgnttctctagtaccacttagcttgtgtagctaagttattgttgctctctactttagcttgtgtagtttccaagttaagtagtgttagtgtactagctcttagcacgcttagagtactagttgcatatgactttatcaactataattgtttaactaaactgaatactcttaatttcgtattgtttctgattgcgacacaattagctttagaaagtacttgttggggacttgttctcaaatgctaagaattaagaacaaggcaacacaaaaaatgttaagtgttaagatccttcgtcctccataacgatatatcccttcaggatataaagcatctcggacgaanggtacgaaggacataccttcgtaagcataacaacgaagaatgatgcattcacataaattatggaata

SEQ ID NO: 39250 - DNA, 162 bp, Zea mays
acgaaagagcagcagaacgaagaacagtcaaaccacaaccgaggaagcaacagaccacaaacaactagcacacccagagaagaaaccacagccgaccaccatcaacaaacaacccaacccaaaacgcagaaacgaagcccaaaatcggcaaaaacatcaaaa

SEQ ID NO: 39251 - DNA, 378 bp, Zea mays
  unsure (1)..(378): unsure at all n locations
cggcggcgcgcaaagaacgaactatctggtgagccactcttcaataccgtcgacccatgctgtatctagcacctagtgaagctcactaaccctgctagttgatctctactgtgaccgtacactctaagtcattaggcccacctacagctgtgcttgtccaacagactntggacaaccctgcagatgccattatcactcaacaagtttgaatctcgaaccattttcccacccaagagcgtacatccgtccgcagatttacatcaatggacgaacaatatcggagctaatacatacctatttacttatataattaaagaggtattttcctaccggcatagaggctaacttattatcaacttggaggaaaccctccataaa

SEQ ID NO: 39252 - DNA, 247 bp, Zea mays
  unsure (1)..(247): unsure at all n locations
cctaannggaaccctggaaaaccctaaaaccaaaccctaggggcttatattcgaaattagtccactcttggactaaagtgcaaaaaccaagccaaataagtgtcttaagtcctttggttcacaaatatgtggacttgaaagccaaaccctaaagtttggacttaaatgcaaaatggacctcatttgagttctacactaagcccgaaaatcagtggtaaaggctccactttagggctcttgaacttgc

SEQ ID NO: 39253 - DNA, 452 bp, Zea mays
  unsure (1)..(452): unsure at all n locations
taagcttctagatggcttctaattgactgatatgctgctatattccattttgttctagtttgatcctcgacaattgataagtttagatttggtgatagagataaatatcaattaaagatagttgctacattcattttttgaaatagaatatctcacacattaaaagcatgtgccagttaaaataactattctacgaacatgttgtttcatttgcttattttgtatcaggggactgtcaacgatgcagaaataaattccacttaataaatgaaattatagtgcttgtatggtctccccaaaagtagatggcatgtatttgacatctgtgcaagtgattgagagtgattntttcagctcttcctgaatttctcatgtagaacaaaattgttagtcgtgaggtataccgtgtggttngaagggacactcaatgtcctgagtggttctactattct

SEQ ID NO: 39254 - DNA, 296 bp, Zea mays
tttttaagacgtgccagccgaaccaggaacttctttagcaaagaactgagtggcgctcacacttcatgagaaactcattctcacacatgaaactacatgtgattacgcagagaaagtgttcgtcccaacagaattaagacatcgaaatgggctcaccctatagatgcgcatcaagtatttgaatgacctggttagatgcattttatctcaaagacaaataggggaattcaatgaactcttgatcaacgcatataaaaattccaataatcagcctatgtctggtcttctcacaatga

SEQ ID NO: 39255 - DNA, 371 bp, Zea mays
taagcttctctggctaaaggcaagataatgctctctcgtttgctgtcttttatgtgtgactcgacaagaagccctgctcgctatgatatttttttacaaaaacatatatttatcaagcgatgtaaaggatttaaactggatcgactgcatcatgaaactttcatcgattgagggtttgtccttgatttttcatattcatatagctagctatatttgctctatctttagattaataagctagttaaaatttaagctggcatgcttactatggggttcaatatggctagtatatgtacgttatataatgttagctataatggctatgtgtacgtacggcattcaaacaccctctcacgtaatgtgcgtacatg

SEQ ID NO: 39256 - DNA, 308 bp, Zea mays
agaaagacaggagatgtagcgcatgccaagcagtaaaacaagaaggcgcccaccatccacacaagaacgtcatgacaaccgacaggccaccggagctcttacacatggatctaatcggcccgattgcatacaaaaacaccggcgggagaaagcaccgccgacgaaacgcggaagaacatacacgctccactcggggggccttcttgcaggagaaatctcatacccaagagaccctaaaaggatgcttgagacgggctcaaaacgagttcggctaaggatcaagaatattagagcgacaacgggacgga

SEQ ID NO: 39257 - DNA, 451 bp, Zea mays
  unsure (1)..(451): unsure at all n locations
tgccttcacttcagtctatcatccgcagcacaacggagtcttttatcgngccaacgggaaaatctacacagccatcacaaagatgctcctcgacaagaaaaagggcatatggaccgacttgctaccggaggcagtctgggcgctgaacacaaccgagtgcagggcgaccgggttcactcctttccgccttctatacagatcacaggctatgaccccgcaagatataatacacgggtctccgcgcacagctcccgcagccacccctgacgtggatgagccaacctccaaagatctcattgacggagaccgggtcttcgccctgcaggcctttaacaaataccaagcccagaccatagcatggtgcgaccgcgcagtcatccccaacgaggtcagcgccggggacctcgtactcatccgaacagcttcgacggagtccaagggcaagctggag

SEQ ID NO: 39258 - DNA, 362 bp, Zea mays
  unsure (1)..(362): unsure at all n locations
tgcgaatngactcaagcctagctacgggtgcataggtttcaccgaaatccaaaccttcgacttgggagtatcccttggccacaagtcgagctttgttccttgtcaccacaccatgctcgtcttgcttggtgcggaaaacccatttggctcctacaacattttggttaggacgtggaactaaatgccatacctcattcctagtgaagtttgtgagctcctcttgcattgccaccacccaatccgaatcttggagtgcttcctctaccctgtgtggctcaatagaggaaacaaaagagtaatgctcacaaaaatgtgcaacacgagatctagtaattacccccttatgaatgtccccgaagatt

SEQ ID NO: 39259 - DNA, 303 bp, Zea mays
  unsure (1)..(303): unsure at all n locations
agctcgggatntatccaatgagaactttctctatctcttaacatagattgtctatggataaactcaacacaagagatgacattagtagcacaagcactagtttcttatttagcaaccctttatatgcgaaagacgagcgtggtgctaagaacagaaaaaccttatgatatggactaaatttcccttgagcccttaagaacagaatattgtgaatgatttgggatatatgcatgggtattcaataaaggctaaagggctgacttaatgcatattatggtgagtgggcaatatggaagaatctaa

SEQ ID NO: 39260 - DNA, 388 bp, Zea mays
tgtagagggagaacacgtgataggtttgactaacgtgcattttgataaagatagaccttgtgcagcttgtcaagcttgaatacgcgtgcgaggagcacatcacagcaagaatgtgatgaccacttcatgacctctggagctgctgcatatggacctcttcggacccgccgcctatctgagcataggagggagtgaggatggcctagctattattgatgactttgtccgctccacttgggtgatctttttgcaggataagtctgagacccaagggaccctcaagcgcttcctcaagagagctgacaatgagtttgagctcaaggtgaagaagataagaagcgactacgggtccgagttcaaaaccttctagtggaggagtttcttgagg

SEQ ID NO: 39261 - DNA, 388 bp, Zea mays
  unsure (1)..(388): unsure at all n locations
tctaaagggagaacacgagagatgtgtgactaatgtgtattttttatatataagaccttgggcaggtggtcgagcatgttaacaagaggtaggagcgcatcacagcagaaatgtgatgaccacagtcaagaccctctggagntactacatatggacctcttcggacccgtagcctatctaagcatatgaggaagttagtatgggctagttattgttgatgacttttcccgcttcacttgggtattctttttgaggataaatctgacacccaatggaccctcaagcgcttcctaatgagagctcaaaatgagtttgagctcaacgtgaataagataaagagcgacaactggtcctagttcaagaacctctaagtggaggagtttcttga

SEQ ID NO: 39262 - DNA, 354 bp, Zea mays
  unsure (1)..(354): unsure at all n locations
agcttgttcttgctctacgtgcttcatggctttcggatcgcncgcgaagggcagcagggcgtcgttgtcgaagcgcgccttgcgcttgccgctgtatgcgaacaggagtacgccgatgaatccgaccatcaccacgacggtgcccagaccgcgaatcgttccgatatccatcgcactcaccgtttgcttttgatgatggtgcccangctttgcatgtaggccaccaaagcagtcatctcggtcttgccctcgacggcgtcgcgagcaccggcgatgtcttcgtcggtgtaaggcacgccgagggtgcgcatggcttccatcttggtcgcggtgttggaaccgtcgagcttgttc

SEQ ID NO: 39263 - DNA, 407 bp, Zea mays
  unsure (1)..(407): unsure at all n locations
tcacgacggcctcctgatttatcccgccgattatcatggggtggtagagggctcttcggcctgatcgcgaacacctcgtanctactaacgactcgcgcaagctgctggtcgtctggccctgagcaaccccggaatcgccggggccccttcgtcctcaggatgacgccggcactcctggaaagctccattccactgcgccccgttgcggcgtcgcggcgccggcagctttgggtcgacagccgcctccagacaggctgaatagagcgccctatgacgagcaaaaaggggacagatntagaagtccgcccccatatctgctattcgccgggcgccgggctggcccactgggcgatgaaggcttcgatatctttctcgatgcggctctcgacggtgcgcaatcgcagtat

SEQ ID NO: 39264 - DNA, 351 bp, Zea mays
agctttccaagaagggcatgagctaagtccatggtgagaaaattaatgctcatatgatttgctctaacaatgtacctatgtgcttcaacaaagaaagatcaaagagaagcgataggagatgctatggatgcaaggagaagggccatgaaattgattcatgcccccacatgaagaatcaagaccttgcccgatcaagaaagatgaccatcaaaaaggatgaaagcaaaaggcaaatgcattgcaaggacaagcatcacatttgctacaattgccgtgaaaaaggtcatctattcaaggttcgtccaaagggtaaaactcctaagcctaacttgtcaatacattcaaatatgc

SEQ ID NO: 39265 - DNA, 492 bp, Zea mays
  unsure (1)..(492): unsure at all n locations
actaagctgtatgctatttgatcccctctcttgatgggccattttgttagtcaacaaagatctaggaacccagatgtcctctgtgctagcacttggtaaactcattacctttctagcacaagttgcaattttggattgtctagttaatatgaatcaattgacaagttaggggcgggatagttaccaataggacaatccttacattgatgtcctttctttcggcatatgtagcaaaggcgatcttcatgtcttgaagatttcttctttacttgtttcttgcttgctacatcgttagtaaatattctcttttctaacactatgcctttttgttttatatagggacatgacttaactaaatgtcccttctcagagcatctaacagaatatttatcatccttcgtaataatcaagccattttctttaatatagggacatgacctaatcaagtgcgcattttcaagcattcactacactntctactttttctaatat

SEQ ID NO: 39266 - DNA, 437 bp, Zea mays
  unsure (1)..(437): unsure at all n locations
agcttcacctagagagattcacttgaaggtcttattaagaattctaagatatttgaagtatactcccaatattggtctatggtatcccaaaggtgctcaatttgaattaataggatattcggattcggactatgcggggtgcaaagttgatagaaagagcacctccggttgttgtcaatttcttggaagatctcttgtttcatggtcttctaaaaaagcaaaatttcgttgctctctctaccgccgaggcagaatatatatctgctggtaattgttgtgctcaattattatggatgaaacaaactctattggattatgggaatcatttaaaaatgtgcctctcatgtgtgataatgagagtgcggtaaatttagctacaaatcngttaacactgaaaactaagcatatgatatcatcatcctcttgaggatcatgtg

SEQ ID NO: 39267 - DNA, 444 bp, Zea mays
  unsure (1)..(444): unsure at all n locations
actcagcttgctctcgnatcagacgaagcttcagcttagagcctacttttttataagaaanaagttcggaaaaaaggttttagttcccaaaagattcagaattaaatggccagagtgcgctctaccgctagggttgagcgtgagggaaccgaagctgaaggatcggagactgttcccatctccgaagcgatgcaacgatccggactggtaacctcggaaggaatccgtactgccgaaacagagcagactgttgccgagacaaaacaagttgttgccgaagcagaagaaggaaatattgaggaagctgatcccgatgatgattaccatattgccgtgccaagcaagcccaaccacttggacttcggaaagtcgactgtctctaaggctgatctctccaagatggtgaagtcnggttatttcagtgagaatgagaagaagctactt

SEQ ID NO: 39268 - DNA, 246 bp, Zea mays
agcttgagtattcgccaccggaaccatttcttttcttttcgcaacgaacatgcccaatccactactttatgtccaaaactcatgtttggggtggtttctcgcaatttctttgccgcacgttacccattcataaaacgggtgttggggtgccataaacaacaattttttcccaccgaaccatttcttcgttttttctaacgaaaaatgccaattcccttatttatggtccaaactcatggtttgggg

SEQ ID NO: 39269 - DNA, 214 bp, Zea mays
gacactataaaactcaggctgcccttgatgcttgccgcaccaaggcagtgtggtattgtcaacgggcaacaaggtcacacaagagactactctttttatgcataatgagaagaagcctggtgtgcaccctattgtccccgatgctatcttgtaagatgaagatggttaagcctgctcagagaaaaaccaatctgttcataataaaaatctagat

SEQ ID NO: 39270 - DNA, 436 bp, Zea mays
tgccagcttagcacaagatatactagaatctattatattgtgctcatgcctaagtctggtgaaagatcggtcatcaagtggctcggtaaagatatcggctaattgatctttagtattaatgtaagaaatctcgatatcccccttttgttggtgatccctaagaaaatgataccgaatggctatgtgcttagtgcggctatgctcgacgggattgccggccattttaattgcactctcattatcacatagcaaagggactttggttaatttgtaaccgtaagcccgcagggttttgctcatccaaagcaattgcgcgcaacaatgttctgcggcaatgtactcggcttcagcggtggaagagcgaccgattttgctttttgagcccaagacaccaggatcttccaggactggaagtcccgatgtgctcttctataaa

SEQ ID NO: 39271 - DNA, 399 bp, Zea mays
actcagcttatatcttctgtcattctgggagaatacatatatgtcattaaagcatgttaggctatattgtactgtctgtacatactcaaaacgctctaaataggtgtgttgcgttgaacttttgtactcacgccaagcgaataattgatataatgggtactcagacgtgtcaatcaggctgcgttgttaatcggctgagttatggtattggctaagcattggttgcgccatggcaacatgatgcagtatttgtgtcttacgaacttagctgtgtcatgtgattgctacgtcgcactatcatttagtcggaccgctcccgttgagtcggaccgtcatcgccgagtcgcgtagattttgtgagataaaatatctccaagttgatattatagttcctagatg

SEQ ID NO: 39272 - DNA, 443 bp, Zea mays
  unsure (1)..(443): unsure at all n locations
agcttgtgaagccaatcacaagtttattgaataatgacattaagttcaattggtcttctaaatgtaatgaagcctttgagcaactgaagacactattgaccactgctccggtattggctcaaccggacatcactaagccttttgatgtatattgtgatgcatctggcagtgggctcggctgtgtactgatgcaagagggccgagtaattgcgtatgcttcaaggcagttgcgccgacatgaggagcattatcccactcatgatctggagctagctgctgtggttcatgccctgaagatttggcgtcactacctgctgggaaatatctgtcacatatatatagatcataaaagtttgaagtacatcttcacccagtcagaagtaaatatgaagcaaagacgatggctngagctcattaaagactatgaactggagattcattat

SEQ ID NO: 39273 - DNA, 373 bp, Zea mays
  unsure (1)..(373): unsure at all n locations
tgctcaggccttcttcttntctcctaggaaccttactgtatcactaccccnacttaaaagaatgaggtagaactcttgaatcttggggatttgaactccttgaagtaccacataacaagggtgttatggggccttcttctgctgttgctgcttgaccagactgcagagagatgactgtcacagggttgattctgggcgaaccttcttcttatcttctcctcgctatcttcttttcactgaccttttctttctctttgctcttcccattggaggactctatcaaagagtattaccatcatacagaggaggaaactaaagactatgaaccatgtacaacagtcttcaacccaagaatcaccaagcattgtgatct

SEQ ID NO: 39274 - DNA, 320 bp, Zea mays
acctgctgcatgcagcctaagagatctagtgcagtttttttttatctaataactgcaagatgctcctggttggattaggcccccgacagtgctcaatatcgtatcaatacgatattgcagagtcgcactatgcgcgctgccaaggagatagatatatcacattcggtcgctggcagtctcttagcagatctcttgcttcatggactgttaaccatactaaattttggagctctatgtaccgaccatgcagaaattatatgtgcgtataaagtcttcctcaattattattgatgacacaaactctgtcggaatgcggattt

SEQ ID NO: 39275 - DNA, 404 bp, Zea mays
agcttaccacatttgaagcatgagcgcttctttttgtcttggtcttgcttggctgccccttgcgaccctttagcgccgtcttgaatcttttgatgatgggggccatctctacatcattaagtccggccgcctcaatttgtgccaccttgctaggtagcgcctccttgcttcttgttgccttgagaacaaggggttgaagctcgttgattggaccattcaatgcgtcgtccacgtatcttgcctccttgatcatcatccgcccgcttacgaattttccaaggacttcttcgggcgacattttggtgtacctgggattctcacgaatattattcaccaaatgaggatcaagaacggtaaaagaccttaacatcaatcggacgacgtcgtggtccgtccatcgcgtg

SEQ ID NO: 39276 - DNA, 437 bp, Zea mays
  unsure (1)..(437): unsure at all n locations
gggacgagattgtagaattgagtagttgaacaaggaagacatcttagactttagtaatggatggtatcaaagtatctatgcggatttcttctgtagaagcaggcattagttnggaagcaaccttaacaatttgccaggactgacaatttttttaacaatagccatgaagaactagaataaatgctacaactcatgacaacaggggaaagtacaacacccaaaatgttcccatcaattcatcttatccatcacgatccaacaaactggaaatgtacttcggttgacacatgcacatagttatgggaagctgttcctttcacctncttcatactctatgaattagcgtgaattctatgaatcattaaataattcatatagtattagctattactatgaacattgtgtgacatcatctatttttagctactgatatatat

SEQ ID NO: 39277 - DNA, 297 bp, Zea mays
  unsure (1)..(297): unsure at all n locations
agcttctaagaaatccattgctcatgagttataaactgctcagctggccgctaaagtcgccgaagagactgctgctactctcaaagcccagcacgataaagccatggacaaggctattcgagcaggacgaatcttgatgaagagacccggagtggtagttcctgaagacataaaggccgacgtgcatgccgcccccgattcctcgaatcacccttcttcgtcggtcgttcctgagaaagatattggaaaatagagaaaacatttgcgtgccatgagcgcgcggntagtatgatcaag

SEQ ID NO: 39278 - DNA, 308 bp, Zea mays
  unsure (1)..(308): unsure at all n locations
tctaaagggagaacacgtgataggtgtgactaatgtgtatttcgaanaagatagaccttgtgcagctggtcgagcaggtaaacaagtgggaggagcgcatcacagcaaatatgtgatgaccacgtcaagacccctggagttactacatatggacctcttcggacccgtcgcctatctaagcatatgaggaagtaagtatggtctagntattgttgatgacttttcccgcttcacttgggtattctttttgcaggataaatctgaaacccaaaggaccctcaagcgcttcctaaagagagctcaaaatg

SEQ ID NO: 39279 - DNA, 391 bp, Zea mays
  unsure (1)..(391): unsure at all n locations
agcttggaggcgtcgattgggtgtctacttggtgtagactcctncttcttttcttccgtcgccttgaatgcgacgggttgagcttcngatgtagatggatcatcaagctcgttgatcttcctcgagccttcgatcatgcactcaaaacttacaaaattcccgataacttcctcgggggtcatttgagtatatctaggattaccacgaattaattgaacttgagtagggttaaggaaaataagagatcttagaataaccttaaccacctcgtggtcatcccactttgcgctcccgaggttgcgcacttggttcaccaaggtcttgagccgattgtacatgtgttgtggctcctccctttgcgagccggaatcgaccgagctcccctcaatcg

SEQ ID NO: 39280 - DNA, 399 bp, Zea mays
gtaccaaatggacgtgaaaagtgccttcctcaacggaccaatcaaggaagagggctatgttgagcaaccttccggctttgaagacagtgagtatcctaaccatgtctataggctctctaaggcgctttatgggctcaagcaagccccaagagcatggtatgaatgcctaagagatttccttattgctaatggcttcaaagtcggaaaagccgatcctactttatttactaaaactcttgacaatggtttgtttgtatgccaaatttatgttgatgatattatatttgggtctactaatgaatctacatgtgaggaatttagtaggatcatgacacacaaattcgagatgtctatgatgggggagttgaagtacttcttcggatttcaagtgaagcaact

SEQ ID NO: 39281 - DNA, 377 bp, Zea mays
  unsure (1)..(377): unsure at all n locations
tggtgcttgaacaatgtggaccagtggcataccgacttcagctccccgaaacattgtctgctgtgcataatgtgttccacgtgtcacaattgaagaagtgccttcgggttcctgatcgaaccattgaagtgactgatgttgtcctggaaccagaattaacatactcggaacatcctattcgagttctggatcaaaaggacagggttacccgaagaaagactctcaagttttacaagatacagtggaaccagcattctgaggatgaggctgcatgggaaacccaagactttntagataagaatttcccaggctttctagcctcatgtaatttgtaaagtctgtataaccgtgtaataaaggaatgaacccccacatca

SEQ ID NO: 39282 - DNA, 411 bp, Zea mays
tgcggcatgcaacttgtggcatgggaatgatagacacacccagcttttggatgcagaagagggagagagatgggctccaaagataagaccttttagagaaggcaaggaaaaggcaacacacacactgttgattgtttttacttacagtcagggacatatgaggtattccttcaagttggtactactttcgacggcgagtcacaagagtcgaggaagcatgtggttgtccttaatgacttgtcatgtacttgtggcgcacccaggcaataccattttccatgttctcatctaatcgcagctgctcgagctcgtaactctgacttagagaagaggatacctcaagagtttactattgataaactagtgttgacttggagtccaagatttattccttattgtgacgccggtgag

SEQ ID NO: 39283 - DNA, 401 bp, Zea mays
taaccccgaacgcgatactcccttcattggtgaaactttcttgtagacatagtctcccacaaggaagtataagggcattcgccgtttgtttgcataactcttctgacgggcttgagctatcttcacattatgaatgattttctgaaccttatcttcagtttctgtcaccatatcaggcctgagaaagtacctttcaccacgttcagaccaatttatcggagtacgacatcgtcgtccatataaagcttcaaaggatgccatcttgatactttcttgatagctattattatatgaaaattccgctaacggcaaacattcatcccatttttgtggaaattccagaacacacgcccgtagcatatcttccagtatctgatataccctctcagtctgcccactgg

SEQ ID NO: 39284 - DNA, 357 bp, Zea mays
tattccacagccagcccatgcaagtcttagcaattaagcatgcatctagaacggcttcttccttcgcaaaatcaaccaaataaagtttgccgtctagtacacccttaataactagtgaaccatcacatcttctaaagacagacacatttacatttgggaatagacaactatataccatattgcataattgactaacagataacaaattatatccaatcgactcaactaaaaacacattagatatagagtgctcggatgaaatagcaattatacctaacccttttaccttgccttggttgccatcaccgaatattattgaatcttggggatccttattcttgacgtacgaagagaaca

SEQ ID NO: 39285 - DNA, 475 bp, Zea mays
  unsure (1)..(475): unsure at all n locations
gctgacatgaggaatggcgctcgncattaagagcttcctgcttattttattctaaggagagggaaagactacacgtcccgctccaagaaagtttgctacaagtgtggtatgccctgtcactttatntgcacaatgtccattatcaagtgacagtgacagggataacgactagaacggctagaggagagaaaagaagaggtactacaaaaggaagggcggtgatgcccatgtttgtcgcgaatgggattgcgaccaaagctcaagcgactcctccgacgacgaggacgccgccaacatcgtcgtcaccaatggacttctcttcctcaacgtctgccacaagtgcctcatggcataggacggctaacggaatatagtaaatcgtactccttcactatatatgaggcttctagtgatgataatgctatcgatgaggacgattaattgcgtaccctctttgccagcctcacatgcaaca

SEQ ID NO: 39286 - DNA, 313 bp, Zea mays
ctacatactctgcgatgtaaggcgaatgatactaagcactgtgcatgacctgcttccgctgagcccgttgtgctgccgcttcagctattttcttttgcttctggataggaacattggctcatgctggtggtatgacctttgttctgtccccagaatatgcaaaagattcttttcggtcgatcgccaaatcttccgtcgaagcccctggcgcctctgcctctctgagctggcggccagaaagagtcttgatgttgccccgatacctgtgaggaacactgcggcctttgctgttagctacctctatcatcatttt

SEQ ID NO: 39287 - DNA, 405 bp, Zea mays
  unsure (1)..(405): unsure at all n locations
agcttgntggaatctagtgttgaatcctatatgatcacctattcaccccccccccctctaggtgctctcaattggtatcaaagtccttctcttcacataagggactaatcgcccgaagagatggattctaatagaaaggggatggtggtcaacgacaaagaaaaggagtcctgcctcaacgagcctagagacgacaagccaactgactctagctcgagttacaagaagaaggacgggaagaacaataggcacctccagaagatcgtctattaccacagcgatgcatcttcttcttcaccaagagaccacgattacgatgattcttcataaaaaaagacggataatccaaactattcatttgattattctcgcattccattcaattctaatgcttatttgctatca

SEQ ID NO: 39288 - DNA, 421 bp, Zea mays
  unsure (1)..(421): unsure at all n locations
gtccacttgaactgatcttcggagaaacctgccttcagtgccacatgttaccagaaggttcgactcanaaagcaatgtatgaatntaaaataattgcagagcacatcagtacaagggacctggtccaggagtttttggctttcaaggattttcctagtgtaaaagagtgggaaatgccgaagctgaagggggagaagaaaaaaggtgaacttgtacgtttaccttactacttcaaatttaagaaatactctaaaactccttgccaagaatggctggatacgattgaagtgatgtgtaatgagatacttggcaattattccataaaagaagatcaattgatgaccgcggccttcggcacccgtccaaaacgaaggctaaatctagtgttagacgccttgtgtttcgaatacccggactacca

SEQ ID NO: 39289 - DNA, 386 bp, Zea mays
  unsure (1)..(386): unsure at all n locations
ggactangcaagagtagaaaagcgggttaacacagatggcgttctcaccacgttctactggacgaattggtgttccagagtgtacgcttcggtaaagtttaattggccggctctgagagcaatataaggttgaagacaagctagaacaggaagcaatttggtaggtactaacccgatgagtgctggccacggaggagtccttcacggcagcgcgaagaacagggcggaatggatttgtggactgtgtgagtcctctggtgaaattgagtcgattgctcaagtgcttgtgtgcgtgatgtggtgaagaagcaagatccgggctcacttatatgccgatggccctagttgatgatgctcgcggagctgtaacgcgctggcgactcacc

SEQ ID NO: 39290 - DNA, 314 bp, Zea mays
gattcatactcggggaggccccaccacggcacaaagcgggtggacggcaatgacgttgctccggtgagcaattcaagtggcctaagtggtagctcccgagcggcacggccacgatctccctctttccggcttgaagatgacgctagcgtatcaccaaaggtttggggtgacgacgtcgtcgagcacccacacggcggccctatctctccctcctttctagttgcgtattgccgatgaatagaaggggaaaagtggggatgagctgctcccatttatcctccttacgacacgcaggtgggtggattccgcgagat

SEQ ID NO: 39291 - DNA, 430 bp, Zea mays
caagcttaacctcagttaataaaacctaaagtatttattgtttaagtcataaaatgaaccccacaataaagttgaatcacatttatacccctgagataccagaaaccctaattggaaccctggaaaaccctaaaccaaaccctaggggcttatatgcaaaattagtccacttttgggctaaagtgcaaaaaccaagccaaataggtttcttaagtcccttggttcacaaaaatgtgtacttgaaagcaaaacccacagttttggacttaaatgcaaaatggacctcatttgagttttgctctaagtctgaaaatcagtgaatgggctcaactttggggctttgtaacttgcaaagcatagggtttttgccctagatcaccacaccaaagttgtaaagcattcacaggagaataaatctggtcaagaatac

SEQ ID NO: 39292 - DNA, 385 bp, Zea mays
tgagctgaagcatcgcctcactggagaagcgatttcaccctcttcggatcttggtggtccgccgccgcgcgtggaccgagctaaccagtgagtcttcgtccaattccttgcacccacatctttcctggcataccgtgaagccctctgacccgttcaattgaactatcgcgccgtgagtaggccagactcctcgccggcgacgagcatctccgcctgcgcacgtggaccggtcgacttcgaccatccccgacggcgacccgcacatcgctgtgatactcgagaccttccctacgtcctcgaccacctcaccggagcaatctcgccgccggtaagccccttccgcctttctttcgctgcagttactggttaagttgggagaaggacc

SEQ ID NO: 39293 - DNA, 431 bp, Zea mays
  unsure (1)..(431): unsure at all n locations
agcttcttcaccatgtgatcacggttatcttgataatgttgggcaatgcatttcccttttagttgtgtcaagctcatcttcagcctctcattntcttccttgagcttttgatatgaatcatcgtttgttcctgcaaattctagctcaaaggaagatttgctcgttgacggacaacaagcattagcacatggtaatatagtatcaatttgaatacatgtgcatgagtgaggttgttgagatttcaagttttctatcacaacctcatgagcaatgtttaatatgatatgatcatctctaagattttcatgaaagcataggagcatatcatattnttcttgaanagctagattttcaacctttagcttttccacttggtccttaagcaaggtattcctatttactaattgagcgatacaatgtaaagcgttatc

SEQ ID NO: 39294 - DNA, 459 bp, Zea mays
tacggaacttgatactcagcttcttagggagaacacgtgatatgtctaaccaatgttcatttcttaaaagatagaccttgtgcagcttgtcaagcaggtaaacaagtgggaagagcacatcacagcaagaatgtgatgaccacgtcaagacctctggagctgctacatatggacctcttcggacccgtcgcctatctgagcataggaggaagtaagtatggtctagttattgttgatgacttttcccgcttcacttgggtgttctttttgcaggataagtatgaaacccaagggaccctcaagcgcttcctaatgagagctcacaatgagtttgagctcaaggtgaagaagataaggagcgacaacgggtccgaattcaagaatcttcaagtggaggagttccttgaggaggaggggatcaagcacgagttcttcgctccctacacacctcagcaaaat

SEQ ID NO: 39295 - DNA, 105 bp, Zea mays
catcttcaacggtcagaatccaacggctatggtttctttgcacaagcaccggactgtccggtgtgcaccggactgtccggtgcgccatcgaacagaggctgccat

SEQ ID NO: 39296 - DNA, 368 bp, Zea mays
  unsure (1)..(368): unsure at all n locations
agctttagctcaagtggtaaagttctttttttgttgtatcttcgccgacacttggatcttacatgttgaaagacatggatggcaatgacttaccaaagtcttggaatgcacatgagcttcgaagatattatgtgtaaactatgtaattttcctatttntccctatggtacccttttcctttcaagatgggagaaaggttttaatggggccataggttgtaattttcatttttgtgcagctctgtgcaatacaagggccaaattccccaacaagtaaaatgtaaaatctggaccatataaccgaatataagagccatgaagaagcttaaaagtagtccctaatgcgatgcatagcttagatgccaccta

SEQ ID NO: 39297 - DNA, 425 bp, Zea mays
  unsure (1)..(425): unsure at all n locations
tgtgcanagtccactcgaactgatcttcggagaaaccgacctctctgcaacatgacacccgaaggtccaacacaacaagcaatgaatgaattcagaattattgccgagcatatcagtacaatggacctggttcaggagtttttggctttcaaagtttttcccagcttgaaagaatgggaaatgtcgaagctaaagggggagaagaaagaaagtgaacttgtacgtttaccttactatttcaagcttaagaaatactttaaaacgccttgccaagagtggctagacacaattgaagtaatgtgcaatgaaatacttggcaattattccaaacaagaagatcaattgatgactgcagccttcggtacccgtccgaagcgaagactgaaccgagtgctggacgccttcgtgtttgaataccctgacta

SEQ ID NO: 39298 - DNA, 434 bp, Zea mays
  unsure (1)..(434): unsure at all n locations
agcttcatcccatttgaactctttgcctttctccagtagtgatgtaagaggcttcactaacttggaaaaaccttcaataaatcttctatagtatcctgctaatccaagaaaacttctgatcttggacgcatccttgggttgcttccaatttagtatctcacttatctttcctgggtccactttaattccaccatcggtaacaatatgccctaagaaagcaacttccttcaaccaaaaatcacacttcgagaattttgcgtatagttggttgtctcgaagcttttgtaggactagccttagatgatcttcgtgtgcttcttcattcggagaatatatcagtatgtcgtcaatgaatacgaccacaaactgatccagatattccatgaatactntattcatcaagttcataaagtatgctggtgcattagtcagtc

SEQ ID NO: 39299 - DNA, 299 bp, Zea mays
  unsure (1)..(299): unsure at all n locations
tttctgaaaagacaccctgcctacattntatctgaagaatatggaaataatgcgactatattcctacattgaccggtactttgtgtaacatggagcatcttattcccatttcccaggatacggtggtgatgtgtgggtcccacagccagcaccaaaagatcacccctggcgctacatgcctaaccatgccatgacccctcacatctctgggactacaattgatgcgcacggcaggttctgagttttgttaccctgagttgaaatctatctaatttaatacctcataagacacatagctc

SEQ ID NO: 39300 - DNA, 439 bp, Zea mays
  unsure (1)..(439): unsure at all n locations
agcttagngatgtttatgttatctttcttcgagattctctaaaggggttcttgagagaatagactattatcattctatgttcttctggcaaggtgagaatcataagaagaagtatagacttgccagatgggacatcctatgccaaccgaaggatcaaggggggttaggaattcagaacatagatgttcagaataaatgtttgctacgcanatggctttttaacctgattaatgaaggacggtatctggcagtagctattgcgtaataagtatctaaagagatatactttggcgaaggtgacacataggcctgnggattcacatttttggtcggngctaatgaatgtgaaggatacttttctatacataggaagtttcaccctaagaaatggggagcaaaataggttntgggaagataaatggttangaaatcaatcttt

SEQ ID NO: 39301 - DNA, 439 bp, Zea mays
  unsure (1)..(439): unsure at all n locations
tgtcctgatactnggacaagcttctcttatattcgnnatttcacaatttatagatgnttgaagaaagtaaacaaaacggatgtgatcatgcttaagctagcttccgttagtgactattttgctagaggctctaanaggtattccgatattgcactttgaaagtatcaaaatttgatagagaaaattagtgactagtgttagatcattggggtagatcagtggggtgatctcaattcatttgtgtaattggtgtgttataaccactagatttaaatcataaatagattataccgttagtggggggtcacacttgtggtggaggatgtagatctgattgccatcacgttcgtcgatgaagatctgcactanggcagcaacggtcggggaagcgagagtggtggngtgaagactgacngcggtttctcgtcactggtcgatc

SEQ ID NO: 39302 - DNA, 429 bp, Zea mays
  unsure (1)..(429): unsure at all n locations
agctttcgaaaaacatccatgcttcataaacaatttattccttttttgcaacaaagntgatgaaactgtattcctcagcttactttgtgccttagcacattttcattttaacaaagcattctccgaagatcgacttcgtattcaattcgtgtctttagtgcgatatgatgtacgatgtgatgctatgcgggatgatgtgatgatatgatgcaaaatgtgatgctaatgctgaagacacacactcacacgcccacattgaaacacacaatctctgcgtccccttaagaacgatcggaatctctctgtcgtttatttttcggcttcaccgcttatttttcggtgtaagttctacatccccttaggaacgtcttttgaactttttcgccttctatttcggcggtataagttctgcatttccgtatgaacgtc

SEQ ID NO: 39303 - DNA, 480 bp, Zea mays
  unsure (1)..(480): unsure at all n locations
accagcttctcacattctgagccctcagcatcgaaggagcttttttctactcgggntatgaagctcgcttgggctcatcttctttcttcatccagatttgatggtcacctacatagcagcccaatagactcatgagctccgaggtagctgctgcatccattacggagtctattcttggcaaagggaactcatccttcaaacatgcgctattgagatctggtaaattaatgcacaaccaccactttccattagcctctaccatcacaatattggccagccactctggatatgttacttctctaattacttcagcacttatgagccctctgactatgtttcttgcaccattggcttctgcatcgaacatctttctaagcttctggtgtctcgggctgataaccagatctacattaagtgagtcctcaatgacatctctgctgacaccaacaacatcattggtgaccatacaaaacatcctgt

SEQ ID NO: 39304 - DNA, 426 bp, Zea mays
agcttgagcagtaaccggcttcgtctgaaacccttttaaactggtgatcagcatatccttcagcttctgccatgatgtgattgttcctggccgaagagaggagtaccaagtttgtgcaacattcttgactgccatgactaaagattttgccatgattgcagtattgccaccatatgaagatatggttgcttcgtagctcatcagaaactgcttcggatctgagtgtccgtcatacatggggagctggggtggcttgtaagacaagggccaaggtgtagcctgcagttctgctgatattggagaagcattatcaaaagcaaaatttccatgatggaaatcttcataccattcatcctcgttttagaagccctcttggtgcagctctctgtgtctgggccttcgatattgctcatcttgagcaagatg

SEQ ID NO: 39305 - DNA, 250 bp, Zea mays
  unsure (1)..(250): unsure at all n locations
aaaaggtctcagttacaaacaggaatataccaccttgcatctggcatataaccgtgtttgttatgagcctggtggagttatttacatgtgagatggagtggcatgaatagcgttgtcatctgaacatataaacaatggttctatgatgtntctggcccatcctgatatacctttattactgatgacagtacatcatgttattgggcgccgataagaaatcagtgctagatcacccaataaaccttatgtt

SEQ ID NO: 39306 - DNA, 278 bp, Zea mays
  unsure (1)..(278): unsure at all n locations
aatgtgatgacgacatcaaaaactttggagatgctgcatatggacctttttggacccgtcgcctatctgagcataggaggaaagaagtatgggttgggttattgttgatgacttttcccgcttcacttgggtgttctttttgcaggaaaagtccgaaacccaagggattctcaaacgcttcctcaggagagcttaaaatgagtttgagctcacagngaagaagataatgagcgacaacggatccgagttcaagaaccttcaagtggaggagtctcttg

SEQ ID NO: 39307 - DNA, 335 bp, Zea mays
cttaaaactgattcccaggttatctctggtcatattgacaaaagctgtagggcaagagaccccaatcttgagaagtatctggatactgtccgaaagattgaagcttcctttgaagggtcttctgttaaaaatattcctcgaggagaaaatgagcatgctgatttgttagccaagtcagcagcacaagggctgcctttaccattggaagtatgttttgaaacaatataagcaccttcggttgaacttctgaaagagcggtcctaacatatctcctgttatagtgaagactggagaactgaaatcatctcttacccttacggtgatttcctttcaga

SEQ ID NO: 39308 - DNA, 423 bp, Zea mays
  unsure (1)..(423): unsure at all n locations
agcttacataagatttgataaataagattttattttctatgatatagnttcctccccctaaatatgtgcatttcagaaaataacacttttgtactcaaatgccaaaagcacatatttaggtcaaagtatagacaaattatatcatactattcaaagggtgcagtgtgtcataaaataaacgtgatgctcatgacatggaatgcacttatcaactttctacatcttatgtttttcttatgacttcccctttttgttaattatttctcccctttttaaaagtcttctaacacttagttacataagactaaaggtaagctttaatgcacaatttctccccctttgtcataaatctccaaaaaaggatacaaagaatataaagggtagaaattatgattaagcaagatgtgaacacactatcataaa

SEQ ID NO: 39309 - DNA, 482 bp, Zea mays
  unsure (1)..(482): unsure at all n locations
ttacggacacatagatactaagcttcggctctgcctgcactcttgtcacatgaccagatataacttgggaatcggntntaaggaccgccattcttatccccattgcctttaacttccgaagccccaaaagaaaagcttcgtatttagcaatattatttgtgcatctgaaatcaagctttattgcatagcatgttctgactttggaaggtgcaactaagacagcagtcgcacctgcctcgaagttccctangaaccgttgcagaacactgtccaagcttcggcatctttatttgcttcttcttcctgagcccctggcattcagtcagcgatgaagtatgctaacgcctgngactgaattgaggatctatgcacataatcaatgttgaattcgttgagttccgcagcccactttccaatccttctagtagcttctctgttcctcatgatatccttcagaggctgtgatgaaggaacaattatat

SEQ ID NO: 39310 - DNA, 167 bp, Zea mays
cagaaacccagaacgccacccaagaaacgccagaaccggcacagaacaccaggaaacccccgcaggaaacgaaacacgcacgagacccgaccacaaatgacgaaggaaacaaccaacgcagcgcaaggcaaaggcgaaacgaccgtagcaccgaccaccaacacggg

SEQ ID NO: 39311 - DNA, 283 bp, Zea mays
cacccggagaagatcgccgccatcaccagcatggggcccatcaaggacttgaaaggcgtacagagagtcatgggatgtcttgcggctctgagccgcttcatctcacgcctctgcgaaagaggcctgcctctgtaccgcctcttaaggaaggccgagtgcttcacttggacccctgaggccgaggaagccctcgggaacctgaaggcgctcctcaccaacgcgcccatcttggtgcctcccgctgccggagaatccctcttgatctacgttgccgcgaccactc

SEQ ID NO: 39312 - DNA, 428 bp, Zea mays
agcttgtacctgtagagacaccaaacttggtatgtaaaaatacctaaaatcaacgtaaaataaaatttgcgtaccaattggtacctccacaagagcgctatatcgcctatcaagctttgcagtcatgtgcacaacttcagcatggaactgggaattctcaccaacaaaaattagtgtcctgcactgtagctgcttcaagttctctgtcaagtcttttctcctgtataaagcatcgcaaaataatattatctggtttcactcatccactgactcaggcaccgtatgaccgtaggagttgaacatataagctttagagataaaaaggacatactcgttgatagtttagataaatcgccacacattaatgcactgctgttgatctataaacttcattgaataaaaggagggttaaagatcataaacaaata

SEQ ID NO: 39313 - DNA, 379 bp, Zea mays
gaaaactcaagcttcctccaacattcatgagccactcaagcatgcggaagtatctattagtgttcctaagagatatgaagctagtcttgggcgtaacttccttcctcatccatatttgatgatagcctgaatatcagtgcagtagacttatgagctcccagaaagctgtggcgtttacaagtgagtctattcatggtaatggaaatggttactttgggcatgctttgatgagatctgtgaagttaatacacattcttcacttgccattagcctacttgaccataacagtgttagctagccatgatggatatgcgacctctctgatgacaccaggattgagaagtcttattacttcattccaagcaccatcggatttatc

SEQ ID NO: 39314 - DNA, 434 bp, Zea mays
  unsure (1)..(434): unsure at all n locations
agcttgcattgagcccaagtcttcttcggatcttctggactaagngctaagacgttcttgacctgtaggaaatgcaggggaaaacttgttaattttttttatcatgctaaggttagttgacacaatttatcttaaacagtttggaacgtggaatatatgaaaattacctgccacgaatcgtaggctgcattaagtatgaacaatggtgtgcgcattgtcgggacaacatactgtgggaacatacactgcgtttgttttgaaagttagtctgaatgctatgcttcataccagatgggaggtaaatgaacgaaactgaccagctcaggtgattgctttggctttgaggtacatgaagctggtaaatttttggctgatccctgaaagatattggaaaactattacgcttgaatcttgtattaaagaaacaacgatga

SEQ ID NO: 39315 - DNA, 453 bp, Zea mays
  unsure (1)..(453): unsure at all n locations
ctcagcttacaatgcttacacggntcagcttgtcatcctcctctaataatagcatgcaactgatgggacacacgtcgatcttctcatatgtcatcccaagaccagccaacatcttctttgcgaagtacatattctttggcaacttatgattctccgggagaacctcgcccattagttggacgatgtcgttgtaagcactgtttgaaatgttgtgcttcgactctatcgccattagtcttgtgagagtcccaagaactgacatctgagtgtgctcgtgcagtctctcttcccccgcggcgagtagccggaagaattcctgagcatcgcgtggaagctgccccggctcctcagcgntcatttcaaccttcctaccaagatcatgcaacatgtcgtccattctatcatgatcatcatcaagttccacctctgcgtccacgtgtctaatacactctt

SEQ ID NO: 39316 - DNA, 419 bp, Zea mays
aagcttgcttgcgatgaagctttaatctttattctctagctcgcagatatgtgaagtggactgctagtaatacactctagctgtaaactccggtgtttacctgaagcaaaccagcatgcaccggtgagatatcaccggcgccatccccatcctactatctattgtcggctactcctagagagagagagagagagagaatacccactgatctctgcgtcgtgtctcctaatgagttcaccaatgtcaggcaaacatggcaccatgcaagcctgcagcaagggtttgtatcgtaccaactcagtgcgaaagatggcacggccggcgtggcccgcatatatgggtacggtactggacatgatcgacgtgcaacgccgcaggcgcaagggaaggacactggacacagcggcggagaagatacc

SEQ ID NO: 39317 - DNA, 451 bp, Zea mays
  unsure (1)..(451): unsure at all n locations
tataatanaagaatagaggcaagagctcgtccgtatatattatataaggggagttatacaagcatggagtttgtgccccgttgctcaagtgcttgtctagagccgaaggtatagagttgatgaaggagatacatgcaggcctttgtggatcccacatcggatccaggccgttacttggaaaagtgttccgtcaaggattttattggccgaaggcagcttcngatgcagctgagttagttcgaaagtgcgaaggttgtcagaaatgtgcaagagatcaaaaacaaccttcgtctttgacacagctaatacaacccatctggccattgcaaaggtggggcctcgatctgctgggcccattaccaccggctcagggcaatttgaaatatgttgtagttgctggtggaatattttccaagtggattgaggcgaagccattagctacaataacttc

SEQ ID NO: 39318 - DNA, 411 bp, Zea mays
agcttatgaaagaatcttcattcctacatgggctattccgcggggccagagcccacccatgttagtcttaacaattaagcaagggtcgagttcagctttatcaaaatctactaagtatagctgaccctctaacactcccttaaatgctattgaatcatcacttcttctaaagatagtgacacctacatcagtgaatagacagttgtagcccatttgacataattgtgaaacggaaagcaaattgtaatctaatgaatcaacaagaaaaacattggaaatggaatggtcaggtgaaatagcaattttacccagacctttgaccaaaccttgatttccatccccgaatgtgatagctcgctggggatcttggtttttctcatatgaagagaacattcttttcttccctgtcat

SEQ ID NO: 39319 - DNA, 360 bp, Zea mays
cacatcttgggactaacaaatattcatttttagaaagacatgggttgtagcgcatgtcaagcacggaagcaagttggtgttcatcatccacacaagaacatcatgacgactaacagaccacttgagctactccacatggaccttttcggcccgatagcttacataagcatcggcgggagtaagtattgtctagttattgtggatgattattctcgcttcacttgtgtgttctttttgcaggaaaaatctcaaacccaagagaccttaaggggattcttgagacgggctcaaaatgagttcggcttgaggatcataaagattagaagcgacaacgggacggagttcaagaactcacaaata

SEQ ID NO: 39320 - DNA, 365 bp, Zea mays
agcttgccagtacctgtcataacaacagcacctgtctgtatattatctacaaaccataccagtaacttggccttttgcatgctggggattggatatgattggaccttttaagaaagctcaaggaggatacacccatgtattggtggcaattgacaagttcactaaatggatagagtttcagcccattgtctctataacctctgctaaagcccgggaattcatacaaagcataatatccagatttgggataccaaacagtatcatcactgacttgggatccaactttaccagctcagaattctttgacttctgcgagcagagaagcattcagatcaagtatgcatttgtagcccattccaaagcca

SEQ ID NO: 39321 - DNA, 300 bp, Zea mays
  unsure (1)..(300): unsure at all n locations
gcagccaaacaaccatggaaacaatggtcatggagtggccatggaggacaataatgcatgggcttctatcaaggatgtgtgggcaaatcagatgtgggagaacacgggccactatcacatttagtgcataccatgtattgttacataacctgtatgaagcatttgggagcataagctgtgatgacacttcttttaagctgtatgaggcattttgcagcataagctgtgatgacactctntttatactggattatgactgacacaggtccatgagatggacaaatgtgacgtctgcttttg

SEQ ID NO: 39322 - DNA, 436 bp, Zea mays
  unsure (1)..(436): unsure at all n locations
agcttacaaaaactgcaaggcaccaaaatctttgtactgttcttgaggcaccctgtttntctcaactgctagagtatgtttccagccaaaaagctaaagatcagcaaaatcattgcacaaccgggcttgaatattcaggtccaatctccgaagtggttacgctagatgaccctgccgatgtcacattgctgtataaggaaccgttcctggtggattntggttggagctccatctctctttgcctctcgggggctgctgcaggttcttgacccgcgtcagctaatctcttcaggatgttcattacagtgggaacaaatttcgtcgacagtgaaaggatggcaggaagctgcgtaatagcgcaagggtagagaagttgattagacaatattcaagtggctaacgagtgcaacaaanagtaatttgaacactcacaaat

SEQ ID NO: 39323 - DNA, 435 bp, Zea mays
  unsure (1)..(435): unsure at all n locations
tgctataggccttcttctttttcttcatagcaggaaccttactggaatacttccccacttaanaagaatgagggtagaactcttgaatcttggggatctgaactccttgaagtacctcataacaagggtgttacggngcctttttctgctagtgctgcttgaccaggctacaaagagatgactgccacagggttgattctgggagaaccttcttctcatcttctcttcactatcttcttttcactgaccctttctttctctttgctcttcccactggaggattctatcaaagagtattaccatcatacagaggaggaaactgaagatgttgaaccatgtacaacagtcttcaatccaagaatcaccaagcattgtgatcttatgggcgagggagtgagaaatggngtcgcttgcgatttncagaggggattatct

SEQ ID NO: 39324 - DNA, 429 bp, Zea mays
  unsure (1)..(429): unsure at all n locations
agcttggaanaatctggaataaaatggcggttatttctatcctgtccaaggaaactccggacttgatgtacagtggttggtggtttccactcgagaatatccttgactttgctggggtcaaccgcaatccccttggcagacaatacgtgtcccaaaaattggatctcctccagccaaaacgcgcatttactaaacttagcatatagttgatgctcccttaagcgcgttaatacgatccgcaaatgtcgagcatgctcctcttcattcttggaatatatcaaaatatcatcaatgaacaccaccacgaatttatctaactcaggcatgaatatcgagttcataagatatgtgaagtgggcaggagcatttgttaatccgaaagacataaccagatattcaaacaatccataccgcatagtgaatgcagtc

SEQ ID NO: 39325 - DNA, 214 bp, Zea mays
  unsure (1)..(214): unsure at all n locations
atctgcgacgacgagccaaccatgcatnnngaagaaccttctctgcgagaagctcgccgacggaggaaccgacgcatgaattgtcggtgacatcatgaagctggagaacgagacccggctgcacctgtatctcgagatgagatttcacatgtgggagaaacccctgatgaatgagtcttcagggaaaggatgaattcccgccgacgtgatccac

SEQ ID NO: 39326 - DNA, 419 bp, Zea mays
agcttaaagcaatggtaagtagcataggccaatttttttctaattgactcaagcctagctacgggtgcataagtttcaccgaaatccaaaccttcgacttgtgaataccctttggccacgagtcgagctttgttccttgtcaccacaccatgctcatcttgcttgttgcggaagacccatttggttcctacaacattttggttaggacgtggaactaaatgccatacctcgttccttgtgaaattgttgagctcctcttgcattgccaccacccaatccgaatcttggagagcttcctctaccctgtgtggctcaatagaggaaacaaaagagtaatgttcacaaaaatgagcaacccgagatcgagtagttacccccttatgaatgtcgccgaggatggtgtccacggggtgatctcg

SEQ ID NO: 39327 - DNA, 360 bp, Zea mays
aacgtacaccaatgtaaccatgccaaatctgtgaaaaattgttcttcacactcctaatgagtcattggctacaattgtgtcctcccttatggtaatattatgcctggaccctgaccttaacctactaacattaaggcgcatttgacaagtaaataagcagtactgtatgttcccttcttttctgaacttgtcagaatgcctgcgtggttcctaatcgggtgagcaaatatatgcatttatatgaggttatctgtgtgccgtattctatgccatgtgcctactctatgttacaactaaatgagggttaatgtcaaatctctattaagtatttgaccattgacgggtatcgtctaatgactg

SEQ ID NO: 39328 - DNA, 393 bp, Zea mays
  unsure (1)..(393): unsure at all n locations
ttctaaaattctaggagtataggttctaactatttgaaatactccataatggcttatttggactaaaaaacataaaactattcttattacatactatagaaaatcacgagccttgctaaattgggctgggattttagcattgttctataaatctctaagaattctctaactctggtagaaaaggaaaaagtaaaacattcaacagtgttgggctgaaaccggcccaatctggcccatgcctacgcaaagtcgcgcgcgcccgcgccctcattgtcggttttacacagaagacctcagcggcttgaaaatctattaaggaaaccaagcactatttgtntgtcttacagacactagcatatactcccgcgcgcttctatttcttcacattccgag

SEQ ID NO: 39329 - DNA, 314 bp, Zea mays
ccaaaaccactgaccagcactctttccgagtcctattttttagggatgctccttcacacaccacctctgggaaactctacgaaactccgcgagaccaccagaagtcgcacatataactgaaacaaccggcaccgtttcaaggatcgaggggaaacctgtgagatctcggaagagaattccgcgcggacgcgcggtcaacaagcacagaacaaacccaagacttttcgcaaccgactgatctcacctaccccgtgagcggggatgctgatgcaggctccgatcaactaggtagtgtgtactgcgtatatcttact

SEQ ID NO: 39330 - DNA, 431 bp, Zea mays
agcttctaaaggaagaacacatgttacgattatcttatgttcattctgagaaagacaggatttgtagcgcatgtcaagcacggaagcaatgtggtgcccatcatccacataagaacatcatgacgaccgacaggccactggagctcctacacatggatctattcggtccgatagcttatataagcatcgacgggagtaagtactggctagttattgtggatgattattctcgcttcacttgggtattatttttacaggaaaaatctcatacccaagagaccttaaaaggattcttgagatgggctcaaaatgagttcggcttaaggatcaagaaaataagaagtgacaacgggacggagttcaagaactctcaaattgaaggattccttgaggaggagggcatcaagcatgagttctcttcttcctacact

SEQ ID NO: 39331 - DNA, 505 bp, Zea mays
  unsure (1)..(505): unsure at all n locations
ggtgattntaccaattgaaagagcacaatctctacttatgtatttccatgaaatatcttaaacgagattatattagtaacacaagcaatagtttcctatttagcaacctctagtatatgaatgacaagaaggttactaaaacaaggaaacctcatgatatgaactaaattacccttacaagcatcatgcataacatcaattgtaaaaaaagatgaaagtagcatgattatttaattaagtttacatggcaagtttaattcatagcatggtgagtgattaatgtagaaggctcaaaaccaatttaaacaagaatgaatacatcacatagcattggttcgatcttctttgaatgttgaatggcacactccatttgggaaacacattctcatgttgtgagactacataaacacttggatagaaacattagtctcacaactctagtcatatagagaatatccttttgataagtgctntaagaatntgaatntcttacttagcactatat

SEQ ID NO: 39332 - DNA, 419 bp, Zea mays
  unsure (1)..(419): unsure at all n locations
tagctacaaattcaagtctgataatgcagtttctttctctttcagcaagccttcggttgactgaagttcgaagtctttcttttcaatgatgactgattgttcttttattttgctctccaaatttccaattatagcttcgtgttttttgtcctctaaatcctgctgcaccttcagagctttgctcagtaacatgctctgcacaaaaacagatttcgttagtaacattttcattatccaaagcaataaggaacagagaaaagattgtttaccttgaaattggaataaaataagctgccgacgatatgctgtcgtcggtagcggctgatatctatctctagcttcggaaaaccgatattctttgacagagtaccgatgaccttagctccggtttggtctcgaatgcagcctaattnttcatc

SEQ ID NO: 39333 - DNA, 485 bp, Zea mays
  unsure (1)..(485): unsure at all n locations
ggcacccaggtacattggtccattcctggtacttgagcaatgtggaccagtggcataccgacttcaactacccgaaacattgtcggctgtgcataatgtgttccacgtgtcccaattgaagaagtgtcttcgggttcccgatcgaaccgttgaagtaacaaatgttgtccttaaaccagacttgacatactctgagcaccccatacgagtcttggatcataaggacagggttacccgaagaaaaactctcaagttttataagatacagtggaaccagcattctgaagatgaggctacgtgggaaactcaagacttcttgaagaagaatttcccaggctttctagcctcatgtaatttgtaaaatgtatatagttattgcaatanaggaatgagaccccacaccacccctgccttgtaccagaattaatgaaataaaagtattctgcgtttccttctccattacttaccctangaaactttaatct

SEQ ID NO: 39334 - DNA, 349 bp, Zea mays
agcttgagaaaataatgcatatggcagatttattttatcaaatgcagctggtgtgagttcctatttatacgcccagtgcgctacaaattggagggccccgtctgtcattgattgttgctattctagcaaagggaaggtgttttttcggaccttctgcttaaggcctttgtccatgtcgcactctgaattccttatcctaacaaattaatactgcgaggggctactgttgggggccttcgtcttccgaaggtcctcaaaaacatgatttaacaatatttccaagtgtaacatatgaacaggtaccttcggactcgggttaaaatcttatacgatgtgaaaaacatgggtg

SEQ ID NO: 39335 - DNA, 470 bp, Zea mays
  unsure (1)..(470): unsure at all n locations
tagcaagtgcgagttctggatcagtgaagtcttgttcttggttacattataaaccgagagggatnggttgtagatccgaataaggtaatagctatcttggactggaaagcactaaaagatgtctgaggaatcaagaatttcatcggaatggccggttattatcggtgtttcattgaaggtttctccaagattgccaggccaatgacagccttgctggcaaagaaggttgagttcaagtggaccgtagcatgccagaagtcctttgagacattgaaggagaagttgacaatggcaccagtactgattctaccagatgttcacaagtcattcttagtatattgcgatgcttcgtatactggactgngatgtgtgttaatgtaggaagggagagtagtggcatactcgtcccgacagttgaagatcatgagaagaatatctactcatgatcttgaatancagtcgtggtcatg

SEQ ID NO: 39336 - DNA, 389 bp, Zea mays
  unsure (1)..(389): unsure at all n locations
agctttagatgttatttagaagccgcgggttaagtttgttatgatttggaccatgtctggtacctagaacccacaaccctaatcttctagtggtgcctgccctatggacttcactaccgacttcagaaaccctagtttcctggagatccatgaagaaaaattgtattcaagacctaagataatgtacttttattatctttgcatttgcataagcattacatgagcattcatgattatatatggctatatatagaaaacgcagaagagatagaagttgaaaaggcaaggactacaccaccaccacctgaagaaccccaggccgagaacgcgctttatnttgacatcggtggagcagagcctgactcacctatcacacaaggcaagccccg

SEQ ID NO: 39337 - DNA, 415 bp, Zea mays
  unsure (1)..(415): unsure at all n locations
tactaagcttcgaagaaaaagttttagntcccaagaaattcaatatttattggccagagtgcgctctaccgctagagttgagcgtgagggagactaagctgaaggagcaaagactggtcctatctccgaagtgatgcaacgatccggactggtgacctcggaaggaatccgtactgccgagacagagcagactgttgccgagacagaacaagttgctgccgaagcagaagaaggaaatattgaggaagctgatcccgatgatgattaccatattgccgtgccaagcaagcccagtcacttggacttctgaaagtcgactgtctccaaggctgacctctccaagatggtgaagtcgggctatttcagtgagaatgagaagaagctacttcgcttcggnggggggaggaaactaccc

SEQ ID NO: 39338 - DNA, 429 bp, Zea mays
agcttatcaagaatgtcaagcccttcaagattacattcagacacttcaagtgcagccatatactaaagactcctgccattatatttggggaagcagaaactatacatcaacaaagttctacaattttcccttcaaaaatgtgcagccccaactccttttatctggatttgggagactaaatgttccaacaaacttagagtttttgcttggctacttcttatcggtaggctaaaatacaagaaacattctcaaaaggaaaaaaacacaaattagaaggcaacacctacaattgtgtcctatcatggagaccttcatcattgcctcttgacatatttggaagccaggaaataacttcatcttcgacgtaggacgtccctcctttatctcctggaaaacctccttttacgagaagccaaacttcaagctttt

SEQ ID NO: 39339 - DNA, 410 bp, Zea mays
  unsure (1)..(410): unsure at all n locations
tcgcacctctgaactaactcggctgcatcgntcttcgctgtttgtcaatagaatcctgacctgaagaccttcccgactagcgttctggaggctgcgtgtattccacattgcccagcatggacctcctccagaagttgcttcccagtggatgggagaatgcacttcatgaggacgcctgatgcaccccttctgtataatgtctccccaatgagtgtatagtgagccgactgtctagcaatgcgctcggccgagttcttgtcgtctggttcttcttcattctttatatacttaatgatcggccttcttcagtcatcagagtctgactcgggttgatctatgatgttgcactcttctgtttgatccattgagatactcggctgtagaatttcttgcacaaagaccccgggtgg

SEQ ID NO: 39340 - DNA, 426 bp, Zea mays
  unsure (1)..(426): unsure at all n locations
agctttaacctctgcgagaccttttcctgtttttttctaaccataatgaatgcgatatcgaatgtcatacttgatgcatattcactttatttgttcccttgtatgatgtactgtttgtttcccaatttgaatggatgaatgtatgtatgcttgcaatcgcatagagaacgatccggtcgaagagcccgaggaactcgcaggagaagcccctgagcagcagtcggttggtggaggcaagtgtcccttgacctatctctatcctattcattctttaattcacctcccgctttacacatttatgcctaaggattgactagctnttgttaaccatgtccttgttcacctatttgggttggattattactgtttagctntatgctattgctcaactataatcaatgaacatgatgagaatatctatgatac

SEQ ID NO: 39341 - DNA, 525 bp, Zea mays
  unsure (1)..(525): unsure at all n locations
gctattacgcgacctatgaaactcagcttcggactataacgtatctgaagacgaaggttcgtaccgacttataaatgaaatgacttcttagtccataagggtgcatgattgtaatttctcacaggctgcgtcatatgcctataaatagatgaacagtactcctttactgttcacgcaatcctataatcattgacgcatcacactggaattattgttctttgtcaaggcaaatgtataaatgtacttgaatattatgttttaatatttaacgttgtataataaaatatatgtttaataatatctgtcattggtataaatntctttaatttttcatattctagcattgggtatattgttctatagagctaatcacgaaggtaagaccttcgtgatattttgcttacagtcttcgtccgaagttcattatatccaaagggagataatgcttcagcggacgaanggcattnaacgttaacattntaatgtgccttgtcttaattcatagcatntgagaacaagtcccca

SEQ ID NO: 39342 - DNA, 412 bp, Zea mays
agcttgtgaagaatcttcattccaacatgtgcttttttgtgatgccagagccaacccatgttagtcttaacaattaagcaagtgtcgagttcagctctatcaaaatctactaagtatagctgaccctctaacactcccttaaatgctattgaatcatcactttttctaaagacagtaacacatgtatccgtaaaaagacagttgtaacccattttacatagttgcgaaactgaaagcaagttgtaatctaaagaatctacaagaaaaacattggaaatggagtggtcaggagaatatagcaatttacccaatcctttgaccaaaccttgatttccatccctgaatgtgatagctcgttggggatcttggtttttctcgtaggaggagaatatcttattctcccctgtcatgt

SEQ ID NO: 39343 - DNA, 375 bp, Zea mays
actttaatactcagcttcacatgttagaatatctccatatgataaactcacaggtgttataatccaatagcttacaaattcggatgagtttcgtattctatattctctcaataatatagaaaaaaaggaactggttaccgaattgagcagaatcaattctctagtgtgtgtataaaagtttgaaagcttacctaccatatcagtctctgcccacacaactgatgaaccaggagaaggcttacagtgacaagaaatgccataatcttcaatgtatctcttagtgaaatatacatcttagtagaattaagggcaataaaaatgtggacatgttcataaaaaggcacaaattcaaattcatcttggtagagtaatatt

SEQ ID NO: 39344 - DNA, 436 bp, Zea mays
  unsure (1)..(436): unsure at all n locations
agcttcanaagatgcttcgggaataggtgtggcgattntctcatataaagtttcttctacagattctttttccgtttctttttcaatttccaagaattccctcttggtaggctctgaaagcccagttttagtttccgcttgacttttggcagcttcggcctcagtttgtgtctttggaacttcggtaactatcttcgaagtagagcttgaagattttatcgtttccagtacatctagcatgttaaccaatcttttcctcttgggggttgtcgtaaggtctttttgtgccatcggcattggcattggcacctcaactcttgctgaaggacttaaaatttccgatgtctttgtctcttcagccctcggttcttctatttnttccatctccagcattttggccggctcttcaatatttgacaggggagtcggctccttg

SEQ ID NO: 39345 - DNA, 384 bp, Zea mays
  unsure (1)..(384): unsure at all n locations
ctcagctgaactcggtngtctgcaagacaaggattagcttgcagatagccttgcctacaacagcctaaaggttggtatactctggcttgtcattctgtaattcttgttaagatgaactattgctgcgttatttcttatcgtcgttatgtgttcactcttcgcttgccagggcttgattctaagcaaggctctgaaggcccaaaaagatgcagaggattagagcttgcgaatggcacttggaaaccttcgttctgaggtcataacattgagaaatgaagctcttgagaaagacaagatcctacactctntagcgaaaagattaagatctagcgaagctaggctttctgctcaagctgaaactcatcangccgagatgcaagagct

SEQ ID NO: 39346 - DNA, 428 bp, Zea mays
  unsure (1)..(428): unsure at all n locations
agcttaaacggtgggagagtggaaaatggtttgatgctagtatacgtanttcacttgggcaacaatggttttcttcgtcccctgcaatggcacagtgcgggtgtatttgtaggtaaccgagggtctgccctgccttgctaaacacaattagaccctcagttacctagtttatccccggaatatccccctgaggggttatggcgggtcattacaacgtaataatatacagacatgggccatccctctattaaccctgtcggcatggcggcctacgggcgggccctgcagcatggaccggactatacacaggcccctttttacaatgcggaagattgaacatatggtcttcgtggtcttgattgtccaagctccgaagtcttcaatggtcttcgctccggtttgccagggcgaagatagtgcctgagtct

SEQ ID NO: 39347 - DNA, 487 bp, Zea mays
ttagagacatgagagatccaaagataacagcaacattcattaatctacatggatacactatgtagataaaacatcgtcatgatcctcggagaaggagtatgagaatgatcagaaatgagagatttacgccagatcggcatccgatacttgagaacaggttatagcagataactagataatatggcagaatcattaaaggatccaaagatttagatgataaagccacaacatgattcgcaaggaaaaagattaccagatccaggtgaaaggagaggtatgcaaacaggatcagctaggatgatcaacagaaatgctatgaagtctttggggcaaggatctatggaaagaaacatggcttggtcatggtctgcgcaactagacaacaaacgatgtttttgttcgaataaccgcgtgcacaggaagtccggttggctagtggtaagctatgggggctataagctggcatgtgcatacaatacgcaccaca

SEQ ID NO: 39348 - DNA, 431 bp, Zea mays
gactgagcatcagcttaaaactgcggacaaaagaaacacatcggatttctatgtactggccagctgtatcccagtcggttagacatgggatgtacatccaggacgcgcagtctcatgtggcgtctgggaagaggacacaaccaaacatgtgcaagatccaagctcgacaatagaactggactgtagcctcatcagcatcagcagggcacacaccaaaagactgacggagccatgtgatgcctactccagcagtcctttcaacgccctcagcaggaagctccctacccagaaagccctcaactatatccctccaaccgtcagagtcacattggcctgtcactgctctgccaccaacatcgagtccaagtatcttctgtgcatcctctaatgtgactggcatctcaccacaaggaagatgaaaactatgtgtc

SEQ ID NO: 39349 - DNA, 487 bp, Zea mays
  unsure (1)..(487): unsure at all n locations
agcttgggaagattcttcattccaacatgtgctagtcggcaatgccagagccataccatgttagtcttagcaattaagcaagtgtcgagatcagctctattaaaatctactaagtatagctgaccctctagcactcccttaaatgctactgaatcatcatttcttctagagatagtaacacctatatccgtaaaaagacagctgtaacccattctacataattgcgaaactgaaagcaagttgtaatctaaagaatctacaagaaaaacattggaaatggaatggacaggtgatatatcaattatacccaatcctttgaccaaaccatgtattccatacacgaatgtgatcgctctntgtggatcttgggtattctcgtaggaggagaacatcttcttcttccctggcatatgagttgggcatccgctgtcgatatccaacttgagctcccggatgcataaacctactaaacaaagttagttcttga

SEQ ID NO: 39350 - DNA, 435 bp, Zea mays
agcttaattggtggaaaattctttactgacatctgggataatggcggtcgagggatggcccacgaaataataaagaagagcgaaaaagatactcacgatgctagggaagcaacgaatgcagctgaaaaggctgcggaactcgaaaggcggataggtattgcttaatagtttttaactttattttctatttttgtgacttcgaacttatttacgttttctatcgcagccaaactatctcctccgccagagcccttcaagtcgctgatcgagccagaggcgaaggaatcagcagaaattattaacatggccgaaagcattttggacgaagtcattactcaactgctgaccgaagctgcagacaaagttttgaaggaagaataatagatattgtaaaaacattgctagaatattaatgtaacatctggtggactatgc

SEQ ID NO: 39351 - DNA, 173 bp, Zea mays
cttacaatataatatgctccttcttcacaaccgatgaaggatatcatgaaaaatctagaagctactgtaaggattggaaaatgggctgcagagctcaatgaattccggattgattatgtgcataggtcttccattcaatcccaagcgttaggagacttcattgctgactggac

SEQ ID NO: 39352 - DNA, 373 bp, Zea mays
  unsure (1)..(373): unsure at all n locations
cagtcttccgctgacgccgtgccacctcatggacatcatcgaaaatgttgcggctcatggagaataatgccgcaaacccatggaccaagcgagcacccatgcctcggccacgacctcgaccacgaccacgagcacgtggcatgggagatccgccaccacgagaaagacgcgaggcaccggcggtgcgagaggaaaatggatgatggggaggctaggaggtggctcattggaggacgcagggcctccagaccctgagggagcccgcttcgtacgagcagctgggttggaggaatcaacccantatggtccgctaccggagtggttgacgggttcttcgaagtgggtctgggtgaccacttcgatcatcttcatg

SEQ ID NO: 39353 - DNA, 366 bp, Zea mays
ttgcatgccacaggttgcaccctgggtgtagaggggctcttgctcagtgacaagtgttggaagcttgatcattaactcacactcaccaacttgcttataacctcctcgggagacattagtttatatctatgatccccacgtttaaatgaacttgagtaggatcgcgaaatacgacggatctaagaataaccttgaccatttcatggtcgtcccacttggtgctcccgaggttgcgcacttggttcaccattgtctttagccagtttgacattgcttgtggctcttctcctttgttgaggacgaatcgaccaaactcccctcaatcgtctcccgcttggtgatcgtggtcaactcgtccccttcgtg

SEQ ID NO: 39354 - DNA, 424 bp, Zea mays
tgcatgctagcttatctcacctgagaggaaagcttattcttttgggtgatgtgttagtttgagctttgccaagtgtgatgttgatgttcatatcgtttcttgccatgttgctcatatggactagtgcttccgctgcgatgaattatctggcttctatagtggtatacatagtcatgtggttaatggtgctttaagattgtcttaaattagcgtcctagtttaaattggcactagtttgaattggtatcttaaaggtgaatagtggtaggttgatattcctgtgatatatccactaatttgaacggtgtttaaatctgattatgtgcatttggattcttgacaccatgcatcctaaaaggtgctaaggtgtagaaatgtttcgaattgcctaagtatgtgcaaactggcgtctgaggccaaaact

SEQ ID NO: 39355 - DNA, 450 bp, Zea mays
  unsure (1)..(450): unsure at all n locations
ctgcacacatagctcatntgaatccctgtgatcatatctcttttatatgctacgactaatgtagtctccagtctatttcaaaccaagtcatacgtatattgaaagggaattgtagtcttctgcgaagacataggcttccactcctttactcatacttagccaccactccgagcaactctctcctctttgtgggagatacgagcatcaatgaaaatgacttcatccttgggggagagagtaaaagctcaaacgcaaaaagactctcgctttggtataatcctaactcacttatttatgaccaaaagggaagaaagtacttcgcgggctctaatgattccgctctttggcgattcatgcccnaaagggggagaaatgagcccactacataatgaccgcaccaccaccaatttcaaacacttaagtgtcgaatattttacaatagatatccta

SEQ ID NO: 39356 - DNA, 421 bp, Zea mays
  unsure (1)..(421): unsure at all n locations
agcttgacaacgaggagatggcgctcatcactaatagttttcgccaaatcctcaagcaaaggaaggggaaagactacaagtcccattccaaaaaggtgtgctacaagtgtggtaagcccggtcattttattgcaaaatgtcctatatctagtgacagtgatagggcgacgacaagagggggaagaagaaggacaagaagagatattataagaagaagggcggcgatgcccacgtgtgtcgggaatgggactccgacatgagctccaccaactcctcctccgacgaggatgccgccaacatcgccatcaacaaaggtctcctcttccccaacgtcggccacaagtgcctcatggcaaaggacgacaaanagaagaagtaaaatctagagcctncacnaatatacaacatctagtgatgagag

SEQ ID NO: 39357 - DNA, 492 bp, Zea mays
tcgtcttgacaatgctcttatatacccgcaacctgattcctaagatacctgctcgcatacatggaaaatactgtcaaattatgtttttgaggaccttcggaagccgaaggcccccaacagtagcccctcacaatattaatttgctgtaatgataaattcatattgcgatatggatgaaggccttaagccgaaggtccgaaaaaacaccttctctttgctagaatagcaacagtctttgacaagcgggaccctccagttttcaacgcactatgtgtataaataagagcccatcacgggtttatttggcacgccctcttgccaactgcttttactcacccaagttttatcctgcgcgcaacaacacttgcttggccttttagaattttgagcttcggtttcgagagtactttatcagccgttacaaggatgtctgaagataaaaagggctgtggtgattcgaagctaagtctttctgaagagatgcatctgggc

SEQ ID NO: 39358 - DNA, 432 bp, Zea mays
  unsure (1)..(432): unsure at all n locations
agcttctaaagggagagcatattttgggactaataaatgttcattttgagaaagacagggtttgtagcgcatgttaagcatgaaagtaagttggctcccaccatccacacaagaacataatgacaacggataggccactggagttaatccacatggatctattcggcccgatagcttatataagcatcggtgggagtaagtattgtctagtaattatggatgactattctcgcttcacttgggtattctttttgcaggaaaaatctcaaacccaagagaccttatagggattcttgagacgagctcaaaatgagttcggattaaggatcaagacnataagaagcgataatgggacggagttcaagaactctcaaattgaaggctctcttgaggacgacggcatcaagcatgagttctcttctccctacacac

SEQ ID NO: 39359 - DNA, 387 bp, Zea mays
tagcaaaattcatggccatcccgcactattcatacatgatattgaagatgccgggaccacaaggaatcatcaccgtgcgcgctgacttccaaggcaccacagaatgcttccgagtggccattcaggcggccctcaccaccaaaccaccgacaactttcctctgcgcatgcgaactcacagcctgaggaagacctcgtgatacccacgaatgaagctcaagccgtgacctctatgcggctgactgaataaacaaagagaatcaacctccgattcgctgacgaacgcaagactgtcatcatcagctccagcctggatgacaaataggaaggcgtgctcgtccagtttctgaagataaccgagacgttgtacatggaagcctgtgatatg

SEQ ID NO: 39360 - DNA, 370 bp, Zea mays
tctttgatcggatgatggtgtcagtaaacaaaattatagtacttgggagcgaagattggagtgactcccacgtcacaagattattcatgagagcgtatcacgaaaaggataacactcttgcgaggatgataacggatcgtgatgactatgaggatatgactcctcctcaattatttgcatagatgccacaacacaagtctgaagaagcccctatcaagacaagagactctcatgccttgatcactaatgaacaatacacctccaagaagaacatataccaccaagccaagaaagtgggcgagacctcatgagctgaagatagctcaagtgatgaagacacaagtatgttcatcacaacattcgataaatt

SEQ ID NO: 39361 - DNA, 419 bp, Zea mays
agctttaccaaatggacgtgaagagtgcctttcttattggaccaatcaaggaggaggtctatgttgagcaacctcccggctttgaagatagtgagtaccctaaccatgtttataggctctccaaggcgctttatgggctcaagcaagccccaagagcatggtatgaatgccttagagatttccttattgctaatggcttcaaagtcggcaaggccgatcctactttattcactaaaactcttgacaatgatttgtttgtatgccaaatttatgttgatgatatcatatttgggtctactaacgaatctacatgtgaagaatttagtaggatcatgacaaagaaattcgagatgtcgatgatgggggagttgaagtatttcttaagatttcaagtgaagcaactccaggagggcaccttc

SEQ ID NO: 39362 - DNA, 428 bp, Zea mays
  unsure (1)..(428): unsure at all n locations
agcttgcacacatagctcatntgaatacctttgttcatatctcttctatatgctatgactaatgtgttttcaagtctatttcaaaccaagtcatatgtatattgaaagggaattggagtcttctgcgaagacaaaggcttccactccgtaactcatgcttcaccatcactccaagcaactctctattccttgggagaaatgagcatcaaaaaaagagggctctaatgattccgtttttggcgattcatgccaaaaagggggagaaatgagcccaaagcaaaaggaccgcaccaccaccaccaaattcaaaaacttagtgctttccaaaagtatttatcatttggtatcctattgtgttcaatagggggagatagtagtatttcaaaaatggtatatcaaaaccctcttgaacactaagaggtggatct

SEQ ID NO: 39363 - DNA, 491 bp, Zea mays
  unsure (1)..(491): unsure at all n locations
taaggatactattcaactaaagtaagacgaagttgataaattgccaacgtatgaaaatttcctctccttcagttgttntagtattctacccttagtaggatgtaccatagtataggttaaattccttgcaatgtaaaatgttcaatagtgcatataactttgacattaactatatgtgtgcactaatttaaaggaatttagtctatccttttcggtttcaataatgatgattcatttgccatccatatatcaggatcatcatttgtgaaaacctcccttgtgtttctaatgctctcttttctaagtgtttcaataaggtccttccaagtgctttcaagatggattcaaaatctacggatataagagtcttggttgtttcaatcacttgagttcaattgatctcatatcaagtatgatcgaatcaagaaaagatgaaaggagntcacgatcactcggttggatgatatcatacagagaaaagaaatcacagt

SEQ ID NO: 39364 - DNA, 419 bp, Zea mays
agcttcgtcgtctgaaagaaaattaccctgatattaatagatgatctcagttctccaatcttcactataaacaggggatatgttaaggattgctctttcaagaagctcgaccgaaggtgctcttattgtttcaaaaaatactttcgaaggtacaagcagcccctgggctgctgacttagccaatagatcagcgtattcattttctccacgaggaatatttttgacagagaaaccttcgaaggaagcctcaatccttcggactgtatctagatacttttcaagcttcgggtctcttgctttgtaacttttgtcaatatgaccagaaataacttgggaaacagttttaaggatagcccttctgatcccattgctttaatttccgaagaccaaaagagagcttcatactcggatgttattgg

SEQ ID NO: 39365 - DNA, 430 bp, Zea mays
  unsure (1)..(430): unsure at all n locations
agctttagctgatntagagtcccttggtggattatccncatatttagcttttccatttcttgacacacagtgttgtcagaggtcttcaccataagacagtggcaggaagccttacggctcagtgcatctgccaccacattggctttgcctgggtgataatggatctccagttcatagtctttaataagctcaagccatcgtctttgcctcatanttaattccgactgggtgaaaatatacttcaaacttttatgatctgtatatatgtgacagatatttcccagcagatagtgacgccaaatctttagggcatgaaccacagcagctagctccagatcatgagttgggtaatgctcctcatgtcggcgcaacttccttgaagcatacgcacatactccggcctcttgcattaatacacagccgagtccac

SEQ ID NO: 39366 - DNA, 449 bp, Zea mays
  unsure (1)..(449): unsure at all n locations
tcggcatagtccactctntcatagttggatatacgccgaatgccatttattttctgcnctaatatccctagtgcccatatgttctgcaataattttgaattcaaccaaggcacaccataagtggacncttatactgacatcttgcaatcgggtcctgtctctcccaaaatcaattcaagagagctctgatccagcttatctttgtctccgtcaactttgaccataaaccattctgacttccagcctgccagccatatgcttcggtagctgatcacaggatactatgtcggtatacgataagcaaaattatattcaccaaaatttcatgcaatccatctcttctggccttaagctggtaatgcagctcatgaactctacagaagctgtcggcaaccgcatcaccgctagcttggatagccatacgtaacatttaacctgacaatgcatta

SEQ ID NO: 39367 - DNA, 414 bp, Zea mays
  unsure (1)..(414): unsure at all n locations
gtcttgactataaaggggccgctccacctggtctccagcttgcccttggactccgtccgagctgtccggatgagtacgaggtccccctcgctgaactccctcgggatgactgagtggtcgcgccatgctttggtctgggcttggtacttgttcagggcctgtagggcgaagactcggtctccgtcaatgagatcctttgaagttggctcgtccacgtcggggacggctgacgggactgttcgcggggacccatgctttatttcttgcggggtcatggcctccgatccgtatagaaggcggaagggagtaaacccggtcgccctgcactcagtcgtgtttagtgcccatactgcctcangtaacaaatcggtccatctgcccttcttttcatcaacgagcattntcttgacagct

SEQ ID NO: 39368 - DNA, 332 bp, Zea mays
ggcggccgaattgactcgcggagctatgagaggggctgaccgtgaatgtgagcgcaggtgaacgaggtgccccatagagcttatatgcctggcgggcacaccgagggaagaccccggcgacttaccggacctcgggtagcgccccgcggttggcgatcttggttgccgacaaggtgaacactgtcccgtcttctgccaatttggccatgtgcctcatccacctgcttgccttgcaggcaataccttttcttctacaactacaattgttggggtatagatttgctctggtgcaaatatgagcgaaatcggctgttcctgttaacccagcaatc

SEQ ID NO: 39369 - DNA, 420 bp, Zea mays
  unsure (1)..(420): unsure at all n locations
aaatttctagaatcaagaatattgagctcatgcctaaatctggtaaaagattggtcatcaagtggcttggtaaagatatcggctaattgatctttaatattaatgtaagaaatctcgatatcccccttttggtggtgatccctaagaaaatgataccgaatggctatgtgcttaatgcggctatgctcgacgggattgtcggccattatgattgcactctcattatcacatagcaaagggactttggttaatttgtaaccgtattcccgcagggtttgtctcatccaaagcaattgcgcgcaacagtgacctgcggcaatatactcagcttcggcggtggaaagagcgaccgaattttgcttctttgaagcccatgacaccaaggatcttcccaagaactggcaagntcccgatgtgctc

SEQ ID NO: 39370 - DNA, 407 bp, Zea mays
  unsure (1)..(407): unsure at all n locations
ctcaagcttacacanttgaacatgagcgttccccttaggcttggtctcgctttgttgcccctagcggacttttagtgccgtcttgaatctcttgatgatgagagccatctcttcatcattaagtgcggccgcctcaatntgagccaccttgctaggtagcgattccttgcttcttgttgctttgagagcaagaggttgatgctcattgattggacccgttatagcgtcgtcgacgtatctcgcctccttgatcatcattcgcccgcttacgaattttccgagtacctcctcgggcgtcatcatcgtgtacctgtgattctcacgaatatcggttacaagatgaggatcaagaacggttatggaccttagcattatgctaacgacgtcttggtccgtccatcgagtgc

SEQ ID NO: 39371 - DNA, 433 bp, Zea mays
  unsure (1)..(433): unsure at all n locations
agcttaggtaggtcagttagcaagatcaaagtctttatatttactcaaacagtatgagtacatcatgtgcagtaaaccctaaaccatggcaaattgctctgtacagtaagaaaaatgaaactaaaaaatgcttaaattatattaaagcatcagttttnctggttccacagtttccaccgtcatcgtgcccctgcatttaaattgaaacaatgctaaaattatatacaaatggggatttgaaccatggttgttgactccaaaaccacgttggcgtccacctagccaacaaaacacagtgaataaactaggataatgcaaaactagaatcctatattagtcaaaaacctcaatatatcaataagatactaggaggccaacacctccatgttnctctcaaaccaaacaagaccatanaaactatcaataaaatcgt

SEQ ID NO: 39372 - DNA, 378 bp, Zea mays
accagaccaacctaacaaatgcaccagaccaagtacgtaacgccttctcgaacatagccgaatgtgcgaaggcatacaacctcatcatacaagccattacacatggtcaagcgagggcatcacactctacatcggctcaaccttcagaataattcccattttcctataataaaatacattatcctaagctcctcacccgcaaaaagacttcacagctgcccctcacccggactcacagaggccgacaaggacaacatgttctggctgccagccatactcacacgaagccgaacggcgtgcgaccaactactctacgcttggcaaccgccctcggcgctacgcacatactatgaccagcacaactttacactcgcagca

SEQ ID NO: 39373 - DNA, 407 bp, Zea mays
gaagttctcatccccatgtgctttttgttatgccacagccagcccatgcgagtcttatccattaagcatgcatctacaccggcctcttcttttgcataagcaactaaataaagtttgccgcctaatacaccccttaaaagctagtgaaccatcacttcttctaaagacagacacatctatatttgggaacagacagatatattccatattgcacaattgactaacagatagtaaattatatgctagtgactctactaaaaacacattacagatagagtgctcattagaaattgcaattttacctaacccttttaccttgccttgattctcatcaccgaatatgactgaatcttgggaatacttattcttgacgtatgaggtgaacatcttcttcttccccgccatat

SEQ ID NO: 39374 - DNA, 393 bp, Zea mays
actcaatcctgacacactcaaagctatcaatctacagagagccacatatccaagactgacccaaggttattgcaaattataatgtccaaaactcatatcatcacgggaagatatagacgctcgcggacataaagaatcaatcctatgccgacaagccaagacctacaacactgaggaaagcccaacgatggttacacaaatgctcttaagcgcaagcattttagaatatcatttcttatgtgcctcatgtagtcacatagaaaaataaagcacttccaatatctttaaattataacacccttctctgaagagaatcctctcatatggtagattggatatacagcactcctatactatggcatgcgacatgtgttacgatattaagcaactcat

SEQ ID NO: 39375 - DNA, 414 bp, Zea mays
agcttaactggtggaaaattcttcactgacatctgtgataacgacggccgagggatggcccacgaaataataaagaagagcgaaaaagatactcatgatgctagggaagcaacaaaagcagctgaaaaagctgcggaactcaaaaggcggataggtattgcttaatgggttctaactttattgtttatttttgtggcttcgaactgattcacattttttaccgcagctgaactatctcctctcctcgagcccttcgagtcattggccgacccagaagcaaaggagtcagtagaaattactagcatggccgaaactattatggacgaagttgttacccagctgctgaccgaagctgcagataaggttttgaaagaagaagaatagctattagtaaaaacatttgctggactatgc

SEQ ID NO: 39376 - DNA, 372 bp, Zea mays
  unsure (1)..(372): unsure at all n locations
ctcagctatgccctaaaatgctacttgttaaggcaagcttccatggctcangataacgagggctatattttatattctgctgattatcccgagcataagattatgagaattcattctaggaagtctcactctgtctctcatcatgcttttatgtataagagtgaggcatctaattctaggcaatccacccatgttaaattgcctaaaaagaaatctcttattgcatcaaatgaacctaacgtttcatttaaaactcttgatgcttcatatgtgcttactaacaaatcaggcaaagtagttgtcaaatatgttgggggcagacacaaggggtcaaagacttgtgtttgggtacccaaggtgctctgttctaat

SEQ ID NO: 39377 - DNA, 427 bp, Zea mays
  unsure (1)..(427): unsure at all n locations
atgcagcttgaaaatctgaaaagtagctcaaaatcttatgttgtaacttgtataaagtatgatgtaatctgagtcttactctgtaatataatcttacttttccgtccatgtatgaaatgctttggtgtggacgaaattaatactcttgagccataggcgaanaacaccttctcttctttgcgtacacagcgaagcataagattgccttcctttcggaaccgaagcaagtttgtatgttatgctggtgatgatcctatgcatgtctaagtgaatgtttatgaatgcaaatgtcatgatgtaatgtatcgtgccaatgaatgttcagatacatattctaagccatattcccttgggaatgactcaaatcttctgtgccgcttatttttcggcctcaccgtttatttttcggtgtataagcgctgacttt

SEQ ID NO: 39378 - DNA, 432 bp, Zea mays
  unsure (1)..(432): unsure at all n locations
tcgaggcagtagcanagntcttttcggtgtcagcgctcatgttgttatgcgccagggcttctggggaagggttggagatcagccaagaaaaatatactgcctattctttggtgcatacaagggccatagcaccaggatgtgccacgttaccatccagaagcagaatgagatagcagaagcagcagcacaacaaagtcagccgaatcaggtcatgcatacaacttcgtatcattcgccttatattccagaatatgtaggcaaccaccctgcagcttctgttgcttcggcaagccaacctcaagcatcttggcaacagccttcaccggcaccgccgacgcagcgatgacagcagccagaagggagtcagcacaatcaccttcagagggacttcagagaggagttccgagctcgcacagtcaataacactatgcc

SEQ ID NO: 39379 - DNA, 371 bp, Zea mays
ctcacagatccaaccctacatggcaacatcttgttcagctgcaaaagacaggactacaagtgctaccgagcccattgtagatgataactcactgataggggaacggcatccacggcagtaatgcctgataactcagtcgcatccagggctatatctcatagtgacatctaaaccgacacgaattcattgcctagaccaaaacatgcaaggatttaaattctggttgacagaaagccatatatctcagtatcttgtccttacccgcctgacttggatcccgccgccgcgggcgcctcattcgccttggcctgcgcacgcacaacaatcccacacgttaaacagatcagcccgacgcagagagtcggagcgca

SEQ ID NO: 39380 - DNA, 438 bp, Zea mays
  unsure (1)..(438): unsure at all n locations
agaacacgngataggactaactaatgttcaattttatatatatagaccntgngcagcttgtcaagcatggaaacatgtgggaggctctcatcacaccaaanatgtgatgacaacatcaagacccttggagatgctgcatatggacctttttggacctgtcgcctatctgagcatangagggagtaagtatggtttagttattgttgatgacttttcccgcttcacttgagtgttctttttgcaggataatgtcgaaacccaaaggactctcanacgcttcctcatgagagctcanaatgagtntgagctcatagtgacaaagataaagagcgacaacggatccgagttcaagaaccttcaagtggaggagtgtcttgaagaggaagggatcaatcacgagttctccgctccctacacaccacatcataatggtgtggt

SEQ ID NO: 39381 - DNA, 363 bp, Zea mays
caactccgctcatgctttccaaacattattttttcaaaaccacgaaacataacaggaacgagcctctccattattatgtgagagtcatgactcttcaacccagataacttgcccgtcttcaaaatcacagaccttttatagcccgcggcgtaaccatctgggaactttaagttcttcaaccatttcatcaattgggtcttccttttaagtttaatactgaaaggagcacgaggcttcttctaattctctcctatctccatagatggtcttctacagattaaggccaagcccttccttgccttaaggctgatctttgttttgtcggtgatattcatgccagtgctgataatgctttcacccata

SEQ ID NO: 39382 - DNA, 405 bp, Zea mays
  unsure (1)..(405): unsure at all n locations
tcgaccctagatggataaagtgtgtcacaacgattatgaattcttgcacatttgtagtgcttctgaatggtgccctaggtaaccattccattgcaagagaagggtcagacaaggtcaccccctctccccgctcctttntgtgttggctgctgacctactccaaacaatagtcaacaggtcgaaagagctatgtattctaaagcttcttctccaaaaaagatgtgggcaagacttccatatcatccaatatacagatgacactatactggtcttggaagcatgtcagaagaaactattctttctgaaggcaatcttaaactctattgctaaatctactggtctgcgcatcaattatcacaagtccaacatatatttcgtaaacgtgttagcacaaaatatggaaat

SEQ ID NO: 39383 - DNA, 422 bp, Zea mays
agcttggtgaactcatatgttaaccaagatctttaagagaaaataattatattcagttgaaggaagaactataactggtggtagatatattgccatttgtagtagtcgtatgagttgatgtaatgtagaaatcttaggtgtgacgattagcaatagagtgcaccaccaagaagaagatgaagtaatttcagtcaatgcaacaagagattaattagtcatgtcagcgacacttcccaaaaatgtgattatcaatacctcaccagagcaagtgagcacttggatgacaacgttttagaggcttgctctccgagaacatatgcgtgcaagtgctagttacaattgaacgatggtagagagagctctctaagaatagatgttaggatgtgattcatatagacgagttatgacctgaacaaccacga

SEQ ID NO: 39384 - DNA, 394 bp, Zea mays
taagtctctttgaaatctttaagggtaaatgcttaaaatgtttgcaacatgcttccataagcgcataaactgtcatgagcatctcacttatattatgacacaatgcacttcacattccgtataatatagatatgttctcattaacctaattatgtgcaattggcatttaaggccaaaatatatgttcctctccatgcacatatttagaggggagcaatctatgttatatagaattatgatcatgcttaatttgacatatccttttgatcatgtctcttttatatatgctatgactaatgtgttttcaagggtacttcaaaccaagtcataggtatattgaaagggaattggagtcttcggcgaagacaaaggcttcacttcactctactactca

SEQ ID NO: 39385 - DNA, 403 bp, Zea mays
  unsure (1)..(403): unsure at all n locations
agcttgcacccaggtacattggtccatttctgtgttattgagcaatgtggaccaatggcgtaccgacttcaactccccgaaacattgtctactgtccataatgtgttccacgtgtcacaattgaagaagtgtcttcgggttcctgatcgaaccgttgaagtgactgatgttgtcctggaaccagatttaacatactcggagaatcctattcgagttctggatcaaaaggacaggatcacccgacgaaagactctcaagttctacaagatacagtggaaccagcattctgaagatgaagctacttgggaaactcaagacttcttgaataagaatctcccacgctntttagcctcttgtaaattgaaagtctgtatagctgtgaaccccacatcacccctgcctt

SEQ ID NO: 39386 - DNA, 447 bp, Zea mays
  unsure (1)..(447): unsure at all n locations
catcgagtattcctagcttactcgattcatctttgtctctgccagcttaacttacggactggttgatttgaccttcaggcgttcacgaccaactaagacgattcttgagaatcctangacctgtgggttaagacccgccacgctttcgctgcaccacttagatcttgttggttgatgttgatcgcattgtcttcattggggttagcagctaacccccttaacatgggcgttgatatgcacttggtgaagatgttgccgactctgatcttgactgatttggaggagttggaggttgccaaatggacaggcgcaagtggaaagaatagcgagaaaaggtagtatagacggattatagagagcaggggggagaacccaactacttaactctatggcactcacctagttaacagattccattgccgaccaagggccacaacacattaacac

SEQ ID NO: 39387 - DNA, 435 bp, Zea mays
  unsure (1)..(435): unsure at all n locations
agcttcaggacaagctagttcttggcaatgatgatgagttatcaatcagatgttttttttctgattttattcaatcaacttattttcccatctgcttcatagggcattatgaacaatgagatcctaatgacatcaaacatggaccggatggctgagattaattggtgtcaactagtttatactgatttgtgtgatgctggcagtcgttggcacaagaggaacagaacaaacattactgcaacagtatatggatgttcactcattgttcttgtaagtaactctctgtttaccaagtatatatatgttatccaaatatttgttctgtactaattatatatgattgattttctttntttgttcagatatactatcttgaccacttacaccaccctgcatcacctgagaacaagtatggtactccccgcattaagtatt

SEQ ID NO: 39388 - DNA, 489 bp, Zea mays
  unsure (1)..(489): unsure at all n locations
ctaagcttgcagcatatttgtacctatctcttgatgggtccatcaaggttagtcaacatagatctagggacccaaatgtcctttgtgttagcacttggtaaactcattacctttctagcacaagttgcaattttaggttgcctagttacatgagaattaattgacaagctaggagtgggattgttaccaatgggacaatccttgcattgatgtccctttttccggcatatgtagcaaagtcgatccttgagtcttgaagatttcttctttccttgtttcttgcttgctacatggttagtaaatattttcttttctaaccctatgcctttntgtttcaaatgggggcaagatttgattaagtgtcccttctttgagcatttaaaacaaagtctatcatccttgttaataatcaagccatctttaatgtangggcaagacctaatcaagtgtccctcttcanagcattcactacactttcttattatctta

SEQ ID NO: 39389 - DNA, 427 bp, Zea mays
  unsure (1)..(427): unsure at all n locations
agcttgtgaagattcttcatcccaacatgggctattctgggtgccagagccaacccatgttagtcttaacaattaagcatgtgtcgagttcagctctatcaaaatctactaagtatagctgaccctctaacacacccttaaatgctattgaatcatcacttcttctaaagacagtgacacctacatcagtaaagagacagttgtagcccatttgacataattgggaaacagaaagcaagttgtagtctaaagaatcaacaagaaaaacattggaaatagaatggtcaggagatatagcaattctaccaagtcctttgaccaaaccttgatttccatccccgaatgtgatagctcgttggggatctttgtttttctcatatgaagagaacatccttttctcccccgtcatgtgattngtgcacccact

SEQ ID NO: 39390 - DNA, 451 bp, Zea mays
  unsure (1)..(451): unsure at all n locations
tgctnattgtgggggaatggatggagtactggnattaaatgtatattctctacttgcatgatgttactctaggttcctcatttgtaccatcttagcatgggcagaaacaacgaagtctaataaaagtatatcccaaaaatactgctttgtttgagtaacttatttttacttacttttgtcattttattgcatgaaggtctgccccacatctagctacacgtgctacttcagagagaaagttgtcatagtcaggtactctgctaaaccaattaaactaactattaagcgcttactagagatggcaatgggtacccgaaacccggaacccgatgggttttaccccattagggtaccggttagggtcaattatcatacccatgtggttgttaatgggcataaatgaataccctactgggtcattagtaccgggttgttcctatagtacccaaac

SEQ ID NO: 39391 - DNA, 421 bp, Zea mays
gcttcgtactcagcaatggtatgtgtgccactgaaattctttcttgctgccgaacaagtttaactttggagggtgcgaccaacacagcggctgctcctgccccgaatgtcccccagaaccgtcacataatactgtccaaacttcggcatcttactcgcttcttttttctgagcccctggcgttcagtcagcaatgaagtctgctaacgctcgtgactgaatcgaagatctatgcacataatcaatgcagaactcattgagttctgcagcccattttccaacccttccagtagcttctctatttctcataatatctttcaatggttgcgaggaacggacaattatattgtatgctcgaaaatagtgccgaagctttctgtaagccatcacaacagcatacagcaccttctccattctgtaca

SEQ ID NO: 39392 - DNA, 315 bp, Zea mays
atgatttgcagcgcatgtcaagcatgaaagcatgttggcggtcatcatccacacaagaacgtcatgacgaccgacaggccgattgactacttcacatagagatattcaggccgaatgcttacataagcatcggcgggagcaagtattggcttgtaaatgtgggtgattactctcgctctacttgagtgttctttgtgcaagagaaatcacaaacccaagagaccttaaagggattctcgagacgagcttaaaatgagttctgctcaatgatcatcaagattctaagcgacgactggacggagtttaataactcac

SEQ ID NO: 39393 - DNA, 413 bp, Zea mays
  unsure (1)..(413): unsure at all n locations
ttgttcattcctgaagtggtgttatcctgaagatgtttgatttgtttggctntgcctttcttgtcatacaaggccttgccaaggcgagccacctcttgctttaattgctcattctccattgcaatctcatccgaacatgtttctataacaacattcttaacaagaacttgattgcaggggttagaatcatcaattaaatcaaagcaagaagtagaagcatcgttctgaatgatttcaggcatttcaaccaaagatatttctgggtgctactaatgttttctagcttaatagttagctcattattatgtatgctaaaaatttccattctcctagcaaattntcagcggcttcttgagagctagctaacttagccttaagtctttcattcttgttaataaggccatcatcggtac

SEQ ID NO: 39394 - DNA, 302 bp, Zea mays
  unsure (1)..(302): unsure at all n locations
taagctttcgtcgccacaccgccgaagagcaatgctcctggntgatagccgcacgatattgcataatcccttaactttcttctgatcctagacagcttttgaccaattatgttttgaaaattacaaatctcttcctccaaagtatctttggcaatctacttctctttcccgggcactgaggccagggtctcttcggcaactgtagcagcttcttccgcgggcatgttcaaaagcatcttgtcaatatcataaaaagtgccctccagatatgtatcttcggttgattaagcttcngcagttgc

SEQ ID NO: 39395 - DNA, 451 bp, Zea mays
ctgcaagcactgcaagtctcttatgccaaagaggctccgaatctctgattttctttttcttgaaaacccaaagaccatcatatacgtgagagtcttttctccgtgatgggttacacatgcgaacgcacactccgtactccgggctttcaaacccatgtcgctgtaagtgatgaaactgctgagatctgctggttctgttcccaagtgcgtcccaagcatgaggacgagaactaccacttatctggggaaggtgttttgcctctctcgcgatgaactaataagttactcctctagtacctcggatatttaataaccaactctgttaatattctacgcatcaagcatcctttctgcttactccgatgatgggtaacgtctgccgtgatgggttaagcgctcttggcaatgtaatagagaacacataacctaactcgctgatcattgtcacacc

SEQ ID NO: 39396 - DNA, 323 bp, Zea mays
atcctatgctcttgtgtgaagatatagcagatcaaagggtactgctgggatctcacttatctaatgaacaaaaaagactctgctaacagttttgttcaacaacaaggatgtattcgcttggacagctaatgagctctgaggtgtcaacaaaaatattcattgaacattcactcaacggggatccatctttcaggccaagaaagcaaagacttcggaaaatgtctgaggataaagccaaacgtgctcggaatgaagttaaaagacttctcagtgctggtgtattagagaagcacatatccagagtggctagcaacactattatg

SEQ ID NO: 39397 - DNA, 275 bp, Zea mays
ttttttttcgagccttaggggcattgataagtgggctacctcacactatggtatgcacacctcgaacagccgccaagaaaccccctggtgctacgatcaagccctatcatgtcctgtaattatatcactcttacaaccttcattaatgctcttaatttatatgctcttgagtccttaaacagttgataaacatattcttaaacattcgctgccccttttgagaaggccagtgggtttgccatttaaaaaaaaccttacaacttttacggatccct

SEQ ID NO: 39398 - DNA, 431 bp, Zea mays
  unsure (1)..(431): unsure at all n locations
agcttgtgcaaaaaagatgcgggatgaaagattcgaactctggtctctcaagaagggtacaaagacttcgcctgctaaccaatacacctcatgttctgttatgttttacaaaggatcaataattttaatataataatacgtataaacagcgcctgcccagggtgggtggttgccatgctcgtagcgatcggcagactggctgtttgctgtacgtgcaaggaacaacctccaacctgaccagtcagcattgaagagaactgtgactatttctgctggcccttgatgacagtttccccccccagttatttgctacaagaaaaccttttttcagcagagtagctnttggacaccttgtatatgccttcaattaaagcgtttgaaactctctgcagcctgctcacgagaaaatcggtgtcgttgattcccaatgg

SEQ ID NO: 39399 - DNA, 514 bp, Zea mays
  unsure (1)..(514): unsure at all n locations
taaaactcagcttctaagggagaacatgtgataggtctaactaatgtttatttcgaaatagatagaccttgtgcagcgtgtcaagcagagaaacaggtgggaagctctcatcacaccaaaaatgtgatgaccacatcaagacctttggagatgcttcatatggacctcttcggacccggtgcctatctaagtataggaggaagtaagtatggtcttgttatagttgatgatttttctcgcttcacttgggtattctttttgcaggataaatctgaaacccaagggaccctcaagcgcttcctcaggagagctcanaatgagtntgagatcaaggtgaagaagataagaagcgacaacgggtccgaattcaagaatcttcaagtggaggagtatcttgatgaggagggaatcaagcacgagttctccgctccctacacaccacaacanaatggtgtggtagagaggaagaacangacgctcatcgatatggcgaggactatgcttggagaagtca

SEQ ID NO: 39400 - DNA, 418 bp, Zea mays
agcttgtgaaggttcttcatccccacatgtgcttatcggcgatgccacagccagcccatgctagtcttagctattaagcatgcatctagaccggcctcttcttttgcaaaatcaactaaataaagtttgccgtctaatacacccttaaaagctagtgaaccatcacttcttctaaagacagacacatctacatttgtaaatagacagttataccccatgttgcatagttgactaacagatagcaaattatatccaagagactctactaaaaacacattagagatagagtgctcattagaaattgcaattttacctaacccttttaccttgccttgattcccatcaccgaatataattgaatcttgggaatccttattcttgacgtaggaggtgaacatcttcttctcccctgtcatat

SEQ ID NO: 39401 - DNA, 429 bp, Zea mays
tcagctgaaagaacgctgggaaagatactgccactagtgatcttatacttgaacaaaatgtataaatcttatcccccatgtcacaaatttcatcagtagtaaaattgtgtctaatctataggcccagacagcagacagtcttattcggacgcttatatttgagattgagatttacagcactagttccataaattcgcaaaatgaagttgctaaacgggtacaaacaagctcaacgccacatcaacaatagaacctaaacctacccaccagccatcgtactctacccaaccgagagatatatgaacccttacgcattgccttccaaagttcaccgagcagatatggtcgaatcatctaccgagtaggagatactgaattccggaaggattcccaaattcgaagtgccaggatcaaacagaaattaacaga

SEQ ID NO: 39402 - DNA, 421 bp, Zea mays
agcttttatataaactttgggaagctatggtttatgtttgccacattctaaaaaatagcctactccattagttagattccaattcctcaaaatcaagggaaacaaacgggtcctaattgatttggtagcttttgccaaagacaaattatagctactaccgcattgttctaaagggaacctgacctctgcataatattgcacggtgttcagttagattgtatctattaaaatttaagctagttcgtcaatgaagtcactttggatgggagttctgcgctacatttttgtgcaggcatctgttactttaattgttcatatttggcctttatctttgccaaaaatattcctggtgggctgattatggatggtggattgacctttctctagatgtctttataagtattgaaagtgatatgctaat

SEQ ID NO: 39403 - DNA, 327 bp, Zea mays
gcatgtcaagcaggtaaaccggtgggatgagcacatcacagctagaatgtgatgaccacatcaagacccctggagtcgctacatatggacctcttcggacctatcgcctatctaaagcattggaggaagtaagcatggtttaattattgttgatgacttttctcgcttcacttgggtattctttgtgcaagataagtctgaaacccaagggaccctcaagcgctttctaaagagagctcaaaatgaatttgaactcaaagtgaagaagataatgagcgacactggattcgagttcaagattcttcaagtggacgagtaccttgatga

SEQ ID NO: 39404 - DNA, 429 bp, Zea mays
agcttagccgtcgaagcttttaaagctgaaaaacgactgcatcactagaaagttgtttcgaagatgagtagctagtaagaactgcatacaatgacatctgccgctcaacctcctttcagtgaaatgagtggctatcaggacatcgaattgacagaaacacttctcgtcactgtactcactttcacgtgacttgttcccttccgtttctcttagaactagtaagcagttattcggttttctcgtgtccacgcagaacagaacacacgtacgtcgctgtggaagagctgcattcattcgcatcacatcggtcacccgctggagacagcactgccctgacagggggttggtgaccattacagattcgtgttgctactacggtaagcagctgctaactcttgccttaaaagttaaaacacacacacctgttct

SEQ ID NO: 39405 - DNA, 324 bp, Zea mays
  unsure (1)..(324): unsure at all n locations
gagcgtgaccataggactaccgataggacctncagaatgtgttctcccgggagctggaggtgacccggaaggagcgaggctggccaagaaggtggtgcacttggaccagaggcaggaggtcatcacagagctccaggcaaagctgagtgcctacaacaagatgctggaggagcagcgggaccaacagtccgcgactgtggagaacctgaaaaaggtgcagcaggggctcgatgatagggccaacagccttgccctggccgaagagaaccttaaggagaaggatgcctccctggataagcgggcggcggatctcgcctggcggga

SEQ ID NO: 39406 - DNA, 426 bp, Zea mays
  unsure (1)..(426): unsure at all n locations
agcttatctaaaaagtttagtgatntttggagctatttattaatntctaaaattccaggagtataagtcttggctatcttaaatactccaaaattccctatttggaataaaaatcataaaattatttttactaaatactataaaaacttaggaacctagcaaaattggtcttgaatttttagcatttttctataattgtctagaaattctctaatcctggcagaaaaagaaaaaagaaaagagccaacagttctggaccgaaattgttccaagccggcccagctaaggcagaacgcgcccacgcgcgtgcgcctgtgtgccgactttgcaaagaataccccgaccttttaaacaactcaaaagagtcagcggcactatttgtttcagtcgctgacgttagcaaataaaccctcgcgcttttatttc

SEQ ID NO: 39407 - DNA, 431 bp, Zea mays
  unsure (1)..(431): unsure at all n locations
ntctncaactgccaccacgtcagcaccgacggtggcatncttctgtccaccaacgccgcaccagcgagcgtatgccgctccaaagcgcaccggcaggtccttgtcacacccggatttcatgggcaccaagacccgggcgtaaacataatcaccaggtgtgctgggaccaagtctcgcacatatgatgaatcatggcacaggatcgaatgtcacatctttactatataataggagttctatacaaaataaataattacattataaggagacaacggtccagcaacccaaagttgactgggagacgacggcctataccactcacgaactcatcacagcatcctccatgcgcctcatcctgcggtacctgttcttgacctgtggaggggagggtgagacagcatgagtgagctcacatacgttcatcgctcaac

SEQ ID NO: 39408 - DNA, 416 bp, Zea mays
agcttgtgccttaaaacaagaggattctatatgtttgtgtgcttctgagaaggcttttgcgaatcacttgaagcgctagtacttttgtgaatgattatgtaaagtgtctgcaaatatgtgcaaaacataataacatgtgtagggtttgtgaatgattttgttgtggtgcttgttgatggtttatgtgatgtgaatctatcattgtgcaatactaattaaatttgtatatctatgtgattatgtgtataaaaattggtgatttgtgatgcttctgtatatataacagctgttgaatgctaattaatggtatattatcattattaacgactataattaggggcaactttctgttggttgctaaatgtatagtatgaccacttacgattggttgctaaatctataatacaaccacccac

SEQ ID NO: 39409 - DNA, 447 bp, Zea mays
  unsure (1)..(447): unsure at all n locations
actcagcttctnagggagagcacattntaagactaaccaatgttcatttttataaagacagggnctatagcgcatgccaagcaggaaagcaagttggtgcccatcatccacacaagaacatcatgatgaccgacaggccactggagctcctacacattgacatattcgccccgatcgcttacataagcatcggcgggagtaagtactgtctagttattgtggatgattattctcgcttcacttgggtggttcttttgcaggaaaagtctcacacccaagaaaccttaaagggattcttgagacgagctcaaaacgagttcggcttaaggatcaagaaaattagaagcgacaatgggacggagttcaagaactctcaaattgaaaggcttccttgaagatgatggcatcaagcatgaagttcctttctcctacaccccacaacaaaat

SEQ ID NO: 39410 - DNA, 408 bp, Zea mays
agcttgtgcgtctcaagatacctggcctttgcctcatggaagacttcgctgacatagtagactggcttctggatggttcggacccctacggttggtcccgagccctcaaactctttaccttccatcaccatcgtggtggtcggaccaccaccttctcctaggggaactttttgactcccctagggatgttgtgccgtctttcaacgatcagcaccatgctcaccacctctgtagccgctgcaatgtataagtacaacggctcccctggctctggagctactagtatttgtagggacacaaggtgctgcttcaactcttgaaaggctcgttctgcctcctcggtccaagagaatgggccagacttctgtaatagcttgaagaaaggtagcaccctctcggccagtcttg

SEQ ID NO: 39411 - DNA, 463 bp, Zea mays
tactaagctactcctcctgggagggccgttcatcatcgccaagaatttgaagtccgggacatacaagctggccaacgatcaatgcgaggtctacagcaacgcttggaacatccgacagctacgtcgcttttacccttaagatgtttcaagacgctcatatgcctcgttcttcattacatacacaaatagagtctaaccgtccaggaagggtcagccttgcctcgggcaagcctgaccctccctctggggctagaaggggggaaccccctctgtgtcaaaattttcctcggaaaagcccttctgacagaacgtctttcgcgcttttcgactgcttcgatagcgggatcctgaaaatgacggagtacacgtaagcggcaaagccgatcgagccaaaggacttctacgccctcgggatacggataccttactcatcaccttccacggataataactcttgctcgga

SEQ ID NO: 39412 - DNA, 384 bp, Zea mays
  unsure (1)..(384): unsure at all n locations
cttgcgcttggattgcttcttttctttctcattcttcttgtgaaaaactcaatcgtaaccaaggcaagagacaccaattgtgtggtgatccttgcaggaactttgtgttccgtttgattgagaagagaagctcactccgtctaagtgaccatttgagagagggaaagggttgaaagagacccggtcttcgtgaccacctcaacggngagtaggtttgcaagaaccgaacctcggtaaaacaaatcatcatgtctcgctctttatttgcgcacgatttngttttgcgccctctctctcagactcatttatatttctaacgctaacccggcttgtagttgtgcttaagtntataaatttcagattcgtcctatgtcacccccctct

SEQ ID NO: 39413 - DNA, 411 bp, Zea mays
actctaatatattagcctcagcttcagccagcaagccttctggtctttggagcaacaagcccttcttttcaatgatggcagattgctcttttattttgctctccaacgtttcaattatagctacatgcttgtagacctgcaagtcctggtgcatcttcagagctttgctcaatagcatactctgaacagagacaacttatgttaaatcattggtaacggcactttataacacacataaaggctgtttacctcgaaggtagaatataacaagctgccgacgatatgttgtcggcggtagcggctgatgtctgtctctagcttcggaaaaccgatactcttcgatagagaaccgaataccttagctgcagtctggtctcgaatacagcctaagttttcatcatctacaccccc

SEQ ID NO: 39414 - DNA, 374 bp, Zea mays
ggagatcaaccaatgagaatattttgcttggtttgcggcgaatacaagggccataccaccaggatgtgccatgttaccatccaaaagcaaaatgagatagccgaagctgcagcacaacaagctcagccgaagcaagtcatgcatactgcttcgtaccatgtgccttacatcccagaatacgtaagaaaccaccctgcagtttctgttgcttcggcaagtcaacctcaagcttcctggcaacaacctccacctccaccaccgcttgaacaaggcccacagccagaaaggagccaatatgctccacaccaaagggacttcagagagcagtccgaagctcgtacagtcaacaacaccgtgccggagtcatagcacat

SEQ ID NO: 39415 - DNA, 442 bp, Zea mays
  unsure (1)..(442): unsure at all n locations
tcagcttaagaaaaactcgcgganagaatgtgattttaagtggttattgctaacaagaaataagtgaatggactatcgcatgacttctaaagaatgtagatgagcttcgggaatcgaaagagagatattacgaaacatccttggattgtgccaagaagttgaaagatagctttgcaaaggtgggtgcatacttatgtgagcagaaatttattagaggcgatcccgaaggaatcatcaaatggatcggcaaagaagttgaagcctttgatgagatacttaacgaccgtggtgatttctgcgccttcgccggtgctagagaggttgcagcaattttataaaaatctagttgtgaacatgttaaagttgcagcccagacggagaccgtctttactgtatacaacacgaaggatccttcggctgaggctatttgatgggcggaaag

SEQ ID NO: 39416 - DNA, 226 bp, Zea mays
cgatgtcgtctacaaccttggcgccaaacggacgcgccaccaactcatggatgtgaatctggctgacggcgtggccaaactgaggcgcctgcgccggccgcgggacgtgtacctggtggagtacggctgctaacgaccgcggacgtgcttacaggcgccgttcgccgcgtgcctggagcacgtgcacctcctgccggacctggtggacgacgacagcactaatttg

SEQ ID NO: 39417 - DNA, 219 bp, Zea mays
tgtgtaccttatgcaatagtgagataagtcatttgcctaatgcatcacgacctactcatagccgcatgagcaaaattatcctacacatgatttggaattggcagccatagtacatgccctaaaaatatggaggcactacctaattgggaacaaatgtcacatatgtacagatcacaagagcctgaagtacattttcactcagccagaccttaatctcca

SEQ ID NO: 39418 - DNA, 412 bp, Zea mays
  unsure (1)..(412): unsure at all n locations
agcttctaaaaggagaacacgtgatacnngttgattttcttgcaaatcgaaaaggataaaccttgtgccgcttttcaagcacgtaaacaagtgggaggagcgcatcacaacaagaatgtgatgaccactttcaagaccccttggagctgctgcatatggatctcttccgacctgtcgcctatctgagcatatgaggaagtaagtatggtttagttattgttgatgactattcccgcttcacttgggtgttctttttgcacgataagtctgaaacccaagggaccctcaagcgcttcctcaagagagctcaaaatgagtctgagctcaatgtgaagaagataatgagcgacaacgggtcccagttcaagaaccttctagtggaggaggtccttgaggaggaatggatcaagca

SEQ ID NO: 39419 - DNA, 338 bp, Zea mays
  unsure (1)..(338): unsure at all n locations
aacagagcaacttcaggctcatttatttcagaattcttcatggtactaaggtatgatttctataaaaaagttattctccttccatagatctacaatattgatgtggtgacctagggcaaaaaccctagaatttgaaagatacaatgctccaaagttgagccctcaacactgaatttcagacttagaatagaacctaattgaggtccattttgcatttaagtccagaactcaatatttggctttcaagtccacacattngtgaaccaaaggacttaagaaacttatttgacttggtttttgcactttagtcccaaaagtggactatatttgcacatatg

SEQ ID NO: 39420 - DNA, 497 bp, Zea mays
  unsure (1)..(497): unsure at all n locations
ntaccanatggacgtgaanagtgcctttctcaatggaccaatcaaggaggaggtctatgttgagcaacctcccagctttgaagatagtgagtaccctaaccatgtgtataaactctctaaggcgctttatgggcttaagcaagccccaagagcatggtatgaatgcctaagagattttcttttcactaatggcttcaaagtcagcaaagccgatcctactctctttactaaaacaattgcaaatgatttgtttgtatgccaaatttatgttgatgatatcatattgggtctactaacaaatctacatgtgaagagtttagtaggatcataattcagaaattcgagatgtctatgatggcggagttgaagtatttcctacgaattcaagtgaagcaactccaagagggcaccttcatcatccaaactaagtacattcaatacatactcaccaagtntggaatgaaggatgccanatccatcaagacacccatgggaac

SEQ ID NO: 39421 - DNA, 426 bp, Zea mays
  unsure (1)..(426): unsure at all n locations
agcttgcttacttggtaagatgaccaaggcgctttttacnggtttactggagaggacattagatttattggaactcatacatactgatgtgtgcggaccaatgagtacgacagctaggggaggattccaatacttcataaccttcactgatgattttagtagatatgggtatgtctacttaatgaaacacaagtctgaatccttagaaaagttcaaagagtttcaaaatgaagtagaaaatcagtgtggcaagaaaattaaagcactttgatcagatcgtggaggtgaatatttgagtcatgagtttagcaatcatctaaagagttgtggaattgttccacagcttacgccgtctggaacgcctcagaggaatggcgtgactgagcgacgtaatcggactttattggatatggttcgatcaatgat

SEQ ID NO: 39422 - DNA, 392 bp, Zea mays
gagtaccgaatagtacaatgaagagatgattcttgcgccatatggaacattctcaagatgtcacatgaaggagatcctaaagtgaagagacatatgattgaatctttataaagtgatcttgcgagatatgattggatcaaaggtgagtctcttcaattactctttgatcgatagatggtggtggtttacaagataagagttcttggaagtgaaggctggggtaactctaagataactaggatattcatgagagcctacaaggagaacgacaaaagcttatcagggatgataagagatcatgatgactatgaggagatgactcctcatcaattattcacaaaaaattctacatgagtcggaggaagcaccgaccaaggtaaaggacacacatg

SEQ ID NO: 39423 - DNA, 390 bp, Zea mays
agcttctattgagtttcggatcgcttgttttctttgctttgcgctcttcagcttcgtcatcttgctcctcagcttcgacatcctgtacataattaagtattgtaaggaaaattcaagtttaaaggaaaaggtaagcacaacgtatgattctgttactggcttaagatgacttcgagcttcgtcaccagctatgcttcgtccacccttcgtccatactagttttataaatctgtttcctatgcttcaggcaagactgggaatatcaaccagatctgctggtgataaactaaagttgggtctattgacaacctttccatgtgtgcaaccagatttcaagaatgcgacagctgtgccccgagaagctaccagggcacagaaatcaccatgtcc

SEQ ID NO: 39424 - DNA, 450 bp, Zea mays
ctcagcttctaagggagaacacgtgataggtgtgactaacgttgccttctaaaaagatagaccttgtgcagcgtgtcaagcaggtgaacaaaggggaggagcgcatcacagcaagaatgtgatgaccacttcaagacccctggagctgctgcatatggacctcttctgacctgtcgcctatctgagcatatgaggaagaaagtatgggctagttattgctgatgacttttcccgcttcacttgggtggtctttttgcaggataagtctgaaacccaagggaccctcaagcgcttcctcacgagagctcataatgagtttgagctcaaagtgaagaagataaagagcgacaacgggtcccagttccataatcttcaagtggaggagttccttgaggaggaagggatcaagcacgagttctccgctccctacacaccacaacataatggtgt

SEQ ID NO: 39425 - DNA, 424 bp, Zea mays
agcttgttttcttggtcttttttttgaaagatatgatggggaactctactgtaaattatttattattaatgttaaattaaaacacaaagtatcaacaaagtacattaatcttattaaagatatgtacactaatgttgtgacaaatgtccgaacaagtgatggagacaccgatgactttccaattaacataggactacatcaagggtcggctttgagcccttatcttttcgctttggtgatagatgagatcacaagggacatacaaggagatataccatggtgtatgctttttgccgatgatgtggtacttattgaggagagtaggagtggtgtttcgcaaaagttggaattgtggaggcagacgctggaagcaaaaggttttacgcttactatgtctaaaacagagtatatgaagtgtgagttc

SEQ ID NO: 39426 - DNA, 234 bp, Zea mays
ccgctattccagccggtgtctgccgttgggcacaccggacagtccggtggtgcaccagacacttcactgtccggtgagtgccacgacagccaaccatcggagtttggagctgttgaccgttgaagtcttctatcttcttgcggcaccggactgtccagtggaacaccggacagtccgtgcattctgtaatacagactgccttctgacttcgggtactacagactgcgcatgcag

SEQ ID NO: 39427 - DNA, 420 bp, Zea mays
  unsure (1)..(420): unsure at all n locations
aacctgagaggagatatcgggcgtgggtttttttgtcttaaccgtgggtccttggcacaatattttgaaataatatatgcaaatttgtattataaattaaatgttgntgtgtatacgtgacaaaaacataagctgttaactgctactataacaaataacgtatacacatgttaaaagataaaatgttctgaataaagaatacctgttgaatcagccgaattccccggttgctgtggctcatccgtctcgttttccaaattttcagactcggcacgtagtacctcgtctataattctataaacttgtctgctatgtcatattgcttgacaataattatgtggatgctgtcttttatggctacccatgacttgtcaacctccaagtcatatgctgcaagaatatctttgaatttagatcgat

SEQ ID NO: 39428 - DNA, 423 bp, Zea mays
  unsure (1)..(423): unsure at all n locations
cggcatgacgaaagtcgatgcttgccgaatgtggtcggaaagggttcaccggaagtgggcgccaatgttggtgacttgctctcaaatgcttcggcttaagagcaaggcaacacaaaaaatgttaaacgttaaagtccttcgtccttcggcgcattatttcccttaggatataacgactctcggacgaaggtcacgaaaaacataccttcgtaagcatatataaaaatgaagaggaaatcatatgaagtatagtaaacagtatgaacaattaaatgtgttgttattattgaattatttatattttattactatgaataaatagaaataataacttattataagtgtaccatcggcttataagaagataaagaagtgcagcgtgacgcanaagcaaatgcccagccagcgtgaacagtatgggag

SEQ ID NO: 39429 - DNA, 396 bp, Zea mays
tctaacttgaagccacctctcgataagtgctgacatttttccaattcgtcccaaggcatactagactctcttctgctacgccaccaaaaacattgtccctggttgatagccgcatgatgattgcataatccctcagctcttccttctcagtcttagacaacttttgaccaagtatgtcttgaaaattaaaatccttttcctccgaagtatcttcggcaatctctttctctttcctgagcactgggccaaggtctcttcggcagctgatgcaacttcttccgtggtcatgttcaatatcatcttatcaatatcagaaaatatgccttctagattattatcttgcgccgtcttatcttcgatagttgcagcttccacggcggcaacctcgtgtgctgt

SEQ ID NO: 39430 - DNA, 373 bp, Zea mays
  unsure (1)..(373): unsure at all n locations
tccccctcttgagacccgccctcaggtagttgatccaccgcagcctgcagctcttcccgcaccgcagcaaccctgcaaagagagagagattggccacagatcagtcgtctcaactcattggcgaacagagagctagccttttgtgcatgcaacatctcaaccatttcccttttcatttcctctgaatcaattggtcgttcgatccacgtaccagcattcttgggcagtgatctccatgagccttccccgtgctcctcgatgtacctcgccaggatctcgtcctcctccctggtccacctccccttcttcaaccccaccttcccgcagcacggcgccctccccatctgtntgcgagggtgcaactgcagaaatg

SEQ ID NO: 39431 - DNA, 450 bp, Zea mays
  unsure (1)..(450): unsure at all n locations
atacaacagcttatccttagccgcttcttnctacaagaccttcggcgacgaagcatagtcccaacagtagcccctttcgcggtgctagatcattttcgtaacgaagctgatccgtgaaaaaagtctcttaagcttcggggagccgaaggtccaaaaaacaccttccctgagctcgttgtcgagaaacgattcagtttcccagcgcgtggcggtcccaccttgcagaagtactgtttgtctctgcggtccaccatgcagcgagtgcaagcaggtatccgcctggtgtaaaatcctggcgcttcgccttttacctgcagactatataaacagacagtaggtgtgaagtccacagattcattgtatttgcactgttgctgcaaaatttaaccacgccaagctgactctggatcaacgaagctcacctgaacctgttcgcagaaaaaaacttgg

SEQ ID NO: 39432 - DNA, 369 bp, Zea mays
  unsure (1)..(369): unsure at all n locations
cttaatctcgaggggatctagctgaatttaacgtcatcgtgatcacgtacgtgtgctttcctctgcacccggcacccgcaccccaacaaggcgaactgccggagcggcccaactgctctgggcccaaactaccgtacatatccagggagtttttgcaagtggtttgggtctggatgctggaacgacgaagcgaggggtcggtacatatacgcaggggagttcgggcgggagcaacagtccgaagatcaccaccttttgtgtgttacacgctngacctgcaccacatcaacattcgtgcatgacttaaaacctagtcctaaacacccaagacaacatgtacaacatgtactattcttgccacactgtaga

SEQ ID NO: 39433 - DNA, 369 bp, Zea mays
tggcctttcgcatgctggggactggatatgaatggacctttcaagaaagctcaaggaggatatacccatgtattggtggccattgacaaattcactatatggatagagtttcagcccattgcttctttaacctttgctaaagccgtggaatttatacaaagcataatatttagattcgggataccaaacagtatcattactgacttgggatccaacttcaccagctcagaattctttgacttgtgcgagcaaaagagcattcagatcaagtacgcatccgtagcacatccaagagccaacgggcatgttgagcgagccaacggaatgatactggaagcactcaggaaaacggtcttctataagaatgaa

SEQ ID NO: 39434 - DNA, 420 bp, Zea mays
  unsure (1)..(420): unsure at all n locations
tacattctataccctgtcggttatcccgaacacaaaatcatgagaattcactctaggaagtctcaccctggatctcatcatgcttttatgtataagagtgaggcatctaattcgaggcaatccactcatgcttaattgcctaagaagaaaactcctattgcatcaaatgatcataacatttcatttaagactttngatgcatcatatgttttaactaacaaatcacgcaaagtagttgccaaatatgttggggccaaacacaagggctcaaagacttgtgtttgggtacccaatgtgcttgtttctaactgttgagggccttcngcttccgaaggtcctcaaaaacgtaatttgactatgtcttccaagaaaaatatgtgaacatgtaccttcgatacagattgagagtatccagaacat

SEQ ID NO: 39435 - DNA, 432 bp, Zea mays
  unsure (1)..(432): unsure at all n locations
agcttatagatnttctaagatgactatgggcttctgaagaagaatacaccctacgcatgtcagatcaatccacaactccagtccgaatgatgacaaaggaagcccgtttcttaggccacaacatagctcacagtctttgggacagcagcaaagcttcttcaggccaccaactccaatgggcagaggtggcaggggcttcacaggaagatatggggatcaacccaaaaaaatctatcatttattctatggtgaggacaacggtcacacgacatgaacgtgtcatgttaccattcacaaacaaaaggaaattgtctaagtacaagcccggcctaatcagccgaagcaggttctacatactgcttcgtgtcactctccttacataccagagtatgtgggccatcaaactgcaacttctgttgcttcggcaagaca

SEQ ID NO: 39436 - DNA, 409 bp, Zea mays
tcatgcaactgctgtcagatatgagaggtgaattgttttctcttgtctgacactatcttctttggcacaccatgaagacatacgatccgagacatatacaactctgccaatactgcactgctgtaattggtcttgacaggtatgaagtgggctgacttggtcaagcggtccaccactacccaaatggaattgtatccggctcgagtgcgaggcaatccgactatgaaatccataccaatttcatcccatttccactgagggatctgcaatggttgcaacaatccaccaggtctctggtgctctgccttaattcttcggaactatcgcacatagccacatgctctgcgaatttcctcttcattccgtaccaccagaatttcttcttcagatcctgatacatcttctcact

SEQ ID NO: 39437 - DNA, 433 bp, Zea mays
  unsure (1)..(433): unsure at all n locations
agcttntaattaaatcatgactgcacctaagctgcgtttcttgagaatgaaggtggatgtgctgctacttcccactttcctggatgagcaacaagcacctgcattgagttatgcaggagtgagttgaaacatctcagcaagcgaattgttttgacgagatatttacaccaccaattgaattaatcaacattctaaaagaatcacaattaagatcagaaatacttgtggatatagaactcagtagtcccaatataaccaataccatctcattttctcgaacaaccaccatatgttctataacacttctctgcgtcaagaaaacctgcaaatatcacttcaatgtatgcataggaatgcaaagtgtagcataatgcaagctagtaaagcatcaccatagagtccaattatgaaagagtccaatactcttgaatat

SEQ ID NO: 39438 - DNA, 332 bp, Zea mays
caagtctaagtgccatgtgtgtgttgaatcacaacaaccccgcatgcctctcaaggatgctgatgcgaagagtttggcacctgtagaacctgttcattctgatctgtgcgagatgaatggaattttgaccaaacgcgaggtaagatactttctcaaccttattgatgactccactagagtttgctatgtgtatctgttacagacaaatgatgaagcgttcaatcatggtaaggcctatatagctgagagtgagaaccgactcgagaggagtatacaaccgcttagatctgatcgaggtggagaacattggtgtaatgtgtatgatgagttct

SEQ ID NO: 39439 - DNA, 434 bp, Zea mays
agcttgaaagcttcaacaggctgtggaagatcattataacgagtttattatttctgacttataactaagattgaaactcttcaagaattgatcaaggaaaagatgctacagtgcaatcactaagtgctgatttaaccgaagctcaaaaattcaatgaagatatagaagcagagaaataactcaaggaacaaaagattgcaagtcaagataaatatatccaagaatcaagagattagatggataagattatgacaaatcatgtcgatggcgtctcacgacttcaacatgaactcaacaaagaattaaggtatgctcatttataaagaggagcataggggtcgtaccatcatgatcctccccaacaattattacttggcgacaaaacaacacctcttgagatcacggtgcggtggccgagtagcatccccgagcac

SEQ ID NO: 39440 - DNA, 468 bp, Zea mays
  unsure (1)..(468): unsure at all n locations
tggacagtattctgcgatggttctttgggaaccttctgtgcatgtatagctgccgtcttaattgcaccttccaaagtcagaacatgctacgcagtgaaacttgattntagttgtacaaataatattgctgaatacgaagctttgcttttgggtcttcggaagttgaaagcaatggggataagaagggcggtcctcaaaactgattcccaagttatttctggccatgtcgacaaaagttgcaaagcaagagatccgaagcttgaaaaatatttggatacagttcgaagacttgaagcctccttcgaagggttttctgttaagaatattccacgaggagaaaatgaacacgctgatctactagccaagtcagcgacacaggggctggcattaccttcagaagttntctttgaaacaataaaagcaccttctgttgaccttcttgaaagagcagtgctcaatatatcttct

SEQ ID NO: 39441 - DNA, 423 bp, Zea mays
  unsure (1)..(423): unsure at all n locations
agcttgctctaaattcaaaatgaatgttatattttgtttcacaaagtttgcttgccagttgatatcancaaataaaatatagggggctatattctctccaaaatcctcctcgaaatatcctacaaatgttttcccaatgaccccctcaaattctttccagaaatgctgcccagatatttccccaatgacccccctcaaattctttccagagatactgcccagatatttccccagtgatccccttcaagttctttccagaaatactgcccaaatattccaccgataattctccaggtattttcctcctgagaaataccttcagaatcatttttcaagtgcctacagatattattcttataacttttctcatgctcatacgtatacctatgccttcagtatcatacggcgagctctacaagctaa

SEQ ID NO: 39442 - DNA, 398 bp, Zea mays
ctaacttggatgaggtctatatatatccgagctatcatcctgtccattcactaatagctctgcatcttcgtcttgtatagaaattcgtcttcttcttgtcactttcatacgtgcccttcttcttcttgcttgtgcaatacatggcaatgtgaccggggtccccacaactcaaacactctctatcattgagagcaattcttataaatgattgacctcttctaagatgacctctcttcatcttcatatatatagcgaatttccttacaaataagagcatggcaccatctctctcactttcattttcttcatcattactatcctacttgtcaatttcctatgacgccttaactctgaatgcaactgattcaattttcaccttctttgacaaacttaaagca

SEQ ID NO: 39443 - DNA, 424 bp, Zea mays
  unsure (1)..(424): unsure at all n locations
agcttgagttttcgccaccggaactcttttctttttttttcgcaacgaacatgcccaatccactactttatgtccaaaactcatgtttggggtggtttcgcgcaatttcgttgccgcacgtcacccattcataaaagaggtgtcggggtgcatacaaagcacgagtttttttccaccggaaccatttcttcttttttcgcaacgaacatgcccaatccactactctaggtccaaaactcatgtttggggtggtttcgcgcaatttcgttgcctgttttaagaatttgaggctcaacatataaaggctatgcttaagacaaaaagaataaaagctgggtaaatgggccactttgcactgcaactcttaattagaggtggngtctgtcctaaaggttatttctattggcatctacccacaataata

SEQ ID NO: 39444 - DNA, 432 bp, Zea mays
tgcacttacgaccaaaccggacccgcattctatcttattctatggcttaacaatagtggtaagggcaaggtaaccaagctggtacgaattaattttgctattggctcatatcgcgatgttgttgactgtgatagtgtgcctatggatgcttgtaatattctgctaggtagaccatggcaatttgattcagattgtatgcatcatggtagatcaaatcaatattctctcatacaccatgataagaaaaatattttgcttcccatgtcccctgaggctattgtgcgtgatgatgttgctaaagctaccaaagctaaaactgagaacaacaagaatattaaagctgttggtaataacaaagatggtgtaaaattgaaaggacattgcttgcttgcgacacatactgatgttaatgaatcatttgctttcactact

SEQ ID NO: 39445 - DNA, 422 bp, Zea mays
agcttcaacttccttggtctgatggctgggtgttcattgagtgaatgttcaataacatctctattgaaaccacaaagatcgttggctgtccacgcaaaaacatccttgttgttgaatagaaattttagcagagttttctcttgttcatcagacaactgagacccaaacaacaccttctgctcagttatgtcttcgcatagaagcagactttggttgatcgctgaagcagcgttgtctcttatatgctttcgatgagcttcggcttcatctatgttgtggatagcctttgaatctgtccagttctctttggcccttctagcggcctcttgacttccatgcacaacaatgggacgttggttagatggtatcttcatgcacagatctgctggtggactactgcttcgaaggagttcaatgtccct

SEQ ID NO: 39446 - DNA, 451 bp, Zea mays
acgcgacactatataataactcagcttctaagggagaacacgtgataggtctaactaatgttactctctgaaaagatagaccttgcgcagcttgtcaagcaggtaaacaggtgggaagctcttatcatgccacaaatgtgatgacaacatcaagacctctggagttacttcatatggacctcttcggacccgtcgcctatctaagtatatgaggaagtaagtatggtcttgttatacttgatgattttcccgcttcacttgggtattctttctgcaggataaatctgaaacccaagggaccctcaagcgcttcctaaggagagctcacaatgagtttgagctcaaggtgaagaagataaagagcgacaacgggtccgaattgaagaaccttcaagtggaggagtatcttgaggaggaaggaatcaagcaccagttcttcgcttcctacaca

SEQ ID NO: 39447 - DNA, 424 bp, Zea mays
  unsure (1)..(424): unsure at all n locations
agcttgaagccatggtagtagcataggccaattatatacgaattgactcaagcctagctacgggtgcataagtttcaccgaaatccaaaccttcgacttgggagtatcccttggccacaagtcgagctttgttccttgtcaccacaccatgctcgtcttgcttgttgcggaaaacccacttggttcctacaacattntgattaggacatggaaccaaatgccatacctcgttcctagtgaagttgttgagctcctcttgcattgccaccacccaatccaaatcttgaagtgcttcctctaccctgtgtggctcaatagaggaaacaaaagagtaatgctcacaaaaatgtgcaacacgagatctagtggttacccccttatggatgtcgccaaggatggtgtcgacggcgtgatctcattggat

SEQ ID NO: 39448 - DNA, 423 bp, Zea mays
  unsure (1)..(423): unsure at all n locations
catgcactacgatgcacgaattcacgccatcgtcagctaccacggctccatccttggtgagaagtgaccaagcagcaagcccaaaccatgtcgttgaccaaggaccagtacttgcaggtaacactataggaaacttggtaaagaacgtgggtgaaaaaccgtcgaacttaatgtaataagccgtcgaacttaccgtaagaacgtgggtttacggacgaatatagccgacggcgatttttggacaaacttatagaggtaagttcgacggccccatcgaacttaaccttaagaacgtgggtaccgtcgaacttaacattaagaacgtgggtaccgtcgaacttaaccttaagaacgtgggtaccatcgaacttaacatttatcagtttcttgtagtgtanatacaacactntaatatacaacact

SEQ ID NO: 39449 - DNA, 419 bp, Zea mays
agcttgtgaaggttcttcatcctcacatgtgctaagcggtgatgccacagccatcccatgctagtcttagctattaagcatgcatctagaccggccttctcttttggcaaatcaactaaataaaggttgtcgtctaatacacccttaaaagctagtgaaccatcttttcttttaaagacagacacatctacatttgtgaatagacagttataccccatgttgcataattgactaacagatagtaaattatatcccaaggactcaactaaaaatacattagaaattgagtgctcattatgaaatgcaattttacctaacccttttaccttgccttgattcccatcaccgaatataattgaatcttaggaatccttattcttgacgtaggaggtgaacatcttcttctcccccgtatatgg

SEQ ID NO: 39450 - DNA, 480 bp, Zea mays
tcaagcttctacagggagaacatgtgatatggttgactaacgtacaattctaataagatagaccttgtgcatcttgtcaagcaggtaaacaagtgggaggagcacatcacagcacgaatgtgatgaccacttcaagacccctggagctgctgcatatggacctctttcgacccgtcgcctatctgagtatacgaggaagtaagtatggcctagctattggtgatgacttttcccgcttcacttgggtgttctttctgcacgataagtcctgaactcaagggacccttcagcgcttcctcaggagagctcacaatgagtttgagctcaatgcgaagaagataaggagcgacaacgggtccgagttcaagaaccttcaagtggaggagtttcttgaggaggaatggatcacgcacgagttctccgttcctatcaccacccaaaatgggtggtaagaggataacagacctctccacatgggag

SEQ ID NO: 39451 - DNA, 371 bp, Zea mays
cacagccaggccatgcaagtcttagccattaagcatgcatctataccgcgcctcttttttgcaaaatcgactaaataaagtttgccgtctaatacacccttataagctagtgaaccatcacttcttctaaagacagacacatctatatcttgtaacagacagttatatcccatattgcacaattgactaacagatagtaaatcatatcctagcgactctactaaaaacacattagagatagagtgctcattagaaattgcaattttacctaacccttttaccttgccttgattcccatcaccgaatatgatcgaatcttgggaatcccttatcttgacgtaggaggtgaacatcttctttctccccgcata

SEQ ID NO: 39452 - DNA, 304 bp, Zea mays
  unsure (1)..(304): unsure at all n locations
aagctcgtaaacaagtgggaagtgcccatcacatcaaaaatgtgatgactacattaagacctctggagctattacatatggacctcttcggacccgtcgcctacctcaaaatctcggggaagtaagtatggtcttgtattgtgatgatttttccacttacttgggattcttttgcagataatctaaacccagggaccctcaagcgcttcctaagaagagctcaaaatgagtntgagcttaatgtgaaaaatataacgagcgacaacgggtccgacgtcaagaaccttcaagtggaagagtacct

SEQ ID NO: 39453 - DNA, 372 bp, Zea mays
  unsure (1)..(372): unsure at all n locations
gcatgtcaagcaagaaagcaagntggcactcatcatccacacaacaacatcacgacgaccgcaaggccgcttgagctactccacatggatttattcggctcgatcgcttacataagcatccgcgggagtaagtattgtcttgtaaatgtggacgactattctcgcttcacttgggtgttctttttgcaagaaaaatccgccacccaagagaccttatagggattcttgagacaggctcacaatgacgttggattaaggaccacgaaaataagaagcgataatgggacggagttcaagacttcacaacataaaggatttcttgacgatgagggcgctaagcatgagttctctctttcctaccaccctcacaaa

SEQ ID NO: 39454 - DNA, 411 bp, Zea mays
actgctcccgcatgagagcttccgaacgtgaagacttgttcggtccacggagtctttctatccgagcgcattttacttatcgcagaaggtgacgagtgaggtatccgtatcccggaggcgtacgagtccctaggctcggtcagccttggctgcttacgtgtactccgtcgtttccaggatccgctttccgaagtagtcaagaagcactaaagaaatcctgctaaacagagatcctttttcgaggaaaaattctacgcagagggggtctccccccttttaacccccgagggagggtcgggctttgccgaggctaggccgacccttccttgacgactaaactttgcgtatgtgcgacgtatatgaacaccttgacaacatcttaccggtagaaacgacgtacctgtctgatgt

SEQ ID NO: 39455 - DNA, 480 bp, Zea mays
  unsure (1)..(480): unsure at all n locations
tctaaagggagagcacattntaggattaacaaatgttcattctgagaaagacaggatttgtagcgcatgccaagcagggaagcaagttggtgttcatcatccacacaagaacatcatgacgactgacaggccactagagctcctacacattgtaggatctaggacaccggctagaggggggtgaatagacggttttgactaaaaacaacaatactaagtaaatttaatcaatacgacaagaggaataaatttactagtgtcaataagtaaacaatgtatgaaagacaactacggagattgaatacttgaagaacaataagcaaaacactaatcaattgcaaggcaataagtaatgctagaaggaatagacaccgaaatttatcccgtggtatcggtgatttgccgatcacccctaatccacgttgaggtggacttcaagctctcacttgctcctctatcaagacacgactcgatctttga

SEQ ID NO: 39456 - DNA, 453 bp, Zea mays
agcttggactcttgtgccttcctcagatggagtctcattctccaccagcataagtgacttcattcgagggcctttctctgtcaatttcagagtaatttattgtggcaccatagcagctgaagctttaactatcacatcattgtcatcttttcccttcatagagagcaacatacttttgaggtctggccctagcggactcaaagtagtgaaaggtaatcttcaatagcttcattggtcgcaactctctcagcagcatccgagagcaccacaatggctagctcggtactcgatttgtccttcaccatcactcaagaaacgaagttctcaaacaacgaagctcgcaaagcatgaaacttgtgagaaagcacgaaagtccaacaaagcttctaatgcatagaaagcacgggtagcatgagtaaatgccatccccaacgcattgatatcggccattta

SEQ ID NO: 39457 - DNA, 424 bp, Zea mays
  unsure (1)..(424): unsure at all n locations
ggcagtctttcgttntaggtgcatgctcgtagggataagcaagccaagattgcgagaacaaagtggtgtaagttgaaaggggagacatcggaaatcttcaagggccatcaaagagagaagataatacaaacaccatgtgggagaaaatgacaacctgcattcaaaaggcggctttagaggtgtgcgaagcaaccacaggtagtgcgggcataactaaagatacttggtggtggaatgaggaagtctaaatggctattaagaagaaagaatgctatagacattttatcatgataggagtgtgaataatatagagaagtacaaggtcataaagaagactgcaaaacgagctataattgtggccaatggtacggcgtacgaggatctttatcaatgtttgagtgcgaacgaagaatataacgacata

SEQ ID NO: 39458 - DNA, 301 bp, Zea mays
cctccgtcgctttagatgctcagctacttcatcgagccggattcggaaaagaacgtgactttcgtgctcacctgccattctgagagccaatagataatggccgacatgtttgacatggagaagctggactctccatttggtggccggaacggagatggcattctcattgccaagtgttcctcgagaatgcgaacaggagatcacattacgcgtttttcgctacggcaaatggaatactgctatctacaactcgtaagaaactgtcctgatacaagatattaaaacggatcactaccgtatt

SEQ ID NO: 39459 - DNA, 441 bp, Zea mays
  unsure (1)..(441): unsure at all n locations
gcagcttgagctctacgtggattagaatttgtctctcaccttaactggggatatccgtggcatgattcgatttaagctattgtgattgtagtacatttggccaggggataaagcattttttgttacgggctgcatgaacaggctctatgcattgtttttcaagcattactatcagtaatactatttcaactgagtaatatggtttctgtgttagctttgggatcttgtagtgggaagtgagaaccaaatagtcaattatgctggtgttcgtgccatggacatgtggtttagtcttgatttattncatatattcatattaactggtggtggttccntttgttctgcagtatcattccatttctggtgtttacttaattatgtctagttgctgctttgtctgatactattctcatgttgcaaacccaactccgcacatatatc

SEQ ID NO: 39460 - DNA, 408 bp, Zea mays
cctccggcagactaatactataataagataacaagcaatttgagtggagagattgcgagagtatcatgtaccctccgtggcaagacgctggacggcggtgcatttgcgctctcggctggcgcgaacctgatctggtcttaagaaccccggtggcgagttgacatatgcacaggttaagtgctacatatgtcgcgtgactggagatcctccactgagtattaatcgattcggatcgccgttacttctcggacatgaagacttggtcactgccctacacgtagcattccagtgaacaagaagggccgataagaaattggctagtatacgtccagtgcttgaactatggtagaaagactctatatgcacgtaccttactttacctgaatgtaaaactggtttttaatgatc

SEQ ID NO: 39461 - DNA, 415 bp, Zea mays
  unsure (1)..(415): unsure at all n locations
tcagcttttctagcagcttcctgactaccatgaacaacaacgggttcttgctccgaacgtatcttcatgcacaaatatgccggatgaagtattgcttcgaaagcattgagtgtcccatgaccaatgaatgcacttgtaggggattccatatcaacgatgtcaaacacaacttattaagttcttgtattgcggacgaagacaaaggtcactggcatcgcgattttgccgagcgctgcaatctgctatcctccgaagccacanagagggtgtgtagcatcataaatcttatcctctggctcttgcatctggctgaaagccttaacacatatgatgtcagctgcactgcatgtatcaaccaaaacattgcggaccacaaattccctaatgacacaagatatgaccatagcatcattat

SEQ ID NO: 39462 - DNA, 412 bp, Zea mays
  unsure (1)..(412): unsure at all n locations
ntcgacattattatcaagcatatcttataattgttccttcgtttcagnctccgaaggacataatgatgaacagacaatcttctgtaaggattgcaaaatgggctacggagcttatcttattcagaattgactatgtgcatagatcctcaattcattcccattcattagcagacttcatcgctgactggacgccaagggcttacgaagaataaacaaataaatacgttcgcacttggacagttgtttgcgatggttcctaggtgaacctcggtgcaagagtggttgttgacctagttgccacttctaaagtcaaaacatgttatgcagcacagctcgacttcagttgtacatataatattgctgaatatgatacacttctattgcggcttccgaagttaatggaatgggaata

SEQ ID NO: 39463 - DNA, 328 bp, Zea mays
gctatgcacggaagcaagttggtgtctgatagcacctagaggcggggtgaatatgtgatcctgcgaacacttaaatttatcgccaccaaaacttgcttaatggtatcacatatattgtccaatggctagataggagttactacattatacaattctcactagagatcatactctgacatgacacatggattatcctgtggttcggccaacaccaacgcttgcctacttcacgttgtggcgtcctaacggacgagggttgccaataacctctctcaagtgttctaagaacaacttaataccacggcgtgttgttatgcctttcactatc

SEQ ID NO: 39464 - DNA, 307 bp, Zea mays
  unsure (1)..(307): unsure at all n locations
agcttcgggaaaccaatacttctggccatttctcttcatacagatagctctttgttgtcaggcaggcagtataagaagtcatcttcattcgttccattgaatattatagcccccttcggatattatagttcctttgcataatggatggcttcatgagtttcttcttcagatagcttcttccccgaagcatgtcgtatcatgtaatcacgcgtgctggcaggtgcttcggggatggcggtgtcagattcttcaactaatactggttctggaatttctattgcttcngcttcaaaaggttgctccttgt

SEQ ID NO: 39465 - DNA, 463 bp, Zea mays
  unsure (1)..(463): unsure at all n locations
tttaaccctcctcccgcgagaccttctcccgtntctttctatccataatggatgcgacatcgaatgtcatacttgatgcatattcactttatttgttcccttgtatgatgtactgtctgtttcccaatttgaatggatgaatgtatgtatgcttgcaatcgcatagagaacgatctggtcgaagagcccgaggaactcgcangagaagcccctgagcagcagtcgtttggtggaggcaagtgtcctttgacctatctctgtcctattcattctttaattcacctcccgctttacacatttatgcctaaggattgactagcttttgtgatccatgntcttgttcacctacttgggttggattattatnnngttagcttatgctattgctcanactctaatcaatgaacatgatgagattatctattgatacgctgtttccctcctctattatgatgttgtactt

SEQ ID NO: 39466 - DNA, 381 bp, Zea mays
  unsure (1)..(381): unsure at all n locations
agctntgtgtggaattgtgagaaggattgatcacttgtgtgtgtctagaattgaatgctagagctcttgtaagtagttgaagtgggaaaacttggatgacttgaatgtgaggtggttgggggtatttataaccccaaccatcaaactagccgtttggtggaggctgctatcgtatggcgcaccggacagtccgatgcgctaccggacagtgtccggtgcgccagccacgtcaccaggccgctgggttccgaccgttggagctctgtcttgtgggcccgcttggctgtccggtggcgcaccanacaaattntttacactgtccggtgcgccacccgcgcgtgcactgctactatgcgcgcgcatgcgatcatataatgcgtt

SEQ ID NO: 39467 - DNA, 407 bp, Zea mays
  unsure (1)..(407): unsure at all n locations
tgttcttgttttgtgaggcgaaggaaaggaggtangccggttggaggggaagcaggatgtgagatatggggctgcggaaagggagctatcttttcttagcaccaagcaagcaccaggagagacgagagaatacacacggtgacggtgaggagagaccaagggagcgagagagatggggacatggggtaacttgagttggcttccaagagaggacaataaagaagtatgtgagagggcagatgagagagagacagtcatatcaagagagggacaggacggcgagagtgatgggtttgtgtggctctcttcgtattgttttcttctggcgacgatgtgtgtgtgcatgcatgcatacgcatatgcttggcgggcctgccctncctcctccctgcggggacgattgacca

SEQ ID NO: 39468 - DNA, 416 bp, Zea mays
agcttgtgtaatctacttcatcatcactatagtcttcatcacttgaagtagtatacttaggagtatctcgagcgcttacatttttcttctttgccatgaggcaagtatgatgctcattggggaagagagacgacttgttgaaggccgaggcggcgagtccttcgtcgtcggagtcggaagaagagcaatccgaataccattctttgccaaggtgcgcctcgcccttcgccttcttgtaggccttcttcttctctcccttcctgctcttttcttgttcctggtcattagcatcatcgggacaatttgctttgaaatgaccagtcttaccacatttaaaacaggagcgcttttcctctgctttgcttttgttgggatgctccttgcgtccttttatcgtcgtcttgaaacgcttgatg

SEQ ID NO: 39469 - DNA, 440 bp, Zea mays
  unsure (1)..(440): unsure at all n locations
tgaatgttcaaaatcaagaacttcaagtgcaacttggaaattgcaagaacatcaatgcccccactttagtatttgaatctaagtctagctctaatgataattcttgcaagcattgtgccaaatatcatgcttcttgttgtctaactaaccatgcaaggaagcaaagcccacaggtgaaggtcaaaagaaatttgaaaagatgctctagcaatgatgggttaaagaaaaagtgaacccagtacaagtcccttaagcccaacaagggtagaagggggcttgggttcaactcatccaaggaaaaccctagcacagtgcataaggggtgatcccccaagttcatagagggaaccactctatatgatgccttggngaggaatccactctcanatgacaagtcatctcaggtaaagggttaacttgagttccacanagagtaagat

SEQ ID NO: 39470 - DNA, 335 bp, Zea mays
gagggaccgcgccctacgtctcctgagaagtctattgctgcggagtggacttttacgtttgagcgagtctgtctacgtcgtccttatcgcctgtgtccccctccctctcccttgagaacgccctgcgcatctcccttttatagatacaaggggaaggtccagatgtacttatagggggtgttgctatgtgctaacgcggccgacggagaagcgcttgatccctgtacaagccgtactagccgtgtgcgcctgagttctgctgacgcttctttgtcttcctagagagtctgaggactatctacgtcatggacgcatgctgggaagcatcattacct

SEQ ID NO: 39471 - DNA, 459 bp, Zea mays
  unsure (1)..(459): unsure at all n locations
agcttctgcagaaaatggatgggtacatcaacgtcgacttatactttcgacagagaagggaagaagcctatatatactccgagatgacgacgggcttctgaggaagactccaccctacgcatgtcagggcgatccataatcctagctccagcgacgatagagaaaatcaaactcaagggcatcagcacatctctcaatctttagggacacaacaaagctctttcaggccaccagctccatgaggcagatgaggtagaagctntgctagaagatttagctcccaaccaagaaggttgttnttgtattctgtggagaagataaggggcatacaacaaggacatgctaagtcacgattcataagcaaaaggaaatagctaaagccaaagcacgtcataatcatccgaagcaggtactgcatacttctatgtgttattccccatacatccncnagtatgtgga

SEQ ID NO: 39472 - DNA, 472 bp, Zea mays
  unsure (1)..(472): unsure at all n locations
tactcaagcttgtgaaggttcttcatccncacatgtgctaagcggcgatgccacagtgagcccatgctagtcttagcaattaagcatgcatctagaccggcctcctcttttgcaaaatcaactaagtaaagtttgccgtctaacacacccttaaaagctaatgaaccatcacttcttctaaagacagacacatctacanttgtgaatagacaattatatcccatattgcataattgactaacagataacaaattatatccaagagactcaactaaaaacacattagatatagagtgctcggatgaaatagcaattttacctaacccttttaccttgccttgattcccatcaccgaatattattgaatcttgggaatccttggttttaagggaggaggtgaacatctctcttctccccgtcatatgggttgtgcatctgctggcgataatccagctctgacccccggatgcat

SEQ ID NO: 39473 - DNA, 470 bp, Zea mays
agcttcggggcagcaacagaactatcctcggccctcatcttctggggcagaggcgccacgggcttcggaggaaggtttggggatcaccccacgaaaatttactgcctattctgcggtgaggacaagggacatactaccaggatgtgccatgtcaccattcaaaaacagaaagagatagcagaacctgtatcccaacagagccagccgaagcagcttatgcatactgcttcgtaccactcaccagacattctagagtatgtgggtaaccatcatgcagtttcttgtgcttcggcaagccaacctcatgcatctatgcaacacccctcacctccaccaccaatgcatcccacttatctccagggccagcatccagaagggagtcagcacaatcaccggcggagagactttaaggagcagtccacagctcgcacagtcaatagtactgtgctagaatcaaagcacatctacta

SEQ ID NO: 39474 - DNA, 471 bp, Zea mays
gcgtggacgacattgccgtactccattgaattggtctgaaccaggggaaaggtgatttttgagacctgatatggctaaagaaatggaagacaaagttcaacgaattatacataatttgaaagaagcacaagctctacaaaagagttatgcagacaaacgacaccaacccttgttctttcaagttgaagactgtgtttacctgaaagtatcaccaatgaagggtgtatctcgttttggtgtaaaaggaaagcttgcaccccggtacattggtctggttcctattcttgaaagatgtggaccggtggcataccgactccaacttcccgaaacattgtctgcagtgcacaatgtattccatgtatcccaattgaagaaatgtcttcgggttccagatcgaaccatgtacgtgatggatcgtaccttggaaccagacttaatatattcataacattcctatcgagtactggatca

SEQ ID NO: 39475 - DNA, 404 bp, Zea mays
  unsure (1)..(404): unsure at all n locations
agcttatataacgcaccatatctgtggaagcatggagaggtgtgtctanacgaagcgatctcatcgactagactccgcctccaagatctccttggacgacttcttccagaatcgccatttgcaaaggaggtgtcttcttcccttcgtacccctctcttcagaagggttgggatactagaagcgagaaactacatacccatttaccaaacggaggcgacgcgaaacgaagccgtattggagcttgcgaaactgaattttaaccttcagcaacttgatttctgtgaagagctaaagcattgctcagcgtaagaatgttttcatctctcacttcgaattaactgatggtgctctctctctctctcatgttttaattggcttattaattgctatctgaacatgcatgt

SEQ ID NO: 39476 - DNA, 433 bp, Zea mays
aagctctgaatgggcgtctactcaagcagtaccatcctagtatgtggcaagatgcttaagaaaactgatgtgatcacatcgagttaagatgcttttggtttgcccagctccaccaaaaggcagggggcatatgtttggcaccaaaatgagcgtgcggacggtccggccctaaggccggacagttcgtggtccggacaatccgcgcctgtgggccggactatccacgcgtgcgcagagcagattagggttccgagttttgtgctacggtttttagctagattcgcggaattagctcggaaatcagttgtgtaaagggtccagccccccttctctataaatagagaggtatacggtcgatttgtaatatatcaatcgaatcaaaaacacttctatttcgcatctatttcctacgagtaattctagtctagttcta

SEQ ID NO: 39477 - DNA, 374 bp, Zea mays
gcaagcttctaagggagagcacattttgggactaaccaatgttcattttgagaaagacagggtttgtagcgcatgtcaagcacggaagcaagttggtgttcatcatccacacaagaacatcatgacgaccgacaggccacttgagttactccacatggatctattcggcccgatcgcttacataagcatcggcgagagtaagtattgtattgtaattgtggatgattgttctcgcttcacttgggtgttctttttgcaggagaaatcacaaacccaagagacattgaagggattcttgagacgggctcaaaatgagttcggcttaaggatcaaaaagataagaagtgacaaccgaacagagttcaaaaattcac

SEQ ID NO: 39478 - DNA, 439 bp, Zea mays
  unsure (1)..(439): unsure at all n locations
tactaagcttctacacgttttgcattgctttctactcccatgcatatcacaagtgggagtctacttntttatgggagttgcagtgcatatgggtagtcttgctaagtgtatttatcaacaaggagtataattatacacatacataagcatctttttgagaatgcattcatttatgaggctttgtgaacccttttaggggatgctttattctgactggggaagttttggaaagatgatttactagttgggttaagcctttgcctacttctggagggactagtttactctcagagttttcaatgcctctcatctttatctctaatttttctctagttttctatatttattggctagtggtgttgagcaattcttggcctcttcttgagggctagcctttttttgcttgattgggtggagatgttgcacatgtccttgggaa

SEQ ID NO: 39479 - DNA, 303 bp, Zea mays
  unsure (1)..(303): unsure at all n locations
atcttgagtcacctgcggcatgcaagcttcantatatgtctgtgcgggacagctagtctgtccgtccatctcctcttactctgtacatgaggatgctgaatacccatgaccacgatgtgttggtgtacctcatgcttctgaatgcacagacttacaggctgacatatctggtttcaagcctcgcgagtagagacagccatcatggtgtgggacaggcagtgcatatgctcgatgcccaacacatgaaactaatttctgcgccttgaggagggtacataggtcactgacgtgttgaaaaactcg

SEQ ID NO: 39480 - DNA, 182 bp, Zea mays
tcggcgacagttacaagcatatgtcatgatggtgcgctagtttcagcctatgaaggacatactgaggaccagctaagctgctggatggatggcacaaggggctacgcgacgttccttatatattattgactatgtgcatccattctcacttcatgtccagaggtcagcagacttcatacatg

SEQ ID NO: 39481 - DNA, 419 bp, Zea mays
  unsure (1)..(419): unsure at all n locations
agcttgtgaaggttcttcatccncccatgtgcttttcggcgatgccacagccagcccatgctagtcttagcaattaagcatgcatctagaccggcctcttcttttgcaaaatcaactaagtaaagcttgccgtctattacacccttaaaggctagtgaaccatcacttcttctaaagacagacacatctacatttgtaaaaaggcaattatatcccatattgcatagttgactaacagatagcaaattgtaaccaagagactcaactaaaaacacattggagatagagtgctcattagaaattgcaattttatctaacccttttaccttgccttgattcccatcaccgaatataattgaatcttgggaatccttattcttgacgtaggaggtgaacatcttcttctcccccgtcatatg

SEQ ID NO: 39482 - DNA, 465 bp, Zea mays
  unsure (1)..(465): unsure at all n locations
tctaaatggagagcacatattaggattaacatatgttcatcttgagaaagacaggatttgtagcgcatgccaagcagggaagcaagttagtgcccatcatccacacaagaacatcatgacgactgacaggccacttgagctcctacacatggatctgttcggcccgatagcttatataagcatcagcaggagtaagtactatctagttattgtggatgattattctcgcttcacttgggtattctttntgcaggagaaatctcatacccaagataccttaaagggattcttgagacgggctcaaaacgagttcggcttacggatcaagataattataagcgacaacgggacggagttcaagaactcacaaatcgaaggctttcttgaggaggagggcatcaaacatgagttctcttcttcctatagcccacaacacaatggtgtagtggagaggatgaatagaac

SEQ ID NO: 39483 - DNA, 397 bp, Zea mays
  unsure (1)..(397): unsure at all n locations
agcttgtcagtaacatatacttgagcttctgccaccaattaatagaccctagccgaagagaagaataccatgtttgggccacattccgaactgccatgacgaaagatttatccatgacagctgcattgcctccatatgaagatatgggtgcttcataactcataaaaaactgcttcggatccgaatgcccatcatacatatggagctgangtggcttgtatgatgaaagccatgggatatcctgcagttctgctgcccagggagaagcatcatcaaaggtaaaggtatcatgattaaaatcatcataccatccatcctcattgaatatgcctctctgattaagctccctgtgttgaggcctttgatcttgttcgtcttgagaaagatggcgtacttc

SEQ ID NO: 39484 - DNA, 458 bp, Zea mays
  unsure (1)..(458): unsure at all n locations
ntctcaatctatcttggtgcttattaaatatactctaacttttatatttggctcaactcaaaattctaaactcttcattcccttttgctcattctcttggattttgctcatggggttcacttacggttcttaattagggttgcacattcttatcctttaagagactcaattgtcttgatcatgacacttttaagcacatacttggtgaattctctcttacttaagttattttgatgctcatgcttactttggttcacataacataatggttcttggtttggctttttaagagaaaccctacgtgacactggggtgtcacacgtcatgatacgagctccttctggcacttcctctacagcagtgaagttgagcttcccttgcctgacttgcaccttctgcttcttccctagcttgatttggcgtggcatctgcctctgctggttcctgcgaccactctt

SEQ ID NO: 39485 - DNA, 401 bp, Zea mays
  unsure (1)..(401): unsure at all n locations
agcttgggggaggatcaagtatagaatcttattgtgttctatggtctaatatttatcaggcagnctttatcatgagctntgctagttgctgaacatgcagtaagactgcatggttgatatggtggtgtttgttgaaatataatataagtgaatttaccacctcttcatatcagattaaacttttggatttaactgattggtgcatgcaacttaatatgattgtggagccagaggtttcgaattcaaatcctaattagcgcaattaaaataaaaataattggtgctcactcttattccacatctgagaccgagaaaaagtctggacgtgagggggagtgttggaatataatataagtgaattgaccacttatttctattatctataagttttggattggact

SEQ ID NO: 39486 - DNA, 428 bp, Zea mays
  unsure (1)..(428): unsure at all n locations
tgcaccgatatgctacgctctgctgtaaaaaaccagcgttatctgctcaagcagaaatacttcaatggtgtacctgcaaatgagattagcacaacttctcctgtatcttacatgactgatgaacagtggagggaattagttgcaaagtggtctgatccaaagaacatggtatgggtatcttgtcatataatgttntttcactataagttngcaaaggatcttcgcatattgaacctatgatctaatctgacatgttcattctcttgtaggaaataagtgaaaagaacaagcagaaccgcagtcaagtcaagtttcatcaggctaccggttctcgctgctatgtggcacacttacatgcatatgtaagtaactattaccttgtactactacctgcacttttgcactcacctctattgcattgatctaac

SEQ ID NO: 39487 - DNA, 469 bp, Zea mays
  unsure (1)..(469): unsure at all n locations
agcttaggcgtggcgcagccgaggtcaccggcgctttcactgcgactccggtagtccgaccacgtcgcagcgactatacccacggcgataaactccaattcgcgatcctatcccttccccgccgtgagatcttttctctgtcgtagttatccaaccgccagtgaacacggatcacggcggcggcgtgaatcttcgcgcagggaggtcgccgtcgacgagcaagccgcgctggcaaccatatccgttcagttactgtaccatggcgaatggcattcagttggactgaccgagcaagtttggcgctaattttcttccgattntcaatggcaaccagtggatcagctaataacaaagttgttgtctgatgatccaacaacaatcttgctatagcatccatagccaaattcttattagagcaaggttgatntccagttcaaagttgactcaataccactggtagtctgaattt

SEQ ID NO: 39488 - DNA, 456 bp, Zea mays
  unsure (1)..(456): unsure at all n locations
ntagactactgtgtgattcacttgtctatccggcgctggttgtctttcctgtgtgaagcttgtcctagaggtgaaagaacggctagcatgggagcacccaggcctccccacgggcaggaacgggagggacgatgacgacatggtcctctggtttctaaaggaccgcaagttctccgtcgatgaagccgtctccaagctcaccaaggcgattgtatcctctaattcactcgcttgtagcagtgaagctcacacctaatagcttctttactggctcactaaaatcctggtatggtaaccgagctcatatagcactgttatcttcagttttcctttcaactgcattagaaatggcgtcaggactttggtgttgcagagttatcagaggattcagtgcaaagcctgtaccaaactggcaaggcatatgtacattgatttctggacatttatggtcgacct

SEQ ID NO: 39489 - DNA, 424 bp, Zea mays
  unsure (1)..(424): unsure at all n locations
gatctctaagcgactgagctgcaactggagcttgatacactggaatcaccgcattagatgcatctntgttaaaaatgttttggctttacaaaatgttggtagactggctacccatggttttggtattttacagtgatggtgttccattggacctttatgggccgtttggcacaactttatgtctgagatctatgctgcatctatagtttgtagattaagttaaagtgatttaactatttttatttgatctaaaatattaatgaaatgggtcatgcaaatgcacttaacatgcctgcagctctagatctatgattttctagagctacgggtgaccagctctaagaaatccatctcaagctcttgcaaacatggccatgaaaagtttgtacaagtaatgcttgctcaattgattggctcatatatt

SEQ ID NO: 39490 - DNA, 387 bp, Zea mays
  unsure (1)..(387): unsure at all n locations
ntactcaacagcatactctgtgcacaagcaaccttcgttagataacaccttcgttgttcanaacaataaaaagtcgaagaanagtttttaccttgaaattagaatagaataaactaccgacaagatgttgtcgtcggtagcggcttatgtcagtctcaagcttcaggaaaccaatactctttgacagagtaccaataaccttcgctccgatttgatctcggatgcagcccaatttttcatcatcaacaccgccgaagagtagtgcccctggttgatacccgcaggatatggcatattctctcaattcttctttctcagcctncgacaattcttgcccaattaagtttttaaagntaaagtttttttcttccgaagcttcttcagctg

SEQ ID NO: 39491 - DNA, 467 bp, Zea mays
  unsure (1)..(467): unsure at all n locations
agctggtcgnttcgcctagattcgggccggcccatgtatactgtggacttggggtaggcatctgacccagtctgggttaagaacttggacgctagaaacatttgtgtcctgtgtggctgtgtctactctagggtttgggcctgcactcttttcaacatatttttctctccttgacacattnttctttgacgtcccgtttggatcactggaattaaattccattataataataataatttagatatatatcaattaagctaattcactcttatacaaaatatatttgtatactattattagcaagatgtcctaaatatttatgtgctacatttctactatagacgagtggaacgaagagtgtcatgtaagttacagagtaaaaacaaattctactcatgtttaacatcatttcttatnctccaccctatcgaattgagataagcttatactttaactctcgaaagtgg

SEQ ID NO: 39492 - DNA, 473 bp, Zea mays
ctgaactaactcggctgcatcacttttcgctggtgggcggtgagaatctcgatctgaagatcttcccttctagtgacttggatgctacgtgtattccacattgtccagcatggacctcgtctacaagttgcttccccatagatgagagaatgcactttatgaggacacccgatgcgcctcttctatatagtgtctccccaatgagtgcgtagcgagctgactatcttatgatgcgctcggctgcgtttttgtcatctggttcctcttcattctttatatatctgatgatcggccttctccagtcatcagagtctgactctggttgatacacggtattccactcttctgcctgaccattgagatgcttggctgtggtatttcttgtaccaagactccaggtgggacctgagtcgactagatcctagcttggacaatacatcggctgccgcggttctatctctttctacatgatg

SEQ ID NO: 39493 - DNA, 462 bp, Zea mays
  unsure (1)..(462): unsure at all n locations
agcttgtcacgggatgaaaagcaggttatctggcatttgcaaagattgatgtactttctgtgaatatgtacaactacttttgttatgtgtttcctcaaaattactggatcatcagctaagctggaattgctatcatttgcagcctcttgttgagttggttaggtagtttgagtagcactccttagatcctgagttcgacttccgtgagagcgaattttaggctgtggttaaaaaatccactcgttcgtctgtcccacgccaaagcacaggtctaaggcctgatctcggtcgcgttcgttctcacatgggctacgcgtgccgtgtgtatgggtgagacagggcttccagggttttctcaacctgcgtgaggtcttcttaatataatgccatgggggcggtcttacccctgcacgccgagttnttttttcttatttagagggtgacacagtgaagttggtgtgg

SEQ ID NO: 39494 - DNA, 446 bp, Zea mays
cgaaggactgcttcggcaggagagcttccgaacgtgaagacttgttcagtccacggagtctctttatccgagcgcgagttacttatcgcagaaggtgatgagtgaggtatccgtatcccggaggcgtaggagtccctcggctcggtcagccttggctgcttacgtgtactccgtcgtttctaggatccgctttccgaagtagtcaaaaagcacgaaagaaatcctgctaaaaagagatcctttctcgaggaaaaaattcgacgcagagggggtctccccccttttagcccccgagggagggtcgggctttgccgaggctatgccgacccttccttcgactaaacttgcgtaggtgcgaggtatatgaacaacttgaaaacatcttataggtagaagcgacgtagctggttgatgttccaagcgttgccgcagatatcgccttgatt

SEQ ID NO: 39495 - DNA, 470 bp, Zea mays
  unsure (1)..(470): unsure at all n locations
aagcacctgngctgcagcttataaagacatgaaagaattaagctgtctgttgacaatgtctcacttgccttatgttgttgtcatgtatatgtatgggatatcatctacattttcttttgaatgctgcttccaaaatcaggatgcatatcggaaaaaatgttgtttttagggacttgagaaatctgaaactgactggaacctgtcgtagcttcgggaggtgattaattgctacaagctcaaggctgaccaaagctccctcccgtatgtgtatttgattgagacgaggcaaatccttcaagtaaagttccttcaaattcaggaaccaacctgcttggaaatataattcttggccagtgtatgcctttataagatataaccaagtcaagtttgacaatatatagaggcgtggtatcaaattttctgaaagctaaatgtaacacaacattatcctaagaagtccatttccatga

SEQ ID NO: 39496 - DNA, 437 bp, Zea mays
  unsure (1)..(437): unsure at all n locations
cgcgagactctttcccgcctctgtctaaccatggttaattcattatcgnacgtgatattctatgcatatttactttatttgtcctcttgtatggcgcactgctcgtttcctaattagaatggatggatgtatgtgtgcttgcaatcgcatagagaacgatccggttgaacagcccgaggaactcccaggagaagcccctgagcagcagtcggttggtggaggcaagtgtcccttgacctatctctgtcctattcattctttaattcacctcccgcattacacatttatgcctaaggattgactagctttgttatccatgtccttcgttacctattcgggttgaattattattgtttagctatatgctattgctcaaactctaatcaatgaacatgatgagaatatctatgatacactgttctccttttcttattatg

SEQ ID NO: 39497 - DNA, 448 bp, Zea mays
agcttcatgaagaggaaccttcggccatctcacacaagcagcttcagccgaaagccgcttcttcctagaagaccttctgcgatgaagcatatacccaacagggggcatgcaatttgcaagctagggaccaccatgaaggaccgagcaacagctaaaggaaacgtgaataaaagataataaaattatctatcaaaaattagcttatgtcccgattatcctaacacgtctcttttttagttaccaagatcactttactaacaagtgatatatgtgttggggcgaaggcgaagacgccacccttcgctcgaggccttcgccgtcctcgctgcaccaacggagacaagacaacaggcagacttacccttcgtcttatatgccaccagacgaagggctgtgacgaggtcgtctcatcttgcgacctcgtccagcatggaggcccgcgtgtgat

SEQ ID NO: 39498 - DNA, 476 bp, Zea mays
  unsure (1)..(476): unsure at all n locations
tgtcaatacttatcaaaacaacaacatttaccagcatagcaactgcaaactatacctgtaacatggccattcgcgtgctggggactggatatgattggacccttcaagaaagctcaaggaggatacactcacgtactggttgctattgacaaattcactaagtggatagagtacaagcccatcgcttctctaacttcggctaaggcagtggaattcatacaagacataatatttaggtttggaataccgaatatcatcataactgacctgngatccaatttcactagttcagaattctttgatttctgcgaacaaaaaagcatccagatcaagtatgcatcagtggcacacccaagagccaacgggcaagtagaaagagccatcggaatgatatcggaagcattcagaaagaaagtcttcaacaagaatgacaaagttgcacgacagtggatcagagaagtgtcgtatgtggtctg

SEQ ID NO: 39499 - DNA, 344 bp, Zea mays
  unsure (1)..(344): unsure at all n locations
aacggactccggtctttntggccacttncacgactctgtaaaaactgcataaaacagagggcggccacagttgtaggtggatggccgcccttctctgtcgcctgaaaagggtgaaactctgggcatagggcttcggcattcccctgttatttctgtctggcccttgatccagcagacgttgacatctattatcacgacacaggctgggaaacggtaacatcgacagctcaaaggaaataatccggagttcttcgcgtcacatctggctcagctctcctaggggctggataaactatgataatatgtcgacacaattggtacatcatatgcaatatgcgtgtact

SEQ ID NO: 39500 - DNA, 471 bp, Zea mays
  unsure (1)..(471): unsure at all n locations
agcttctaagggaggcttacagtgaanaataaacgctgattccgctgaagtaaaaggcgaagaagctcctaagggaggcttgtagtgaacaaacgtcgatcttcggcaaatatcattctgcataacatcacatcattacatcatttgcatagcataacatcatacatcatattgcatcaacgacgcaagaagggggtcttagtattgatattcgaagattgtttcgaagaaatagtgctagggcacaaaaatagctattgaagaactataccttcgtcaaactctgaaatgaanagatctattggttattgattctacgaggattggttactgattctatgagaacacggatattatttacgaatcatgaaaagaacggaaggtgtcttttcgccgaaggctcaaaaacggtatgtatgcgaagcttcatgcatcgtanagaatagaaccatacatagcttatatattaca

SEQ ID NO: 39501 - DNA, 435 bp, Zea mays
tgaagtacatctttacccactcagagctgaatatgaggcatggagatggctcgagctgattaaggattatgaatcggagattcactatcacccaggcaaagctaatgtagtggcagatgcactaagtcgccaggcttcctgacactgtcttacgatgaagacttctgacattacactatgccaagaaatggaaaagttgaacctgtgaatgattcaacatggaacttcaaatcacttgaagcttgagtcggttcttctgcaaagaataattgatgcacaaaggaatgatgagggtatgaaacacattcatgagaaaataaaggctggtaagacaaattgttttagagaagatgaccaatgcattgtatggctcaacaatcgcatagttgtgctcaagaatgatgagatccgccagccaaatttagatgaagcgca

SEQ ID NO: 39502 - DNA, 461 bp, Zea mays
  unsure (1)..(461): unsure at all n locations
agcttactaaagtgagtccttactttccatcttttaatgccatcttaagtattaatagactctatttgcatcttgtctaatttcacatcaaaacaagacaacattagttttatccctagtgttcacattctgactctaggttgcagggaagtgaccaagtcttcataaccgcgaaggtacggcgatccgaatcgattatactcagctgaggatctcccatcacacgacatatgtagcacttaacccttgcatatgtcaacccgccaccggggttcttaagaccggatcaggttcacgcagaccgagagcacagatacaccaccgtncaacctcttgccacggagggtacacgctactcttgccaccgctccacgcccatctcgtgttatcttattccggccttagtctacccgacgcaaggcttactcatgacgaggcatgtgaccagttaaagggtcctc

SEQ ID NO: 39503 - DNA, 404 bp, Zea mays
tgcaccacgatatattggtcctttcctcattcttgaaagatatgggccagtagcacaccgactccagctacccgaaaccttgtctgctgtacataatgtgttccacgtgtctcagttgaagaagtgtcttctggttccacatctaaccattgaagtgacagatgttgtccttgaaccacacttgacatattctaaacatcccattcgagtcttggatcaaaaggacagggttacccggagaaaaactctcaagttttacaagatacagtggaaccaacattccgaagatgaggctacatgggaaactcaagactttttagacaagacattcccaggctttctagcctcatgtaacttgtaaagtgtgtataggtgttgtataaaggagtaaatcccaatcaccc

SEQ ID NO: 39504 - DNA, 442 bp, Zea mays
cgcacactatcaatactcagctctgggcacacatctgaacatcatctctgttgatcacccgcttactgacgggcagcactaaagaactaatcacatcctagaagatatgctgagagcctgtgcgttgctagactattcacgatggtacacaacgttaccttatgcataattctcctacaacaatggctactatgccatcttgaatatgtcactgttctacgcgctctatggaccgagttgtacgactcctctgcattgggacagcctatagatagacaagtgtttggtcccgacattttgcttgatgccgacaagaatatcaagatggttcgggagaatctgaatatatcactctcaatgcatccatactatgctgactgaatgagaagagaactgatttttgaatgtgcattatttctatctgaagtgcacctatctatga

SEQ ID NO: 39505 - DNA, 403 bp, Zea mays
agctctaccaaatggacgtgaagagtgccttcctcttctgatcgatcaaggaggaggtctatgttgagcaaccttccggctttgaagatagagagtaccctaaccatgtctataggctctctaaggcgctttatgggctcaagcaagccccaagagcatggtatgaatgccttacagacttccttattgctaatggcttcaaagtcggcaaggccaatcctactttgttcactaaaactcttgacaatgatttgttcgtttgccaaatttatgttgatgatatcatatttgggtctactaacgaatctacatgtgtaagaattagtaggatcatgacacaaaaattccagatgtctatgatgggggagttgaagtattttctaggattccaaagtaagcaact

SEQ ID NO: 39506 - DNA, 451 bp, Zea mays
tcggcgcgatggcagaagggggaaccgacttaaagatgaatatacttcggtggcctctacagatatccataagccgttaacaaatgtaatggacatggatgtaattttacgtgggctgcgtcccgcgtctataaatagatgaacagtactcccgtactggacacgctgacttggcatttgcttttggcatcacgctcgtacttttcaccttctctcaggaccgaaggtacatttgtaatttggaatcatctctggttttccatgttaataaaatagaaatgattctatggtgatgcttatatcatatttcatgctttatgtgagtcctccgtcattacttgttatgtttacgaaagtatgtctctcatgaccttcgttcgagactcattatttctcgaatggacataatgcttctaatgacgaatgattttaacacttaacactttctatg

SEQ ID NO: 39507 - DNA, 334 bp, Zea mays
  unsure (1)..(334): unsure at all n locations
agcttnccacttctggactgactcggctgcattgtttttgccgncggccagtaaaaaccagacctgaagacctctcccactaaagatctagatgctacatgtatcccgcactgtccggcatggatctcatctaacagttgcttcccagtaaccgaaggaatgcacttcatgaggactcctgttgcgcctcttctgtacagtgtatccncaatgagggtgtagtgggctgactgtcttgtgatgtgttctgctgcagctttatcatccggntcctctctcgttttatattcttaataataagctccctacagtcattagaatctgactctggctg

SEQ ID NO: 39508 - DNA, 413 bp, Zea mays
tgtgatctatccaatttagaacaagcaccatctcttaacatatactgtctatggataaactcaacacaatagatgacattaataacacaagcactagtttcttatttagcaaccctttatatgtggaaggcaagcgagtcgctaaaatagagaaacatcataatatggactaaatttcccttgagccctcatgcacaatatattttgaatgacatggataatatgcatggttgttcaatgaagtctaaagggctgacttaatccatattatggtgagtgtctaataaagaagaatcaaatccaaattaactagatagagaatacgtcacataattctggattgttcaccatatgataatattcattcatcttccatttgacctttattcataataacaactgatgatattcta

SEQ ID NO: 39509 - DNA, 405 bp, Zea mays
  unsure (1)..(405): unsure at all n locations
agctcgnttctatggtgtctaatctactgaggtgtcgcttggcgcgttctaatcgactnttactttcaactgacttgccattagtttgtcttttaagagttgctagatgttnggtgttcttgcaaggaggtgtggggctcgtgactcctatgaggaggggtgaggctactacatacaagggtggggctcttgcgagaacgggtgaggctcttaccaggaggggtggggttcctacaacgaggaatggggccccgccaactaccagtgcattgtgacatctgtaatttatgatgtgtctcttctttcatatagaaaatctatgcacatcctataaaagtactagatatgtctccatcaccctctatgatcttgagctctttgtctncatatccttcatagatctaa

SEQ ID NO: 39510 - DNA, 360 bp, Zea mays
  unsure (1)..(360): unsure at all n locations
tctaaagggagaacacattctaggattaacacatgttcattntgagaaagacaggatntgtagcgcatgccaagcagggaagcaagttggaacccatcatccacacaagaacatcatgacgaccgacaagccactggagctcctacacatggatctattcggcccgattgcttacataagcatcggcgggagtaagtattgtctagttattgtggatgattattctcgcttcacttgggtgttctttttgcacgaaaaatctcacacccaagagaccttacagggattcttgagacgggctcaatttgagttcggcttgaggatcaagataattagaagcgacaacgggacggagttcaa

SEQ ID NO: 39511 - DNA, 438 bp, Zea mays
  unsure (1)..(438): unsure at all n locations
agcttctaaagggagaacacgtgataggtctaactaatgtaactttcgaaaaagatagaccttgtgcagcctgtcaagcaggtaaacaggtgggaagttctcatcatgccaaaaatgtgatgacaacatcaagacccctggagttacttcatatggacctcttcagacccgtcgcctatctaagcataggaggaagtaagtatggtcttgttatagntgatgatttttccctcttcacttgggtattctttctgtaggataaatctgaaacccaagggaccctcaagcgctttctaaggagagctcaaaatgagtttgagctcaaggtgaagaagataaggagcgacaacgggtccgagttcaagaaccttcaagtggacgagtacctcgaggaggaanggatcaagcacgagttctccgcttcctacacaccacaac

SEQ ID NO: 39512 - DNA, 450 bp, Zea mays
  unsure (1)..(450): unsure at all n locations
ttctggatggctgcaatgaatgccacaattaatcacatctactcgtagttcatgatataacgagaacaatcacgaattaaatggtaactaatttttagaatatacttatgtccaaaatgatgggtgttgtgatggaacggattgaagtgtattgtggtatgatccgaagacttgaggcactctagaattacacatttaaacctccgttacgaatcattatgaagcacaacttattgacagatgttttgaaaggcgtaaagacatgttgtaccttgtcttctgaaccgtctaaacatagtcccaattattatgccataatcctccttagccaacgcccagcggagtgcattnnttgttagtacgtcaccccanactttaatgatatgtaaatatccnctacgacattgattctggtaagaataggttagtaatatctagacttgaatatat

SEQ ID NO: 39513 - DNA, 463 bp, Zea mays
  unsure (1)..(463): unsure at all n locations
agctttaaaagaaagtattgaatatatcatccatcatgcttctggaaaaagactctctaaagaagaagaacgagaagctcaacactattcccagaagctgaaatatccaaagggggcattagtgttcaacggcagtgaagaggaagatttcttgtattgtctcccacatagcaaagatatatctgtttgctgggagatggttagaagctttggattcccaacgttagaagatggcctctcagtactgtcgaaagatgaattggccgatagtttggcatataatagtataaaggtgcgaaaatcaattnttgtatttaaaacgaattatttcatttgtttatacttaatactatactccttttgcatggcttaatccttagcaatgccctcacggcacagaanaatatcgaagacgaaggatgcacaatagctctgaacaaccttcgctcggaagtattgaact

SEQ ID NO: 39514 - DNA, 306 bp, Zea mays
gtatgcataacagtcttacaccatacaatagcacatggtattaatgcgacgcgtatgtaatagagagcgctgttacggtcacgcgtaaaacatacacactatagacgactctctagtcgacgggttagtatcgttcatgtaaaaccagttctaatcacaacatgcaactaaacataactttattaattcatacgaatcaaatggagcatttatactactacttaattcttagtaacttactagcttaatagtatacggttccgcacgcacgttaagaatatgacggattctaagctatgcgaaata

SEQ ID NO: 39515 - DNA, 402 bp, Zea mays
agcttgaaccgagggcccgcgtcaccggagaagctttatcttgctcaccggagttcaagaacccgccggcgcacgtggaccgggtaaaccccttcaccatattccgattcgttgcgcgcatggcctctgtgtcatcccgtgaagctcctcgtgcccattaattgaactctcccgccgtggtttggccggagcaagcgctgccgtcgatccccgccgtctgtgttcgtggccaggggagctccgaccacctctgacgccgacccgcacatcgacgtgaccgtcgcgacctcctgaacatcaccgaccacctcgtcggacctccctcgccgccggtaagccgtgccacccttttctttcccgcggctactgtttcagttaaaggaaggactgcgggtgagaggg

SEQ ID NO: 39516 - DNA, 481 bp, Zea mays
  unsure (1)..(481): unsure at all n locations
cagaggcgagagacaagaattccgaaggaatgtctcangagaagaatgttgctgccggtatgtctgaagagaagaaggttactgccaaaatgaagctgagcctttctgaagagatgcatctgggttttcttgagtcaatggcgaagatgaatacagagaagattacaagggagactttagaaggtttatctaaagatactggtgagagtgacagttacgatgcagatagtgggggtgaagattccgaagatcggccatggcgaccaagccattcagtcttcgggaaatcaactatcgggcaaaatcaccttgaaaacatgaaggggagatacttttgggatatgtccgttgtgagagcagatgccggagaaagaactgtgccgacccctgaagatgatgaagtcgntatcttccgaagctttttaaaagctgggctacgaattcctttaagcagggtcgtggtagaagttctgaaaacata

SEQ ID NO: 39517 - DNA, 281 bp, Zea mays
agctttcgggatttaagtaataaagacgagactgtctgtgatttgacgagaaagagtccggcgttatgtcttcatctgactcgcttaagaccgaaccgatgtacgcttgatgatcgacgaccttttaactatccacatgccttcccatgggtaagcctcgtctcgcgtcgaccaataccacacaggccatcaccccatgggagtggagagatggccacagtagcgtgtacccttcgtggcaagaggctagacggtggtgtatctgcactctatgttggcgc

SEQ ID NO: 39518 - DNA, 451 bp, Zea mays
agcgcaaccaatgtaatttcaatctcaacagggtcaaatgatttatcatcagagccgtctaaaaccatcaaggaataagcaagcgctccaagaatatcagcgaggggaacaggtgaccggggtgcttggcaaagctcaccaaggtaaagcaacagagaagttgttcccccacaaatatctgataaagcacggacagcatggctttgcagagaatgacatgtcccaccctgcatgcattcctttgagggcgctacaacagctccaatcagaataggaaggcctcctgcatccaccacagctttctttgcaatactggacttggaagacagggcctccaaagcatcagtcgcactttcacgaacagaaatgatattatctcgtattagaatgtgaaggagagccttaacagccccagcatctataactcttgtgaatgctatcatcacacgca

SEQ ID NO: 39519 - DNA, 388 bp, Zea mays
  unsure (1)..(388): unsure at all n locations
agcttgaagccatggtaagtagcataggctaataatatgcgaattgactcaagcctagctacgggtgcataggtttcaccgaaatccaaaccttcgacttgggagtatcccttggccacaagtcgtgctttgttcctcgtcaccacaccatgctcgtcttgcttgttgcggaagacccacttggttcctacaacattttgattaggacgtggaactaaatgccatacctcgtttctagtgaagttgttgagctcctcttgcattgccatcacccaatccgcatcttggagtgcttcctctaccctgtgtggctcaatagaggaaacaaaagagtaatgttcacaaaaatgtgcaactcgagatcgagtnggttaccccttatgaatgt

SEQ ID NO: 39520 - DNA, 484 bp, Zea mays
  unsure (1)..(484): unsure at all n locations
aagcttcanagggagagcacattctgggactaacaaatctttattttgagaaagacaggatttgtatcgcatgtcaagcagggaagcaagttggcattcatcatccacacaagaacatcatgacgatcgacaggtcgcttgaactactccacatggatctattcggcccgatcgcttacataagcatcggcgggagtaagtattgtcttgtaattgtggatgattattctcgcttcacttgggtgttctttntgtaggataaatctcaaacccaagagaccttaaagggattcttgagacgagctcaaaataagttcggcttaaggatcaaaaagattagaagcgacaatggaacggagttcaagaactctcaaattgaaggctttcttgaggacaagggcatcaagcatgagttctcttctccctacacaccacaacanaatggtgtagtggagaggaagaatagaactctattggacatggc

SEQ ID NO: 39521 - DNA, 387 bp, Zea mays
caacacaggaaccaaagtggaactaaaaatactagcttctaactttgtatctactgttctttcctgaaaatttattctgccacattttcttttttaaaaataaacagatttatgtttcactcgtgaagctgttttatgaaactgaagtgaaaaaactactttaacaagcctgatctctgtgccaactgaaatgcgtgttccgttataacaggggccccacttgtgaagggtagacaagaaaaccttgccaattaaaacagttctatgtggcccgtccgccggaagaaatgcagaataggcggaagacagcgatcgaattaaagcacctttgattttgattttgataaaaggaacctttgctttacgatgaccatgtgtatatatatt

SEQ ID NO: 39522 - DNA, 387 bp, Zea mays
actcagctagcatgcaactcgtgaagttgttcgaggtgggccatgtgacttctccggagtggtttggacctcacctggctctcctgcctccctagcctgtgggggtggcacatcattttctcgaggaatgtcgagctggttccctccgtcgtgttcatcatgactgacatggaagcactcccgagttgggtcgtaacccactcatccatgttgtagttatccgagctgtccgagagtacctcgtcgcacgcaaaccggaactacggcatggactcggtgtcgcaaagcccggagattgtcatgccaatgcccggaccatcttcctccttggagttgagacatccagaggggaaagaaagaccaccatatacgttggcgagagagctg

SEQ ID NO: 39523 - DNA, 376 bp, Zea mays
  unsure (1)..(376): unsure at all n locations
tcatcttgataaagacaggagttgcagcgtatgccaagcatgaaagcacgctggcacccatcttccacacaaaacataatgacaacggtcatgcgcctacaactactccacatggatctattcaacccaatagcttacataatcatcaacgggagtaagtatcgtctagtaattgtggatgactattctcgctttactacggcatctcttttgcaggaataatcacacacccaagagaccttaaagggaatcttaatacgagctcacaaccagcttggattatggatcaacaagataagaagcgataatgggatggagtgtatgaactctcacaccgacagtttnttcgcgatgagggcatctaacatgagttctc

SEQ ID NO: 39524 - DNA, 444 bp, Zea mays
agcttaccgcatttgaagcatgatcgctttcccttggtcttagtcttgctcggctgtccattgcgaccctttagcaccgtcttgaatctcttgataatgagggccatttcttcttcattaagaccggccgcctcaatttgcgccaccttgctaggtagcgactccttgctccttgttgcctttagagcaatgggttgagactcgtggagtggaccgttcaacgcgtcgtcgacgtatcttgcctccttgatcatcatccgcccgctcacgaattttccaagtacttcttcgggcgtcatcatcgtgtacctgggattctcacgaatattgttcacgagatgaggatcaagaacgggtaatgacctgagcattaggcggacgacgtcgtgatccgtccaacgcgtgctttcgtagcttcttatcttgttgacaagggtcttgagc

SEQ ID NO: 39525 - DNA, 456 bp, Zea mays
  unsure (1)..(456): unsure at all n locations
cgatgtttagaatgacatcagcttctctcanatctttcatttcgaaattgttcgatagaagaattttaacttcctcaatcacattgagatttgatccacagatcaagatgtcatcaacataaagacacagcataacagactcacccccaccataccgatagtatacacacgtgtcagattcatttacaacaaatccagctgctgtaagagtattatcaaacttttcatgccattgcttacgtgcttgttttacgccatacaatgattntatcaacctgcacaccttgttctcttgaccatccgcaatgaacccttctggctgatccatatagatctcctcatccaactctccatttaagaaagctgtcttaacatccatctgatgaatgataagaccataagaggctgccacagctattaatgtgcgaatcggtagcaatcgagccactggtgagt

SEQ ID NO: 39526 - DNA, 439 bp, Zea mays
tcggtattacaaaccgacttaaagatagaatgaccttctagttcataaaggtctgagtcaatgttgtaaacttttataaggggcatacttgtaatttctcacaggctgcgtcctgtgcctataaatagtgaacagtattcctttactgttcacgcattctgagaattgcagtcgcatctttcggaattctacctttgccaaggcataggtattattgtattcaataattcaatatactaagtaaatataatataattcgcctatgatctatttaccccttttataccctttattttatgttgttctttaatatctattgaaattttattacgaagacttgagctttgtaattatactctcatttaccttcgtccaaggctcattatcctcaaaggaataatgtttcatggacgaaggacgttaacatttaacactttat

SEQ ID NO: 39527 - DNA, 452 bp, Zea mays
  unsure (1)..(452): unsure at all n locations
agctntatcaaatggacgtgaagagtgccttcctcaatggaccaatcaaggaagaggtctatgttgagcaacctccccgctttgaagacagtgagtatcctaaccatgtttataggctctctaaggcgctttatgggctcaagcaagccccaagagcatggtatgaatgccttatagatttccttattgcaaatggcttcaaagtcggcaaggccgatcctacactctttactaaaactcttgaaaatgacttgttngtatgccaaatatatgttgatgatattatatttgggtctactaacgagtctacatgtgaagagtttagtaggatcatgacacacaaattcgagatgtcgatgatggnggagttgaagtattttctaggattccaagtcaagcaactccaagagggcaccttcattagcccaacgaagtacactcaagacattctt

SEQ ID NO: 39528 - DNA, 461 bp, Zea mays
  unsure (1)..(461): unsure at all n locations
nttgaacatcttcggcaaacatcaccttcgtcatgccgccgattaaagcttcagcgacaagggttgccactctgcagacgctggaccccaatcaggacgtcctttctcttagggaggcccgaagccagaagacgaaggccaccagtccaacgcctccggaggacgacttagaccaggaaatccaaaacttggaaatgctccaacaacaggtgtaacgaaagaaggagaagatggctcgtctagctgaccttcagaggcagatagatgaagcttcagaagaggttcgtcatcttgttcaggatgaccagaaccgaaggcctccgcgcagagagctccatcatgaggcttactacaatgaggatgactggtatgaagatttccatcatggaaaatttgcttttgatgatgcttctcctttatcaacagaattgcaggctacaccatggccncagtcttacaag

SEQ ID NO: 39529 - DNA, 467 bp, Zea mays
  unsure (1)..(467): unsure at all n locations
agcttgtgaagattcttcatcccaacatgggcttctctgcgatgccagagccaacccatattagtcttagcaattaagcaagtatcgagttcagctctattaaaatcaactaagtatagttgaccctctaatactcccttaaatgctactgaatcatcactccttctaaagacagtaacacctatatccgtaaaaagacagttgtaacccattttgcataattgagatacaaaaagcaaattgtaatctaaagagtctacaagaaaaacattggaaatggaatggtcaggtgatatatcaattttaccaagtcctttgaccaaaccttaatttccatccccgaatgtgatagctctttgnggatcatcgtttttctcgtaggaggagaacatccttttctcccctgtcatgtggtttgtgcatncgctatcaatgatccaaacttgagccccgaatgcataaaccta

SEQ ID NO: 39530 - DNA, 450 bp, Zea mays
  unsure (1)..(450): unsure at all n locations
tctcctgtactagcgccgcactcactgtagagtgcgaagcttctacatacaatagtaatggagcccctggcgctggtggagttaatgttgntagatcaatcaaatactgcttcagctcttcgaaggctctttgttgatgtgggccccattgaaaaacttcggctgactttagtatttcaaagaatggcaagtttctttctgctgatctagatatatatctattcaatgaagccagtctttctgctaaccgttgagcccccttctttgtgcttggcggctccattcgaaggatagcttcgatcttgtttgggttagcttcaatccccttcgttgaaactagatagccaaggaacttacccttctttactccaaagacacatttctcaggatttaatntcatgccagcttgcctgaaattagcaaatggttcttgtagatcagtgatatgat

SEQ ID NO: 39531 - DNA, 361 bp, Zea mays
  unsure (1)..(361): unsure at all n locations
agctnggagctagatacactggaatcaccgctttatttgcatcgatcgcgaaaatgtgctgggtttacaaaatgttggtagactggctacccatggttttggtatattacagtgatggtgttccattggacctttaggggtcgtttggcacaactttaagtctgagatctatgctgcatatataattcggcgattaaattaaagtgatctaactatttttatttgatctaaaatattaatgaaatgggtcatgcacatgcacttaacatgcctgcagctatagatctacgattctctagagctacgggtgaccagctataagaaatccatcttatgctctgtctaacatggacatgaaaag

SEQ ID NO: 39532 - DNA, 308 bp, Zea mays
  unsure (1)..(308): unsure at all n locations
ntactcatcagcagactctgcgccatgcaaccttcgttcgataacaccgtcggtggccataacatatggagagtcgtaaagacgctataccttgaatggtgactcgcatcaactaccggctggatgtggccgacggtagcgacttatgtcaggctcaagctatacgagacacatactctctgacagagtaaccataaccttcgctacggttagatctccgatgcgggccaacttttcatcctaggcaccgccgtagagtagtgcacctggttgattcccgcaagacatggcatattctatcaatcctt

SEQ ID NO: 39533 - DNA, 160 bp, Zea mays
agcttgcaggcatgcgagaattgtagtgtccaaaccaaagtacatgttttagcccccttaggcccgtaaggctattttggcctcccgtgacacatgtttctgtcgttgaacaacgatttcgtgcctcctgtctgccacccatgatttgaccatcgagact

SEQ ID NO: 39534 - DNA, 454 bp, Zea mays
agactcacacttcattatactatggtttgtacactaaaaccttctagtgtagatgtttaaggttacggcttacggattggattccgggtctatgttaccataaaaatgtgtgctatagctcacttgtggcaaataatgttgtaacggcctctccggtgtaaaacgtacgtggcaggtcggatacatgaaattggcactttggccacggaaactcgtgctacagctcgtgggaggccaagaacaactttaatgtgctctgttgaccaatacgcgggtggtggaacacgtacataaaaattggcgctcgaccatgaaaacgtgtgctatagcttacgggaggccataaacagcctttgcagtctccatggccaaaccatgggtggcagacgggaggcatataatcgttgttcgacgaagaatacatgtgtcacgagagtgccaaaatagtcttact

SEQ ID NO: 39535 - DNA, 377 bp, Zea mays
  unsure (1)..(377): unsure at all n locations
agctntccacaatgtatttaaacttctaaatctgttatgatatgtatccgcggtggcaaaaacgaaccaaagatgtttatggtgatggtggattctctggtgaccaaaacgtggtagaactcaaaactctaaaggaataaactaagaccagcaactctacacaaccgatgcaaccaaaaaactcaacaagccctagctaagtagtactagtaaatgctcaatggtttataggattgcggtaaaactaatctactattttctggctttttctggactatatgagataaaaaaacagcgaagaaaagtaaatctctcaccgataaaccttgctctgattaccaactgatgtgcacccgttgggtgattgcccgatcttt

SEQ ID NO: 39536 - DNA, 491 bp, Zea mays
  unsure (1)..(491): unsure at all n locations
actcaagcttcagntccatctatattatggattgccttggagtcggtccatcttccttcggtccttctatcagcttcctggcttccatggatagcaataggcccttggtccgaaggtatcttcatgcaaagataggcaggatgaacgattgcttcgaaggccttaagagtaccacgaccaataattgcattgtaaggatattccatgtcaacaatgtcaaacacaactcgctcagtactagtgttgttgatgaatccgaaggttactgacatggtgatcttgcccagtgctacaatctgtcttcctccgaagccacaaagaggatgtgtagcatcatgaatcttatcttctggctcttgcatttgtctgaaggctttagcacatatgatgtcagctgcactgcctgtatcgaccaagacattgtgaaccagatatcctttgataacacaagagataaccatggcatcgttgtgtgggtaatctttgagctg

SEQ ID NO: 39537 - DNA, 330 bp, Zea mays
  unsure (1)..(330): unsure at all n locations
tcccttncagacggggcaagctcttctttaacctctcactttcttctttgagcttttgatatgaatcatcatttgttcctgccaactctacctcataagaagatttgcttgttgacaaacaacaagcattagcacatggtaatatagtattaatttgaatacatgtgcacgagtgatgttgttgggatattaagttctctatcacaacctcatgagcaatgttcaatatgatatgactatccataagattctcatgagaacatcaaagcatatcatattcatcttgacaagctagatttttcaacttttagcttatctacttggtccttg

SEQ ID NO: 39538 - DNA, 447 bp, Zea mays
  unsure (1)..(447): unsure at all n locations
gcgagaccttccncgcctctgtctaaccatggttaattcattatcttatgtgatattctatgcatatttactatatttgcgctcttatatggtgtactgtttgcttcctaatctgaatggacggatgtatgtatgcttgctatcgcatagagaacgattctgtcgatgagcccaaagaactcgcacgagaagcccctgtacatcactccgttggtggacgcaagtgtcccttgacctatctctgtcctattcattctttaattcacctcccgcattacacatttatgcctaaggatagactagctctgtatccatgttcttgtttacctatttgggctggattatttattgttagctatatgctattgctcaaactctaatcaatgaacatgatgagattatctatgatacgctgttctcccttctcttatcgtgatgtcgtacttg

SEQ ID NO: 39539 - DNA, 395 bp, Zea mays
  unsure (1)..(395): unsure at all n locations
agcttaaaggcgtcnattggaagcctactagatgtatacttcctcttctcttctttcattgctatgaatgcgacgggttgcaccttgggtgtggaggtggcgccttgctccaagttgacaatatgtatggagtctttgatcataagttcaaagctcacaaacttgcctatcactttcttgggagacatttgtttatatctacggtctccatggattagttgcacttgagtgggattactaaaaacaagtgatctaagaataaccttggccatatcatggtcatcccacttggtgctaccgaagttgcgcacttggttcaccatggttctgagacagatgtacatggcttgcggctcttctcctttgatgaggacgaatcgaccgagctccccctc

SEQ ID NO: 39540 - DNA, 415 bp, Zea mays
gaagctacctaggggctcggattgagcggaagagggcatgaaatgtgttcggtcacggtggttgtcctctggcgggtcgcggagaggtcgccggagctatgggcgagctccggggagttcggcgcgggacagaggttgcaacggggaagatagccgagcactggggcgtggtcacgggcggccgcggcgcgtgggggttcgcgcacgggcgtgctctgagcgcgcccccgagtgtcagcccgtgccgaacacgtgtgtgttcgcttctaccatggttcaacggctgattggagcaccttatcgtgtagatcatggcaaaaccactgagtacggtctctttcctgcaccatatcctacctttttgatgtgagtcccaagccaagatacggtcggtgtatggagatataggggtgag

SEQ ID NO: 39541 - DNA, 337 bp, Zea mays
  unsure (1)..(337): unsure at all n locations
tgcaagctctggtattacaaaccgacttataaggagaatgttcttctattccataaatgtttgngtcgctgctgtaatcccttataaggggcataattcgtattccccacaggctgagtcctgtgcctataaatagtgaacaagattcctttactgttcacgcatatctgtatttgcaataccatcattctggaaccaatctttgccaacgcagacgnataatgcgattcaatactttaatacattaagcaaatataatattggcccgttatgagtcatttacctctgatactctctttttatgttatctcatacaatctattaaaattcaattacc

SEQ ID NO: 39542 - DNA, 449 bp, Zea mays
actaataccagaatatgacaacacgtaatgtgagtggagagatggcgatagtagtgtgtaccctccgtggcaagaggctggacggtggtgtatctgtgctctccgctggcgtgaacccgatctggtcttaataaccccggcggcgagttgacatatgcaagggttaagtgctacatatgtcgtgtgattggagatgcccacccgggtattaatcgattcggatcgctgttacttctcggacatgaagacttggtcactgccctacacgtagaaatccagcgaactgaacggatgataaaaagactgctagtatatgccaagtgcttgaactatggtagaaagaactctcaatgcaagtaactctacttaacctgatataaaattggatttttaacgatcactcatagaagcctttctgcaatagagacttgattttgatagcctacctt

SEQ ID NO: 39543 - DNA, 336 bp, Zea mays
tatcttagcactaaccaagtcttagtactaaggctggtttgtgcatggccgctaacataaaccaaatatccttcgtacctataaattcatagctaaaataaaataagctagtttagagtaagttacaaacattaattggtatgactaacgactatcatgtatacatatgacctatctattaacattatagctatagttatatatgtgctagccctcctaagactgtctgcaacggttgcgcgtttgctcatctctccctccatttagaggcgactgtagagcgctatccactgatcggtccctctattctcccctgtactagagggaccttctctc

SEQ ID NO: 39544 - DNA, 462 bp, Zea mays
  unsure (1)..(462): unsure at all n locations
agcttctagccaaagaggtgctttctactaccactacactttaaacatatcaaacaacaggattccaatttttcctatctgcttctttgcactagagcaatcattctgaaatttggtaactttttgcttaagggaaaggtgatacgaattctttgaattaaatggcctttctcatgaagtacgggcaatgggtattattttgtaggtttgaataggtttgcatttttctctggtggtttattccattaataatctggtaaaaatttatttgcccactgntgcacactttttggcttgcttatgatttaattgaaatatggctcaatatcaagttttatttgttcaacccacttaaaaagatgggctgtggtatttatcattnttggagtggtgtcctcagtggtacaagtctactgaatatngcttaccaactttganattgttcttatattctcttataat

SEQ ID NO: 39545 - DNA, 367 bp, Zea mays
tccaccgcatggtcaatcctcaagctgttctcaataatggcttggctgactccgaccagatcgatggtataccacgccaccacctctttattcttgtccaagccacagagaagtctctcttcttcaagagaagagaggtcttcgctgataattactggctgcttgtgcgtggcctgaccgatgaggacagtgatagcgcccgtcttggcactgaaactgtgcctcgacccgctgcttgtcagatggactggtcggtacaaggacctcgctctcggtcgtgagacaatgtacgtttctctgaccgggcacgacagaccgcttaatgttgcgcgctgtatgatcgtagccgtatactgtgatggcgcct

SEQ ID NO: 39546 - DNA, 468 bp, Zea mays
agcttctaaagggagaacacgtgataggtttaacttacgcgcaattcgaaaaggatagaccttgtgcagcatgtcaagcaggtaaacaggtgggaggagcacatcacagcaagaatgtgatgaccacatcaagacccctggagctgctacatatggacctcttcggacctgtcgcctatctaagcatagggggaagtaagtatgggttagttattgtggatgacttttcccgcttcacttgggtattctttttgcaggataagtctgaaaacgagtttgagctcaaggtgaagaagataaggagcgacaatggatctgagttcaagaaccttcaagtggaggagtttcttgaggaggaagggatcaagcatgagttctccgctccctacacaccacaacaaaatggtgtggtagagaggaagaacacgacgctcatcgatatggtgaggacgatgcttggagagtaca

SEQ ID NO: 39547 - DNA, 465 bp, Zea mays
  unsure (1)..(465): unsure at all n locations
tcactgaattccttggtatcagcagttaacatccttgcatactgttcagttagtctgactcagctgagttgcaaccgtgattagattgtacattgtttgaattcttatatggtctgaactggtgatggtgtacatctcaacttaattntttattctcacagtatttgagctgtgaaccagacagatgccaccccatctcaccggacaatatatactgccacgtgagtggatttgtcgatcatgaacctacatggctacatatggtgtactctaccaactaccgcgctacaaattgatttcaacaaactgaaattgttctagagaattgacagtcaactaccgaacaaacgaataatcaaccaaatgcgaacgcgtgcagacttgttctttagcacagtatccggcagtttattcatagtcattcanaacactattntgtactatccatagtcatttaaaacacta

SEQ ID NO: 39548 - DNA, 367 bp, Zea mays
ttacaatgctagatcgctacagagacataatccaacttgcgcaccacgatagaatgtgactagacatctttatccctatatcattcgtaaatcatgtgtgttaactctatgggcatgtttgtatctatctacaagctcttaccttcatatacatagtgaatagtgtcctacatatatgtttccgtttgttgcacccggatttaaggaacataggcgggtgcatttcatacatgctccatagaatacactatatactataaccgagtgtgtatacataaatgtcataacaatctgagttctattacatatctgaagtcttacttactatcatatatattaatcgatcttaatccatcttggcgcctaa

SEQ ID NO: 39549 - DNA, 343 bp, Zea mays
  unsure (1)..(343): unsure at all n locations
agcttggtgccaattgagaagcagaagtctttgtgtcctggctgtcaaattgtttgctgttgtcaactgtgagctcggacgggactctgaatcggcaaacaatgttttgccagaagaatttctgggcagtcttcgatgttatcgtggatactgcccttgcctcgatcgacttggtaaaatactcgacggcgacgaaggtgaacttgaggttccctttggccgtgggtagtggcccgacaatgtccaggccccancgctgaaggggccacgtgtgggcgatcaactntgtgaattgcgaaaggttgcccgagcggggggaaaatttttggaggctttgcacgat

SEQ ID NO: 39550 - DNA, 431 bp, Zea mays
  unsure (1)..(431): unsure at all n locations
cttgatcaagatgtataatgggtctccctttatgtctttaaaagtgaatacatcgaaatcaattccttcatgcatatctttagggggagtccattcttatattctgattatgttgagactattgctttatcttagtaatttcatatagtctcttgcatgagaataatgtttcccatatagtatgctactacacatcaatccaacgtattaaaataatgtcgcttttatcaaggattgttgctttcatttctaaagtagcatgcttattggattctcctacttttaagcctgattgaaaatttaaatacccttgtntgtctcttgatcgcatattggttgatcattgaacaacttccactatcactttatgttcttagtgcctcatgtaatttcaatttgatctcaatcgtaattttattgacatctatctg

SEQ ID NO: 39551 - DNA, 326 bp, Zea mays
  unsure (1)..(326): unsure at all n locations
ctcaatctttcttggtgctcatttaatattctttaatttttataaaaggctcaagtcataattttaaacttttcatcccctttttcttattctcttgcatttngcttatagggctcacttagggctttcattaaggttgcacattcttatctttttttaaaagactcaattgttttgatcatgatacttttaagcatatacttggtgaattctttcttacttaagttaattngatgctcatgcttacttgggttcacataaaataatggttcttgggttggtaattgagagaaaccctacgtgacactagggtgtcacatcgacct

SEQ ID NO: 39552 - DNA, 453 bp, Zea mays
  unsure (1)..(453): unsure at all n locations
nttcctgattnttctaatcttctggactgggcgcattaatacagagaagttcagggatctcagtgcaataatctcaagactcagactgcctaccctggaccgcgggtttattaacagatattccaggggctctttacaaaactgaccacaaccgaagggtatcgtgaagtactagccgtgcgatcacggatgaagggctaagattacacgtgaggaagttgcgatgagaacaggcacgcggtttggtctcgaccacacatcgaacgatcaacggcccacgcgacgccaacgctcttatccgcgccgaaccgcacgatttcaatccgaaggctcgtgttctatcgccatgtgatcacaatctcaccgtacattaatcgatgaacgacacccactcatctccatcgcagatcacagatccgatggctagcaggcctctactacctcacaacccca

SEQ ID NO: 39553 - DNA, 443 bp, Zea mays
  unsure (1)..(443): unsure at all n locations
agcttctaaagggagaacacgtgatagggttgtcttacgtgcaattcgaaaaagatagaccttgtgcagctcgtcaagcaggtaaacaagtgggaggagcgcatcacagcaagaatgtgatgaccacttcaagacccctggagctgctgcatatggacctcttcggacctgtcgcctatctaagcatatgagggagtaagtatggtctagttattgttgatgacttttcccgcttcacttgggtgttctttttgcaggataagtctgaaacccaagggaccctcaagcgcttcctcaggagagctcaaaatgagtttgagctcaaggtgaagaagataaggagcgacaacgggtccgagttcaagaaccttcaagtggaggagttccttgaggaggaanggatcaagcacgagttctccgctccctacacaccacagcaaaat

SEQ ID NO: 39554 - DNA, 361 bp, Zea mays
tgacattgtctccctggtggaagctaacgccatccttaatgctagtgtgtctcccactatagagcatgcttctagcaaattaaaaaatttcattctctaagtcatgcctcattaatttggcactaagttgagctatgtgatcattttgttgtttaattaaagctaggtgatcatgaatagcatcaataatatctctacatctagtgcaaatagtaacatgctcaacggtagatgtagagggtttgcgagtatttaattcaacaatcttagcatgtaaaataacattctcatctctaagattggacatagaaacattgcacacatttaaatctttagccttagcaattaatttttcattctc

SEQ ID NO: 39555 - DNA, 414 bp, Zea mays
  unsure (1)..(414): unsure at all n locations
agcttgtgaagggtcttcatccccacatgtgctaagcggcgattccacatccagcccatgctagtcttagcaattaagcatgcatctagaccggcctnctctttttgaaaatcaactaaataaagtttgccgtctaatacacccttaaatgctagtgaaccatcactccttctaaagacagacacatctacatttgtgaataaacaattatatcccatattgcataattgataacagataacaaattatatccaagcgactcaactaaaaacacattagaaatagagtgctcggatgaaatagcaattttccctaaccctttcaccttgccttgattcccatcaccgaatatgattgagtcttgggagtctctgatcttgacgtaggaagagaacatcttcttctccccgtcat

SEQ ID NO: 39556 - DNA, 469 bp, Zea mays
  unsure (1)..(469): unsure at all n locations
tataaatactaatctatacagcatctttaggactactagcagaagaaaggacagcttctgaggcattcttcagagttattgaataagcttcgacttgtaagtcttcaatcttcatcaacatcgccctgaaaataatgagacaaaggtattatgaagcataaatgtgagaaaactcgatgaagtatgaaagtaagaaaatcttcataccttgttcattaatgaccgtgcttcatcttctgcaatttcccgaccacccttagtccagatctgagtaataaatctattgcccacacttttggcttcagccaaaatgtcgactaaatctgatgatgaaaggtcgaaggttggtttattaacagtcttgaggtaattgcatccagccttggcaaaagcatgcagtgttccatggatagccactagtgcgcanaagtgaccgtggccaactatgactatgtcaagatcttcaatc

SEQ ID NO: 39557 - DNA, 434 bp, Zea mays
  unsure (1)..(434): unsure at all n locations
ctgcagcttctgtcgcactagcgtggaccagccatgataataacatcgccaagtgcacgccgataggcgcataccgaccaactagccctttgaaagcatacaaagatggacccttggtgaatacctgcagcaacagatcatacaatcataatgcaaaggccagaggttggagctggatacaaattgttgtgggtgccagctgttactcacctcatattcagcacccattaagatgactcccaaatcctgaatggatgcttggggaagcgagtccgcaaattcctgcttccgtattctttctccggaatgtgtgaacgaccatctgcaataaccaataacacaccggtactcgcaattgatgtctcagcccatgattcagtgattcactgattggcttaccaagaagtangcaagtagcatatacaagagcggcg

SEQ ID NO: 39558 - DNA, 484 bp, Zea mays
ctctagctctgtcagcgcgtacaggtgtctcaatgtggtgcactaatcgccgcacgggttctctctttcgtcgtcgatcgactccaagctcgccacctggacagcgtgcagggacaggaaaggggtcggtcaagtactggctgaaaacaatgttgtggtgaataatggagctagctagagggacagcatctgaaaagaagtgacaacgaaggaatgctacaaagcgcgcgttgttcctacgaaagccgcaaattatatatgagatttgagcgatggttgcttattgtgctgcgcttttcgaattatttcatgcggtacgggtgcttattagcgttgtttatttgttggcgctacctttgggcatcgctcttcaggatccataacgtagtcagtcagcttgattcgattgataaaatcttgaaaagaattgtgctcttttttttccggatctatattccattgaatgatttgattcacacaatac

SEQ ID NO: 39559 - DNA, 375 bp, Zea mays
agcttgtacagagtcctcttgaactaatcttctgagaaaccctttctcattgcaacatgacaccagacagtccaacccaaaaggcgttggctgagtttaaaattatttcagaacatatcagcacaagagacctggctcaagagtttttggctctcacggcttttcctaccttaaaagaatgggaaatgccgaagctagagggagagaacaaagaacgggaacttgtgcggttaccttactattacaagtgtaagaaatattttaaaacaccttgccaagagtggctggacacaattgaaataatgtgcaatgaaatactcggtaattactccaaaaaagaggatcagtagatgactgcggccttctgtacccgtc

SEQ ID NO: 39560 - DNA, 404 bp, Zea mays
  unsure (1)..(404): unsure at all n locations
actctatgagcttcngactttgcttcatgattggcttcactagccttaactgttccactaaggaaagaagaattttctgctttctctgcagcttcgtttctcagtttgataacctctgaccgaacgttgctaagggctattacgacaactctcaccctcagcatttttctgtgctctggaagcgttggtcagaattatgccctccacaaagaagggagactaaggatcagcacacgaataaagaccaataatctgctttaaatctgtcacttttgtacctttagactattgtacgcaaagctgtctgcaatgtcatcttttgacataccagacatgccaaccttcagcttcacaatatcccatatatttttgtcatcttccgacacacacatatattcttgttg

SEQ ID NO: 39561 - DNA, 423 bp, Zea mays
  unsure (1)..(423): unsure at all n locations
gctacataagaattgataataagaatttgaatcctatgatatagnttcctccccctaaatatgtgcatttcagaaaataccaattttgtactaaaatgccaaaaccacatatttgggtcaaagggtgaagacaacttatatcatactattcatagggtgctttgtgtcataaataaacgtgatgctcatgacatattatgcactcatcaatttccttcatcttatgttttacttatgattcaacctcccttttgtcaattatttctcccccttttcaaaagtcttcttacacttagttacataagactaaaggtaagctntaatgcacaatttctccccctttgtcataaatctccaaaaaggatacaaagaatataaagggtagaaattatgattaagcaagaattgaacacactatcatga

SEQ ID NO: 39562 - DNA, 472 bp, Zea mays
  unsure (1)..(472): unsure at all n locations
actcaagctntaccanatggacgtgaagagtgccttcctcaatggaccaatcaatgaagaggtctatgttgagcaacctcccggctttgaagacagtgagtaccctaaccatgtttataagctctctaaggcgctttatgggctcaagcaagccccaagagcatggtatgaatgcctaagagatttccttatagcgaatggcttcaaagtcggaaaggccgatcctacttaatttactaaaactcttgacaatgatttgtttgtatgccaaatttatgttgatgatatcatatttgggtctactaacgaatctacatgtgaggaatttagtaggatcatgacacagaaattcgagatgtcaatgatggcggagttgaagtatttcttacgatttcaagtgaagcaactccaagagggcaccttcattagccaaacaaagtatactcaagacattctaaacaagtttgggatg

SEQ ID NO: 39563 - DNA, 293 bp, Zea mays
accctcttctttataaaggggtattgtttttatctggatcgacgatgtaatattctacaagagtacctaaagtcaataaagatacattcccccaaaatatgactacaccaaagaagtatctttgagtgcaaaaaattaaaaacagcaaaaggcctgatttccatgtcttcagcatgtaggtaagtttcacgtcacccagttaaggtgaaaaagctccaaagtcattcctaagggattgtagagctagaaaatcatcacctacctaaagtgaaaaagctccaaagtctgttcta

SEQ ID NO: 39564 - DNA, 370 bp, Zea mays
  unsure (1)..(370): unsure at all n locations
taagaaaatggcgaactttgttaagggcaaagctcctatggttcacgataatttgggttacattttatatcctgctggttatcacgaacacaagattaggagaattcattctaggaagtctcactctagctctcatcatgctnttatgtataagagtgaggcatctagttctaggcaatccacacatgttaaattgcgtaaaaggaaatctcctattgcatcaaatgaacctaatatttcatttaagacttttgatgcttcttatgtgaccactaacaaatcaggcaaagtagttgccaaatatgttgggagcatacacaagggatcaaagacttggtgttgggtacccaacgtgcgtgttctaatgtca

SEQ ID NO: 39565 - DNA, 379 bp, Zea mays
  unsure (1)..(379): unsure at all n locations
tatatatatatgtgcgatgaactactttattctctctaacganctatggttgtagagttatcttggtcttgcaagccgcgattgccataaagctggtgtccacgctgatgtgagcggtaccggtgctgattcctcacgggagcggcggaacaaccatccaagtgacgacgatccctgcgctgagtccgcaacagggcaatcttagcacgagccctactaactaatctaatgcatggtccacctccgtgtttagcacggcggctaggttgattgtgctgctaacctaagatgccctcaccgaaggtgaacaatcaccctcctgtgctgcagatggacgggggggtaaacttcacgcaagaccgttagctgtccaccaaaa

SEQ ID NO: 39566 - DNA, 451 bp, Zea mays
  unsure (1)..(451): unsure at all n locations
tgtgattctaccaatcganagagcacaatctctacttatgaatttccatgacatatcttaaaagagattgtattagtaacacaagcaatagtttcctatttagcaacctctagtatatgaatgacaagaaggttactaaaacaaggaaacctcatgatatgaactaaattacccttacaagcatcatgcataacatcaaatgtaaaaaaagatgaaagtagcatgattatttaattaagtttacatggcaagtttaattcataacatggtgagtgattaatgtagaagactcaaaaccaatttaaacaagaatgaatacttcacatagtattggttcaatcttctttgaatgttgaatgacacactcaatntgggaaacacattctcatgtcgtgacactacataaatcacttagataaaaacattagtctcacaactctagtcatataga

SEQ ID NO: 39567 - DNA, 384 bp, Zea mays
tcagactgttccctgaagtctctctgctggtgagtgtgctggtctccttctggctgctggccttgaggatatgcgggttgcattggtggtggaggctgttgccaacatgcctgagattggcttgccgaagcaacagaaactgcaggatggttacccacatactctggtatgtatggtgaatgatacgaagcagtatgcataacttgcttcggctgggtcggttgagctacaacttctgctatctccttctgcttctagatggtgacatggcacatgcttatagtatggcccttgtcctcaccgcagaatatgcaataaattttcctgcgctgatccccaaatcttccaccgaagccactgtcgcctctgccccttggagctgga

SEQ ID NO: 39568 - DNA, 352 bp, Zea mays
tctaaagggagaacacattctgtgactgaacaatgttcattttgataaagacagcgattgttgtgcatgtcagacacgaaagcaagttggcactcatcattcacacatcaacatcatgacgactgacaggccgcttgagctactccacatggatctattctgtccgatagcttacataagcatcgacaggagtaagtactgtctagtaattgtggatgactatccctcgcttcactttggtattctttttgcaggaaaaatcacacaccctagagaccttataaggattcttaatacgagctcataaatacgttatagtcaggataaacaagactataacagataatgtgac

SEQ ID NO: 39569 - DNA, 341 bp, Zea mays
agcttgacatctccagagccttcgactccataaattgtgcatatctccttgatgcgttaagagccctcggtttctcccacacgtggcgtgattggatcactataattcttggttcatcttcttccaaaataataatcaacagagagcaaacaaacataattaaccacaagcgtggcgtacgacaaggggatcctctttctccctttctattcactttaacaatggatcctctccaccggatgatcgaaaaggcagcaccggccgggctactgggaagtgtcctgacgaaaggggcaaagatttgttgttccttgtatgcagatgatgccggtgtgttcgtg

SEQ ID NO: 39570 - DNA, 426 bp, Zea mays
  unsure (1)..(426): unsure at all n locations
actcaagcttggcctcgtaccagccaaatctcgaccacccttcgcccatattngccttataaatctgctttctatgcttcaagcttcgcccagaatatcaatcaaatctgtcgaagatagactgaaggtatgtctattcactatctttgcatgctgtcggcgttttgaccccgggggggtccctagaccgacgagtaaatttgtcgctgcgtgtcccaacccacatgggttggcgcgagatggaacacaagggagaaacgcggtcgcaccaggggggtgtgctcgtagtacgggttacaagcgttcgcgagagagagagagtgagcctgttcgttacctcgttcttccgcgcgaccctccgcatgaaggccctggacctcccttttatagatgcaacgagaaggtccagatgttcaatggtggggg

SEQ ID NO: 39571 - DNA, 284 bp, Zea mays
aatgaacccattacttacttctatttccctaggatttaataaaaatagttcatgatctttaggctaaataaggaattttaaggcatttaaaataacttaaagaaatagttcctaaattttaaaaaattaatagtattgcccaaaatgttcaaaatttttatatgaactccacacattatttaaaacccttgggtaaaatatgagttatttgcaccttgtttgaaactaaaacccaaaccctatcccctgccctttgaactcctttactgactccggaaacccta

SEQ ID NO: 39572 - DNA, 440 bp, Zea mays
tatgaaggttcttcattcgaacatgtgctagacggaggtgccaaagccagcccatattagtcttagcgattaaacatgcatctagatcggcattctcttttgagaaatcaactaaatagagcttgccgtctaatacacccttaaaagctaatgaaccatcacttcttctaaagacagatacatcaatatgtgtaaataaacaattatagcccatatgacataattgacttacagacaataaattatgcccaagcgattctactaaaaacacatttgaaattgaatgctcgatcgtgatggctattttgcctaatcccttaaccttgccttggttaccatctccaaaattgatagtatcttgggaaaccctattcttaatgtacgaggtgaacattttcttctccccgtcatgtggtttgtgcatccgctatcaatgatct

SEQ ID NO: 39573 - DNA, 408 bp, Zea mays
  unsure (1)..(408): unsure at all n locations
agctttgggaaaagataaaattctgtttacattgttggttaaagngaanaaagacgaggccgcttcaaaggcccaatccgaagctcaaaaacgcgagattgaagatcttccgaaacaactggctcgagcgaaagaggagcgcgcgcttgaggaaacgaatcgtgaacttagtgattttatggtcaacaaattggaatcaagagttaaggagcttcgcacatcgcagaggaaatgctatgttaaatctatagaatgcgtgaataaaattaaaaacagctttgctagcgtcggcgccttttccagcgaagagaatttttctcgaggcaatcccgaagatccgctggaatggattagccacgaagcagaggccttcgaagaaattctaaacagccgcggcgacatatgcgc

SEQ ID NO: 39574 - DNA, 345 bp, Zea mays
  unsure (1)..(345): unsure at all n locations
tcgtgaagattttttccgaagctacactgtcgaagatcaaatcattcttctggagttcgatattgtgcccncttcttgtgccatatgcagcatgatgtatgatgcttatggtatgcggaatggtgtgatgatgttatgttatgcaagatgatatctattccgaagaccaacatacatccctgcgataaaatacataatctttctgaatcagaggtgactctctgttataagcctcccttatgagcttcttcgccttttacttcagcggaatcagcgtttatttttcgctgtaagacctccttatgagcttcttcgccttttactttcaacggtattcgcgttgac

SEQ ID NO: 39575 - DNA, 466 bp, Zea mays
  unsure (1)..(466): unsure at all n locations
agcttaattggcggaaagctttctaccgacatctgggaaaatggtggccgagagatggcccacgaaattataagtaaaagtgaaaaagatacccacgaagctagagaagcagcaaaggcagttgaaaaaactgcagaacttgaaaggcggataggtattgtctaattgcttttgactttatgctttattattgtgacttcgaacttattcatgttttatattgcagccgaattacctcctcccccggagcccttcgggttacaggccgaccccgaagcaaaaaaggaagatgagattattaagatggccgaagctattatggacaaagttgtttttcaactactaaacgaagctgcagaagtagttttaaaagaagaataacctattgtgtaaaaacatcttggaaatgtgatgtaatattgctgaaacaaatgtgtaatattctatagttntgaaagaatatata

SEQ ID NO: 39576 - DNA, 455 bp, Zea mays
  unsure (1)..(455): unsure at all n locations
agcttataacaagagaatagaggccagagctcgtccatattgtatgatagaaggggagttgtacaaacatggagtttgtgctccgctgctcaaatgcttatccagaaccgaaggtatagagttaatgaaagaaatacatgcaggcctgtgtggatctcacatcggatctaggcccgtacttggaaaaaatttccgtcaaggattttattggccgaaggcagcttcggatgcagcagaattggttcaaaagtgcgaaggttgtcagaaatgtgcaagagatcaaaaacaaccttcgtccttaacacagctcatacaacccacttggccattgcaaaggtggngccttgacttgttaggtccgttaccaccggcccaagggaacctgagatatgttgtagtagctgtggaatatctttctaaatggattgaggcgaagcctttagccacaataactt

SEQ ID NO: 39577 - DNA, 357 bp, Zea mays
  unsure (1)..(357): unsure at all n locations
agcttgngcnaagnccacttgaactaatcttctgttaatcccgctcccattgcaacacgacaccggaaggtccaactcaataagcaatgaatgaattcacaattattgcagagcatatcagtacaagagacctggttcaggagtttctggctttcaaggtttttcctagtttaaaagaatgggaaatgccgacactaaagggggaaaagaaagaatgtgaacttgtgcgtttaccttactatntcaagtttaagaaatactttaaaacaccttgccaagagtggctggatacaattgaagtaatgtgtaatgaaatacttggcaactactccaaaaaagaagatcaattgatgactg

SEQ ID NO: 39578 - DNA, 469 bp, Zea mays
  unsure (1)..(469): unsure at all n locations
ggagagcacattntangactaacaaatgttcattttgagaaagataggatttgtagcgcatgccaagcatgaaagcaagttgggtcccatcatccacacaagaacatcatgacaagtgacaggccactagagctcctacacatggatttattcggcccgatcgcttacataagcatcggcgggaagaagtaatgtctagttattgtggatgattattctcgcttcactcgggtgttctttttgcaggaaaaatctcatacccaagagaccttaaagggattcttgagacgggctcacaatgagttcggcttaaggatcaagaaaattagaagcgacaacgggacggagttcaagaactctcacattgaaggcttccttgatgaggagggcatcaagcatgagttctcttctccctacacaccacaacaaaatggtgtagtggagaggaagaatcgaacttattggacat

SEQ ID NO: 39579 - DNA, 420 bp, Zea mays
  unsure (1)..(420): unsure at all n locations
agcttgtgaagggtcttcatccacacatgtgctaagcggtgatgccacagccagcccatgctagtcttagctattaagcatgcatctagaccggcctcttcttttgcaaaatcaactaaataaagtttgccgtctaatacacccttaaaagctagtgaaccatcacttcttctaaagacagacacatctacatttgtaaatagacagttataccccatgttgcataattgactaacagatagcaaattataaccaagagactcaactaanaacacattagagatagagtgctcattagaaattgcaattntacctaacccttctaccttgccttgattcccatcaccgaatataattgaatcttgggaatccttattcttgacgtaggaggtgaacattntcttctcccccgtcatatgg

SEQ ID NO: 39580 - DNA, 405 bp, Zea mays
ctaagctcgcgcgggtggaggctagtctcgctcgccagcgtgttgaggatatggagacgaggctcatcaacctacgcgaccgcttggacaagacggaggcctcgacgcgcgtggaggtcaagcggacgcatactcagcttgtggacgcgtaccgggagctgggtgcgtggaccgcgcccttcgaagcgcccggtcaggaggtgggccttcgcttccttggatggctgcaggaggagctagaggtgctcccgaccattgtgacgggccctcatgtccttcgcctcccttgtcacctgtgagggggccgtgaatgccttgtcccgtgaggggtgcgggcacttcgaggccttagaccagtctgatgaaggcttcgagcgcgaaatcttccaggtcgaggacccagtg

SEQ ID NO: 39581 - DNA, 468 bp, Zea mays
agcttattcaccacatgtttgtagatatcttgattatattcagcatggcgtcttctcctcaattgtctttgtttcttgctcccaagcaattttctttctgaccctacagcttgattctcaatcaaagattggcctttcttgcggcacgggaggtcagcacatgataatactttaactaattgatcacttgtgcaagaatgaggttcacatgagtttaaactagtaattactacctcataagcaatatcgagcatgatatggtcatcaactaatttactatgagagtacgacagcatatcatacttttcacctagagcaagcttttctaaattcatcatttctacttgactcctaagcatagaattctcagctttaacgtgagcaacatcagataatacatcatgattatctctttgctcacataaaacagattcatacctgtggaccaagttatcatgagagcacttt

SEQ ID NO: 39582 - DNA, 460 bp, Zea mays
tctccgccagtctgagcagttcgaacaagagaaacaagatcttcttgcataacttgaagccgaagctcagcagaattcggatttgagaaaactactgacaaatcttcaagaaaaatgcctagaatttagcaacaagtgcattcagcgactaagaaagatttttcattccgttggagctagcagcgaacaatttaccccctcagctgaagacctaccacaaaccttcgaacacattgagggggaaattgacgagctcgacgaagtcatagctgggcatggtgatttctgtgcctgggtagcttctcgagggactgctgcagcctttatgaacgctggctgtgaacatggaaaaagttgtaacaggcccaacttcgccttatcttcatcaatcctggatgatatgcctgaccttgcccgaagtatcttcaacagaattatataaatgatatggacacaacgc

SEQ ID NO: 39583 - DNA, 471 bp, Zea mays
  unsure (1)..(471): unsure at all n locations
agctntgcangagaaggagatgatatgaagcttgtggtgcttgagagagataattcaatttaactcaagctatcaatcttcaatgatctacatatccaagattgacccaaagttgtttcaaatcgttatgtctaaaactcatatcatctcggggaagatattgatgttgtaggaaataaagaattatcttgtgcggaaaaatcaaggcctacaacatggaggaaagccaaaggatggtaacacttgtgtttttgagtgcaagtatcttaaattacaatttctcatgtgtcttgtgtagtagcatagaaaaagaagcacttcaaatgtctctaatttatattaccattctttgaagaatttcctctcatatggtagattgcatactcatcatttccatcctatggcaatctatatgctgtanagtgctgcaagtatctcatggcatgttcttcgctagtcattctattattg

SEQ ID NO: 39584 - DNA, 448 bp, Zea mays
tgagacgggaacaaccgtggcatgcactacatcccttgaagaatatgtcaatgatttgaggattgccaagaggaagaaacaaaagatgaaattcaacacctcctccaaaagcctcaaccacgcctctacaaaaggtaacacccaaggtaataatcaagccacacttcacattaagaggtgtagtgaatgcttcgaaaaagggcatttgattaggtcatgtccctacattaaaaatggcttgattattaacaaggatgatagactctgttttaaatgctcaaagaagggacacttacttagatcttgtccccatttaaaacaaagaggcatagggttagaaaagaaagtttttactaaccatgtagcaagcaacaaacaatgaaagaagaaaagcttcaaacttgaaaaatgactatgctacacatgccgaaagaaaggacatcaatgc

SEQ ID NO: 39585 - DNA, 358 bp, Zea mays
cgcagagcagacagccgcgagcagcgcgtttatttggctgcgcccctcagggacatcctggaagccgtccaaccctcggcgaccacctccagctgcttcggaaccctccaaccccgaaggaaccctgacctcgaatggtcgggtccgacgacccaacaccctgctaggaggcatgcacgcaagagatggccgccccactaacctacctgagctaagaagcgggcccaacgggtatcacgtgggccaataaaacaccgttcaagacaccggaggcgggagacgcaagcctacccgcaccgagaacaccccacgggcccaaccgacgcatccgccactcgacacggagacgcaagcggcc

SEQ ID NO: 39586 - DNA, 450 bp, Zea mays
agcttatatctacccactggcctgcgtagaaatgtttatcctctctggccaccctattaagttagttgttaccccttattccacaatatgctcaaagataagaaaaatagaaaatgtaatttaaaacatgaaccagagagcacccctatttttgttaggatacttatttgatgttgttcactggaaaaataaatcataccctggtttagtataaaataagtacgatgcctcttaaattaataaaataaggataacttaaaaaaaccctacaaaaataaccctaaggcaaaagcaccccaaaccttgggataactaatggttggttattttgaacagaggaaaaatataaaatctgctgtctgatattcttcaaatgacaagttaggtataagcacccttttcgcattcaactttataaaatcacatttaataatcaccaataactcccat

SEQ ID NO: 39587 - DNA, 381 bp, Zea mays
actcagctcttaagggagaacacactttgtgactaacacatgttcattttgagaaagacaggatttgttgcgcatgtcacgcagggaagcaagttggagttcatcatccgcacaagaacatcatgacgactgacaggccactcgagctcctacacatggacctattcggcccgattgcttacataagcattcgcgggagtaagtactgtccagctattgcggatgattatccttgcttcacttgggtgttctctttgcaggaaaaatctcatacccaagagaccttatagggattcttgagccgggctcaaaacgagttcggcttaaggatcaaaaggattagaagccacaacgggacggagttcaagaactctcaaattg

SEQ ID NO: 39588 - DNA, 218 bp, Zea mays
acaacaccaaccaccgggtttgcgatcaacggtccgagttctacataaacgggatcgactcacactcatcggaatttagatctacgacactaattgatcgcgtgaagaggtgcgcgatcatctaatcttggctggcacgtaaaggagcaacggtccgcgcaccttctttccccggtagcccaccagcacaatggacggtggcgccgtgactgagaaac

SEQ ID NO: 39589 - DNA, 428 bp, Zea mays
ctctccaaatcttgaggtaaactatgaacctcgatcagacactatcttctttggtactccatgtaaacacacaatccgagccatatataattctgctagctgagaacctttataagtagtcttgacaggaataaagtgagccactttagtcaatctatccacaatcacccatatagcatcatatcctttctgggtgcgaggcaatccagtaatgaaatccataccaatctcttcccatttccactcgggtatcttcagtgggtgcaatagtccagctggcctctggtgttcagccttaactctttgacacacatcgcacatcgccacatgtgcagccacatctctctttaatccataccaccaatatttccgcttcaaatcctgatacatcttggtactaccaggatgaatagaataatccgagtcat

SEQ ID NO: 39590 - DNA, 371 bp, Zea mays
  unsure (1)..(371): unsure at all n locations
agcttcaacaacttaagcctgtagaggagatatattgttcttgtggcagacaacgaaatcattacatgagatttaaaaaatgtcctttattacacaaaaaataaaactggattgaaaagactactatcaaggtaggatatttgtcaataaatgtgcttcgactctggcacagtgctattgactgtgcgagcttcaaactgttctctgaagtccctttgatgttgagcatattggcccccttctggctgctggccttgttgcagcggtggtggaggcggaggctgttgccactaagcttgaggttgactcgccgaagctacagaaactgcanggtggttgcctacatattctgggatataaggtgaatgata

SEQ ID NO: 39591 - DNA, 433 bp, Zea mays
  unsure (1)..(433): unsure at all n locations
ctctaaaggagaacacatgatatgtctaactaatgttactttctaacaagatagaccttgtgcagcttgtcaagcagggaaacaggtgggaagctctcatcatgccaaaaatgtgatgacaacatcaagacccctggagttacttcatatggacctcttcggacctgtcacctatctaagcataggaggaagtaagtatggtcttgttatagttgatgatttttcccgcttcacttgggtattctttctgcaggataaatctgaaaccctagggaccctcaagcgcttcctaatgagagctcacaacgagtntgagctcaaggtgaagaagataagaagcgacaatgggtccgagttcaagaaccttcaagtggaggagtatcttgatgaggaaggaatcaagcacgagttctccgcttcctacacaccacag

SEQ ID NO: 39592 - DNA, 392 bp, Zea mays
agcttcaacactaaaagtgtagcaaatcgtattgttcaagagctaaaaattgagtgagcgagagcagttggccagagagcgtgtcacatgagcttgcggtatgaccgtatttatacgccaagagcgttgaaaattgaaagaccccgcttgtcagtgaatgttgctattctagcaaagggaaggtgttttttcggaccttcggcgaaaagccttcgtccatgtcgcaatctaaatttattattttaaacaaaattaatattgcgaggggctactgttggggaccttcggcttccgaagttcctcaaaacaggatttaacagtatttctggagtagaatgtgtgaacaggtatcttcggactcaagtcggcatcacagtggaccaatataatac

SEQ ID NO: 39593 - DNA, 431 bp, Zea mays
tctatatggagaacacgtgataggattgactaatgtcacaatctaaaaagatagaccttgtgcagcttgtcacgcaggttaacaagtgggaggagcacatcacagcaagaatgtgatgaccacatcaagacccctggagctgctgcatatggacctcttcggacccgtcgcctatctgagtataggaggaagtaagtatggtctagttattgctgatgactattcccgcttcacttgcgtgttctttttgcaggataagtctgaaacccaagggaccctcaagcgcttcctcacgagagctcaaaatgagtttgagctcaaggtgaagaagataaggagcgacaacgggtccgagttcaaaaaccttcaagtggaggagttccttgaagaggaagggatcaagcacgagttcttcgccccctacacaccac

SEQ ID NO: 39594 - DNA, 485 bp, Zea mays
  unsure (1)..(485): unsure at all n locations
ttaagcgactgggctgcagcttgtgttngaataaccgaatctccaaatatgtatgtagttgcaaactcgcaaagtcgaatttccagtgttgctttgcttatttgcatatgtcacaagcaaaagaggcaatgcctcaactagcgttgactgagaatgttcgagtgctagagaacccaactgaagagcctaagaaagagattgctgaagcagctgcagagaaagaggtgaagaaaagaaaagctatggcacctagatcagaggtatgacagagcttcaccaagatcatagacaataattctagtgttatgaaggaagctaggtgcaactaatgcaagattgttatcaagtgtgaggcaaaagtcaatggtacatctgcattatgcaaacacttgaaggtatgcaaaaagaatcctaataagatcaatgatgacaaacaacctattttgcangcatgtagtgaagatggtagtgggtctagcatcact

SEQ ID NO: 39595 - DNA, 495 bp, Zea mays
  unsure (1)..(495): unsure at all n locations
tactcaatcttctgtctagcgacgaagcaataacaccggaagaaggaagaacgagttcaataaggaccctatcttcgatagaagatgaagaggattgcaaaataacaaaagacaccatagaagggaccaggctccaagcgatagatcacatcaataagtatcaagctaaaacagttaaatggcgtgatcagaatgtaagactggaaaacatcaaactaggacacttggtacttcggagagtggccaacccagatacagtgggaaaacttcagctcaaatgggagggtcctttcttggtggtgtcttcgtcaagaccgagatcgtacaggctgaaagacattgatggaaacgttattccaaggtcatggaatacagatgaactccggagatattatgtgtaaatcttgtaatattcttaatttttcgctatggcacccatttcctcttaagaggggagaaagggtnttgacggtgccatatgttgtaattttaaat

SEQ ID NO: 39596 - DNA, 390 bp, Zea mays
  unsure (1)..(390): unsure at all n locations
cctcgtgcttctctggcttctgggtggactcttctcccccgaagcgaagtagcttcttctgatcttcactgaaaaaacctgcttttatcatcttggcgagatcaacctttgaaacagtcgatnttccgaaatctacgtggctgggtttgctgggcatggcaataccgtagtcatcttcggagtcggcttcttcaatgttcccttctccttcggcagctgtcgggtttgctccggcagcagctatttctttcgtagtcaccagtccggagcgctgcatcgcttcggagatgggcacagtctccgaagcttcagttttcgtcccctcacgctcaaccctagctgtagagcgaactctggccatntaattatgaacttgtgaaactttaatac

SEQ ID NO: 39597 - DNA, 474 bp, Zea mays
  unsure (1)..(474): unsure at all n locations
actcaagcttatcagtagtataagcacanaagagagaaggctgcttcaactaatcagccgaagcctatgctcctgtgtgaagacatagcagaccaaaaggtactgctgggatctcagttatctggtgaacaagaaaagactctgctaaggtttctgttcaacaacaaagatgttttcgcttggacaaccaacaatctctgtggtgttaatagatatgtcattgagcattcactcaatgtggatccatccttcaagccaagaaagcagagacttctgaaaatgtctgaggataaagccaaatgtgcacgaaatgaagtaaagagacttctcagtgccagtgttatcagagaagtaacatatccagagtgtctagctaacactgttatggtgaagaaggctaatggaaaatggagaatgtgtattgatttcacaaacctcaataaggcatgtccgaaggatgagttccccttacca

SEQ ID NO: 39598 - DNA, 444 bp, Zea mays
agaactcaagagaaggttaaccactgtttcaattatggtaatgccagacatccacaaggtacttgacgtgtattgcgatgcatcacaccttggactcggatgtgtgctaatgtaagaaggaatagtgatagcttatgcctcacggcagttgaggaatcatgagaagaattatcctacgcatgatttggaactagctgttggtacgcatgctttgaagaattggagacactatatgattggatacaagtgcaaaatcttcaaggatcacaaaagcttgaaatacatattcactcagaaggaactcaatctaatacagagacgatggctcgagttgattaaggcatatgacttggaaatacaatatcaccccggaaaggcaaatgtagtatctgatgctttgagttcgaacggtcaagcgatcaacatcactactcatttgatgtc

SEQ ID NO: 39599 - DNA, 393 bp, Zea mays
ctaaccttattaatgcgatatcgaatgttattcttgatgcatattcactttattcgctcccttgtctgatgcactgtttgtttcccaatttgaatggatgaatgtatgtatgcttgcaatctcatacagaacgatccggtcgaagagtccgaggaactcgcaggacaagcccctgaacacctttcggtaggtggacgcaagtgtcctttgacctatctctgtcctattcattatttaattcacctcccgcattacacatttataccttacgattgactatcttttagtgaccatgttcttgctacctatctgggctggactataatattagtacttagctctatgctattgctcaactctacatcatgaacatgatgagattatatatgatac

SEQ ID NO: 39600 - DNA, 294 bp, Zea mays
  unsure (1)..(294): unsure at all n locations
actcattgagctctactacccatnttccaattcggcccgaagcctctctcattcttatgatattcttgagtggttgagatgatggaacaatactgccatgagattggaaacagagctgaagttctcttgaagccatatggactgcatataagacctttctcatctgtgtaatttctcttggatgggcgcaggaattcagacccacagtagacagacgtttgccttttcacactctcgtctactacttcttgaactacagcagcactcacagtcgactgcgaagctgaaacatat

SEQ ID NO: 39601 - DNA, 369 bp, Zea mays
  unsure (1)..(369): unsure at all n locations
gcgacactatagatactcagcttggacatagtcccataataatgacatcccttttcttgacatataanaggtcaaacatttgaggccaggttcatgtaaatttgagtgatgacaatagttcttaaagcacaatataatattgatgaaattcaaatgagtatagttgtaagcagatgcatacccgattagtgaaaatattttattttctatgattcttaaataatgctaaccggaattcttcatgtgcaatataaaattttatgtccacaaaattttagttctcagtggcagctcacatggtagagcttcagctattttaaagttgaccagagctcacgccaagaatgaaaattgactcgatatacatct

SEQ ID NO: 39602 - DNA, 438 bp, Zea mays
agcttgagcagtaagcattttagttggtctacattttattaacaacacctgtcttactaataagtgtgaatcccaagtatcccattaaaccaaggtataagagtatatcaaaaacacttaagtgaaaccacttaagcaaaccattggcagatcattggatctcgatttatttccatcttcaagttcaattatcatgtgaggagtccaggctgctcataaccgtgagcacgactgatatatcagttttacactctgcagaggtggcgcatctttacccatgagtcgtgattcccttgtagcccgggttaactagacccgtattcacttccgaggtgaatggccagggtctcactacgaggcttctccctagagttctcattacgcacatgttggaatggtcaactgcataaggtacacctaccgtaaccaacttatagt

SEQ ID NO: 39603 - DNA, 405 bp, Zea mays
tgacctaagattcgtgtcgaactctctgattcgtgtcagactgattatggtgctcgtcgccgattcatcggtattgtcctgatcgtcgcgcgagcgctctggctgcaagatattccttcgcggcggactcagcctcgccttgctacctcgaacgaaatcgtctctggctcttttgctaatatgtgccatcacccgtcgtcgttcttgtgatttcaaatcgattcgatcttggtaagtcaaactattattcctattagtttgactgacgaacatggtgagtagatatcgtaaatgtcaatatcgatttggtcgccaacacgattgacaaatcaacattaattaattgatgtatatgctaggttgtggctgtcgattatgccgagcgggcatggttatatgtagatg

SEQ ID NO: 39604 - DNA, 456 bp, Zea mays
  unsure (1)..(456): unsure at all n locations
agcttcatataatctcctttcccctgcaaagcttgtcatgcatantttggtcctcatctcttgatgggtccatcaaggttagtcaataaagatctaggaacccaaatgtcctttgtgctaacgcttggtaaactcattacctttctagcacaagttgtaattttgggttgcctagttacatatgaatcaattgacaagctaagagcgggatagttaccaatgggacaatcctcgcataaatgtcccttctttcggcatatgtagaagaggcgatcttcatgttntgaagatttcttctttccttgtttcttgcttgctacatggntagtaaatattntcttttctaagactatgtcttttgttttacatagggacatgacttaactgaatgtcccttctcaaagcatctaanacaatggttatcatccttgtaataatcaagccatttctttatat

SEQ ID NO: 39605 - DNA, 392 bp, Zea mays
tcagctccatctatgttatggattgctttggagtcagtccatcttccttcggcccttctagcagcttcctgacttccatgaatagcaattggcccttggtccgaaggtatcttcatgcagaggtaagctgggtgaagaattgcttcgaaggcattgagagtaccgcgaccaatgatagcattgtaaggatactccatgtcaacaatatcaaacacaatttgctcagtccttgtgttattaacaaatccgaaggttactggcatggtaatcttcccaagtgctgcaatctgccgtcctccgaagccacaaagagggtgtgtagcatcatggaccttgtcttcgggctcttgcatttgtctgaaggccttagcaaatataatatcagctgcact

SEQ ID NO: 39606 - DNA, 417 bp, Zea mays
  unsure (1)..(417): unsure at all n locations
agctctacaatctggatagattgcaatgttaatatttttctattttaagaaaacacataaattcattattaatgacgaacaatattaaaatagctctaaaaattctagaaaaattcctataaatattttggcagccaatgaacacaaataaaaatatttgtaggttattaaaaatatttctaggtgccctagtaaatagatcttttgcttttcaaaaataggaacaaataattataaaaatatgaaaattatcgaggacttctgaggtttgttaacatgttttgcacttagaaacactatgcaacaacacgaatgcacaaaacaagnttaacctatattttctttaattgattacaataaaaaaaatacttaaaactgaacttgtgattctaaccactcaaatctaatatataaact

SEQ ID NO: 39607 - DNA, 451 bp, Zea mays
  unsure (1)..(451): unsure at all n locations
cacaagaaactcagctctngagagaccttctttgagcttctctagataacatcaattttttgggagaacctcttgtgaacatcatatctattatagagaatcaccagcaaaaagaaactatgaacaccatttctacttttatggccatagtaaaaaaacacaataattccttgatcacaaaatattcattacagaaatgacatttattgattacacaatatccattacagaaatgattcactgatttctacattgttcataatctgcccacatatgataagctatcatatctcttaagttattcccttccatattcccttcatcatttccatggtcactattgggtaggctgacaaaactttgtgggttgatatttctttgatcactttctagccatctctcatcaccactatgtgaccgaactaagttatggaagactgcagcagcaata

SEQ ID NO: 39608 - DNA, 334 bp, Zea mays
agcttgacaacgaagaaatggctcttattattaagagcttctggccaatcctcaagcaacgaaaggggaaggactacaaaacccgctccaagagggtttgctaccggtgtggtaagaccggtcactacattgctaaatgtccatatacaagtgatagtgacagggaccattattagaaaggggagaagaagatggagaagaagaaaaatggtggcgaagcgcacatatgacgggaatgggactccaacaagagcttcatcgacttcttcgacgaggacgccaccaacattgccatcaacaaaggtcttttctttcccaacgtcagtcacaaatg

SEQ ID NO: 39609 - DNA, 392 bp, Zea mays
  unsure (1)..(392): unsure at all n locations
ccttcnatctgctccaggacatcgcggtaagctcggagctcttttttcatgcgcgaactatttattaccttgtggcgtctatgtgacttacgggttcgcaaacggacacccagtccatcgacgagagcgttcatgtttgcagcaacgcgaccgtaagagggagtgactcggtcctccgctcttcttggcgcgttcgcggtttatttgcagtcaaccatgcaggccagctcttacgcgctgtcgccatcgttgtgaacatgtctagcacaggaggccgtgcgtgtggaacggcatgaatccggtctgttatctgttcgcgcgcaagttctacccataggcgctggacaacctgctgaacatactctcgaactttaccatctcttgagcgagcg

SEQ ID NO: 39610 - DNA, 353 bp, Zea mays
  unsure (1)..(353): unsure at all n locations
catgcaagcttgctaccatgtgagcttgcagctttttcttgcanatatttggggcttnctctatccttgcacaagctgtccaagcagcagttccagccatatgtggatagatttgctgaccaacttcctaactggaaagctgatttgatgaccacggcacgcaggagaatcctagtgcaacatgttctaacaggtatgactgtgtatcttgcaatggcgatcgatataccccactgcgcctgtgatgcgattgataaaataagaaagggctttctatggagaggaagataggacgccaaaggaggacactgtctggtggcttgtggcaaggggtgtcgtcctcttcaacttgg

SEQ ID NO: 39611 - DNA, 417 bp, Zea mays
tgtggaggttcttcatccccacatgtgctaagcggcgatgccacaaccagcccatgcaagtcttagccattaggcatgcatctagaccggcctcttcttttgcaaaatcaactaaataaagcttgtcgtctagtacacccttaaaagctagtgaaccatcacatcttctaaagacagacacatctacatttgtaaatagacaattatatcccattttgcataattggctaacagataacaaattatatccaagcgactaaactaaaaacacattataaatagagtgctcagatgaaatcgcaattttacctaacccttttaccttgccttggttcccatcaccgaatataattgaatcatgggaatccctcattttgacgtaggaggtgaacatcttcttctcccccgtcatatggg

SEQ ID NO: 39612 - DNA, 418 bp, Zea mays
  unsure (1)..(418): unsure at all n locations
aagcttgccagatcagtactgatgtgtggttgctttttgcanatgtcagagaacacgcgtagaggacgaacgtgtgctcatcatgagcgatccgctctccatgatgaggtgcctcagcagcagcatctgtcgttcccgtccccgatgtcgattgagcagatgtttctgatgcacactcatgcagttcaagccatcggtcaaactctggcctgcatttatcatcantatcaccagcaacagcagcaagcaccaccccagccttagatgcctcatatgcctatagacaagcgtgctgaattcatgagaggtcatccaccacacgtccgctcactcttctgaccccatcgatgctgaacattggctgcgcactgtggagcgggaggtgcatacccctctatgcgatgaccgtgagaaagtt

SEQ ID NO: 39613 - DNA, 407 bp, Zea mays
  unsure (1)..(407): unsure at all n locations
gacctatagaatactaagctngtgaatactctttatcccaacatgtgctagtcagcgatgctttagctcagccatgttagtcatagctattaagcaagtgttgagtccagctctatcaaaatctacttagtatagctgatgtaacaccccacgtgttaccaaggtgctggctttctaatggcacatatacctattatcacatgtggttaacacttggaggagagggagcacttatcaccttggaagcatgagtgagttaacaaatgccatggaccaaaacattacccaagcttttatgcaatatcaccttgcgcaaagtaggatagaacctttggtcctctaccttgaagccttaagctgagagcaagatcaagcacatgcacattttatatatcaaaccttaaccc

SEQ ID NO: 39614 - DNA, 352 bp, Zea mays
  unsure (1)..(352): unsure at all n locations
agctcncgattcccaactatagaatactgactttcggtgctatccaagaacgatctggctgacagcctagcttacaacagtttaaaggtgcgacaaatggaattctcgtactttttgttgagtccaaaatttttcgtttgtttaaaactattgacacagacatattcctacttgcagggcctgatactcagcaatgccctcagggcacaaaaagatgctgaggacgaaggatgtactatagctctgagcaaccttcgttcccaagtaattgaactgaggaacgaacgtctcgacaaagacacaatattatactcattgatagataaaataaacgaggacgaagctgctttta

SEQ ID NO: 39615 - DNA, 379 bp, Zea mays
  unsure (1)..(379): unsure at all n locations
tgcatntgggtccctaagacaactgtgactaaccttgtaggatccaacaagagttgggtacctaagacccaagcctaaatttgccttgcaggattatgcatccgggggttcaagctggattatcgacatcggatgcacaaaccatatgacggtggagaagaagatgttcaccgcctacgtcgaaaacaaggattcccaagattcaataatattcggtgatgggaatcaaggcaaggtaaaagggttaggtaaaattgctatctcatccgagcactctatatctaatgtggttttagttgagtctctcggatataatttggtatctgttagtcaattgtgcaaaatgggatataattgtctattcacatatgtagatgtg

SEQ ID NO: 39616 - DNA, 314 bp, Zea mays
agcttgacattgtctcccttttggaagccaatgccatccttaatgccaggacacgtcccattataaagcatgcttctagcacatctaaacttttcaatttctatctcatgctcatcaattgacccttgaaatgagtgtgtgaccagtttggtcctctatggcgaatacgatatcttggactggcggcatttctataatttatcaggaaaaacatctgcatactcacagaccactggaatcttcttcaagggtaactctatcatagcaaaagcacatgatcgagtagaatcttggctgggcagaaataaggtgaa

SEQ ID NO: 39617 - DNA, 331 bp, Zea mays
  unsure (1)..(331): unsure at all n locations
atctatattatggattgctcttgagtcaatccagtttcctctggccttctggcagctttctgacttccatgaatagcaatgggtccttgatccgaaggtatcttcatgcaaaggtaagcangatgaagaattgcttctaaagcattgacggtgccacgaccaataatngcattgtaagggtattccatgtcaacaatgtcaaacacaacttgctcagttctggtgttgttgatgaatccgaacgtcactggcatggtgatcttgccaagtgctacaatctgtcttcctccgaagccacatagagggcgtgtcgcatcatgaatcctatctt

SEQ ID NO: 39618 - DNA, 343 bp, Zea mays
tcctttgatcatgtgtctctctacgccatgactaacgtgttttcaagtctatatcaaaccaacccgtatgtgtattgaaagggaattggagtcttccgtgaagacaaaggctttcactccgtaactcatccttcgctgtcgctccacgcaactctccatctttgggggagagagcctaagtacaaggcaaaaggactccgtctctggtataatcttcactcatctatttatgaccaaagggggagaaagtaattctaacggctctaatgattcccgtcttggcgacttatgcccaacggggagagagcatgagcccaaagcaaaaggacctcaccaccaccca

SEQ ID NO: 39619 - DNA, 320 bp, Zea mays
  unsure (1)..(320): unsure at all n locations
ctcattatgtgacacctactcttctaggagcttggagctcctagagaaatgaaccaganagatcttgctgtcgcaccacagctcgaatcaagaagaacaagttggatttggagatgaagcaccaagatccgcacctattaatctcactcaaagatgtcctctccaagattcgatatggctcatgccctacttatctgtcgcatacaatcaggagtgattctcagcgattaatagagctgaatgcgtgctcctcttatgtaagagaggtgggagtgatgtttttagggggggctcccactctagccgtttgtgacttatgc

SEQ ID NO: 39620 - DNA, 189 bp, Zea mays
agctttcatctttcttcttcacaaacaacgttggacatcccctaggcgaagtacttgggcggatgaaacccttgtctaacaattcttgtagctgcttcttcaattctgccaattctgcgggtggcatccggtcaggcctcttgcaaatacgagtcgctcccggttgcaactggagggcgaattcatatc

SEQ ID NO: 39621 - DNA, 218 bp, Zea mays
gctcattaaatctagcagttagctgagttattgatcattttgctctttaattaaagctaggtgatcatggatagcatcaacattaatatctctacatctagtacaaagagaaacatgatcaacactagatgttaaaggtttgcaagattttaattcatcaatcttatcatgcacaatggtgttctcatttctaagaatggaaatagaattatctgcaa

SEQ ID NO: 39622 - DNA, 322 bp, Zea mays
tttttctaccattgtctcaaattgatacgggtctggagtgataagtaaaagggaacagatgaatagtactgggctgattttaacccaggtcggcccactaccatcagaagtgcgcgcgcccgcgcacgtgctggcagacttgcacaaaggccctcgtcgttttggataactcgaagtgggctccgttactgttttctcgagtctctgacagtttacagcatagtcctcggttttctatttctttacccgacacgtcctcgacgacggcagcgcacggaggagcctccgcgagccactgtaccggccgattgaggcgatgacc

SEQ ID NO: 39623 - DNA, 412 bp, Zea mays
gctttggagacgcatgagagacaccaaggttcttatgagcacatgttctcatcggagatggcacagccagcccatgctcgtcttagctattaagcatgcatctaaaccgggctgtgtttttgcaaaaacaactcaataaagcgtgcctgtctaatacactcttaaaagctagtgaaccataacttctttaagacgaaccatgtcttttgtagatagagaggaatgctccctggtgatgaatgaataacaaagcgtgcattattttcaaagaatctgctagaaacacattatagatagagtgctcatttgaaattgcaattgtacctaaccctttaccttgccttgatcccatacccgatataatagatcttggaatccttattctgacgacgaggtgacattttcttccccc

SEQ ID NO: 39624 - DNA, 443 bp, Zea mays
  unsure (1)..(443): unsure at all n locations
agcttctggattatcgaattttcgtcacatgttaattttgaactgttccgatcacgcgtgtaagtgaatactagaatcagaagacttctgattntatggaaaatctggagccccgcgctgtccggaaagagtaatgtgccaccacattaatcgaattgttctctagtcgagtgttcgagtagcgaacggaattcgtctaaattcaactaaatcaaacgtcaactaacatattgaatctgatctcgtctggtttaatacgtctacatctcgctcctgtgacgatgctgacatcgtctccggtagaatgtcgattgcgatgccgcattcgactcgcacacgttaaaatttatttattttaaagtgtcgagcctagtgccaatttaaaaataattgattaagacgaactannaatgtacttaagtatttactcggttcgagcaatc

SEQ ID NO: 39625 - DNA, 407 bp, Zea mays
  unsure (1)..(407): unsure at all n locations
agcatatcangggagaaaatatatgatacacaacttctaaaatctagaagatatttgtatatgaaaaaatgatctcctaccatctctatatttaataacgttgctctaggaaatgataatctcctatcatgtatacatgattcaaactatgtttaacgaatgtaagcagtcttacaaaaacttaacttgcttatgccttctcttcaaagaccttcatgtagttctcatttcttatggtactttactaccctatagtctttatctttagtttaatagccacgaatgctcaaaaattgcatgtatgctcatatgtgtattcgtcaggtctattgacattgcttttatctttatgtacctatctcttcaatgcttagtatataccactatataatccagcagnttaaaat

SEQ ID NO: 39626 - DNA, 286 bp, Zea mays
acaattggcacgcgtctaacgcagccagctgtgctccattgaatgtatctcactggcaccttgaacacttacacgatcagacacatggatccttatacggcccatgcacgtggtatgccaagctatgaaatccatacccgatctcactccatttccactaaggaatttgcaatggctgcacaagtccggctggtttctgatgctcagatgtagtgatttgacaactatcacatatggcaacatgctctgcaatctctcttttctacacaccaacataatctccttt

SEQ ID NO: 39627 - DNA, 317 bp, Zea mays
  unsure (1)..(317): unsure at all n locations
accgcagatctacaagaatttncaattgattctcacagtggtttcattccacgattggtatcatntacatgtcttctccagaantcgattatactatattacaaatcttatgctttttgtgttgatataaatggatatgttgtcaaaatatatcttttacctatacatagggggagttagtctaatcaatcatgtcttgtccctctctttctcatgtgctttctctaagtagaggatctccaacagggggagtatatcttcatctatgacaaaggggaagaatattctttcaagggggagaacactcgtttagggct

SEQ ID NO: 39628 - DNA, 420 bp, Zea mays
  unsure (1)..(420): unsure at all n locations
agggcttagcgccagggcttcggggaaggttggagatcaaccaaaaaaaatttattgcctattctgtggtgaagacaanggccataccaccaggatgtgccacgttaccatccanaaagcagaaggagatagcacaagcagctgcgcaacacagtcagccgaagcaaagcatgcatactgcttcgtatcattcgccttatattccagaatatgtaggcaaccaccctgcagcttctggtgcttcggcaagccaaccccaagcatcttggcagcagcctccaccgccaccgccgacgcagcgaggacagcagccagaagggactcagcacaatcaccttcacagagacttcagagaggagtgcgaagctcgcacagtcaatagcactgtgccagagtcgaagcacatttattgataaatat

SEQ ID NO: 39629 - DNA, 413 bp, Zea mays
  unsure (1)..(413): unsure at all n locations
agcttcaattcttctgaccgtgtctagatatttttcaagcttcggatctttagccttgcaactcttgtcgatatgacccgaaacaacctgngaatcagttttaagaatggcccttctgattcccattgcttttaattntcgaaggcccaaaagcagggcttcgtactcagtaatattgtttgtacaactaaaattgagtcttgccgcataacaagttntaactttggatggtgagaccaacacagcgactgctcctgctccgaaggttccccaagacccatcgcaaaacactgtccatacttcggcatctttatttgtttcttcattctgagcccctggcgtncaatccgcaatgaaatctgccacgcttgagactgatcgagatctatcacataatcatgcaaattattgac

SEQ ID NO: 39630 - DNA, 316 bp, Zea mays
  unsure (1)..(316): unsure at all n locations
acatgtgctaaacggcgatgccacaaccagcccatgctagtcttagcaattaagcatgcatctagactggcctcctcttttgcaaaatcaactaaataaagtttgacgtctagtacacccttaaaaggtaatgaaccatcacttcttctaaagacagacacatctacatttgtgaataggcaattataacccatattacaaagttgactaacggacaacaagttataaccgagcgactcaactaanaacacattagaaatggagtgctcggaagaaaagcaatcttttctagccctttaaccttgccttgattccc

SEQ ID NO: 39631 - DNA, 414 bp, Zea mays
  unsure (1)..(414): unsure at all n locations
agcttggaaaaatctggaatgaatcggcggttataaccagccagtccaaggaaacttcggacttgatgtatagtggttgggggtttccactccaaaatatccttgactttgctgggatccaccgcaatccccttggcagataatacatgtcccagaaattggatctcctccggccagaacgcgcacttactgaacttagcatataattggtgttcccttaagcgcgttaatacgatccgcanatgtcgagcatgatcctcttcattcttagaatatatcaagatatcatcaatgaataccaccacgaatntatccaactcgggcatgaattaataccgagttaataagatatgtgaagtgggcaggagcatctgttagtccgaaagacataaccagatattcanataatccata

SEQ ID NO: 39632 - DNA, 368 bp, Zea mays
  unsure (1)..(368): unsure at all n locations
agcttgtggaggttcttcatccccacatgtgctaagcggcgatgccacacccagcccatgcaagttttagccattaagcatgcatctagaccgcgctcttcttttgcaaaatcaactaaataaagtttgccgtctaatacacccttaaaagctagtgaaccatcacttcttctaaagacagacacatctacatttgtaaacagacagttatatcccatattgcacaattgactaacagatagtaaattatatcctagtgactctactaaaaacacattagagatagagtgctcattagaaattgcaattttacctaacccttntaccttgccttgactcccatcaccgaatatgattgaactctggga

SEQ ID NO: 39633 - DNA, 359 bp, Zea mays
  unsure (1)..(359): unsure at all n locations
agcttgtcaaccatctcacgacttgcaagattatggcaactccctccatcaatgattacttttactactttgtcttgcactnctggctcgcgttganaaagattatgtcgctgtccaatntcagcttctttcatttgaacactcaagatttgtgtaaccacaagagtagtaccatgctcaaattcacatcccgtatgttcttcagatttatcaatgtcatcttcatttcctgcttcagcttcctcttcactagctgatgtatattcttcatcatcagtcacaaggatcacacgattatttggacacttctttatgacatgaccacgacctccacacttgaaacactgaataccactact

SEQ ID NO: 39634 - DNA, 374 bp, Zea mays
agctttgataccacttgtcacgcccctggctctcgggagatcaccggcgacgtgagccacaccaattcggcgacgaagcgccaggaacacagacgcaacctgaagcacgaaggtgagaaaatttctattcaattctgtattttctattctcgttccgatgacaggttacagtatatattgcctgatctattgggccggtccactcaccgatccctggcttaacagcccaattacttacgcacaaatcttggcttgaaagccgagcacaccattatataatctctatacactaatagcttctacttccctcgcagcaaccatagcagttctgacaagggaatataacacaactaatagcacgatggaacatgagt

SEQ ID NO: 39635 - DNA, 292 bp, Zea mays
  unsure (1)..(292): unsure at all n locations
ttcaatttacaaataagaatnggaatttctttctcaaatttctgcatcaacctcttcgataccggctttgcgcatacttccctatagaagtaactcagctctgcaaatatgctccaaagctcatccttaaaatagcctcgaaacatcacgggcatcagcctctccataataatatggtagtcatggcttttcaaaccgatcaatttaccggtcttcagattgactgcccgtttcagatntgctgcatatcgatctggaaatttcagattcttcaaccacttaaatatttctt

SEQ ID NO: 39636 - DNA, 422 bp, Zea mays
  unsure (1)..(422): unsure at all n locations
tgcaagcttgtgaaggttcttcatccccacatgtgctaagcggcgatgccacagccagcccatgctagtcttagctattaagcatgcatctagaccggcctcttcttttgcaaagtcaactaaataaagtttgccgtctaatacacccttaaaagctagtgaaccatcacttcttctaaagacagacacatctacatttgtaaatagacagttatatcccatattgcataattgactaactgatagtaaattatatcctagagactctactaaaaacacattagagatagagtgctcattagaaattgcaattntacctaacccttttaccttgccttgattcccatcaccgaatataattgaatcttgggaatccttattcttgacgtaggaggtgaacatcttcttctccccccgcatat

SEQ ID NO: 39637 - DNA, 460 bp, Zea mays
  unsure (1)..(460): unsure at all n locations
gtgctcaagaatgggtgaaagctatctctcaattgagtttatctcttattgagttcaattgagttcttgctcttgtgtgaagatgaaatgttgtccttgtacatcttgagcttctttttggactttctcggagtccttgcccttgtgtgacttctttgaacctgagtgaacgaattcattatatntggtgtcttccagcaaaatagacttgttctnctcgccaccaattttggatccctcccctgacatcactttgaatggttagactcacaatgaagtatcaagctcttacacgaattgaaagttgcctagagggagggtgaataggcaatacctattcttttctcatacacaagatatagtctgaatattcttactttggtggttattatgagaataatatagccacgtgtatattcaaagctaagtctctctatatgctagcaatataagtgtgtac

SEQ ID NO: 39638 - DNA, 443 bp, Zea mays
  unsure (1)..(443): unsure at all n locations
ctgcaactacacgctctaatacctggtaaaatacaacatcgcgattttgttactttggactttagcttctgctttatatttgggtacctgcttgtgtgtttaccttactagntaattataagctagcgaataagattgaaactatgttgcttaactcttttgcggaacacttagtcaaaaccatagttgcacataacggagaacctcactagtcaaaattgtagttgcatataaagatagattatttattgcgtatatttgaactagaaagaaaatagaggcgtagtagtttagacgagaaattagatnttctacattactcacctcttagacgtcatcgttccttttactaaggttgcatgccattatccctcttgcggagtaattgagctcaagacgtgttatttaataaagtggtctacataataatatattatatgtat

SEQ ID NO: 39639 - DNA, 313 bp, Zea mays
atgctctaaagggttaacacgtgatagggtttactaacgtacaattcgaataagatagaccttgtgcagcttgtcaagcacgtaaacaagtgggaggagcacatcacagcaagaatgtgatgaccacttcaagacccctggagctgctgcatatggaccttttcggacccgtcgcctatctgagcatacgagggagtaagcatggcttaattattgctgatgactcttcccgcttcacttgggtgctctttttgcaggataagtctgaaacccaagggaccctcaagcgcttcctcacgagagctcataatga

SEQ ID NO: 39640 - DNA, 388 bp, Zea mays
  unsure (1)..(388): unsure at all n locations
tgcagcttcnaccggtcatgtgcggcggcggctgttgcggcggtggccttgttanggtctcgtcngtgtaaagaggaaaggaagagatcataatacgtgaagaagaagaatagtgtggcgacgaaggaaaactttgcataaggtgggtgactaaccagtaactcgattntattttattttagttcctaaattataaaatacaaaatctaaaatagttttcgtattttacaatttacggactcgtcgtggtttagaaaccagagataatagaatttatgttcggtggggattagcgcgaactcactccaaatgatgaatcatagagactcgaacgtgtatttgagacgataggtttatactgattcagtcttgcgctctagtctaatgt

SEQ ID NO: 39641 - DNA, 457 bp, Zea mays
  unsure (1)..(457): unsure at all n locations
agctnggacaatgttttgcgatggttcttgttgaagccttggtgcaggagcagctgcggtcttagtggcaccttcgaaagtcaaaacatgttatgcagtcaaactagatttcagttgcacaaataatgttgctgagtacgaagcacttctattgtggcttcggaaactaagggcaatgggaataagaagggccatcctaaagactgattctcaagttattgctggccatgtggataaaagcagcaaggcacgcgatccgaagcttgaaaaatatctggatgcagttcgaaggttggaagcttccttcgaaggtttttccgtcaagaatattccaagaggtcaaaatgagcatgcagatntgctagccaaatcagcggctcaggggctcccactaccctccgaagtatttttgaaacaataaaagcaccttcngtcgagctcatggaaagagcagtgc

SEQ ID NO: 39642 - DNA, 377 bp, Zea mays
  unsure (1)..(377): unsure at all n locations
agcttctgctcatctcccggcagacagaaatcttcttgctgtctgngagacaatacaagaaatcttcttctctgctgccgttgaatactaatgcccctttggatatttcaacttctgggcatagtgttgagcttctcgttcttcttctttagagagtttntttcccgaagcatgacggataatatattcagtattttctttcacagcttcggaagtaggagcggcagttntttaggcaaaatttgttctatagcttcttcctccgctgccttttctccaatttccaaggatttccctttggtgggctctgaaggcccagcttcgacgtcggcccgactcgttgtagcttctgcttcggtcagctttgtctcggtttc

SEQ ID NO: 39643 - DNA, 441 bp, Zea mays
  unsure (1)..(441): unsure at all n locations
gagcttattgagagggagagggctagggagctgttgctcncanagaagctgcggatgcagagaacgaagcagaccgtgttgaaccagcagatgctgcaccctgctatcaagcagaccaagaacacctgcagcaggggcaacatatgaatcagaatttggtcaaataattaagttcaatatgagtaaattgcatgctgttgtattgagtcttgacagtttaacctctgttgtctttntatcttgacttaaatgcatttgactatttgacgatagtgtttgcaatcagtctgtcaagagtgaagacaggttgtgttctgatagaggttgcctactgaaaaccacaggatntgatttgtatatcgagtcctgtatgatataaaatgcattgtacgactacaacgcagtgcatctttcttttttcttttttactttcaagggcta

SEQ ID NO: 39644 - DNA, 305 bp, Zea mays
  unsure (1)..(305): unsure at all n locations
acatcttggggctttccggatgcatagagaatttggagagatgagcctcatccaaaattttcctcttgagctcctggtctttaggaattaccaatctgcttttgaaccataacacacctttctcatcctggcggaaacaattatacttctcaaccttctgatggagattcttcttgataattngcactcccttgtcactgagctgggccatgataatctggtcttgcaaagctggctcaatagaaatgtgagacaaagaaccagaaggaatcactttcatttgcatcttgctcaactcatcacac

SEQ ID NO: 39645 - DNA, 437 bp, Zea mays
  unsure (1)..(437): unsure at all n locations
ncaagcttgggaagccgatactcttcgataatgtaccggcaaccttcgcaccggtttggtctcgtatacagcctaacccttcatcatcaataccaccaaagagaagcgcccccggccgatatccacaagatatagcatactcttttaattcctctttttcagcttcggtcagctctggccaactaagcttcggaagtcaaaagtttcatcgtctgaggtatcttcagttatttctcctttctcgggtttggcagccatggtctcttcggtggctgcagcagtttcttcagcggccatgtttagcagcatgttatctatatcagcggctatgctctctaaattaataccttcgaaagtggcatcttcggctctggcctcttctgcggcagcctccgaaggtacagcttcagtagctgtcatgatttcaactgccgaca

SEQ ID NO: 39646 - DNA, 226 bp, Zea mays
  unsure (1)..(226): unsure at all n locations
cacacccttaaatgctattgaatcatcacnttcttctaaaagacagtgacacctacatcagtaaaaagacagttgtagcccatatgacataactgggaaacagaaagcaagttgtaatctaaagaatcaacaagaaaaacattggaaatagtatggtcaggtgatatagcaattntacccaaacctttgaccaaaccttgatttccatccccgaatgtgatagctc

SEQ ID NO: 39647 - DNA, 422 bp, Zea mays
  unsure (1)..(422): unsure at all n locations
acctgcngcatgcaagctntaaaatgaccatttcctttctggatttgtggcagagggaaatatattcaaaagcccatgctaagcaatcctggatcgatctatccttgatgaaaccatattgattctgatgaactagctntgtgatcactggttgtaaatgattggctaagatttttgttagtactttgacactcgtgttaaggagggagatgggtctataatcaccaactgaatccggagagctatttttgggaatgagagtcacatatgacccattaatgctatgcatgcagagagatccttcaaaaaaattgttgaaaagatcatagaaatcaggggcaatcaccggccagcatcttttaacaaagtctgtattaaagccatctggacctggcgatttatttgatggcagacaagcaatg

SEQ ID NO: 39648 - DNA, 462 bp, Zea mays
  unsure (1)..(462): unsure at all n locations
agcttcttcaccatgtgatcacgattatcttgataaggttgagcaatgcacttcccttttatttgtgtcaagctcatctttagcctctcattttcttctttgagcttttgatatgcatcatcttttgttcctgcaaactctagctcaaaggaaggtttgcttgtcgatggacaacaagcattagcacatggtaatatagttccaatttgaatacatgtgcatgagtgaggttgttgggattttaagttttctatcacaacctcatgagtaatgtttaacatgatatgttcatccataagatnttcatgagaacatagaagcatatcatgtttntcttgaaaagctagattttcaatttttagctcttctactcggtccttaagcaaggcattcttatntactaattgagcgacacaatatanagaagtatcttgctcaattgaaatagtctcatacctttgg

SEQ ID NO: 39649 - DNA, 218 bp, Zea mays
cgcgtggcttgagccagtataggtacaacacagctctagctcagctttacgcaagcgtctagcagagctccagctctgtgagaggtgagacgacacatgaaacggggatgggaagatgatggacacgatgacacgcgggtctcacttaacggatgttaatagattgcaaatgtgatgtattgtttcatactcatccctctaaccaacatagagaagac

SEQ ID NO: 39650 - DNA, 317 bp, Zea mays
  unsure (1)..(317): unsure at all n locations
gtttctggatgagacgaggccaccctggatctgttgatgaagcaccagaagactaatcaagggaggaatccatgtgggagttcgcaagacaaagatttgtgtgttggcatcaatgtttcctcattaggctacctaccaagcgaaagctagaagcccgaagatgatctttgagtagccagaatcagcgtttgcaatcagcaaccggatgctcctcaaaggccagattntgttgaagttccatctcctcgaagagtcgcaaagtgaagattcgtagctgaagtaaagttataaccataacccttctaagccgaatctcg

SEQ ID NO: 39651 - DNA, 339 bp, Zea mays
  unsure (1)..(339): unsure at all n locations
acatatgcatgtcatcttgacttggcactatgttctctctcctatccctttgctgttctctgtacgcagaaatcaaagaattcaagaaccatgcatttgaaacgttacgtttaaactgctattctggatggtaattttagtagtttgaactanggatgaaaacggtttcggaaattntcggaattccggaaaccattttcgaaattttttgatcggatatgtcggtaatggtattgttcggaaatgaaaccagtaatcggaattctttgtcggaaacagtatcggaatcggtttagcactttaccgaccgtttcctttcgttacccggattagtcgaat

SEQ ID NO: 39652 - DNA, 441 bp, Zea mays
  unsure (1)..(441): unsure at all n locations
agctntgacacatataagtgtaatgatacatatcgtagaatatgagattttaaagcgttttaccagttgtagcatttttttaaaaaaatatcaattgatgtatcatttattatggagtgttaaagaagctatgtgtcgtgcttaaataaacattttgaaccatgtaggtttgcttaagtgtatgaattgaaagcaagcaatcctaccatgtgatttacctagtatgcatgcatttaaacaaaagtaaataccaattgtaatactaagcatgaaaggtaaactagatgcaagataaatatatacgcatatctaanaacaagaaatacaataaatctagttaccttagtcatgggtgggaaatttgggtccaatatatttactaacccacttggcaataaactcaatacaatacgatgtatcccatgatatacatcccaactt

SEQ ID NO: 39653 - DNA, 196 bp, Zea mays
  unsure (1)..(196): unsure at all n locations
tcgctgacnngtagtagacnccacgcttctggaatggtctgnnngacccctgcggttggtccccgagccccttcaagctcccgtggtggtgcggacnccaccaccttcttcctagnngggaacnntttctgaactcnnccctagggaatgtnntgtgccgtcccctttcgaacgacnncagcaccatnngctcact

SEQ ID NO: 39654 - DNA, 441 bp, Zea mays
  unsure (1)..(441): unsure at all n locations
agctttcgacccttattatcggcttcgacctctacaatgattagccagcgctgtaccagattgatccgcatcgagtaccttctatgattggaaggccaacaccatgggaaggaactacaactctatgtgtgagtttctggagaagaactaaggagacatccgacaatgagaccatcaagcttgcaatcacgtcgcttacagatgctgatcctatccacatagagactatatttataccttttgcttttgaacttgccattataccctgataattatgaatctattgagggggaacacgtgagttgtgttgggttttcggccttgatgtagctttacccccaagtactgcacanataaaagttgggtttctctagacatgtagaaatcctaaatctgtactaaggaattccctactttcactgtgagggagtctgaatgcac

SEQ ID NO: 39655 - DNA, 302 bp, Zea mays
  unsure (1)..(302): unsure at all n locations
agctttggaaataaatattctttgaatactattggagatgctaaaggtcgatgcatatcgatcgagcattcgagctactagctncgtcacgcgcaccgaccgggcgcgcgccatgttcttcccagattcctttcgtacgtacgcgtgtgtggccggccggcttgcctcatgcatggtccaactaatccctaacttatagccaacgcgtgccctactgtccctatcacatatatataaaccctaaactaaagccctgtccgatgcccgttgatctctccctttggtctatacacacatgcaca

SEQ ID NO: 39656 - DNA, 285 bp, Zea mays
cgacgccgcgagcccgcaatgccttattctaccgcgcgcgtccttctcccagagcgcatgcagactagccgcctccaccgaagagatctcaccgccgtcgccatcgcaagggtgctccaccgtcgaccaaaacagccacgtgccagcgacctcaactctcgtctcgacgcgcagccagcgctttaacgcgacgcaaccggagccgctccgacacagactgatgtcaccggagccgctctgacgcagcctacgagctactagagcctctggcccaatgcctacacc

SEQ ID NO: 39657 - DNA, 353 bp, Zea mays
agctttactatgataaggcaagcatatcgatggtgtaagccaataccttgtgatgttcattttgctcaactctgttctgaaacagcgagagatcatatgacttcagttcaaactgagaattcaactcagtgtgccttttctgcaatggtaaaagggctccaatctgggagagggggtaataaattagaaaaaactagaaaccaaatttaccatgtgttcaatacccggcatataacatgttgcagttgcaacgtaaagagatataactgatagtgaccagcacaaggcaccactcaattgataagagatgaattttctatttctatcatagtgcgtattaccacatgtcccaa

SEQ ID NO: 39658 - DNA, 418 bp, Zea mays
  unsure (1)..(418): unsure at all n locations
agctggtggaggttcttcatccncacatgtgctaagcggcgatgccatatccagcccatgcaagtcttagccattaagcatgcatctagaccggcctcttcttttgcaaaatcaactaaataaagtttgccgtctaatacacccttaaaagctagtgaaccatcacttcttctaaagacagacacatctacatttgtaaatagacagttatatcccatattgcataattgactaaccgatagcaaattatatccaagagactctactaaaaacacattagagatagagtgctcattataaattgcaattttacctaacccttttaccttgccttgattcccatcaccgaatataattgaatcttgggaatccttattcttgacgtaggaggtgaacatcttcttctcccccgtcatat

SEQ ID NO: 39659 - DNA, 334 bp, Zea mays
  unsure (1)..(334): unsure at all n locations
gatcagccaaagtctatgcttctatgtgaagacataatagagccgaaggtactgctggagtctcanctatctgaagagcacgagaaaactttgataaggtttttattcaacaacaaagatgtttttgcttggttggccaatgatctctgtggtgttaacagagacctcattgaacattcacctcatgtcgacccgtccttcacgccaaaaaagcaaaggcttctgaaaatgtctgatgataaagccgcacgtgctcataatgaagtataaagacttctcagtgctggtgttatcacagaggtacaatatccacagtggctatccaatactgtta

SEQ ID NO: 39660 - DNA, 351 bp, Zea mays
  unsure (1)..(351): unsure at all n locations
cttcattcccacatgtgttaagcggtgatgccacttccagcccatgcaagtcttagccattaagcacgcatctagaccggcctcttcttttgcaaaatcaccaaataagtttgtcgtctagtacacccttaaaagctagtgaaccatcacatcttctanagatagacacatctacatttgtaaatagacaattatagtccatattacatagttgactgacagatagtatattatatccaagagactcaactaacaacacattagagatagagtgctcattggatattgcaatcttgcctaaacctttcaccttgccttgggttccatcaccgaatatgattgaatcttggg

SEQ ID NO: 39661 - DNA, 367 bp, Zea mays
  unsure (1)..(367): unsure at all n locations
gctgggtatgacagttcttctaatgatcaaattgatcaccacggagctgtattngatttatatcagtgtgctcccaaggttcttaaggcgatcgtgccgtatattactggggagctactggtatgaatatgactcacacttctcttaaagacagtaaactatagatgtgaacataaactgtaatatccctgtcgcagaatatgtctaacaaacagtgctattattttgtggagacaagacttatctcttctaaatggaatttgttgattaaagaacatatttgatattctatacgcagatgaaggacataacacgtctaagtcaattgaattacttgttgaaatttttttcttacctggagcctcta

SEQ ID NO: 39662 - DNA, 370 bp, Zea mays
agcttgctgaatgttatttggcaatcgaccttgctgtcaattcacgttccattgctcgggaccgggaagccaaagctcgcgctcgtgtggccgaacttagtgcggccgttgacaactgcatgtgtatcgcaatacattacatgaggaagtccatgtactgtattcgcgactgcacccatacgtacctgccgaccctgttggaatgggagccggaccctcaggaacagcatgtgaaggacttggtggggaattggaccttttgaagccccctccttctatgaacctaactgacgaacggtcccctacacagacagtgaagcacccaggacgaaaaaactagagtagtatagttacatctatactatgtaaa

SEQ ID NO: 39663 - DNA, 364 bp, Zea mays
  unsure (1)..(364): unsure at all n locations
agcttactacttattaacttgaaaccggatagctgacctttattcctataatcgagtggagttcttctatctgactccaaaccgggtacgccaagctccatacagtagatacgagccggtaaactacaatctggtattcttaactccgactttgaaactgctagctggtaaaaagaatgaaggaccataattaatgctatcgaggccccaagtcaagcaacaaagcttctagccgatagaaagaatgggtacgagcctatcttgctaagacaagggaaactctagctgcacttactccttggtcagtataaactacatggcttacgagaagctgctcttcanactcacagccaacttggagtca

SEQ ID NO: 39664 - DNA, 446 bp, Zea mays
agcttgcacacatttcttatttgaatacctttgatcatatctcttctatatgctatgactaatgtgctttcaagtctatttcaaaccaagtcataggtatattgaaagggaattggagtcttcggcgaagaacaaggcttccactcagtaactcatacttcgccatcactccgagcaactctctattccttggggagaaatgagcatcacagaaaaggacttcatccttctaggagagagtaaaagcttgaaagcaaaaggaccggatttccgctttggtataatcttaactcatttacttatgaccacaggggacgaacttacttcaagggctcttatgattcccgttttggcgactcatgccacaaagggggagaaatgagcccaaagcataatgaccgcaccaccaccaccatattcaaaacttaatgctttcaaaagtctta

SEQ ID NO: 39665 - DNA, 399 bp, Zea mays
  unsure (1)..(399): unsure at all n locations
agcttgcataggtgatcttcctttcagaacangaagaatatcacatcccagtgatatgtattctttgtttctcttctagtatctattggtatatgacaggtccggaaccttatccatctcctcaagaacccattgtggcaaaggaatcctgtaaaggtagtaaattccaaccatgaacaaaaaagagatatgcttttaaactatattacagtgaagtaaaagtcaggcactacttgtgttcagttaaagggtgaggccataaaacagcacacaacaatcaacgtgcccagaatttatacaatacttttgttcgttagaggaacaatctcgtgaaccaatggctgtttgggacgtgtggcctatggtcgtcctccaccttctcgatgctctacacaacat

SEQ ID NO: 39666 - DNA, 344 bp, Zea mays
ctctaagtcacctgcggcatgaagcttacacctttcttcttaaggggtcggtttgtcacttctaagacagaaaggaggttagaggctatcctcgtgcttgactacgatgtgattgacgtaagcctcgaccgtgcggccaatgtgttctccgaacacatggttcatgcaccggtggtacgtcgcgcccgcatttctcaagtcgaacggcatggtgacatatcagttcatgccgaagggtgtgatgaaagaagtcgcgagctggtcggactctttcatgctgatttggagataccctgagtacgcattcaagaaagacagggtttctcaccccgcagtggaattca

SEQ ID NO: 39667 - DNA, 431 bp, Zea mays
agcttgtgaaggttcttcattccaacgtgggctagtcggcgatgccagagccaacccatattagtcttagcaattaagcaagtatcgagttcagctctattaaaatcaactaagtatatctgaccctccaatactcccttaaatgctactgaatcatcacttcttctaaagacagtaacacctatatccgtaaaaagacagttgtaacccattttgcataattgagaaactgaaagcaagttataatctaaagaatctacaagaaaaacattggaaatatagtggcaggtgatatagcaattttaccaactcctttgacaaaccttgattccatccccgaaatgatagctcgtggggatcatcgttttctcgtagaagagaacatcttttctctctatatgtggttgggattcgtataatgatcacttgac

SEQ ID NO: 39668 - DNA, 368 bp, Zea mays
  unsure (1)..(368): unsure at all n locations
agctttggctatggtcaaatttttggcagcttaacagtgcaatagcaatgaatgctgtggtaacttcacacctacctgtctgtttatatagtgccgcacgtgggaaggtgaattgtcaagtctttcgcaccggtcaaacagtcgcccgcacccactgaatggtgggccacagagcccgagaaggtgaatcgccaggatgcgtatacccatcgcatggaatattttaatcgtttctcggcaacaagctcagggaaggtgtttttcggaccttcggcattccgaagcctatgagactttttcacggatcaagctcgttacgaanaacgatctagcaccgcgaaggggctactgttgggggcatgcttcgt

SEQ ID NO: 39669 - DNA, 242 bp, Zea mays
  unsure (1)..(242): unsure at all n locations
ggaacaattacatgctagttgttaggcgatcatnaccacaggtttctacaagtttgctggatataataanngtgtgaattaaggagcatgatttgaagcccatggcagaaaatgttcatgagtggttcctctaaggaaatgctggaaatggctcaatgatgctagaatcaatcaattatacatggtcgccattntactttgtttcactttacgtatccaaatggaatcacctatctcaaaat

SEQ ID NO: 39670 - DNA, 457 bp, Zea mays
  unsure (1)..(457): unsure at all n locations
tataaatcatagaaaatgcatattatatcctttttagtccattccaatctctataattctgtaatattatgggtgatcatctagtaccattgttttcacatgaaagtcatattaaaatttatatcctatttaatcttgtgtaaaacacataaaatcattagaaattcataacttaaatctatgatcccgatttgatccattcaaattgcgttagtctcgtataaatatttaatatgcaatagcaacacttattgtaccatgtctcattattttataattagatctatatttaacttatgttggttagtcttgttaaactgctcatctactaaaatatgatctatggtcaatttataatttagattaagttgaattaattactactatanngttacctttctctgggattataaaataaacacagaacnnctgtgtaaatcatgtatcacatcataac

SEQ ID NO: 39671 - DNA, 474 bp, Zea mays
  unsure (1)..(474): unsure at all n locations
catgcaagcttgtgaagattcttcatcccaacatggtttagtctgtgatgccagagccaacccatattagtcttagcaattaagcaagtatcgagtttagctctattaaaatcaactaagtatagctgaccctctaatactccattaaatgctactgaatcatcatttcttctaaagacagtcacacctatatgcgtaaaaaagatagtgaacccattttgcataattgagaaactgaaagcaagttataatctaaagaatctacaagaaaaacattggaaatggaatggtcaggtgatatagcaattctaccaagtcctttgaccaaaccttgatttccatccttgaatgtgatagctctttggggatcatcgtttttctcgtaggatgagaacatccttttcttccctgtcatgtggatagtgcatncgctatcaatgatccaacttgagcgcccggatgcataaacctaca

SEQ ID NO: 39672 - DNA, 385 bp, Zea mays
agtcagaacatgctatgcaataaagcttgactttagctgcacaaataatattgctgaatatgaagctttgcttttggggcttcagaacttaaaggcaatggggataagaagagcggtccttaaaaccaattcccaagttatttctggacatgtcgacaagagttgcaaagcaagagatccgaagcttgagaaatacctggatacagttcgaaggcttgaggcttcattcgaagggttttctgttaagaatattccacgaggagaaaatgagcacgctgatctgctagccaagtcagcagcacaagggctgcctttaccttcagaagtgtttttttgaaacaataagagcaccttcagtggaacttctcgaaagagcagtgctcac

SEQ ID NO: 39673 - DNA, 338 bp, Zea mays
tttaattagactatatttaatactgcggatgtacattcaaacatccaatgtgacacagctcaactttagtgacgagactatgttaggctgggcgcaacagatcatgtaaaatatgacatttgcattgtagattatactgtttacagtgtgaagtttgaaacaagcgaacttgaggtatccctgatcggtgggcacgggtctgacaatgtgcactatccactggtctgaaggagcaagtatgggaatatgactggactactttacctgtgctacacataaacatggattgttaatccagtctgcaacctacacgcagagcttagaatcaattttgagct

SEQ ID NO: 39674 - DNA, 369 bp, Zea mays
actgaagattcgcttcgtccatcagtagaaatactctcgatatacatttgcttatgccgaagcaaaatattaaacgagtgatcttcgacataaaagacccccaacaagccgcttatccatcctcataatcaaattccactctacgaatagtacaatctatagtacaaaataatacaaaatagtgttttaaataacgatatagatgaactattagacattatcttagtttccttccttctctctaccaagtgtcacgtacggctcatttggtagccaccgtcaccaaaatctagtagcccacctcatccacgtcatcggcccctgctccaccacgcctagggctgggcattccggtatatggattattcg

SEQ ID NO: 39675 - DNA, 394 bp, Zea mays
  unsure (1)..(394): unsure at all n locations
tcttgggaatccttattcttgacgtaggaggtgaacatcttcttctcccccgtcatatggtttgtgcatccgctgtcgataatccagcttgagcccccggatgcataaacctgcaaggcaaatttaggcttgggtcttaggtacccaactcttgttgggtccttcaaggttagtcacaatttccttagggacccaaatgcaagttttatcacccttgcattntgcccctaatttcctagncaactatcttctatcctttctacaaatagcaaaggaagcatttaaagcatgataaattgtagagggaccattcataacttttctaggaacatgaacaatattcttcctaggcacatgatgaatatttttctangcatatctctaccatgcatat

SEQ ID NO: 39676 - DNA, 360 bp, Zea mays
  unsure (1)..(360): unsure at all n locations
agcttgtgaagattcttcatctcaacatgtgctattcggcgatgccagagccagcccatgttagtcttagcaattaagcaagtgtcgagttcagctctatcaaaatctaccaagtatagctgaccttctaacactcccttaaatgctattgaatcatcacttcttctaaagacagtgacacctatatcagtgaaaagacagttgtagcccattttgcataattgagatacaganagcaaattgtaatccaaagaatctacaaaaaaaacattagaaatggaatggtcaggagatatagctattttaccaagacctctgaccaaaccttgatttcatccccgaatgtgatagctcgttggg

SEQ ID NO: 39677 - DNA, 366 bp, Zea mays
  unsure (1)..(366): unsure at all n locations
agcttgtgaagattcttcatcccaacatggtctagtcggcggtgccaaagccaacccatgttagtcttagcgattaagcatgtgtcgagttcagctctatcanaatctactaagtatagttgaccctctaacacacccttaaatgctattgaatcatcacttcttctaaagacagtgacacctatatcagtaaaaagacagttgtagcccatttgacataattgtgaaacagaaagcaagttgtaatctaaagaatctacaagaaaaacattggaaatagaatggtcaggagatatagcaattttacccaatcctttgaccaaaccttgatttccatccccgaatgtgatagctcgttggggatct

SEQ ID NO: 39678 - DNA, 268 bp, Zea mays
  unsure (1)..(268): unsure at all n locations
attacctcaccggagaagcagtttcaccctcgccggacttcggtcttccgctgccgcgcgtggaccaagctaaccagtgagtcttcttccaattccttgcacccacatctttcctagcatcccgtgaagctctctgacccgttcaattaatctatcgcaccgtgagtaagccggattcctcgccgncgacgagcatctncgcctgcacacgtggaccggccgactccgaccatccccgacggtgacccgcacatcgccgtgatcctcg

SEQ ID NO: 39679 - DNA, 421 bp, Zea mays
  unsure (1)..(421): unsure at all n locations
agctntaagtaatatttagaagccttgggttaagtgtggcatgacttggactatgttttgtacttagaacccaaaaccctaatcccctgccctatgaacttcactataaactccaaaaaccctagtttcccggagatccgtgaaggaaagttatattcaagactttagataatatacttttattatctttgcattatcatgagcattacatgagcattcatgattatatatggctatatctagaaaacgtggaggaaatagaagttgaagaagcgaggactacaccaccaccacctgaagaacctcaggcangaaactacttttactttgatatctgtggagcagagccttgactcactatcacttcatgcaagcnctgttgcatttgcacctctttgtattttgaatcttctcactactg

SEQ ID NO: 39680 - DNA, 332 bp, Zea mays
  unsure (1)..(332): unsure at all n locations
ttcatactaaagatgttctataccatcctaataatcccagaaaaatcttgtctctattcatagacatctgatagctcaaactttattgaactacatcctactttctttctcattaatgatcagaanaccaaatcaattctacgtagaaggagatgcataggagaggtatatcttcttccaatatcaacgataaagaaagtttacaatgataggaggtcatcaataaacatgtgtcatatatagtcatcatggacattcatcttttagtattgtcgagcaaaagttgtagcataatagttttgtatattcacaagagtttgtgagtgtgtaaa

SEQ ID NO: 39681 - DNA, 436 bp, Zea mays
  unsure (1)..(436): unsure at all n locations
gcggcatgcaagcttctacccgctggccccagtgatcggcttagtatgtttgaatagctctctggtaagtcgctccagcgttcttgaggccaaacgacatggaggtatagcagaaagctccaaacggngtaatgaatgcagttttttcctcgtcttcttttgtcaggatgatttgatggtatccagagtagcagtctagaaaggacaacatagaacatctggcagtcgaatctaccacttgatctattctaggaagtcctaagggatccttcggacagtgtttgttgagatctgtatagtcgacgcacatgcgccaatccactttattctttttgagtacaagaacaggatttgctaaccactcaggatgcagtacttctctaatgaaccctggtgcgactaagcgagctagctcggtgcgaatagcttctctctt

SEQ ID NO: 39682 - DNA, 430 bp, Zea mays
  unsure (1)..(430): unsure at all n locations
agcttgccaattcttaacaaagcaacaacatttacctgcacagcagctgcagactattcctgtaacatggccatttgcatgctgggggctggatatgattggacctttcaaaaaagctcagggaggctatactcacgtgctggttgccattgacaagttcacaaaatggatagagtataagcccattgcctctntaacctcagccaaggcagtagaattcatacaagatataatatttgggtttgggataccaaatagcatcataaccgacctaggatccaacttcactagctctgaattcttcgacttctgcgagcaacgtagcatccagattaagtatgcatcagtagcgcatccaagagccaatggccaagtagaaagagccaacgggatgatattggaagcactctggaagaaagtgtttgacaag

SEQ ID NO: 39683 - DNA, 257 bp, Zea mays
  unsure (1)..(257): unsure at all n locations
cagacgacacggaggaaccctcggtcgatgcttctttgataggcgagaagttctattctgatgcttggatgaaaggcgaccgtgatatggctgatgaagccataaaaaagagtgaaaaagaatctcacgacgcccgagaagagcaaaacaagtggacgaagctgctgaacgcgcaatgnatatatgtatccttttacagcttctttttgtctcggtgtttgttatagcttcaaattcacccatatgctctgtgtaca

SEQ ID NO: 39684 - DNA, 446 bp, Zea mays
  unsure (1)..(446): unsure at all n locations
cgtcgatggggattctacttggcgtagattccttcttttcttcctccgtcgccttgaatgcgacgggttgcaccttgggtgttgaggtgccgccttgcttcaagttgacgatatgtttggagcctttgatcattaactcaaagctcacaaactttcctataacctccttgggagacattagcttgtatctaggatcaccacgtattaattgaacttgagtagggttacaaaatacgagtgatctaagaataaccttgaccatttcatggtcatcccatttcgtgctcccgaggttgcgcacttggttcaccaaggtcttgagccggttgtacatggcttgtggctcctctccttggttgaggatgaatcgaccgagctccccatcgatcgtctnccgcttggtgatcttggtcacctcatttccttcgtgcgcggtctttagtact

SEQ ID NO: 39685 - DNA, 399 bp, Zea mays
  unsure (1)..(399): unsure at all n locations
agcttctaaaggtttatcatcgtgatacgtctatactaatgaactntcgaaaaggatagaccttgtgcagcttgtcaagcaggctaacgggtgggaagctctcatcataccaaanatgtgatgaccacatcaagaccttnggagttgcttcatatggacctcttcggacccgtcgcctatctaagcataggaggaagtaagtatggtcttgttatagttgatgatctttcccgcttcacttgggtattctttttgcaggataaatctgaaacccacaggaccctcaagcgcttcctaagaagagctcaaaatgagcttgagctccaggtgaagaagataaggagcgacaacggtccgagttcaaaaccttcaagtgaggagtatttgagacgaaggatc

SEQ ID NO: 39686 - DNA, 360 bp, Zea mays
  unsure (1)..(360): unsure at all n locations
agctngacaggattttggtgagcactgagtgtgaacgaaaattccctttatcggtggctgaggccctatcgagagatatttcagatcacacacctttattgtttcaaagtgaaaatgcctcctatagagaaaataaccaaatgttcagatttgagttctcctggttgtacatggaaggttttcatgaattggtagcaaaggtgtggaacaaggaaaataggggaagctcttccctagttagatgccaaaataaacttagagctctgcggcgttacctaagagggtggtcaaaaaatgtgcttgggaatactagaanaagaaagcggttcttgcttacttccttagaatctttggataaaa

SEQ ID NO: 39687 - DNA, 352 bp, Zea mays
  unsure (1)..(352): unsure at all n locations
agcttgacaatgatgaaatggcgctcgtcatcaagagcttccgccagatcctcaagcaaaggagagggaaagactacaagtcccgctccaagaaagtttgctacaagtgtggtaagcctggtcactntattgctaaatgtccattatcaagtgacagtgacagggataacgacaagaagggcaagaggagagaaaagaagaggtactacaaaaagaaaggcggcgatgcgcatgtttgtcgggaatgggattccgacgaaagttcaagcgactcctccgacgacgaggacgccgccaacatcgtcgtcaccaagggactcctcttcccaacgtcggcacaagtgcctcatgg

SEQ ID NO: 39688 - DNA, 402 bp, Zea mays
  unsure (1)..(402): unsure at all n locations
agcaagctttgaacgtactaagcacatgccgggaaaaatggttttcggtaaacctagtacctgagtgaagccgggcgcggactttatccctcatgcgacctgagacagggtctcccatgctagctatggtgggtacaagtgcggtcactgcacggcggcagccggggtcagtggagcattgtatgccaaggcggtgaggcctggacgctaacggngaatcgatggggacgggtgtcatgtgcgggtcggagtaccctgacatgccgcgtgtttaggtttaccttgcaagggttaaaaactcgattcgaatcgtctgcttctcgcagctaatgagactgcttgattccttgtactgcatcgagtaagaagtgaaatgggattacatgagataacttgttgatg

SEQ ID NO: 39689 - DNA, 336 bp, Zea mays
agctttagcacaagcactgagatgaactcttttgaaaccagttgatgttttggaaccatcagcaacaaggttagcaagaaactcttgcacaaaagctttctgacttactgtccaaacaggtccacctttaacctctccttccattatatccagcttgaaatgaaacaaaataatactaaatgtcagccacatagagtcatacaaacaacatgagtctcaatatcagccacatagagtcatacacaccaaatgatacaagagtaatacaaagaatatggtacatagagtaatacaaacaaaatgggacatagatggtttacagactcatggtgcatt

SEQ ID NO: 39690 - DNA, 343 bp, Zea mays
  unsure (1)..(343): unsure at all n locations
gagagagggaaactggtcctatgtctcctgaggagtctagtggtgtggagtggagctcgatgcttgagtgtgtncgtcttcgtcgtccttgctacccgtcctctctctcctttctcttgagaaggccctgggcatccccttttatagacacaaggggatggtccagctgtacatatgggggtgttgcgatgtgctaacgcggcctatggagaagtgcttgagccctgtataaacgtaactggcggtgcggtcctgggtcctgctgacgtttctttgccttcgtaaagagcttgaggactattgacgtcatggacgcctgccgggaatcatcattacctatgac

SEQ ID NO: 39691 - DNA, 441 bp, Zea mays
  unsure (1)..(441): unsure at all n locations
agcttggatattattcatcagaacattggatattgttgtgacaaagaagaattcttcttcacgaagcatgaaaagaagggaaggtgttttttcgtcaaagactcaaaagcggtacgtgtaaagtttcatgcatcgtaaagaactaactgacaaaaataggtatattacatttggggttacaaaatgttacagtatattacattttcagaagttttcacaaaaatacttaatcttctctcaaaacgacttctgcagcttcgttcaggagccgattgacgacttcgtccataatatcttcagccatctctttaatttcgtcgtcttctttcggctganggcccgaagacgctntagcaagatctgaagtaagacangatacggctacattgctattacanatcgcanacanatcttaaagcctaagattatcacacataaaac

SEQ ID NO: 39692 - DNA, 420 bp, Zea mays
  unsure (1)..(420): unsure at all n locations
gctgcttttgaaataaatggtaagttatgtaactgcttccgcatttctttatctcttatgttctgtaatgtctgcaagacgggtgaaacgttcctggtgaggtaaggaaagataccgagcttgtcaagtgacttangaacatctacagggtgtctgatgtctgttggacaacgacaactgtaagtgggcctaattacttgggaggttccgtcacagctgcgatcttggtcccgccctcagcttcaaggatcttcatcatcctcgctggggcggaggccgggctgagccggagctctacctcccgcgtgggttcgtgggtcagcctctccctcagcattcaagggagagggcgctcactggcctagcgggaggggcggactttgacaacgcggggccgatcgacggcnggcgtcgtcagct

SEQ ID NO: 39693 - DNA, 102 bp, Zea mays
ccctattggcttattattcctgaaccaaatccctagtaccattatgctcagacacaactctaaattcgcccacagcatctgggcatgatgtccctggcgtca

SEQ ID NO: 39694 - DNA, 403 bp, Zea mays
  unsure (1)..(403): unsure at all n locations
agcttncactgctaaatctacaagaattcttatgtctcacaagcctgccactggtcttcaattggttcaccattgactttcaattggtatctttgggactacattcagtatcatttacatgtcttctccaatatttgattagactatatctcatatcttatacttcccatgttgcccaaatgcatatattgttgactcatattttgttacctatgcataaggaaagttagtctattcaaatcatgtcttgcacctccatttctcacatgctttttcctaagtagaaatctttgtcaggggagcaactcttcgtctctaatgggggataaatctctttctaaaagagaacactcattcagggggaagtataatgtcaaagtcttcaattggcaataatctttat

SEQ ID NO: 39695 - DNA, 387 bp, Zea mays
  unsure (1)..(387): unsure at all n locations
agcttgtggaggaccagatcaccaaagcttattagtttctgtatgagaagtggtcacccaagttccgttgatgaagcaccagaagaacaatcaaggaaggaatccatgtgggagttcgcaagagaaaggtttgtgtgttggcatctatgctccttcaataagcaagctgccaagtgaaagctagaagcctgaagatgatctttgagtagccagaatcagtgttttcaatcagcaaccagatgttcctcanaggccagactttgttgaagtttcatctcctcgaagagttgcaaagtgaagatatgtagctgaagtaaagcgatacccataacccttctaagccgaatctcgaggacgagattccttttaagtggagtagaattgtag

SEQ ID NO: 39696 - DNA, 375 bp, Zea mays
  unsure (1)..(375): unsure at all n locations
agcttattcatactaaaatcatatattaactcagattanacatgttaatccaaattaattattcatttttgaagacatgttangtggtaaaacaagtctactaaagtgtaggtaatattattacgagactaacgtaatttgaacgagtcaaatcgaagttaaattgtggaagttatggactaaacaagtttgtatggcctcttttatagcacaatatacacccactggtgtatttgtaatttgcacggacaccagtgtaaaggtcttcccatggcgaaagacggcacggtttattatgcaaaagccgaggggctttttgtgaagagtacgcggcgaaggggtatccacaacctacgccacaggatcataacctga

SEQ ID NO: 39697 - DNA, 308 bp, Zea mays
agcttgtcggagcacaggcgacacgaggcttctgcgcactaaatcaagtccggctgggtgctactcgtagagggtgtgagggcgagctcgctggtgccacaaatcccacgaatcacccatgggcagagcctgcccacgacagcgcaccatccgcggcgaaaatgcacaccggcgtaaattcccggcgtaccgcgactctataacgattcgtcatgcgtaatggtcagagggacgtaacgaacgagcgatgcaggggtgtcttaccggcgttagaaggaatggtgaagctgcccacatgcacaggggat

SEQ ID NO: 39698 - DNA, 343 bp, Zea mays
gcagctttggaactatgcccgtatctcatatgtctgagtcaaaatataagtgcttgccagatgcccccgttccggtcgaccacgagcagcacccataagaattccctagttatttaaccaaggactgtccttaccaccctcatggtagcactgttttcctgtgtggtcactccatgatccaattaatatgcaataattttatttaaccatcgggttaacatcatcataccaatgtcatttccagaacattaatatcagataatgagtgacatcaaataaataagctgagtggtagcacaaatttgcaaagcagagtatcttccccgtgtatcaaagaatacag

SEQ ID NO: 39699 - DNA, 334 bp, Zea mays
agcttgtccctgacagacactctggaagagcaccctgctccgcggctgtcgcagtttccgttggacacgtgcgagttcacgttcgaccgtgcgtccgttccgcggatggagctgctcaccctcggcatcctcgagtggtgggtggtcgccgacatccctttcccctacatctgctacttagtggcgcagttctagcatgacgaacgccaagcgatctgcgagcgcgccgtgcagcaccaactacctcaagcattgaggaggatttacccttcgacacgctcaccaagtgttcgatgagggtcctcaaccgcggcgccaactacggacacaacac

SEQ ID NO: 39700 - DNA, 428 bp, Zea mays
aatagacttcgagaacaggtattagcctcaaagacttagattatagagtaatctccccctgaaagtgtgcatacaagttttgaatacttgtacgagacatgcactctgatgtgatatcaagaggggcagattattcataatccgagctttggcacatataagttaaatgataccaatcgcgaattgtacgatataagctttggatgcataagtgtcatttacttaagggtgttaaataaactatgtgccgtgcttaaataaacattttaaaccatgtacgtttgcttcaaaatatgaatcgataacaagataccctaccatgctgattacctagtatgcatgctttgtaatctagagtaagtccaaatgatatactatgcgtgaaagggaagactagatacaagaatttagatacgcatatctataaa

SEQ ID NO: 39701 - DNA, 322 bp, Zea mays
aaccggacctaattacgcagaacagctaaccgaaagggattttgtctagcgaaaatcaccgctatgcagcgccagaataccgccacccgacacatcgaacctcccgaaaggaacgccgccggaaaaagagaagacaaccgcatgtatgagcccgacaagtacatccgctgggaaaaggtgcccctgactctatccgaagggcaaacccttgactcagagcgcgaaactctaatctcgaaaaatctgacacacccttacgctcacccacagcacgctctaccatgaaacggaacgaactccgcacatacgcgggacccacctt

SEQ ID NO: 39702 - DNA, 401 bp, Zea mays
  unsure (1)..(401): unsure at all n locations
agctccgaattcaattctgatattttagcttctgcctcggtcattctgcctccgngggagagaagctcgaagtctttcttttcaacgatgactgattgctcttttattttgctctccaaatttccaattatagctccgtgttttttgtcctctaaatcctgctgcatcttcagagctttgctcagtagcatgctctgcacaaaaacagcttcggtagtaacatttcattatccaaagccataaggaacagagaaaagattgtttaccttgaaattggaataaaataagctgccgacgatatgctgtcgtcggtagcggctgatgtctgtctctagtttccgaaaaccgatactctttgatagagcaccgatgaccttagcccccactgagtcccggatgca

SEQ ID NO: 39703 - DNA, 385 bp, Zea mays
tccacagcaatccaacacacagtggagtagggtgttatctctctctgcggccccgaacacacactacaaacatacgtgtgatgcatgttgctctgatgatacgcttaataagacaggcaaaacgcctaagcccctttctcaatcttatgatttaaggcgggtccattctgtcacccgcgccgagaattccctcttcgacagcaagctaccccatggcccccatcatacaagccatgtgagcttcctttgtatgatgggtactcacacccgaaggaattcctaatgaactactaggcgaccatattttcatatgggggcaatactgcagtcaatggccaaaatcttcttatggcagtcaaagcgtatccatacttggtattcgtct

SEQ ID NO: 39704 - DNA, 399 bp, Zea mays
agcattacactacaatggtgcgaacacttgttgatttccaccataagtgagctcattcgatgtgggattgtgttgagttcggagaggtataggccgtctcctctcatacaatcgtgcatgtagagaagctatcatcgaccactgtatatatttagcgactttatataaatatatttcgttaaactatgggtgtgaattacgctatattttatgaaccaaacagtaaccactacacgaaaaagataaaatttccgaaggccaaagccgttggaaataaaccctaaaccgtcgaacataagccgatggtcactggcttatattctacgacagccgtccctccggcggaatggggcaaaaataacactattcttgacagcggccggcaaacatatactatgc

SEQ ID NO: 39705 - DNA, 330 bp, Zea mays
atacccccgagataccaaaaaccccatttgaaccctggaaaaccctaagtccagaccctatgggcctatgtgcaaaaattgtgcacatatgaactaaagtggtaaattacaatattaaagcatattaagtcctttggttcacaaatatgtgaatgtgcaagataaaccctaagatttggtctatttgcaaaatcacctcttaagtactatatagcctaagtctgaatttcagaagatttgctcaacttctgagccttgtaactttcaaactctagggtctttgccctatgtcaccacatcatagttgtagaccaacatatgagaaacaac

SEQ ID NO: 39706 - DNA, 394 bp, Zea mays
agcttctcctgtacaagtgtcgcactcaatgctgagtgtttatctgccacatacaatagcaaaggagcccctggcataagtggggttagtgttgttagatcaatcacgtattgcttcagctcttcgaacgctttctgctaagctgaaccccactgaaagacttcagccgacttccgcacttcaaagaatagtaaatttctttctgctgatctagatatgaaatcaattcaaagatgccaatcttcctgtcagctgctgagcccccttctttgtgcttggcggttccatccgaatgataacttcgatcttgtttgggttatcttcgatccccttcgttgaaaccagacaaccaaggaactttcccttcttcactttcaagacaccattttctgga

SEQ ID NO: 39707 - DNA, 479 bp, Zea mays
  unsure (1)..(479): unsure at all n locations
ccagctaagccaggaagagcataagcaataatatgccaattgtcttatcctanctaccggtgcataaggttcaccaaagtccaaaccttctacttgtgaatattccttggccacaagtcgggctttgttccttgtcaccacaccatgctcatcttgcttgttgcggaatacccacttggtacctacaacactttggttatgacagtggaacttaatgacatacctcactcctcgtgaagatgttgagctcctcttgcattgcctacacccaatccgaaacttttattgcatccttcaccctgcatggctcactagaggacacccaagagtactgtcacaacaatgagtgactcatgatcgagtagtacccctaatgatatcgcnaggatgagtcacgactgactcttgatcgctggggacctcaggtgcggctttacccgacatctcctgcttgacaactattccctgataatgctctc

SEQ ID NO: 39708 - DNA, 318 bp, Zea mays
cttcaaccagaacgtcgttgatgggatttttttttttgaacgacgagctccacttggtgggtgtacgatgccttcggtataatcatagttcgtgatttaccataggtgggcgccaatgatgttacctgttccctatatgctatctcgcatgaactacgctatacactagttaatggatctagaccttcgttcttcttagtattatatcccctaagattattatgatttatgatgaacgatatgaacgacaatatcttcattctttccgaatgaaatggaaagcaggaacatgtgttccatatgaagattattaatatt

SEQ ID NO: 39709 - DNA, 358 bp, Zea mays
  unsure (1)..(358): unsure at all n locations
acctgctgcatgctatctcgaatgacgatctcataatactattttttttctaaccanctcttgatttacaacttttactctgatagggtctatgagaaactctctcatagcactacagatgatcatgctacgagcgccgtacttgatctaagtttgtctaaaaaccctctctagctatcgagaagccctattctctatcttatccccctcccaagaaatttgaatggatccctgatcattatctgcttcctggctggtgaaggactgcccttaccttaagatttcgactacacggtatgacatatttattatagtggtttctatcctaaattgcttattcccttacttttatactttg

SEQ ID NO: 39710 - DNA, 438 bp, Zea mays
ggaccttaagcaccgcggctgcaagctggaagttcttcattccccatgtttttatcgacgatgccacagccagcccatgctagtcttagcaattaagcatgcatctagaccagcctcctcttttgcaaaatcaactaaataaagtttgtcgtctagtacacccttaaaagctaatgaaccgtcacttcttctaaagacagacacatctacattggtgaataaacagttatatcccatattacacagttgacttacagacaacaagttatatctaagtgactcaactaagaacacattcgaaatagagtgctcggatgaaatagcaatttttcctaaccctttcaccttgccttggttcccatcaccgaatatgattgaatcttggggatccttgttcttgacgtaggaagagaacattctcttttcccccgtcatgtg

SEQ ID NO: 39711 - DNA, 396 bp, Zea mays
agcttggtcatttcattgctaactgtcccgactttgtatttgatctcgatcaagggaacaagagggataatatgaagaactataagaaggcaaaaggcgaggctcatcttggcaaggagtgggattcggactgcttttcgtccgactccgacaatgaatgactcgccgccaccgccttcaacaagtcattcctctttcccaacgagcgtcacacttgcctcatggcatgggagaagaaagtaagcactcataatactagtacttatgcttcttcaagtgaggatgagtctagcgatgatgatgagatagattactcatgcttattcaaggattagatagaaccaatgtagacaaaattactgaattgattgacgccttgaatgataagaatatact

SEQ ID NO: 39712 - DNA, 292 bp, Zea mays
  unsure (1)..(292): unsure at all n locations
cagagcagcagcngggggaccacaccaacaattagttctaagaaagggcacccagtccgtatgaacaccgaaaccatcaagaggaaaccaggggaatccgagagaaggtgcggatggcacaagcccctcatagcaactgccaagcaagcagaagccgcgatgacttgagaccagaacacgttgaacagcaccggagcttgcaggcagatacacgaatccatccctcaaagtgcaaggaaaatgagcgaagaagcaacccaaaccctcagccaactcgagacagatccttaag

SEQ ID NO: 39713 - DNA, 411 bp, Zea mays
  unsure (1)..(411): unsure at all n locations
agcttaatgcccctaagaaactgtctaactttgttattggcaangctcccatgcctcaagataacgagggctatattttatatcctgctggttatcctgaggataagattaggagaattcattctaggaagactcactctggctctcatcatgctcttatgtataagaacgaggcatctagctctaggcgttctactcatggtaaaatgcctaaaaagaaatctcctattgcatcaaatgatcataacatttcatttaagacttttgatgcttcttatgtgcttactaacaaatcaggcaaagtagttgccaaatatgttgggggcaaacacaaggggtcaaagacttgtgtttgggtacccaaagtgcttgtttctaatgtgaaaggacccaagaccgtttgtgtaccta

SEQ ID NO: 39714 - DNA, 287 bp, Zea mays
  unsure (1)..(287): unsure at all n locations
cgggacctaagaccgtacacagcttccactatgaaatgttagtagcacactcttacggttcgccgtatgacattagccatcctttgatgcatgcttaagaccagcactaattaattcgcgaggccagttttgcgtgttcggaccccctggatcccgactctaaatactatggctctctccgtatagtaatggggcatgttagctntaccgtactggaccacactaaacgggtgctctgccccggaccacccctgtagacaaatgtgcattctttataatcggacccc

SEQ ID NO: 39715 - DNA, 402 bp, Zea mays
  unsure (1)..(402): unsure at all n locations
agcttaaaaacttaaaaagctcagcaagtctttgtgctctttatctaaaaanagagtgagcacgagcagatggcaagaaaacgtacctaacgagctcgcggattgctcttatatatacccccagtgcgttgaaaattgaaagaccccgcttgtcaatgaatgttgctattctagctaaaggaaagtggttttttcgatccttctgcttaagggcctctagtcactgtcccaattcaaatataatattattcttacaaaataatattgtgaagggctacttttgggggccttctgcttccgaaggttcttataaacaagatttatcagtgtttctacagtatactgtgtgaacaggtatcctcggactcgagtctataccacacgtctgagatgcccaattat

SEQ ID NO: 39716 - DNA, 420 bp, Zea mays
  unsure (1)..(420): unsure at all n locations
agctcgacctggaatctaaccttaattagtttttgttagatggngaagagaacaaactactttcatttgcttgccaagcatataaagaaaaaactgatgatctttactctttctcatggtgatattctggctcatgatgatcatggcattaaccaactggcgacttctttttataaagatctctttggaccttcttaaaactacaccatttctttggttaatttggacatgaagcatcttgaggagggagacagaaaccttcttattagtcctttctctttggaggagatcaaagatgttgtgtttgctctgaaacacaacagtgctccgggtcctgatggttttccttctgaacttttccaagggttctgggaagtcattaaaagcgattagtttaatctctttacgtcctttcatgat

SEQ ID NO: 39717 - DNA, 360 bp, Zea mays
atggtttgcacggcacagcgcccccgtggaaccgattctccgcgagcggttatcaccggcggaggctgcatgacctcctacttgttatccatctgcagcggaatttgctcctccttcatcaactccttcttgggcgataacgacggatgaagcttgctgctttctacacagtctacgccttgaagagagggacccccctcctgccgcatatgcctcatgcccaatgaggacgataccggctggctgatattttcactgctcaattgggcgcaagtgggtggcaatatattgcgggcgaagagaatggcgtgcatagttgtgctcggatgcgcacatggtttgcgtctatggtaaaagacc

SEQ ID NO: 39718 - DNA, 328 bp, Zea mays
ctcgaacccaagcaattgtccttttgaccctacaactatatgctcattcaaacattcgctttcttttgagcgacacggagcaccacatggtgatatattatctaaacgtgtacttgtgcaacaatgagggtcacatgaagctaaactgagaatactaccgcatgagcacaatcgagcatgatatgagcatcgacctaattatcatgagaatatgacaacagatcatacttttcacctagagcaagcttctctaacattaggaactctagcttgctctcaagcatggcagtaccattgtaagttgagcaacacaagataaatcattatc

SEQ ID NO: 39719 - DNA, 263 bp, Zea mays
  unsure (1)..(263): unsure at all n locations
aacggaacnaaacactgagggcaaccgggaaagagacttctttatatggcggcagagagttcatagaaacccccccccgcatatgaatcgcacacaacctgagcgccgccccaccatctagttgcactacaaaaatcgtatcaccctaaatattacaggacatcagagtaaggaccaaacgcttaaaaaaaagccgcctgctcacgcaatgggaatcatactccgcgcaggagccccaacagatgagacctaacccacggata

SEQ ID NO: 39720 - DNA, 341 bp, Zea mays
gaaacctgatgaagtgttcagaatggtcatggatccttctattttgctataagaactatttccaacagttacagaatcaagtggaacattgccatctccagctgagacaagaattgtgggtgttaatacagtaacaaaaggaacatggtctccacaatagttctcttcacttgataggccaatcttgttcagagctctaagtcctgagcaatgtgagagaaacatcatcactcatatgaacttcatcaccattcaccaggttgcattgtgccaacagcaaagatgtactgatttgagaaagacaaaatgcacttctaccatatcaagttttgatttcagac

SEQ ID NO: 39721 - DNA, 411 bp, Zea mays
  unsure (1)..(411): unsure at all n locations
agcttanccagaagcatcgggaacatatttattttccagatctgggtaagtggtgggcggaaaatggcaggcgacgaatctcgaagccatctttagccggtaaaaaacttatgtttggtacttttaccttcttctttgaaatttgtacctttcttactgtgctgtttgatatatacaggatgacgaagctgaagattgacaatgcttgaatctgataaaactgaagacgaaaccttaactgtagcttaaaattgcttataatgtgcttttctgcaaaaattcttggagaaactcttgtaatatagatatggagtaacttatgtaaatttgtacatacctttgaatatattttattttctctaatcgcatttaagctgctttgctcggagacgaaacttctcttttgagccg

SEQ ID NO: 39722 - DNA, 344 bp, Zea mays
ttcaagataatgatggctaatatttatattctcgtggttatcccgaactcatgaattagagaattcatggcaggaagacctcaatcctggtttccaatcatgctctttttggacaaagaaaggaagcattatagctcttaggcattctaccccatgttaaaatttcttaaaagaaaacttctactgcatcaaatgaagcctaatggttcatttaaaaatatcgatgcctttttatgtttaactaacaaatcacgcaaagctgttgccaaatatatttggggcaaacaccatggcctcaatacttgtgtttggaacacaaagtgcttgttctaatggaaagaccc

SEQ ID NO: 39723 - DNA, 333 bp, Zea mays
ctgtccttatacttttattgtatgagttccaggttagggccatattgactaccagaaaaaaagatagaaaaagatgtcagaaatcatacagctcatatgtgcaacgcacagtaggtcaacactcagtcacggtagcacatgttaataggcacatctgttcaaaatattactactttactagtcagtgtgtccttgccttttgcatctgtcagtttcctgagttacttgaactatatgtacatctacttctaaggtttgaagtctgtattaataaagtgatgattactgtttgtttggctccgtaaaagacatacacaatgtttactgccttct

SEQ ID NO: 39724 - DNA, 426 bp, Zea mays
agcttagaatcaccttgacaacgaatatactttatttccttcttggaagcataatttagccccaggatcaatgcacatattcagcagcgttgttggtcataatacccaaaccctcacgtagtacagcaatcttcagtagaggggtggggggacacaataaacagctaggcatgactattgaagaaaagataaaacagcttagccaagactggtctacataccacagatccatctaaccgccgaataatgactccagcacctgatttcccaggatttcctttacaagctccatcaaattcaagaatacaagagagctgtaaaagatagcgtgcattggtgggaagagctcaagattccgaaaacagtgaaggtacatcacaaatatacatgcagagatcaaaccataactacataagtacataacag

SEQ ID NO: 39725 - DNA, 496 bp, Zea mays
  unsure (1)..(496): unsure at all n locations
ctcaagctccatgcagcttctgtcagacatgagaggagaactgcgtttttctgtcttacactatcttcttnggcacaccatgaagaaatacgatccgagacatatacaattctgccaatacggcactgctgtagttggtcttgacaggtatgaaatgggttgactcggtcaagcggtccaccactacccaaatggtatcgtagccggctcgagtgcgaggcaatccgactattaaatccataccaatttcatcccatctccactgagggatctgcatctggtgcaacaatccagcacgtctctggtgctctgccttaatatttctgaactatcgcacatagccacatgctctgcgatatccctctctatttcgtaccaccagaatttcttatttagatcctgatacatcttctcactgtcagggtgaatcgaatatgctgtttcatgaactttcttacgaatcaactcccgaatggactggacattgggaatacac

SEQ ID NO: 39726 - DNA, 427 bp, Zea mays
  unsure (1)..(427): unsure at all n locations
agcttgccgtggcggcagcagctgcagctgctttgtcttctacgtaattgatgcaacattgtagtaatcgcacgaagagcatggcggcgctggcaactaacgccttcttttcattgcatgtgatctttagctataacctcatttaacacactcccagtggtgtccgtgggaggaggaagccgcaagaactttcgccgtagggtgtcgactgaaaaaattcacttgtagctgaatagtttgatctctagctttgtcgtgcctccggcctttaggaaagcgatgcggcatgatgttataaatcctctcncagaactgacaatatcgcattgtaacccaagaagccggtgcaagaacctgtgaaactgcattgatgcgcaattatgcgattcatcagttgtataacacagtggaagatgcataattttat

SEQ ID NO: 39727 - DNA, 495 bp, Zea mays
  unsure (1)..(495): unsure at all n locations
aaaaacaanagaatgaactgtgtgcaacgagactgcttctaattcaatatcactagcatcagtctcaacagataaggattcctcaaaactatgaagtgccaacacaggggtactactcatggcttgattcanagtctcaaaagcagatgttgcatctgaattccactgaaactgctttttttttagcaatgaactcaaaggcttggcaattatttcataatgtcgcacataatttctatagtacccaattaagccctaaaaagctcttactctcgtaacagaagtangaataagccactgcaacatagcagaagtcttgctgggatctgtagccacaccttctgaagaatcatatgtcccaaatacaccagctctctcttgacaatagttgcatttggactctcttatatataactgattgtgtctgagagtatataagatctcgctcaaatgcatcaagtgcactccaacgatgactataatcaaatgtctcta

SEQ ID NO: 39728 - DNA, 55 bp, Zea mays
ccggatccttaagcacctgagctgcagctggggcctatgaggactactctctttt

SEQ ID NO: 39729 - DNA, 425 bp, Zea mays
agcttgcatcccaagcggtgggccaggtaccttgttaggagtcaacagcaccacacacagcaagaacaggtggtacacggataagtgttaacgctgcttgataaataatactcaaaagtaccttacaaaaaggaaaagtattacgtccgcggaatcctaattccatctctactctgcaggtataaactaccaaacaaatctcgttggaagtttgcgaccgctgttcttgtgaaaccttacaagacagcacgacagcggtgatggccgcctcaatgcgtgcgccattgcgaagaggtgctcgcccccgtcctcctacggggggcgacaacgaggccattaaaaccaaataatttgaagctctgcggcaagtggtgctggtggtcttaccaacggatgcaaccacctttgcactgggcaggctcacc

SEQ ID NO: 39730 - DNA, 423 bp, Zea mays
catcttaattgccggaattgccatcaatgaagcttcctcattcttctcatccccccttgccttatggcaaagggagatgctatagtcaaaatcatcacccatttaaatgacttaatgatgatgacgatatcgatgatgtcgatgatgatggctattcatatgatgatcctgttacaatgttatgtgaagccgatgacttcctccccaagaaaaagaaaaatttacgccttgaaggaattgtataaaaacctccaagtgtcttttgaggagctcaagatctctcaccatgatctcatagaaaattgttagaagcttgctgatgctcaaaaatcatttattgtgcatgaagttgaagcgggcactaaagaatgtggagttacttgtgacttacttgataatcttacaagtgaaccactacctact

SEQ ID NO: 39731 - DNA, 301 bp, Zea mays
tcgagtcccaacgggtcaccatgtagagtgagttcactagcttttccttctaacacgaatcctattgtcacctgtgttctgaaaccacgaaagaatcgtttcttgtttcgacaactcataaatagattatatgtgcacaactttaaaaaataccgatgcgcatctgatcctagatgttgtacctccacaaaatgctgcgtgtattaatcttgagaataactaaatcaccacggacatatcgtgttatattttaaaaatgattggatatataaacttcagcacccgctataagttggagagc

SEQ ID NO: 39732 - DNA, 367 bp, Zea mays
ttctctatataaacatctggggcctattacattatgttaatacacatatttttgctgtgcacacccccatgttcaagaactttatgcttcgtgttaccacaagtggctgtgatttcatgttcaaaatttccattcatgatgctttgatgacctgtgctaaaactttcctacttgggtcaatgttgaacgtggatattagtaaatagtattggttatttctgcgagcagcgaacaatacatttgttgcattgatatgcaccattcaatacttgacagattgatcctaatgaaaagttggatcctgaagttgaagatgttcttattgactttccagaacattttgctgagtctgaagttatctactctc

SEQ ID NO: 39733 - DNA, 389 bp, Zea mays
  unsure (1)..(389): unsure at all n locations
aaaaaccagtgactgaccgacaatacagaaactctttttttatcctggacatatcatgaacttatagaattttaagaagacacaccatattgtcacccccttttttaattccacataagaagccggctattgaaacacagtatatatgaaggttaaagaactataagctgatttctatatcaatcctaaatcatttataccataaaatggacctaccatcaaaggctctgccatttctgttgagtatctaccattacttctttgtatgagcgggctcncatagatatatactatgaaccttccgctagttctggttcacagactatttagttattgggctatattcaatcccacaagatgatgcgaattaacaatatgagaatattacc

SEQ ID NO: 39734 - DNA, 404 bp, Zea mays
  unsure (1)..(404): unsure at all n locations
agctntccatgttgtgcttgaacattccaattctagcccgcatctgaccgaggtgaccgtcacaagttggtcagcatgttcaaatccttttccctttcggtcttctccctgattcctaagcaaaacaagagtgcacgggtctccatggtctaaatatgatggacatgaactcaagagtgtaatcacctgatggttgagttgaccagcacgagcgcgagtaatgggaccagaaattggtacttgtattggtatagacgcatcagtagtgtggatgtcttcatcacaacctgtgtgctgagaacacactgcacaacaagactctatacctattggcgtcatgggacaatgtggactttctcttttttgctggtaatgggaatctatctgaccagttcttcaaatac

SEQ ID NO: 39735 - DNA, 380 bp, Zea mays
tactcagctttatttcactacagtattctcaactgatggtcttttgtattgtgaatagaactttgtctacttgttaagggcggctctaaagaagaatattaagatgtgggaggactgtttgcctcatgttgaatatgcttataatcgatcattgcattctactacaaagatgcgcccattttagattgtatatggtttgttgcctcgtgctcctattgtattaatgcccttgccattctttgaaaaactaaactttgatgctactaagcgtgctgaattgatgttaaaactgcctgaaactactaaagaaaacatagagcgtatgaatgctagatataaattgctagtgataaaggagaaacgatataaatttaacctga

SEQ ID NO: 39736 - DNA, 391 bp, Zea mays
agcttatcttaaaggtgaagaatattttttttttgtgctaaaggactcaaaggggtcttcttgagtttctttgatcttaaagaaaaatatgttagtttggtgatcatacttatcatatgcttcttgttgtattatatggtgataatgcaaaattagtgcctccgttgatatgaatcgaatggtatctactgtgtttatcctgtgatagatattcatgtggttctggcgccttaacatcggtatcttaatggtgaataatggtaggatgatattcctatggtatatttatttaattgggggttaactctgattctgtgcatttgtgtgttatacgcatcacaggttgattttttacacaatgcatcccacaggtgctaaagtgtagcaatgc

SEQ ID NO: 39737 - DNA, 430 bp, Zea mays
agcttctgtcagtggagcaaactggagaacttttctctcttccgctctactggaaataggagtaaaagacagcacagtttagtgctgcaaaataaattatgcgatacttaaattcttctcttattgcatactgtaattactggtttataccccgtggcggaggggtcaacaaaatcacttgacgaaatcaagcaaaactgtaaaacacaagtgttacgaagaatttaggtgtcatatccatagatacaaattaagagaagaaactatatatacaaaagaagcaaacgtgtcggtaagttcctactgactgaattcaagccatatgtatttcgttgaatgtatatctccttgaagggctcgtggcacccggaaggggacagtgttaaacaacctctcccgtagagagacaggacttcctggttcaccaaac

SEQ ID NO: 39738 - DNA, 379 bp, Zea mays
gcttcatatcgagattcttctgttcgtgctcgaagctttccgatttaggaggagctcactgtgtaatctggcaatctcggcttgggcctctgtcagtgaaccctccatcgtttgaagaacaaaatctttattttcaagagcagcttcatgatatttaattttgcgttccaagcctccaattataacctcatttttcttatcttcgaggtcctgttgcatcctcaaggctgtacttactagcatactctgcgcaaaataaccttcatcagcgatcacctctctccgtcaacagtgaagagctgaaggaaaataacttaccttgaacatagaatagaataaactactgacgatctgcctgtcgccgtagcgactgatgttc

SEQ ID NO: 39739 - DNA, 299 bp, Zea mays
cgagctgcacacaagcaagagaggagaatttttttcccagataaaacctcaagcggaggagcaccacgcacccacaaaacgccacagacactcacacgaaacaaaaaacccgggctcgccaaaagccacacaaagaagcaacaaaccaaaacaacgtaaaggcaccaaaccaactggcggagggtcccggaggcacagacaaaccaatgacaaaaaaacgcgaaacaactctcacaaggcaaaagcacagcaaggaaaaaaggcacctaaacggccagtagacggcagcacaacacaag

SEQ ID NO: 39740 - DNA, 424 bp, Zea mays
agctagacacgctcaactaaacgattttttttatataattatcatataagctaacgcgatccaatctaatgtggtctacttaaacagattagtgatactagcagaatagattaggccctaatatccaggtgtagaccaacttaaccatgatcagaagatctaacccaaccacgttagacatgatggattgcataatctgtctatccccacctaacatcaaacaagatttcgacctacaccatgtagtctacctcatccatatctatcttaaccatattccccaaccctgatgatatacactaacctcgaatcaatgagaccaagaccggagaagaaaagatcgacattgacaaggatagttataatactcaaagtgaatctcgagatgaatcaagacttacacattttggatgaagtcctttcc

SEQ ID NO: 39741 - DNA, 418 bp, Zea mays
  unsure (1)..(418): unsure at all n locations
agctttcttcggcgccataacgaagatctattttctcttaaagngtncaaaaaacttcaaagagtggaagtgagttcaccggaggtgggcgccaatgttggggacttgttctcaagtgctatgagttaagaacaaggcaacatagaaaatgttaatctgtaaagtccttcctccttcgaaacattatttcccttatggtataatggtctactgacgaaagttatgaaggacgtaccttcataaattcattaaacaatgacgaaggatgaaatgttaagaatataaaagacagcctggacaattatatattattattaggcataaacagaaatatcgttgaattacaagtgtaccttcaatcgggaggagatgacagtacaagcgtgacgccaaaagcgaatgccaagtcatcgtgaac

SEQ ID NO: 39742 - DNA, 468 bp, Zea mays
  unsure (1)..(468): unsure at all n locations
tgtggaggttcttcatccacacatgtgctaagcggtgatctcctttcagcccatgcaagtcttagccattaagcatgcatctagaccggcctcttcttttgcaaaatcaaccaaataaagtttgccgtctagtacacccttaaaagctagagaaccatcacatcttctaaagacagacacatctacatttgtaaatagacaattatatcccatattacataattgactgacagatagtaagttatattcaagagactcaactaaaaacacattagagatagagtgctcattggatattgcaatcttgcctaaacctttcaccttgccttggttcccatcaccgaatatgaatgaatcttgcgaatccttattcttgatgtacgaggtgaacattttcttctccnccatcatatnggttgtgcatccgctggcgataactcagcttgagcccncggatgcataaactac

SEQ ID NO: 39743 - DNA, 348 bp, Zea mays
ccagagccaacccttgtgacgcttaacaatgtcacacgtgtctatttcaacgttattataatccaccaagtatagctgaccctttaactctctcttatatgctattgaatcatctactcctgttaaagaccgagacaccaatatcataaaaagacagtcgttcccctttgactatttgagaaacagatacgtaaaacggaatggatagaagctcaacaaaacattggaaataaagggcggggatatagcaatttatcccatgctttgcccaaccgtgatatccatacgccgaagtgattgcctgatgggaacctggtctttctcatatgaggagaacattttcttctc

SEQ ID NO: 39744 - DNA, 351 bp, Zea mays
actctatgggagtggagatatggcgaaaagttcgtgttccctccgttacatgacgatggactgtggtgtatctatgctcttcgttggagtgaacacgggctggtcttgaaaaaccctgcggccatttgacatattcaaaggattaatactacatatgttgtgttggttgagatccccaaatggtcttaaatgattttgatcgccctacttcttaaatattaatacttgctattacttacacttatcaatcattgactgatggttattaaaacactgctgtaatgccaagtgttgactatgaataaagaacctttatgccgttacttacttacctgacactaaaatggattt

SEQ ID NO: 39745 - DNA, 421 bp, Zea mays
agtcttcttcgaaggatttttctgacaaaaatatttctctatgacaatatgagcatgctgatttgctatcttagtcagcatcacaggggctgcccttaccttcggatgtgttcttcgaaacaataaaagcaccttcagtggaacttcttgaaagagcagtcctcaatatatcttctgtttatagcgaagactggagaactgagattatctcttacccttcaaggatatttcctttcagatgacgatacttacaacaaaggatagatgcaagagcttgtccatatgtcatgatagatggagagatgtacaagcatgtgagttgtgctccattactcaagtgcttatccacagccgaaggcatataattgatgaaagaaatacatgcctgcctgtgtggatctcacattggatctatgccgtt

SEQ ID NO: 39746 - DNA, 409 bp, Zea mays
tgccaatacttgtcaaagcaacaacacctgccagcacagttattgcttaccataccagagaccaggcccttcgcgtgctggcgactgtatatgattagacctctcaagaaagctcaatgaggatacactcatgaactgcgtgcaattgacaaatgcactatatggatagagctaaatccattgcttccttatccttagcttatgccttggaattcatacaaaacataatattcagattcgtgatacccagcagcatcattactgacttttgatccaacttcacaagttcaaacattttcgactatctgcgagcaataaagcattcatgtcaagtatgcatatgttgcacattctacagccaacgggcacgttgatcgtagcaacagaatgatattggaggcactcttga

SEQ ID NO: 39747 - DNA, 386 bp, Zea mays
agcttggctcgaccacacgacaacatcctcactcttatctcattcaatggttaaacaacagcggttagttcaaggtaacaaaaataacaatggggcatttctctaatggctcttaccatgacattgctgatttctatgtggagagcatggatgctagctctcttttactgagacatccctgggaaattgatactgatgctattcaccatgggtcaactaataaatatactttcatgcatacaggaaagaaaaatcgtgtgcttcctatgactcccactgaaatggttcactttgaacattagaaaaaaactaatgctaatccaaaaagtgttttgaactcttaaaatcaacaacctattaagtttatactcctactttgctatcca

SEQ ID NO: 39748 - DNA, 331 bp, Zea mays
  unsure (1)..(331): unsure at all n locations
cagctngtcaagcatatttaggtacccttctcttgttgggtccttcacggttagncaacaaagaactatgaacccaaatgtcctttgtgttagcattaagtaaactcattacctttctagcacaagttacaattttgggttgcctagttacatgtgaattaatcgacaagataagagtaggattgtctccaatgggacaatcctcgcattgatgtcccttcttctcacaagagtagcaaaggcgctttttaagtaatgaaactatcttctctccggtctgttgctcgctcatgggagaaaaaactttttttcttacccatgcccctttgtt

SEQ ID NO: 39749 - DNA, 197 bp, Zea mays
actcaaccgactaacacgagagcactgagctctgaattctttaaccccttcttcgtgctgagcagggcccctagtaggggccgcccgtacaatgcaaacctacaattaactacacttaaactctcgacacgctgttagaccccaaaagccgatgattaaacaaaaaaatacctacctcaggctccttgggcccagtc

SEQ ID NO: 39750 - DNA, 410 bp, Zea mays
agcttgtaggtgcaactggaaaaacgtcacaactgaaacaagcatggtttctgtgacacttcgagtgaaaccagagctaactcttccagcaacgtatgtttgaaatatgtttctggttatctatggtaatttgctctcccaatttttcatgtgttatctgttacaaaggacacaattacccagtttgggatgtccaagtatgtgaatttgcgaatagccatttatgatgttgaccttattataaagatattagtactccctatgcactatactatttgttgatgccttctgtatttatatttttatgacagttcagcccagttggccattactttgctagcgcttcacatgacaggactgttagaatttggtcagttgataaaatccaacctttgcgaataatggctggg

SEQ ID NO: 39751 - DNA, 379 bp, Zea mays
ttctccgaacgctctaattatggtatgaatgcaaagtctcatgcctctcatagaatataactataaacagattgtatattacatcgtaagctacaatatcgtacacacttctacatttcaacaagtttcttcgacggcatacaatcctcttaaacactattgctgcatcattgttctataggtgattgacaaccttgcacaataatggcttcggcatttgtctaattcatcctcccgcttgcggtggaggcccggagatgcttaatctgctctctgagggaataaaagataccgctatattactattacaagccgagaacggatgcttggaaatagatattacgagcataatataaaccactaattaacacctatgtgc

SEQ ID NO: 39752 - DNA, 399 bp, Zea mays
tgctggggagaagactcactgttgcgctctctctaatagggaagtaccacatgactgccatatgtctctatccttattgtcgcgaccgcgtgctatttttgtgctctggaccacggacccttcattccccggcgtggcgcctacgtggtaactgaacttgctggcgctgtcgaccgtccgatttatggcatgctggtgagattagatgaatgctaccttttggccatgattgatcatagctggtggatcagaaatgaatgggggtgatgggcgcgtcatattttgaaaatttggtcatcgatcctcgatcctatggtcacgatcgcgtacccgttcaatttgattggtgatttattccgagccgataattcttgattgggctgttccattgtgggatac

SEQ ID NO: 39753 - DNA, 420 bp, Zea mays
  unsure (1)..(420): unsure at all n locations
agcttccgctcacaagctaaagctgaatcttgtgcctcaaagccctgcaaggagcaaccttttgaagccgaagcaataaaaattccagaaccagtattatgtgaagaaactgacaccgccatccccgaagcacctgccagcatgcgtgattacatgatatgacatgcttcggggaagaagctatttgaagaagaaactcatgaagccatccattttgctaaggaactaaaatatccgaagggggcagtaatattcaatggaacaaatgaagatgacttcttatactgcctgtctgataacaaagagctatccgtctgccgagagatggcgagaagcatatgctttncgaagcttgaagctgggttaagcgccatgaccaaagaggatctttcagacagtctctcgtacaacagtctgaac

SEQ ID NO: 39754 - DNA, 428 bp, Zea mays
ctctacatcgacctgccgcatgcaactcgacaacaccatttgcatttctcatttatttctgagatcaagaaaattagctcattcctcaacatgccaaagcgggtcctatcatgtggcttacagaagaaatccgctcattgatcttccgacctcactccttctaaaatgatatcttctctaacaacatgatctctaaggaagtgatgacggatatcaatgcgcctgcggcgagagagctgtacctgataattagcaattttaacagcactctcattgttacacaacaaaggtaccctttctagaactacgccatatgctagaagagatagtttcatatataaaaactgtgaacaacaagcacctgcggcaatgtattccgcttccgcagttgacaaagcaacactattacgctcttggatggcaagaaa

SEQ ID NO: 39755 - DNA, 250 bp, Zea mays
tctggatgaagacaatcacctctgaatatgccacttcaataaagatgcaagcagcacggccacttgatcagataagtacctcaatgagaagaagtccaagctgctgattaagctcttaaactcttagaatcagcctggaaaccccacgttactaaaggattctcattctccctcaaggtctttccaccccggatatcaaaatcgacaatcattaccctcaacaaggacctccttttaacctgtgttcaca

SEQ ID NO: 39756 - DNA, 414 bp, Zea mays
actgagccgcaacttgaaaagaaaactgcgctagttttttttcataagaagacagttcctataaatgataaaatcgacatgagcttggaaaaaggctaagattcaattaatcatgtggtttgcactgaccttttttctatgtcatctaagaacaaaaagagaaaagggaaaaggaggtgtttttaatgcaacaagtcaagacaccttatcgcataatgttcatacaccaacaagggtgaagggataaagagatgcttttgatgctatgacaaaaaccacacgatcacttcttgtcctctactgtgtggtgagcagggtcatctatcgaaagtatgtaataaatgtgaggtctctaaacaagtaaaattgtcttaatctcattcgcttaggagacccaaactatacacctgtgct

SEQ ID NO: 39757 - DNA, 426 bp, Zea mays
  unsure (1)..(426): unsure at all n locations
agcttntatagggagagcacatcttaggattttcatttgttcattttgagaaagacaggatctgtagcgcatgccatgcagggaagcaagttggagtccatcatccacacaagaacatcatgacgaccgacaggccgcttgagctactccacatggatctattcggcccgattgcttacataagcatcggcgggagtaagtattgtcttgttattgggacgattattctcgcttcacttgggtattctttttacaggacaaatctctaaccctagagaccttaaagggattcttgagacgagctcaaaatgagttcggcttaaggatcaagaaaataagaagcgaccacgggacggagttcaagaactctcaaattgaatgcttccttgaggaggatggcatcaagcatgagttctcctctcccta

SEQ ID NO: 39758 - DNA, 257 bp, Zea mays
ctagctgtggagaccagacatcgaagcaataaggtccggattataagtggtcacctaagctctgacgatgaagcacctgaagaccaatcaagaacggaatccacgtgggagtccgcaagacaaaggcttgcgtgttggcatccatgcttcctcaataatctaactgccaagcgaaagccagaagcctgaagatgatctttaagtagacagattcagcgtttgcaatcagctacgcagatgctcctccaggccagatc

SEQ ID NO: 39759 - DNA, 422 bp, Zea mays
  unsure (1)..(422): unsure at all n locations
agcgagtagntactcccttgctaatatcaccctaaaattggtcgtcttgatgatccctttgaatcgtcgctcaaacttgggttggaggtgccggttgtgcttcttcctccatcacatgatcatcttgttctcccccttgatcacacgccttctcctgatgaacctgttcatcgtcttgagttgggggatgcaccattgttgaggaagaaagttgatcttgctccaattgttcctgtggtcgcacatcgccaatcgccatggtgcacatttgcgggcgttggaacgtcttcttcatctacatcatcaagatcaacaacttgctctcttggagagccattagtctcatcaaatacaacgtcgctagagagatcaaccaaacccgatgatttgttgaagaccctatacgcctttgtatttgaatc

SEQ ID NO: 39760 - DNA, 402 bp, Zea mays
  unsure (1)..(402): unsure at all n locations
agcattaggcctctcggagttttaattgttttaattagtgaggctgcccaacaatgccagagggccttcggcgttatccgatcttttattgcaacgagggaccttatacaacagcatatctccttcacggtatgggcgcttgcggagaaatgggaaatgcctcattaaaccataaaagagacctactaaggtggacttatcanggtgaagaacacccctatagttggagataaattcgttgagccacaagatgactggttaaaaagcattgaaaatttaagtgatgagctgtttgggacctattctaaggccgaagacactgcaatgttatcaaccttcggaagccggaaaaaaagaagctgaatcgggtatttatgccatcgggtttgtctaccctactat

SEQ ID NO: 39761 - DNA, 421 bp, Zea mays
agcttagcaaaagatatttctagaatcaagaatattgagctcatgcctaagtctggtaaaagattgttcatcaagtggcttggtaaagatatcggctaattgatctttagtattaatgtaagatatctcgatatcacccttttgttggtgatccctaagaaaatgataccgaatggctatgtgcttagtgcggctatgctcgacgggattgtcggccattttgattgcactctcattatcacatagcaaagggactctggttaatttgtaaccgtagtcccgcagggtttgcctcatccaaagcaattgcgcgcaacaatgtcctgcggcaatgtactcggcttcggcggtggaaagagcgaccgaattctgcttttttgaagcccaagacaccaaggatcttcccaagaactggcaagtc

SEQ ID NO: 39762 - DNA, 377 bp, Zea mays
  unsure (1)..(377): unsure at all n locations
tcatgaatgataccttcngcgtcacgtaccggcagcttcattcgaagctgtctctttctgcaggaccttcggcgacgaatcatggtcccaacagtagccccttcgcggtgctagatcgtttttcgtaacgagcttgatccgtgaaaaaagtctcttatgcttcaggaagccgaatgtccgaanaacacctttcctgagctctgtgtcgagaaacgataacggtcccaccctgcatggttactatttggtctctgcggtccaccgcgcagtgggtgtgagcaactgtttgcctggtgtaaaaatcctgacgattcaccttcctacctgcagtactatataaacagaccggtagatgtgaagttaccacatcattcatt

SEQ ID NO: 39763 - DNA, 411 bp, Zea mays
  unsure (1)..(411): unsure at all n locations
acctgcagactgcaagctttaaagggagaacacgtgatatgtnttatcaatgttcatttcgacaaagatagaccttgtgcagcttgacaatcagggaaacatgtgtgatgctctcttcacacctagaatgggatgaccacctcaagacccctgtagctgctacatatggacctcctcggacccgtcttctatctgagcataggaggaagtaagtatgggctaactatcgctgatgacattatcccgcttcactcgggtgttcttttttcaagataattctgaaacccaagggaccctcaagcgctttctcaggagagctcaaaatgagtttgagctcaacgcgaagaagattacgatcgaccacggggtcgaattcaagatcctccagtggaggagtttcttgaggacgaa

SEQ ID NO: 39764 - DNA, 231 bp, Zea mays
acttcggcatctttactatgtactttttcttgacccctggcgtccaatctctaatgaagtctgccaacgcttgggactgaatctaagaattatgcacataatctactgcattattcattgattcccgaacccatttttcaaccctttcagcatcttctctatttgtcataatatccttcaatggttgtgaagataggacaattatattagttgcttgaaatagcgccgaag

SEQ ID NO: 39765 - DNA, 309 bp, Zea mays
  unsure (1)..(309): unsure at all n locations
agaacacattntgggactaactaatgttcattttgagaaagatatgggttgtagcgcatgtcaagcaaggaagcaagttggtgctcagcatccacacaagaacatcatgacgatcgacaggccgcttgaactactccacatggatctattcggctcgatcgctcacataagcatctgcgggagtaagtattgtcttgcaattggggatgattattctcgcttcacttgggtattctttttgcaggaaaaatctcacacccacgagaccttaaagggattcttgagacgagttcaaatgagttcggatta

SEQ ID NO: 39766 - DNA, 364 bp, Zea mays
  unsure (1)..(364): unsure at all n locations
gagtaccctaaccatgtctataaactctctaaagcgctttatgggctcaagcaagccccaagagcatggtatgaatgcctaaaagattttcctatcgctaatggcttcaaagtcggaaaagtcgatcctactctctttgctaaaactattgcaaatgattngtttgtatgccaaacttatgctgatgatatcatatatgggtctactaacaaatctacttgtgaagagtttagtaggataatggttcaataattcgagatgtctatgattggggagttgaagtatattttatgatttcaattcaagcaactccaagagagcaccttcattagtcaaacgaagtacattcaagacatactcacca

SEQ ID NO: 39767 - DNA, 387 bp, Zea mays
  unsure (1)..(387): unsure at all n locations
gctgtgggtggaggacagctcggatcgcggggtgcttgctgatgccgatagggtccgcttttgctgctaattgcctcggcacttgtgctcttatttcttcatcagagcccacggttaattttgtgacccgttatgttcagtcttttccaggttttgtattggccgatgagacatatgaagggaataccgggtgctcaatcgttgcttatatgcttgacgggttaccacaaacgctatcgcgaagacatgatggtagcaccctcccagttttatctatatggctacgagtgtatccatttcacgccataggatagttccacatccaaaagttanatagattgaaaatgccacgtttttggaactggaaggagtagacgcaaaagttac

SEQ ID NO: 39768 - DNA, 340 bp, Zea mays
  unsure (1)..(340): unsure at all n locations
ctctattctactatgttcaaatctctcaagttgtatctgatccatttatcactttggcctttattttctccccctttggcatcaagcaccaaaacgggatgaatcttggccctttaaccccattggctcaccaaaatcttcagtaagaatacaaaggcaataagagtctatagatgaacttggaataagttaccctctcatcggagtgcagtggaagtctttcatggtccaagtccaccttatccctttcaatcttccttcgagactaaatcatcaaactcaagcacatggttagtctcacagggtcaagtngtaacacatcttcccctaaacatgtgca

SEQ ID NO: 39769 - DNA, 415 bp, Zea mays
cagctgcaacttaaacttttagatactcgatttgttttttaatgcgaatcctcttccgaacatgaaaagaaggaaggtgtttttctcccaagactcaaaaacggcacctgtgtaaagtttcatgcatcccaaagaaatgagtaaccaaaatagatatattacattccgggttacaaaattgtacaccatattacattttagaaatttctcaaaaaatgttactccctcttcaaacgacttccgcagcctattcaggagccgaatgacacttcgccataatatcttctgcatctcttaattcgtcgcccccttggctgaggtccaatgcgcttatcggattgagcagacatgctacttgctattacaatccaaacaatcttaaacctaagatacaccgatagaactattttagact

SEQ ID NO: 39770 - DNA, 407 bp, Zea mays
tattggtggctctatctctctgatttccaagtgatgacgttcacttttgctcttgcacatgtgtcatctaattgattaatctacagcctgatcacgctgtgctgctactgcttgatcgacgagtgctgctgcgaacccgcgtcatcttcgtcagctagatgaagcatccgagtacaactctaaacatacgaacattgtaataaagagagcattgaacgataaatagtgcttctgcatcttaatgaatggtatcaatacatgttgactccgtagcaaagcacgagcatacacctagtaatatgtatttgtgtattgtgacttggtatttgtgagagtgagactattactaagttgaaataattgtctcttatgagttatgtttgtattataagattgttaggtatttt

SEQ ID NO: 39771 - DNA, 374 bp, Zea mays
atctaattcttgaagatctgttgagagcctgtgcgttgccagaacagttccggatgggattagaaaatgccttatgcagagcttttctataacaacaggtaccaagcccagtttgaagatgtcaccattttacgcgctctatggaaggagttgcacaactccgttgcaatgggatcagcccggagaaagcaagtgttggggcagacttttgcttgagccgaagagacatcagatggtcgagaaatctgaaatagcgcatccacgcagcgaactatcagaccaagaagagagacttgagttcgaactgagacttgttattgaagtgtaccgatcaagagtacaaattcgagtgaatgcagctacacccgtacttg

SEQ ID NO: 39772 - DNA, 53 bp, Zea mays
agaactcagctgacttgaaagacagctgctactactctcgtttttattgcccc

SEQ ID NO: 39773 - DNA, 509 bp, Zea mays
  unsure (1)..(509): unsure at all n locations
tctgtgatacatactgtaacaacccgggatccacaaacaccccttattgttttatactacacatctaatattcatatataaaatntcgacagtgtctcctttgaaaatcgcataaacggggaagcaacaaagtataaatagataccatgataagaaaacataatagacattaataatctgctagcaatgggaagacgaccataatgacatgaactgaattaactagtgcgcacgactagttaaaaacaaacatcctttgacaagaagtttctaattaaatcatgactgcgcctgagcagcgttattatgagagtgaaggtgtatatgctgctactttccactccccttgatgagcaacaagcacctgcattgagtaatgcaagagtgagatgaaacatctcagcaagctaattgttntgacgagatatttaaaccacatcgaattaatcaacattcttaaagagtcacaatcaagaccagaaatacttatagatatagaactcagtagt

SEQ ID NO: 39774 - DNA, 280 bp, Zea mays
  unsure (1)..(280): unsure at all n locations
aatgctatatgtccaagttggacaatactgacatatggccagntgtagagtcactgcataaaagtctgggccctcgcattgcccacttgtcctccagcacgggcgacttaagcggcatacctagccgccgctgaccctctctccctccctcccctctcccgctgcgccgccaccggagcaagccgccggccaggatggcggcagcagggatcacggctggcccgtggggttgctcggctaggcgggtccaatgcggtcggggaggttcttggctcggcgc

SEQ ID NO: 39775 - DNA, 407 bp, Zea mays
  unsure (1)..(407): unsure at all n locations
cctgcngcatgcaagcttgtggactaactataactaacatgagctttgtgtgtgcaacatgtctattaatttatggtaatcacgtgtaaagcacagagacgatgatcaactattaaaagtgaaggttaaacaggtttgtgccgatgagtgaaggacgaacgccaggcttagactaattaagggattagagagccgaagatttgtttgtggtggttgacgtatgaagacatcgaaatgtaagagtatatatggaatagtatatcatgttgaccaagttaagattacggttgaccaagtcaagttgttataggacattgtcggcgtttcgactccggggggtccctggaccgacgagtaaattgtcgctgcgtgtcccaagccagatgggtcggcgcgagacggaacac

SEQ ID NO: 39776 - DNA, 390 bp, Zea mays
  unsure (1)..(390): unsure at all n locations
tcagcagaatgacaacgaaggttctncattctcagataggcttatatgtgttaacatatgttgatgatattatagtaaaaagcaccaagaaagaaaatcacattgctgatctgcaggagacattcgctaatttcagacaggctggtctgaagctaaatccagagaagtgtgtcttcggagtaaaaaaggggaaattccttggttgtctcgtctcaacaaagggaatcgaagctaatccaaataagatcgaagctattcttcggatggagcccccaagcacaaagaagggggctcaacgattgacaggaagacttgcatctctcaaccgattcatatctagatgagtagagagaaatttaccattcttcgaagtgctgaagtcagtcgaag

SEQ ID NO: 39777 - DNA, 462 bp, Zea mays
  unsure (1)..(462): unsure at all n locations
cacatggattcccagaagaagaactctgtnattttcatcaactatctgagcccttgaccccttgcgcacaacagggagaacttgtctgaaatcacccccgaacacaacagtctttccaccaaagggcagcccaggccgtcccattatatcacgcatgctattgtcgagcacctcaattgcttgtctcttagtcattgatgcctcgtcccagataataagcgatgctttttgtagcaacttcgctgtcccgctttgtttcgtgaaactacatacagcaccatcatcaatagtaagtggtatcttgaagcgcgaatgggcagtcctcccctcaggcaatatggaagccgcaacaccagatgtagctgttgcaactgcaatcttgtcctgactgcgtanggccgcacgcaatgccttatacagataggtctttccagtcccaccangcccattcacaaagaacac

SEQ ID NO: 39778 - DNA, 325 bp, Zea mays
tttctttccctgctttcgcgagggatagcaatcgtccgggtatacgaaacccgtaacatcgaaaaccctattcgatcttttcttgcctcggcccccaaggccactatcatagcatcgtcttcggcccttgtataagcaccaagtaactcatcgctggttgcctcatacaatctaaccagtcatcattcggctcatcgaattggttcctgtacatgaatgtgtatttcagatagaccaatccaccttcttggaaccacagcagtttctttggcatttccaccacttgcgacggcacacttataagcatgtgctttggactagtcct

SEQ ID NO: 39779 - DNA, 380 bp, Zea mays
  unsure (1)..(380): unsure at all n locations
actaagcttgcttcgcttagtgaccacccgcatccaactatttgtgttacttctccaacggaaaattttcacagccatcaagaaaatgctcctcgatgacaaanaaggcaagtgggcagacctgttacctgaagcggtctgggcgctgaaaatgactgagtgcanggcgactgggttcacccctttccgccttttatatggaacagaggccatgactccgcaagaaataaaacatgggtcatctcgtacagtcgcgtcagccgtccncgacgtatacgagcctacttcgaaggacctcatcgacggagaccgcgtcttcgccctacaggctctatacaaataccaagctcaaacaaaagcatggcgcgaccacacagtca

SEQ ID NO: 39780 - DNA, 476 bp, Zea mays
  unsure (1)..(476): unsure at all n locations
agctcgacaatgaagagatggctctctttatttatagcttncggcacatcctcaaacaaaggaggcggaacgactaccattcccgctccaagaaggtttgctacaagtgtggtaagcccggtcattttattgctaaatgtcctatatctagtgacagtgaccgaggtgacgacaagaccgggagactataagaaaagaagaggtattacaacaagaagggcggcgatgcccatatctgtcgcgagtgggacttcgacgagagctcatgcgactcctccgacgacgaggacgccgccaacatctccgtcaccaagggactcctcttaccaacgtcggccacaagtgcctcatggcaaaggacggcanatagaaggttaaatctaaatcctccactaaatatgaatcctctagtgatgacaatgctagtgatgaggaagataattcgcgttccctattttgcaaccttaacatagctc

SEQ ID NO: 39781 - DNA, 265 bp, Zea mays
  unsure (1)..(265): unsure at all n locations
acgcaacaacgctccaatctatgtgatgtaccggactggacaagttacatcatgcttgtgaggattgattggtatatatatgccgaccagatatcaagatactctatacgatctattgcatataaacagacagaactggtgggatgcatgtcgtttttacagacatgtgtggatggattctcgcattggatcagntcgntaccactttggggtctccgttcaacaagcgagcattcttcttcatcatatgctgagctgatctgca

SEQ ID NO: 39782 - DNA, 387 bp, Zea mays
  unsure (1)..(387): unsure at all n locations
tcatcttcatttggcccattgaatattactggccccttccgatatttcaacttctttgcataatgaataacttcatgaatttctccatcagatagcttttttcccagagcatgtcgtatgatgtaatcacacatgctggcaggcgcttcggggatggcagtgtcagtctcttcaactaaaaatggttctggtatttttatcgcttcggcttccaaagtttcttccttcaagggctctgaaggcccagcttcagcttcngtttggtgtgtcggagcttcagaggaagcttcagcaatttcaacactcttttntggaagtgtgcttgaagacttaattgtctncaagacatctagtacatttaccattcttttcctttttgggtcacca

SEQ ID NO: 39783 - DNA, 363 bp, Zea mays
tcccctgcacgccgaggatatgcaggtctcggatgtcatggcacaagaagattgccccagtagcgaacatttgtagctccaagtgctatattcattatgtctctgggcccacatattggggtttagtacctttgtgcatgccccccttcagctataaaaggggaggcatgcggcgttacaagacagatccaatcttatgctcactcagacgctcacaagttcatacaagctctcaagcaatacatcacacagcggagtagggtgttacgcttcggcggctcgaacaactctaaatccttgtgtgttcttgtgtttcctcccagtttccaactaacaagcaaaacgcttaggcccctcctcatc

SEQ ID NO: 39784 - DNA, 380 bp, Zea mays
agcttgtactttgcctcaacatgacctgattggtgattggcgcgctgttttagcacgtctactgacgtgcccactgtcaatccaccttcagtcacgtcaactgccatatctgtccccgcagctgactgacccacggtccccacatctggtggtttcgtcgggccacgcgcggggcgcctcgttgccgctgcactggtttaaaataaccttttgtcttctgcagcggccccaaggaggcacgctatcgcgtgcggcagtttgcatcccgctctttccgcacccgaaatctggcacacgaactgtatgacttgtggacccgggcccccgtgtcagacactgggctgcctaagtcctaagtgctcgtcgaacgggatttcttg

SEQ ID NO: 39785 - DNA, 405 bp, Zea mays
  unsure (1)..(405): unsure at all n locations
ggccaatacttgtcaaagcaacaacatctgccagcacagcaactgcagaccataccagtaacctggcctttcgcatgttgnggactggatatgattggacctttcaagaaagctcaagggggatacactcatgtattggtggcgatcgacaaattcactaaatggatagagttcaagctcattgcttctttaacctctgctaaggccgtggaattcatacaagacataatattcagattcgggataccaaacagcatcataactgacttaggatccaacttcacaagttcataattcttcgacttctgcgagcaaaagagcattcagatcaagtatgcatttgtagcacatccaagagccaacgggcaggttgagcgagccaacgggatgatattggaggcactc

SEQ ID NO: 39786 - DNA, 347 bp, Zea mays
  unsure (1)..(347): unsure at all n locations
tccacatgccaaatgggttgagtttatctgaacattntcataccttgtgaaatgtagaaaaggtagagacaatgtggtcgctgatgcctagtctagaaggaatgtgttgttgaatcaactataggtaaaagtgttgggtcttgcagatttgacagaactatataatgatgatcctgaatttcagaaccatcaatcattgttagatggaaacgctgcaaacatatatatcatgatggttttttgttaagctaactaacttgtgtccaaatcttctgtagaagctttattgctgagtacatggggaggctacaagcattctgacaaagaaactatgactgctcactgac

SEQ ID NO: 39787 - DNA, 423 bp, Zea mays
  unsure (1)..(423): unsure at all n locations
ntgcgccacggagtcgctntaaaggctagcgttcccgctgaccaagttttgggctgtgttgatggtcccgagttggtccctgctggttcattgcaagctgcttcgggtggcgaccttacgccacgtcgtcaattgatttctcacaatttgggagtcccttcgttcttctccaatctccaggtactgtggtatattctggcctgacttttacaccatacgaactgctgtcaacacgctcatatgttctccatatcangcattggtgggcggaatggctagtcagctgaggttgcaaggtgcttctgttccagacagagtttcatctctggcacgttggaatccagtgttgctccaacatcgcgtctctaatttggaggcgacgaatagctggtagtactcttttgcttcttattgtctatctta

SEQ ID NO: 39788 - DNA, 180 bp, Zea mays
  unsure (1)..(180): unsure at all n locations
gaccctatgccaagtcatcaattgatcctctcacgactttgggaagttcctttcgttcctctccaatactccaggtatcgggatatattctagcctgacttttacaccgcatgaactgctgtcattacactcatctattcntcatatcaggcattggtggacgggatggctagtcatctg

SEQ ID NO: 39789 - DNA, 421 bp, Zea mays
  unsure (1)..(421): unsure at all n locations
actaagctggaggacataccaacgcaccatatgcagatctgctctctattaatttcttgaggaaaggaaaggggtcatagaaattagtcttggcagatggaggggaacgtctcaatgactgaggcacattntttcttggtagatagctcatggatttttatggtccaagaggaagtgctgctatatgaatatgacaacacccattaatcaacataactatatgaatacaatctgaaaggaaggtcggtttggtcagaaacacatggaggtactgatggaggctatgaaacatataaggtatacttcagtaaattatccccgaaacatttgtatcttttaaaataacatgtaatcttgttgatctgcgttactcaaactgcatcgagtttgtacttggagaagaatcctggagttattttac

SEQ ID NO: 39790 - DNA, 412 bp, Zea mays
  unsure (1)..(412): unsure at all n locations
gcttcttgctcaatttccttcacctatgtaacgatctatgagaattgtcaaaaaaacaaaggtcttctatgctgcaacatggtgtgtatctcaatttctttctcaaatcactcacaaagtgcaccgaaacatactcttctaatcaaattcacaggctccatagcacgacgtagctcctcagattcccatatataccgaagatgtgctgcacaatagtagaacccagtacttaagctgaacttaatcatcaaataatagaagcgaggtgcacaatcacaatgtgaggagcagactgcagaattntctaacatagtaaaattctaacacttacaaataaactttaaccaagcaccaaaagaacttaactccatcaagtcgcggagcacacgtcgtggagccggaagtccctctc

SEQ ID NO: 39791 - DNA, 208 bp, Zea mays
  unsure (1)..(208): unsure at all n locations
ctacctcggcagcgagcacgacgagagcgccatggccggagccggcgactccgcgcgggcgaaaaaggcacggggcggccgcggntagcanggcgatctctgttcgacggcgcgggaccggtaccaacgacaactggcaactaatcgacgggacagagaaaatgggggagagagaagagaaggtctgacggngaaattcacctcgggt

SEQ ID NO: 39792 - DNA, 240 bp, Zea mays
agcttcatgttcatggtccatagaaaactgtggtattatgttaattcaatatatatgctcaactcgtctggtgcatgagacttgccgattaaagtcaggtgctgtttggctgggtgaaacgagcggtaacggcacatggaatcacgagccggtgttatccgatgcagagtgatgattacccgccctttgtttggttatcgcgggcagcgttttctgttttatgggaatgtgatgacaata

SEQ ID NO: 39793 - DNA, 441 bp, Zea mays
  unsure (1)..(441): unsure at all n locations
tgttcaaggcctcgtgagagagtggcaagccgaaaacatcattaagattctcacgagctntgcagcactcagccaaggttgctgctttggatttctctcgaagaagagagttctaggaaggcatgcatgcattggcgcgacttttcgttccacaggtccatccagtctccagaggtagcatgaccttccactattttatgttgaccatggcaacccctttggatttttatagcagttccaatatatctctccactgaaggcgacgaaggcccttaccaaactagttctggtttaatctggattagaatccaatctagctagcctacaatccaagcccagaaaanaattcaggatgagttatttttttccttcggntaagcccagtatgggttgtcgaccagaggcttagatcatttctttactcttgtactcctggattat

SEQ ID NO: 39794 - DNA, 424 bp, Zea mays
  unsure (1)..(424): unsure at all n locations
gatccttaagtcacctgaggcatcaagcttgtcaaactaaggacataatgtattttatatggcttgctngcttcttaaattaatattgctattgccggtggcaataacaactggtgaaaggccatatatgcaatgaatttagtcaagaactacattgacacacaaaatatgtgatattcgtcctgaatgatggccatgctacatacattgagagagatcttttttttaattaaagtgatgaaaacatataatgagactctattgagttgaggaaggtagccatataccagtattgaatcttatgtcatcatacatgtcgactattgatataacaggcacttcatactatgtgatgtaacttggaaccctaagggaggggatagtatctgaaatcacataatgacaactggataaagtgtagata

SEQ ID NO: 39795 - DNA, 440 bp, Zea mays
  unsure (1)..(440): unsure at all n locations
tacctggcccggaatcacgttgctcgcgctcggccacgtgtttagctcgccgacggggcacaccaggccggccagggactcctcattgaagcagctgcactcctcgtcgtaggtcagcaaactgttgggctctntacagaggcgttccagagtcacaacgagctctgcagctgcaaccatcggatcacggcgcaatttcattggaactgtgccagcatgcccttgcgaaccatctactattacctatgcaaacaaaaacaaagactaagcgctgtaactactttccttctcactcgaaagcttggtatacaaagggacttggaagcaacccagaattattaatgacagttgtcgtgggcagctggagtatttaaatgtcaatgttaaactgaacaatcttggtgacagcaatgcctgtcttcctgaacattaattaacta

SEQ ID NO: 39796 - DNA, 474 bp, Zea mays
  unsure (1)..(474): unsure at all n locations
agcttgtgtcacttatgttcgatctgtctgactctccatgtgccaaaggatgaagaagagcatgcccgatatcacgacatcgttaaggtggaaaggaaaagatataacgacatcattaatggggaaaggaaaaaataagcatgtggtgtgaagaaattgtgtccactgtgtttgaggagtgtctatcgagctccaaatttagagaccaactgtggttaaatagtgtgttaaataaatttagaagtctatttacacttacacaattattggttgtttacttaaatttaaaatttaagatttagagagttgttttgatactattaaggctagtttggaaaaacttttcgaattcccggagatcgagaagataattccgaagaagatatatatttgcaaactaccccttaaagctactattatactcttcattanagacaatgtaatctcacgtgaacctgacaactaacgcgatgt

SEQ ID NO: 39797 - DNA, 406 bp, Zea mays
  unsure (1)..(406): unsure at all n locations
tctgaagaggttcgtcatcttgttcaagatgatcaaagccgtatgcttccacgcagagaacttcatcaggaaggcttccacaatgaggatgactggtatgaagatttccatcatggaaactntgcttttgatgatgcttctcctctctcaacagaattgcaggctacaccatggccacagtcttacaagccaccccagctccccatgtatgacggtcacacagacctgaagcaattcctaatgagctatgaagcaaccatatcttcgtatggtggcaatacggcagtcatggcaaaatcttttgtcatggccgtcaggagcattgcccagacttggtactcttctcttctgccagggacaatcacttcttggcagaagttgaaggatatgctgataactatcttcc

SEQ ID NO: 39798 - DNA, 396 bp, Zea mays
  unsure (1)..(396): unsure at all n locations
tttggaaatatgaaatctatcttcatcagctgactcctatttctatcattagactcaacgtcttcatctgggcactccgaagccaaggaatagactcgaatgccgaagctttttgccgagtgcatgagcttcattatcagacaaaggccagagaagatgggcttcatgagaattttggttgttacaatttcgcttaccgcaaagatatgaaggctccggtggttagctatcgcaccaagtggccaaccggttggaaaaacgagtggttctatgttaaggccgatgaanagaagagggagaagctaaagacgctagtactgagcctgctgagcttaagctntgggttgactaggcccctatgccgcatgtcgtcggngtcaccgtgccaacaagctg

SEQ ID NO: 39799 - DNA, 290 bp, Zea mays
  unsure (1)..(290): unsure at all n locations
accggacntaagcactgagcagcacttataaggcggaaaagcttttttggccacaagaaaggttgtgacacccccgattaaacaggatcccaacatgtatagcttaagccttatggctagcacccaaacatgataatgcctaaattctatataaggttaagccgcagcgaccacttatactaacttgacagattgttgatgcaattagtgagaatatttggctatagaacacagaaagtatagactgaaaaaatcaagtatagggagtgagttttagatcagcacaatca

SEQ ID NO: 39800 - DNA, 389 bp, Zea mays
  unsure (1)..(389): unsure at all n locations
cctataaaactaagcttgcatgcatgttaaatctctcgattgcatcctgtgcttttctaacctaaacgagagaaccgccgacaaagcgagtgaaaaagcttaactcggatcaaacttgacaagtcctaagtttaagcttttagcacttaaattcttacttcttatgcaatatgtggctcttgaaatatgcatgaggtactgcacttatggggagtattcaaaactcaaatcactcatgacaacccctagtgcaagccaaaatgcatatttcaccatttgcctatnttctctaaaaattatctagcctatggcaaaatattttgaacagtatatgagggtgccaatacctgtcccaacaagtgttattttgtgtgattataagttgggat

SEQ ID NO: 39801 - DNA, 382 bp, Zea mays
tactcatgtacgctccttctcatgcaagaagacgtactcaatttctactctcttctatctctcatgtctccttttcctcccaccattcctgtcacccacgcagcacgccggagcagctgtagcagtcgagctcggcatcagctcccttgctgctcactttgcagcacctcgccagctccctggtaacgctctgcatccccaacacctgacacttgaaggttgaggattattattaaaatcacagtaatcccccctgcagctattgatcacagacttacaatccatttaaacggtgaggatctagctaaacagtataatcaaagtaagcacatgaacagaacctcatgtcttccatagaggacaggcaggtgagggaaacaat

SEQ ID NO: 39802 - DNA, 491 bp, Zea mays
  unsure (1)..(491): unsure at all n locations
agcttctanagggagaacacgtgatacgtttgactaacgttcaattcgaanaagatagaccttgtgcagcttgtcaagcagggaaacaggtgggaggagcacatcacagcaagaatgtgatgaccacttcaagacccctggagctgctgcatatggacctcttcggacccgtcgcctatctaagcatagggggaagtaagtatggtttagttattgttgatgaattttcccgcttcacttgggtgttctttntgcaggaaaaatccgaaacccaagggactctcaaacgcttcctcaggagagctcaaaatgagtttgagctcaaagtgaaaaagataagaagcgacaacgggtccgagttcaagaaccttcaagtggaggagttccttgaagaggaagggatcaagcacgagttcttcgcttcctacacaccacagcanaatggtgtggtagagaggaagaacaggacgctcatcgacatggcgaggacg

SEQ ID NO: 39803 - DNA, 426 bp, Zea mays
  unsure (1)..(426): unsure at all n locations
gggccaatcatgtatcttcccatcagttggatcataagtggttccatcatccttatagctcctaagagtatcaggccacctcccaattgccacaagcttcactgctgacatctggtttgtggtcaaagttccagtcttatcagagcaaatcacagttgtacaacccaacgtttccacactcggcagcttcctcacaagggcattcttctgtgccatcttccttgtgccgagtgccaagcatgtggtgatcacagcaggcaagccttctggaattgctgcaacggccagtgccactgcaatctcaaagtaatatgtgcacttctcanatgagaatntgtaaatcctaggccacccgtcaacatactcccaggaaaggaaatacttcangttgatgagccagaccaaggcacagatcaccccaattat

SEQ ID NO: 39804 - DNA, 447 bp, Zea mays
  unsure (1)..(447): unsure at all n locations
ctaagcttacatatactgaaagatgcactcaaagctcataaacaagatttcatcttgtgattggngatgtctcttncgctcctgcctactatccttccccctcaggccgacgcctcagtccctccaccccacagactcacgtaggtcctccttccaaggtatagattggaaaggagaggtttggaccactcagagtcttgtttattatgtgataaaacacaagaaaccatcaagcatctattgtgtacgtgcgtctctgcaagacagttttggtataccatcttttcgcccttgtggtttggtaatctctctccatctggagatgagatctcctttgccgatcggtggcgaaaggtatgtaagaagatacataggagcaagagagagggtatgaacagcgtcatcattcttggggcctggtgttatggattcccgcacaaggcagtc

SEQ ID NO: 39805 - DNA, 94 bp, Zea mays
aagctccataccccatgagatgaccaaaccccgctcttacacaacccaaacactgcgaaaacacagaaaactaggcggcaatgccgaacagtac

SEQ ID NO: 39806 - DNA, 376 bp, Zea mays
  unsure (1)..(376): unsure at all n locations
tcggatccttagctntgcacttttgtcatatgacccgaatcaacctgggaatcagttntaagtatggctcttctgattcccattgctntaacttccgaagacctagaatcaatgcttcgtactcagcaatgttgtttgtgcaattaaaatcaagctttgctgcataacaagttttgactctggaaggtgaaaccaacacagcagccgctcctgctccgaaggttccccaagatccatcacaaaacactgtccaggcttcgttgctttatttgtttctcctcctgagcccctggcgncaatcagcaataaagtctgccagtgcctgtgactgaatcgaagatctatgaacatattcaatacacaattcattgagctc

SEQ ID NO: 39807 - DNA, 336 bp, Zea mays
  unsure (1)..(336): unsure at all n locations
atcgtgcgtatcttggcaaagtcactgtgtacggtcgcttctctgctccaaatcctatcttttcgctgtgagttccaagtcgagatatggtccgcgtagagagatagagaggggagaagtttgctgtgtcagccaagcccgaaccgagacaaaaggagtgtcaagtcatgtctagcgccctatgatacgtgtcatctctttccacggtgttctagggttaatctggcgccattntgtcaattgggtcgaacggttttgaaaaggtgattaaggtgaacatgtggagtctttgtgcaagggttagtttttgtacttatggcaaaactgaatntttcc

SEQ ID NO: 39808 - DNA, 416 bp, Zea mays
  unsure (1)..(416): unsure at all n locations
tactcagcttccaacaanattcgatacncttttggtgacctatagttaagctacagctggtntatttggaatctttgaatatgtcccaaattggacagcaaagcctttcttatgtcttttgatcttgatatgcattgaattaacctgataggtttataaatgaaatatagacaattttactggctttctaaaaagtctaggagcgcctgaattggatgactgagactccaattatgggattttgaagtgagtagttgaattctgtccaagtctagacaaaatttacgtttcacattgtttggcctttctaagtgtcaagtcttgtggtgatgataataccaagagtatagtggactntgtaagctntccataaagtcctagtttacttctattggatgcatattttgtgagttatg

SEQ ID NO: 39809 - DNA, 277 bp, Zea mays
  unsure (1)..(277): unsure at all n locations
gtcacctgcggctgcaagctcaaaattgtgggtgagagttggaatcttattgtataccgcctttatgtgcttatggactgctntcccactatgttgaaatgttttcttcagtctttcattgctagcattgtgtgaaatcatgaatagaaacattcctagtggctcctcaatgataactctctgtgtgtcacgcaacaaccactcccgcctaagataattgcatgttgccttaaaaatctttgctccatacgaaactctgacctacaccaactctcat

SEQ ID NO: 39810 - DNA, 402 bp, Zea mays
  unsure (1)..(402): unsure at all n locations
tcggccttcgcaggccgaagggtgaaatgaatgaagctgccttaattgccatagagccttcggcattgtctgttcttttataggaacaagggacttagtacaagagcacatcgctttcatggtgtggccgcttgcagagaaatgggaaatgccacaagaaaccattaaagaggccgacgaaggtggacttgtcaggtttaagtacactcttaagtttggagataaatttattgaaccagatgatgagtggttgaaaagcattgataatttaagtgatgagctgcttggtacctactcgaaggccgaagatactgcaatatcagcagccttcggaggccgaanaaagaagaggctgaatcgggtatttgatgctattgngtttgtctaccctgactattgcta

SEQ ID NO: 39811 - DNA, 453 bp, Zea mays
  unsure (1)..(453): unsure at all n locations
agcnttgccccacctggaggctcgcattctactttgcggtgggcccggcggccactgtcggtaccctgaaactagggtaccccttactactgtataaagacgcagtacccacgcggctatttttagtcatgtggtaaaggagctgtatgtgggaccaggccatgactcgccccatcctcgggcaaatactctgggccagcaacagcacctgaccccaccacatgggcgggtccggtgccgccacgtgttcagagaaagtgacatactctgaggtatcaccagtgagtccgaacccacatgggaaggtgctggacccctgtatatatggtccgggcctccaagtttggtccaggaccttcatgtgtgcgaaccagatccctacaatgggatccggacctcttgtatggggtccacgccatccatagcggcgtcctaaggtccaggatagacata

SEQ ID NO: 39812 - DNA, 494 bp, Zea mays
  unsure (1)..(494): unsure at all n locations
tggtgaagccaatcacaagttattgaagaatgatgttaaatttaactggtcttcgaagggtgatgaagcctttgaacaattgaagacattattaaccactgctccggtattggctcaaccggacatcaccaagccttttgatgtatattgtgatgcatcangcagtggactcggctgcgtgctaatgcaagaaagccgagtaattgcatatgcttcaaggcagttgcgccgacatgaggagcattacccaactcatgacctggaactagctgctgtggttcatgccctgaaaanttggcgtcactatctgctgggaaatgtctgtcatatttatacagaccataaaagcttgaaatacatcttcacccagtcagaattgaatatgaggcagaggcgatggcttgagcttattaaggactatgaactggnaatcattatacccaggcaaagccaatgtgtggagatgcctaagtcgaaggttctgtactgcttac

SEQ ID NO: 39813 - DNA, 481 bp, Zea mays
  unsure (1)..(481): unsure at all n locations
agcttgcccgatgaattattnttacctatgattttctctttaagattctcaattcaatggagctcaatattgtatacaaaagtgtagatgaatctggagagaacaatgaatctgatgctagttgttttcacaatagcgatcaacatagtttgcattcaatcaattacaagatgaatactatcgatttgaaaaaaaacagaaaggaaacttatcaagacgaaacgttttgataaatgcaagagcactacaaatttgtcatgacattgaaatgagaatacaaaagaactacttcaagtcaatctaggttttagtttaatcaagtcaattttttcatagtaagtatacaaagatcttgaatttatagattgacaagcgttgatatctacttctttcattggaaaataagttatcataacttatttctttctgatctaatatattattctttatgtaagttgaagtcaaaattccatcgatagag

SEQ ID NO: 39814 - DNA, 477 bp, Zea mays
  unsure (1)..(477): unsure at all n locations
tctaaagggagagcacattntatgactaaccaatgttcattttgataaagacaggatntgtagcgcatgccaggcaggaaagcaagttggagcccatcatccacacaagaacatcatgacgaccgacagaccgcttgagctactccacatggatctattcggcccgattgcttacataagcatcagcgggagtaagtattgtcttgtaatagtggatgattattctcgcttcacttgggtgttctttttgcaggagaaatcacaaacccaagagaccttaaagggattcttgagacgggctcaaaatgagtttggcttaaggatcaagaaaataagaagcgacaacgggacggagttcaagaactctcanatngaaggcttccttgaggaggaacgcatcaagcatgagttctcttctccctacacgccacaacaaaatggtgtagtggagaggaagaatcanactcttttggacat

SEQ ID NO: 39815 - DNA, 277 bp, Zea mays
  unsure (1)..(277): unsure at all n locations
ccaaaaccattacaaaacactgtccagacttcgacatctttattcgtttctttcttctgagccctttggcgtccatcacaaagaaatctgccaacgcttgggactgaatcgaagattgaaagggaaatgtgccctctggccatttctaagtattttggtgattgagtgccaacacaagtgcttaaatgtgaatctatgcccatggatgaacaaagtgcacatcaagagtanaggtatgtttctaagccttaatacattggttgtgtgtactaatata

SEQ ID NO: 39816 - DNA, 433 bp, Zea mays
  unsure (1)..(433): unsure at all n locations
ntnggttgccgaagcagaagcgtggcagaatcagcctgaacttgttntacatactgcttcgtgctactctccctatataccagaatacgtgggtaatcaacctgcagcttctgttgcttcggcaagtcattcacaagcttcctggccccagctcccattaccaccaccattgccacctactcacaccctaagccagcagccagaagggcaccaacatgcccaatagcagcgcgacttcagggaggaatccgaagctcgtacagtcaatagcactgtaccagaatcgaagcatatatactgaggaatatcctacttttgatgtacttttatcttttatggccattttttgtgcgagaaacaagtaatgaagaaacttaatttaatttcttgtcataattgtgcctgcatcagagtaaaatatatcttcctcatg

SEQ ID NO: 39817 - DNA, 453 bp, Zea mays
  unsure (1)..(453): unsure at all n locations
ttgccagcaattcatttccacttattactcaatgcagtatattggatcaagcagtctcattagctgcgagaagcagactattcgaatcgagttttaaccttgcaaggtaaacctaaacacacgatgtggcgaggcacttcatccccacacacatcaaccatccccatcgattccctggcaacagaaagaggcccaccgccttggcgtacaatgcctcactgaccccgagtgccatcgtgcagtgaccacacttgtacccaccataaccggaatgggagaccacgtctcangttgcgtgaggagatcaatccgcgggcaggttcactcangtactangcttaccgattntccatatttctcggcatgtgcttagtacgttcaaacgcttgacacangtatncgcacgttaatccttattccaatntcgtctcgtaaccatgcatcccatggatc

SEQ ID NO: 39818 - DNA, 375 bp, Zea mays
cggatcttaagtcactgcagctgcagcttgagtggtttaaaataattcttctatgtcttcatcttatgctttagaaatcaacattttatcttcgtgggactaaaaatctattgggtgcaccggaggtgcacccaatgggtgtagcccccgagctttgagtggattttagaaataatccatccaaaggtcttcatcttatgctctagaaatcagcattttgtctccatgggactaaaaatttattgggtgcaccggacgtgcacccaatgggtgtagcccccgagctttgagtggattctggaaataattcattcaaaggtcttcatcttatgctctagaatcagcatttggtcttcatgggactaaaaatctatt

SEQ ID NO: 39819 - DNA, 387 bp, Zea mays
  unsure (1)..(387): unsure at all n locations
acctatgaaactcagcttttatgtcccttttcttacaaatctcaaggacgagatttctgtttagggggtaggatttgtaagacccaaaattagtagaattggttttctaaataaacaaatatagttattatagtacattggggaatgagaaagaaaaacttgtaattgagtcaactattgttagagacaaatatgggaaggagaataacatagtaatatttaaaaaaatgtggtttatattcacatttggatttcaattgatacaattggaaaatctgaaaattaaaataagagtataaatttgagtttgaatttgaaataaggaattgaaattttgaaaggaataaaaaggagaaacagaaattggaaaanaaagactaacctgtg

SEQ ID NO: 39820 - DNA, 473 bp, Zea mays
  unsure (1)..(473): unsure at all n locations
agnctgtgaagattcttcaatccaacatgggctattctgcggtgccagagccaacccatgttagtcttagcaattaagcaagtatcgagttcagctctatcaaaatctaccaagtatagctgaccctctaatactcccttaaatgctattgaatcatctcttcttctaaagacagtgacacctacattagtaaagagacagttgtagcccatnttgcataattgagatacagaaagcaaattgtagtctaaagaatctacaagaaaaacattggaaatagaatggtcaggagatatagcaattttacccaatcctttgaccaaaccttgatttccatccccgaatgtgatagctcgttggggatcttggttnttctcgtaggaggagaacattntcttctcccctgtcatggtggttgtgcacccgctgtcgatgatccaacttgagcccncggatgcataaaccctacaaac

SEQ ID NO: 39821 - DNA, 495 bp, Zea mays
tctctggaagagaaagatttcctactccaagcaatggaagttccctagcagatacgcaagccaaaaatactagattgcacggggaacttctgcaaaaatcagagagctttgaacaagagagaaaaagcttgcagacaaaatacgaagccgaagctgtcgaaaatacgaagctgtagcaatctttgaaagagcttcggaacatgtgtttgggttttggcagccgctgcgtacagcgattgaaaaaagtttttaactcagttggagccagcgctgaaaagtttaccccttcggtcgaaaacatatcaagcacctttgaacacattgaaggcgaagtcgaggcgcttgacgaagtaataacggggcacgatgacttctgtgacctgctagcttctcgcgacacagctgtagcatttctgaaagctggatgtacgcacgcgaagaatgtgaatagaccgaccttcaacctatcttcaacagaattggttgatattacta

SEQ ID NO: 39822 - DNA, 469 bp, Zea mays
  unsure (1)..(469): unsure at all n locations
agcttatgaagattcttcatcccaacgtgggctattctgcgatgccagagccaacccatgttagtcttagcaattaagcaagtgtcgagttcagctctattaaaatcaactaagtatagttgaccctctaacactcccttaaatgccactgaatcatcacttcttctaaagacagtaacacctatatccgtaaaaagacagttgtatcccattttacataattgagaaacagaaagcaagttgtaatctaaagaatctacaagaaaaacattggaaatagaatggtcagatgatattgcaattttaccaagtcctttgaccaaaccttgatttcatccccgaatgtgatagctcgttggggatcttggttnttctcataggaggagaacatccttttctcccctgtcatgtggttggtgcacccgctatcgatgatccaactngagcccncggatgcataaacctacaa

SEQ ID NO: 39823 - DNA, 368 bp, Zea mays
tttctaaattcattgcttctactcgacttctaagcatagaatattcagttttaagttgagcaacattagatagagcgtcataattattactttgctcaattaacattgaatcataccgttggaccaagacatcatgagagcacctcagctcctcatgttctttggtcatcttctccaggctgttgtttgttttgatgagagtctcctctagcctgagaagcgtctcaccttgttccttgttccttctcaacaacttaaccaagagagctttgtccgctctggtgagatggttgtagaaacggcgaatcttctcttcttccacatcatcgatctcaatttgcctgtcaataatgtcagtggaagcaata

SEQ ID NO: 39824 - DNA, 151 bp, Zea mays
gtgccacctctgctaatggtactgaaactggtatatcagccgtgcattcagtgtataacatgcttgccatcctctgtgtctttagacacataccattctagagacatacgggtctgctcgagccatgatataagggatacactgatgtctc

SEQ ID NO: 39825 - DNA, 355 bp, Zea mays
  unsure (1)..(355): unsure at all n locations
gatcttaagtcactgcagctgcagcttgactttgcctaatatggcctgatctgtgattggcgcgctattntagcacgtctactgatgcacccactgtcaatccacctttggtcacattaactgccatatctgtcctcacggctgattgacccacgggtcccacgcctgatggtttcgtcgggccacgcgcgggacgcctcgttgccgctgcattggtttaaaaataaccttttgtcttctgcaacagccccaaggaggcacgctatcgcgtgcggtggttcacaccccgctctttttgcacccgaaatccggcacacaaactgtatgacctgtggacctgngcccctgtgtcaca

SEQ ID NO: 39826 - DNA, 404 bp, Zea mays
  unsure (1)..(404): unsure at all n locations
actcagctataggtnntntgagatgactangggcttcgaaggaagaatccaccctatgcatgttaggttaatccacaactccagtcagagtgatgacagaggaagccagtttcaaaggccacaacatagctcacagtcttcagggcaacagcagagctccttcaggccaccagctccaaggggcggaggcggcangggcttcngaggaagatatggggatcagcccacgaaactctattgcttattctgtggtgaagacaagggccacactataagaacatgtcaggtcaccattcagaagcaaaaagagattgtcgaagcagaagcacggcagaatcagccgaaaccgggtttacatactgcttcgtgctactctccctatataccagaatacgtgggtaatc

SEQ ID NO: 39827 - DNA, 261 bp, Zea mays
  unsure (1)..(261): unsure at all n locations
agcttcngagaaaaacaaattttcatgcttcgttgtgtactaaaagaaaggaaggtgtttttcgccttcggctcaaaaagaaaaattcgtccacagcaaagcaagttgtacaccggcaaaagggaaaagaatattaaaggtacgcacaattacaaagttttttaccacatatacaaaaatttctctagaatcttatgcagcanagtcttttcgagcatttgttaaggcttcactcgtcattctcaacttcatatcctgtac

SEQ ID NO: 39828 - DNA, 399 bp, Zea mays
  unsure (1)..(399): unsure at all n locations
atggccccacctgcaagctcgcatcctaccctgaagtgggcctgttggccactgtcngtaccctgaaactagggtaccccttactactgtataaaagacgcagtacccacatggctatctttagtcacgtggtgaaagagttgtatgtgggaccaggccatgactcgccccagcctctgtcgactactctgggccagcaacagcgcccgacctcaccacatgcgcgggtccggggccgccacgtgtccagagaaagtgatatactccaaggcatcaacaatgagtctggacccncatgggagagtgccggacccgtgccggacccctgtatatacagtccagacctccaagtttggcccaaggcctccacgtgtgcgaaccggacccctagaatgggat

SEQ ID NO: 39829 - DNA, 188 bp, Zea mays
ctcagcttggagaagctttacagcctctcggaaagctgtccatgggctatggcgaggctatgggtcgttagaaaggattggtcacgacgaccgtgctccggcagtgctggcgggcggtggcgctcgctttcaacggtgaactccagtgatctctggctcgggcggagctctgggtgcgcaagtgcata

SEQ ID NO: 39830 - DNA, 469 bp, Zea mays
  unsure (1)..(469): unsure at all n locations
agcttatgaagattcttcattccaacatgtgcttattttgcgatgccagagccagcccatgttagtcttagcaattaagcaagtgtcgagttcagctctatcaaaatctactaagtatagctgaccctctaacactcccttaaatgctactgaatcatcacttcttctaaagacagtaacacctatatccgtaaaaagacagttgtaacccattttgcataattgagaaacagaaagcaaattgtaatttaaagaatctataagacaaatattggaaatataatggtcaggagatataacaantttacccaatcctttgaccaaaccttgatttccatccncgaatgtgatagctcgttggggatcttggtttntctcataggaggataacatcttcttctccctggcatgtgattttgcacccgtatcgatgnccaacttgagccccggatcataacctaaaaataag

SEQ ID NO: 39831 - DNA, 418 bp, Zea mays
  unsure (1)..(418): unsure at all n locations
tcgggaaactgacactcttcgatagaagttagattantttctccccggcgcgatcgcgaatgcatcctaaggctccttcgtcaattccaccaaagagcatagctcctggctggtagccacaggacatcccatattcctgtagctccgtcttttcagcctcggacaattcttgacccaccaggttctgaaggtcaaagtccctttcttccgaagcagcatcaacaatcttttccctttgttaggcactatggccatgaccttctctgcagccacaactgtctcttcgcagccatatccgaaagaagtttatcaatccatgacagtgtactttcaagattggcagcttcggcagcagctgcagcttcgacagagggtttagcttcggcagtggcctcngcacctgcaatagggtgctatt

SEQ ID NO: 39832 - DNA, 394 bp, Zea mays
  unsure (1)..(394): unsure at all n locations
tccctttaatcccgaaacgatatatacccttcattggtgattctttcaggtagacataatctccaactagaaagtacaagggttgtcgtcgcttgtctgcataactcttctgacgagcttgagctttcttcaaattatgaattattcattgaaccttcgcttatgtctcttttaccatatcaggcctgaagaaatttatttcacctggttcagaccagtttaacggagtacgacatcgtcgtccatataaagcttcgaagggtgccatcttaatgctttcttgatagctattattatatgagaactccgctaatggtaaacaatcatcccatntctgtgggaagtccaaagcacaagcccgtaacatatcttcaagtattttgattaccctctt

SEQ ID NO: 39833 - DNA, 356 bp, Zea mays
  unsure (1)..(356): unsure at all n locations
taaaacgctgagcctaacgatagcgttaggagttagctgatgaagaataaatttgaaatctttcaaaacattcccaatcatttcatgcaaaggaaacctcaatcctgcttngaagaaacttctgaaaactaccacctcatcattttttggcttcggagtggtttcttccccgccaaaacgaatcagcctcttctcggcttccctgaagtagcctagctttatcatcatgggcatatcagcctcaaagatagtagactntccaaagtccaagtggctgggtttggatggcatgacggtgttataatctacctcttcttcatcagcatcaccctcttcaatgtcatcatgttcatctt

SEQ ID NO: 39834 - DNA, 450 bp, Zea mays
  unsure (1)..(450): unsure at all n locations
tctccgccagtctgaacagttcgaacgagagaagcaagatcttattgcttaacttgaagccgaagctcaacaaaattcggatttgagaaaactattgacaagccttcaagaaaaatgtctggaatttagcaacaaatgcattcatcgattaagaaaattttttcactcagttggagctagcagtgaaaaattcgtcccctcagctgaagatttaccgaagaccttcgaacatattgagggtgagattgacgagctcgacgaagtcatagctgggcacggtgacttctgtgcctgngtggcttctcgaggcactgctgcagccttcctgaaagctggctgcgatcatggaaaaatngtcaataggccaaatttcactttatcaccatcaatcttggatgacattcctgatctcgcccgaagtatctctaatagatttgcaaaaatgatatg

SEQ ID NO: 39835 - DNA, 380 bp, Zea mays
tcaagccgtggttcacggcaatttcgccaaccttgtctgtgttctctacagacaagcatttcccaccagaactgcagaacgaagagtatttacaagtaaaaaatatacacgtgcggcctgacttcgcgtcagtttaatttgaagtcgtgctatgcgactcacttggcatgcgtgttctccaggcagatgagcctggtcgtcgggtacagcagcgccccgtcggggttcctgatggcgtcgacgatcctggcgaggtccatggtgccgtcggggttgttgggcacggtcctgtggtgcacgccgccgacggtggagatgccgccgctctcgtagacgtggatgtgggaggcgtccccgaggatgacctctctgccgcggac

SEQ ID NO: 39836 - DNA, 438 bp, Zea mays
  unsure (1)..(438): unsure at all n locations
tttttctcccaggggcgcagctagatagctcgtctggcgtgagcacttgccaccaacacctttaggattctgaacttcttcgtcctcaccaaggttttgcccaatcgcaacagccatcgacttagtatgggtagagtcaaacgattcttcagccaacatgctgagaacaacgttcacctcagcctcatcagcactggtcggcatctggaagtgagtccgcctctctgcttcacgaagattctagaatggagcgatgaaagcctcgatgtcatccaagactgccatcttgaacaggaggattggaagtgaattcacaanagggactctgtggaggtagattcgaggcagaataagatatgggagcaccagcattcgaaaccttgccccttcgcatcaagtcaatctggctcagtaggtcctagttaggaattcgtctat

SEQ ID NO: 39837 - DNA, 436 bp, Zea mays
  unsure (1)..(436): unsure at all n locations
actcagctagaaagtctggataaatctgcggtaatatccagccagtcaatgaaacttcngacctgatgaacagtggtcggnggttgtcactccaaaatgtccttgactttgctgggatctaccgcaatccctctggcagatagagcatgtnccagaaattgaatttcctccagccaaaacgcgcacttgctgaacttggcatacaactgatgttccctcaggcgcgttaacatgatccgtaaatgttgggcgtgctcctttcttggaatatatcaaaatgtcatcaatgaagaccaccacanacttgtctagctcgggcatgaataccatgttcatcaaatatgtgaagtgggccggagcccattgtaacccgaaagacattaccagatattcaaacaacccataccgcgtagtgaaggcggtctttggtatatct

SEQ ID NO: 39838 - DNA, 281 bp, Zea mays
tcaagactaaaaacgcacgtgcgaaaatttcatgcatcgaagaattgccaaaaaaaacaggatattacattcacggtaccaaatgttacacatatacatttcagaatttttacaatggtacttaatcttctctcaaaacaacttctgcagccctcttcaagagccgattaacaacttcatccatgatagcttcagccatctttctaatcttctcgtctcctttcggcggagggccccgagacgccttagtatgatctgaaggacgacaggatacgactaca

SEQ ID NO: 39839 - DNA, 319 bp, Zea mays
  unsure (1)..(319): unsure at all n locations
tctaagggagaacacgtaataggtctaacaaatgttactttctaaaaagatagaccttgtgcagcttgtcaagcaggtaaacaggtgggaagctctcatcataccaaaaatgtgatgaccacatcaagacctctggagttgcttcatatggatctcttcggacccgtcgcctatctaagcataggaggaagtaagtatggtcttgttatagttgatgatttttcccgcttcacttgngtattctttttgcaggataagtctgaaacccaagggaccctcaagcgcttcctaaggagagctcataatgagtttgagctta

SEQ ID NO: 39840 - DNA, 489 bp, Zea mays
  unsure (1)..(489): unsure at all n locations
agctntcaaagaattttgtgaacaaattggcactnatatccattttgcatcagttcgacatccggaatcaaatggactagttgaaagggataatggcatcataatgacaggaataatgaagctaatattcaatcagccaaggggaaagtggccagatgaattaatcaaagtggtgtggagccacaacacaacaatatcaaggtcaacatgttttacaccattcaaattgctgtttggtgatgaagcaataaccccagaagaggctaaggcaggatcaataagaacagtggcctcggcaaaagatgaagatgattgctctgtggacaaagatgctatagaagggatcaggcttcaggctgtggaaaacatcaataaataccaagccgaaacaataaaatggtgtgatagaaaggttcgtgtgaagaacattaagccaggacatttggtgcttcgaagagtggcaacccagacacagtgggcatactacag

SEQ ID NO: 39841 - DNA, 391 bp, Zea mays
ttaaatctttcctgggatctgcgagcaaaaggagcggcacacgatttccatggcgccatacgcgcgccatctgttgatccgtacctgagagcttcgcaaatcacggaggaccggtgtggtcggtcacgcatatcctgccgctagaaaatgagatcgcgattgggatggagaagaagggttgacccgacaagcggggcccacgggcagtcaaaggtgcgcgtgttttatctgagcgggaccaaaggattgggcccgtttggcagtgtcatgtgagggctgctcgcacaggaggtgggttgggactagttctagttctgcggaccagaacacgcttgtcttttctgatgtttggtattaattccctttcttctattctacattcaatttgaat

SEQ ID NO: 39842 - DNA, 394 bp, Zea mays
  unsure (1)..(394): unsure at all n locations
tgctaatacctgtanaacaatagcatctgccagcacagcagctgcttattataccaataacttggcctttcgcatgctggggactggatatgattggacctttcaagaaagctcaaggaggatgcactcatgtattggtagcaatcgacaaattcactaaatggatagagttcaaacccattgcttctttaacctctgctaaggccgtggaattcatacaagacataatattcagattcgggataccaaacagcatcataactgacctaggatccaacttcacaagttcagagttcttctacttctgcgagcaaaaaagcattcagatcaagtatgcatctgtagcacacccaagagccaacgggcaggttaagcgagctaaccggatgatact

SEQ ID NO: 39843 - DNA, 323 bp, Zea mays
actcgctatgcttctaacatcattttacaaaccatgaacatacagggagagtcttcatttatgtgagtatgactttaaccgaaactgccgtttaaattcacagacttctaaagccgtgggtaacatctggaacttaagttttaaccatttatcattgttcttcttttatgttaatacaaaagacacaggctctctagtctttctattacaagtggctctacaattaagcaagtttctacctaggtcgcttgtttgcaggatatagcaggctatatgtttaccatttcctctcgcacaataagtatcttaaaaaagcttaatag

SEQ ID NO: 39844 - DNA, 390 bp, Zea mays
ctcgctgtggtcaatattctggcagcaaaccagcgcgctagccatgaatgttgtggtgactacacacctacctgtccgtttatatagtagacacaagtgggaaggtgaatagacacaatctttcacgacgtacaaacagccacccgcactcactgaactgtgggccacacacaaccaaaacgtgaatctccatggcgcgcccaactgctcgcagatggggacacctcgcgctccgattattttaatgggttctcagcaacgagctcacggaacgcggttatcggatctattgcatacccaagcctacaagattatttctcggatcaagctcgttacgacaaactatctagcctcgctaacgggctgcttgttggggtatgctttctaccg

SEQ ID NO: 39845 - DNA, 363 bp, Zea mays
  unsure (1)..(363): unsure at all n locations
tatctcggaatgcnccgggctattgctccctcactatatcaatggcattcggtgcgagaccaccggctctctggttaaacatatgtggcgttggctggatattagcatgttgtctttccctccattggtttgagctgtgtggtgcattgccatttaccctatatggttgatncgtcctttccggccttctaagcggggccggaaagctttcttgggcttgggattatgtattaatgggttgatgcatcncatantgtgatgggaagtgttgctggcgcgggtgaggattcacgtaacaatcctcctcaaaaaactcatgcgcggactgtctggacatgtacccggaccgtccgtgttatatgc

SEQ ID NO: 39846 - DNA, 440 bp, Zea mays
  unsure (1)..(440): unsure at all n locations
tgtcaatctctgacattgtggttccgatgttntcagctntagtagcctcagtgggcttggcttcagtaccttcggctccggcgatatcttcggcatcgataggcatagcagttttttccgccgaagccgggggcagggtcttttcgatggcctgcattacgttcatcattcaccgctttttcggacccctgacattccctccactagccgaagcagtctcctttctttcgaagcttcgttcgacacccttctccttcgactacaataggccagtcaaatccgatcctaggggacttagcattgcaaacgggaagggttcagtcattaccttcagtatctctgaaacatcgacagaggaggctggagaggggcccgcagtcttttctggtacatcttgtaccttcatcttcgcagcagtcatcctaacaagtcttttgttt

SEQ ID NO: 39847 - DNA, 467 bp, Zea mays
  unsure (1)..(467): unsure at all n locations
tagcttggaaatcgagactacgtgtccactatatgccttaatgacacagnctttacacctagtacatatttcaacatgttctacacatcaatcggatatgtttgctacttctaatttaccattcaaatcattgtcgacacctgtcaaagtagaaatggtttcatgacaagtcgatagttcgaaagaaagcatttcatttctcttaacttctaaagcataggatatttgagcctcaacaaatttatcatgctcttcatacaacaaatcctcttgcttttctacaagtatattcttttcattcaaggcatcaattaatgcattaatcttgtctatcttagatctatctaagccctcgaacaaacatgaataatctacttcatcctcatcactagactcgtcctcacttgacgaagcatangtagagtagcgagtacatactcttttctctcttgcatacagcatgtgtg

SEQ ID NO: 39848 - DNA, 364 bp, Zea mays
  unsure (1)..(364): unsure at all n locations
aaactcagcttaattggcttatgcgactttgggctaagatgtatttttgtatcccgaacctacaaggcttatgcttggtcatatgttaggacatgatatgctacacttgactctatgagagntaatgggtgtttgagtgatttgatacagctagaggggattgaaagaaatatgacttgacaaaggaaaagcttcactgataacggtataatgaccttgtcaagttcccttggtgttcattgctttgctcttatttgaattttggaaggactgagattatgccactagtttctgtttgggctattgctanggaataacgccaacaactgatcatcacacttggaattcaaaagttgtgtcactg

SEQ ID NO: 39849 - DNA, 450 bp, Zea mays
tagcaagtgcgagttctggatcagcagagttctattcttgtgttatattataaaccgagaaggattgactctagatccgaagaaagtagcagcttcttggactggaaagcaccgaaagatgtccgaggaatctacagtttcatcggaatggccggttattatcgatgtttcattgaaggtttctccaagattgtcaggccaatgacagccttgctggcaaagaaggatgagttcaagtggaacccagcatgcgagaagtcctttgagacattgaaggagaagttaacaacaacaccagtgttagttctgccagatgttcacaagccattcttagtgtattgtgatgcttcgtacaccaaactgggatgtgtgttgatgcatgtatggagagtactggcatactcgttctaacaggtgaagattcatgagaactatcctactcatgatctt

SEQ ID NO: 39850 - DNA, 415 bp, Zea mays
  unsure (1)..(415): unsure at all n locations
tatttacttcatgttgcatgtaacacaaaggaagatccanttttacctgcatgagggcaagatttgcatcaacgccttccacctttacttgattaactgtaccacatgttggctctattctctcaaatgaaatctcttttaaagttgttgtttttggcagatggacagacgtggcacacggtttgctaagacagtgcagtattatttctataatctttatttcccctccctgttttcccattgaccagtcataccattacattttgttccggtgactatattatcctactaattngaccataaagaagcaataattattattatttatataaaaatataaccatgctaataatctaatcccaccattttaccgcgaaatggatacatacttacaactatttattcctttaacaca

SEQ ID NO: 39851 - DNA, 285 bp, Zea mays
  unsure (1)..(285): unsure at all n locations
aacaagccccggcttaatgaccttcggcgccaccatcctgttgagagaagaaggtatgaataaatcangaagtataataaaggaaaaccaagggtaaaaagacagggtaaaatttcatactgagttaagtagttttcgagcttcgtccccggccaattcacgcccgcctttttgccagatttgggtgataaatctgttccctatgcttcgagcttcagctggaatgtcaactagatcttatgtcgaaagattgaaatttggcttattaacaagcttggagtgagt

SEQ ID NO: 39852 - DNA, 378 bp, Zea mays
  unsure (1)..(378): unsure at all n locations
agtcacctgcggcatcaagcttacaggctactggcggagctagccgtttctctggctcgacttgaggatggctggggtgggctggccacggtggccgaagctctggcggcgatggcgggcggaattgagctcgccggagctaagggaaagtggctggccggtgacggtgagtgcggggccaaatggggcgcgccccgggaggctttatatgcaccgcgcggtgcatgggcggtcgtgaccggcgagcgcgcgcgggcgtgcactgggaggcgcggtgcgcgaacgggcgtgaaccangggtggtagccacggtcgaacacgtgttcccgttgcctttgccatgttcaagcgccgattgggtgcaaatcttcgcgaatt

SEQ ID NO: 39853 - DNA, 316 bp, Zea mays
  unsure (1)..(316): unsure at all n locations
gagatggcgagagttgcgtgtaccctccgtggcaagagactagacggtggtgtatctgtgctctcagttggtgtgaacccggtctggtcttaagaaacccggtggcaagttgacatatgcaagggttaagtgctacatatgtcgtgtggttggagatccccaactgggtattaatcaattcggatcgccattacttctcggacatgaagacttggtcactgccctacacatagcaatccagtaaagtaaaagggtgataaaagacggctagtgtaggtcaagtgcttgaactanagtagaagaggaaacaacagac

SEQ ID NO: 39854 - DNA, 324 bp, Zea mays
tttctgacactatcccttttccggcactcccgcttttcatggagatcaatattccacaaggttctgtcacaagaactttgtgatatgggtggttcttttgttcatataagtttcttctttcaacttgtgtcgtgtattaatataaacttgaattcatctggaagtagccttttacggtcttgcttaattttttcgtgcaatcttcttggccgccccataaaatctcgtcctgcgtctatcccgtcggcttcccttagggtgtgtttggttggatgtacatgcagaaatggaagagagccggctacaattttataagtgttggat

SEQ ID NO: 39855 - DNA, 398 bp, Zea mays
  unsure (1)..(398): unsure at all n locations
tgccaatacttgtcaaagcaacaacatctgccagcacagcatctgcagaccataccagtaacttggcctttcgcatgctgnggactggatatgattggacctttcaagaaagctcaagggggatacactcatgtattggtagcaatcgacaaattcactaaatggatagagttcaagcccattgcttctttaacctctgctaaggccgtggaattcatacaagacataatattcagattcgggataccaaacagcatcataaccgacttaggatccaacttcacaagttcagagttcttcgacttctgcgagcaaaagagcattcagatcaagtatgcatctgtagcacatncaagagcaaatgggcangttgagcgagccaacnggatgatactgga

SEQ ID NO: 39856 - DNA, 401 bp, Zea mays
gctgcagctggcatacaattgcatctcttttctttttatcctttctcaaaagttcctatgctctgctcttctgggaatatacaacaaatcatcaatgaacaccactacgaacttgtgaggtatccatgaacactctgtcattcgatacatgaaataagctgggcaatctgtggcgaactgcccgaatattcaacttaatgtctaatcccctttaaggctgacacacttaatggaatacccgtaatcctcagattattcgcacgaccctgacggatcagtccacaatctactcgagggagtcacagacatatcataaagctaaacatcatgaagagattaagttacatatcatggagttgcaaagtacctcatgtcgagtgaccgaataaatacggaataac

SEQ ID NO: 39857 - DNA, 364 bp, Zea mays
cgcagcataagaaaagagtatggaattctccaacagcactgtcatatgagcatcttcactgatctccaacacagaccacacagcttctcagataaagaggaaagtggaataaaagttttcccaactatataactaactctattgacatagtatgtaaaccaaaatgcaggggatacccacactctggtgacaatcattacaaagatccaaaccaaacatagttcatcatgacaaacataaatgcacaggatatagcaaactaccctgtctaactaaaactaactaagaccgagactaacgctaagactgaagcttccatgtatatatatatctcgtattagttacaagatccaactctaacgat

SEQ ID NO: 39858 - DNA, 465 bp, Zea mays
  unsure (1)..(465): unsure at all n locations
atgcaagcttgcacgagcttgaaccgatgacccacgccancggaatttctcaatcgngctcgccagagttcaaaacctcgccggcgcacgtggaccgggtaagtctctgcgccattatccgattcaatgcacagatagcctctacatcaccccgtggagctcctcgtgcactttaattgaactataccgtcatggtttggccaaaacaggagccgccgacgacccccgccgcctgtgctcgtggccagggtagctccgaccacctccgacgccgacccgcacaccgacgtgaccatcgtgacctccccgacgtcactgaccaccccgccggagctctactgccgccggtaagcctcgccgacgtaatctatgtcgcgggtactgttaagctagccagcgagcgcgggttagatntcagctaggtccaagggatttcggcaatgtcagtgaccatgccatagagat

SEQ ID NO: 39859 - DNA, 372 bp, Zea mays
tcgagcgaccgaacaacagcagcgatgacctcagggcggatgcttctgccatgatgcccacgcccacgtccccactcgaggagcgaggacgagcagaaggccgtaaagttgaaggtcagtccgcgggcggcaccgactatctcgtcggcggagaaacctcttccggctgccgtggcggaaggtggcaccggaagcggcgccaaagccgctcgggccggagagccggacacgcggcagctgccagcaccacgaacggtgaacgcccttccccccgatcgctgagggaaggagcgggccgctgcccgcgcggagaccgaccccaactcggcgcactcccctccccagcactgatgatgaacatccttgaagctg

SEQ ID NO: 39860 - DNA, 439 bp, Zea mays
  unsure (1)..(439): unsure at all n locations
gactcaagcctaactacgggtgcatatgtttcaccgaaaacccaacctttgaattgtgaatatcctttggccacaagtcgggcttttgttcttgtcaccacaccatgctcatcttgcttggtgcggaagacccacttggattctacaacattttgattaggacgtggaactaaatgtcataccttattcctcagaagttcctcttgcatcgccaacacccaatccgagtctcttaatacgtcttccaccctgtattgctcaatagaagacacanaagagtaatgttcacaaaagtgagcaacacgagatcgagtggttacccccttatgaatatcgctgaggatggagtctacggggtgatctctctgtatcgcttggtggactctngggtgtggcggtcttggagcctcatcatcttccttgtcttgatcattggcat

SEQ ID NO: 39861 - DNA, 450 bp, Zea mays
  unsure (1)..(450): unsure at all n locations
acatgtgctaagcggcgatgccacagtctgcccatgctagtcttagcaattaagcatgcatctagaccggtctcctcttttgcaaaatcaactaaataaagtttgtcgtctaatacacccttacaagttaatgaaccatcacttcttctaaagacagacacatctatatttgtaaatagacaattatattccatattacataattgactaacagatagtaaattatatccaagagactcaactaanaacacattagagatagagtgctcatttgatattgcaatcttgcctaaacctttcaccttgcctttggtcccatcactgaatatgattgaatcttgngaatccttattcttgacgtaggaggtgaacatcttcttctcncccgtcatatgggttgtgcatccgctgtcgataatccagcttgaacccncggatgcataaacctac

SEQ ID NO: 39862 - DNA, 376 bp, Zea mays
  unsure (1)..(376): unsure at all n locations
ttacaatgagactactacatgttatatactcgaaaacaggtattagtctcaaagacttagattatagagtaactctcccctggatttgtgcatacaacttttgaatacttgtatgagacatgcactctgatttgatatcaagaggggaaaattatctataatccgaactttggcacatataagttaaatgatacaactcgtagaatatgagtgttttacctgtagcatttaaaattattaattgatgtatcatttactatggagtgataaagaagctatgtgccgtgcttaaatacacattgtaaaccgtgtanggttgcttaagtgtatgaattgaaaacaagcagtcctaccatgtgatttacctagtatgcat

SEQ ID NO: 39863 - DNA, 289 bp, Zea mays
  unsure (1)..(289): unsure at all n locations
actaagcagaaaagaacttgagaatggctggntggaatctaaattaaatctgttattgagtctaggctctagcccattctttgaagagcacatacaagccttcaccatctctttaccatactttcttgactctgcatacattcttctatactgatgtcaattctagttgctacaaagtatataaaatgaaataactgcacccccctatttgatgccaatgtaattgaacaagatttcagtttgtgatttatctaanattgaacatgaaaccggtggttcccaacacatg

SEQ ID NO: 39864 - DNA, 426 bp, Zea mays
  unsure (1)..(426): unsure at all n locations
tataaaactaagcttggaaggttcttcatccncacatgtgctaagcggcgatgccacagccagcccatgctagtcttagctattaagcatgcatctagaccggcctcttctttggcaaaatcaactaaataaagtttgccgtctaatacacccttaaaagctagtgaaccatcacttcttctaaagaccgacacatctacatttgtaaatagacagttatatcccatatgacataattgactaacagatagcaaattatatccaagactctctactaaaaatacattagagatagaatgctcattagaaattgcaattttacctaacccttttaccttgccttgattcccatcaccgaatataattgaatcttgggaatccttattcttgacgtaggaagtgaacatcttcttctcccccgcatat

SEQ ID NO: 39865 - DNA, 454 bp, Zea mays
  unsure (1)..(454): unsure at all n locations
tcggattcccgacactagaagacgggctttcggtgctatcgtaagattaatnggccgacagcttagcatataatagtataaaggtgtgagaatgaattttttgtacttaaaaacgaattttttttatttgcttatactcaataccgcacttcttttgcagggcctgattcttagcaatgccctcagggcacagaaaaatgccgaagacgaaggatgcactatagctctaaacaaccttcgttctgaagttattgaactaaggaacgaaggtcttgaanaagataaaatattaaattcattagtgaacaaaataaaagaagacgaagctacttccaaagcccaagctgaagcccagaaatgtgaaattgaagaccttcgaaaacagctggctgaagcaaaataaatgcattgttgccgaagctgaacgagatgccagtgattactggaaaaatac

SEQ ID NO: 39866 - DNA, 454 bp, Zea mays
  unsure (1)..(454): unsure at all n locations
gctngacactcagcgaagacgtctcttcttcttattcttcccctcagcaggagaaactggttgattggctcagcgaagacgcttcgggtgaacactatcagacctctgaatatacaaagctttgccagcctctaggatggccgctgcatctagtgtttcaacaggggctgcatcagaggaatcttcaaccaacatatccagcatggcacttatctcagcatcacttggattcaaaggtacctcgaaatgaatctgcctctcatcgtcagggattccaccaagtgaggcaaccaaagcactaacctcttcgggagagggtcgcactctaaggcccaaaccgctatcaccagcagcaggatctgatacaaaactggtcaaagccttggaaggaggcagattccatgctgagtatgcaacaagagcatcgatgttcgacacctagcctctgagtatc

SEQ ID NO: 39867 - DNA, 395 bp, Zea mays
  unsure (1)..(395): unsure at all n locations
tcagcaacttcaacactctttgatggaatagtgctttgagacttaattgtctccaagacgtctagtacacttaccattcttttcccttctggggtcactgatggccccttttggttttttgctgtttcaatatttactgcaggactcaaaacttctaatgtnttttccttagtcggctttttcgcttcttccattttatctgtggatggtgcttcggccatctctgcagtttctggcagcaagggtggctgttcagcttcggtggccgaagaagcttctccggtgaactcaggcatcgaagctggttcaatataacgcggtcgatgcgtaagaacctttatctttttccttttctggtctggctcgctaggagcaactgcagcttcttcttttgc

SEQ ID NO: 39868 - DNA, 460 bp, Zea mays
  unsure (1)..(460): unsure at all n locations
aagctctctttgggcttttgtttcttcaagcagcataacatcatctgccccactcggtctaacctcataccagcggntatagatgtcgttgaagagggtaatcttccagatgttcgtcaaccaccgatcctttagatatttggtggtacaaggacgaagagcttctatggtaaagttataggtgttgtctatttagccccagaaggccgacctattgtttccattgacatcaatgggacccaccaagtgcattagccacacatggacctaatgaaatatgaaccatatgaagggggaagagtatatggaggaggagcaccatatacgggagaaaatagaggacgagcaccatatggagcattatattgtagagaagcaccatacgattcatataaaggagcatcatatgaatatccatattgatatggataagtgaacggtggagaacgagcgtcagtga

SEQ ID NO: 39869 - DNA, 452 bp, Zea mays
  unsure (1)..(452): unsure at all n locations
cctataaaactaagcttcgtcatcctcctcgcctcatttggcttccgctatcattttcattatccacacaacatatgtgggaatcgaaatgggaagacaaaccttttggagaggtggattcatcgnttggtttccatcgttcattntcttcttcttccttcanagggttagtttcacaaataccaaaggaagtagaagcacacaatgaactatcatgtttggactcatcaaatttgattttaattctagtccaaatatcatgcgcatcatgaatagattcattataattcaatatgaaggcatgataatcttcattgctaagagaaatacttaagatgtcataagctagatagtttaagcgtatacatctttgatcttcgtcggaaagcattttcctatcataactaggagggataatactcttgaatagaattgttctaatcgtggatcta

SEQ ID NO: 39870 - DNA, 429 bp, Zea mays
  unsure (1)..(429): unsure at all n locations
ctcaagcttngtaaattcttgccttgtaacgtttgtagtanatatgctgttccagacattacctgttttactttataagaaccctcccagcttggcgaccattttccaaacttccgatctttattccttagaggcaggatggtcttccacaccacgtcccctacttgaaatgactttgctttgaccttcttgttgtaggccctggctaccatgatattgtccttttctattgctcctaaagctatcaccctcttgtcggtcacttcatcaatattatccatcattgaattataataatcagtgatggttagatcattntgtctggcgaacctgacagcattcaaacttattaccacaagcaacactgctttctgcccatagactcagctcaaaggagatactttagtagcactattgttagatattctg

SEQ ID NO: 39871 - DNA, 346 bp, Zea mays
acctatgaaactaagcttcggcctcgcaccagccaatcccaccacccttcgcctttattgtgttataaatctgctccctatgcttcgggcctcgctgggattatcaaccaaatgtgttgaagataggcttaacgttggcctatttacaatttttgcgtgcgtacagccagctttcataaatgctgcagctgtgccgcgagaagctagcagggcacacaagtcactgtgccccgctattacttcgtcaagcgcctcgacttcgccttcactgttttcaaaggtgcttgatatgttttctgccaaaggggtaaactcttcagcgctggcttcaactgagttaaaaacc

SEQ ID NO: 39872 - DNA, 400 bp, Zea mays
  unsure (1)..(400): unsure at all n locations
agctntagcacatggtaatatagattcaatttgtatacatgtgcatgagtgaggttgttgggattntaagttttctattacaacctcatgagcaatgtttaatatgatatggctatccataagattttcattagaatatagaagcatatcatatttttcttgaaaagctagaatttcaattttttagcctttccatttgggccttaagcaaggcattccaacttactaattgagtgatataatggtaagaagtatcctgctcaattgaaataggttcatacctttggaccaaatcaacatgagagcactttatctccttatgttctttattcaactcgtcaaagcataacattttcatggagagaacatcttctagcatttgatgagcctcgctttgctc

SEQ ID NO: 39873 - DNA, 488 bp, Zea mays
  unsure (1)..(488): unsure at all n locations
tctgtaacaaccacttcatcttcctcgggcgcaatgtcgtatctgtcccncncagctctcacaatggacatatcacaaaaatatcttcccttcatagcatcaatctgactctgtttgatggacgacttttcgaagatagtatgacttgaccgccagggccgatcttcggcatctagattcccgctttccacatcaaagttctcgctatcaccagaatcctcagacaactcagctaatatttcattcgtaatcttttctgtgtttgttttttccatagcctcgtaaaacccagctagagcanggtccacaaccttcttttcctcagacatcttcttctcttcagacatctaacgagcacttgtgcagatgacgaagctcacaaatcaagcgaaatctgacagcaaagaaattcaagcttgaanaaaataagcacaagcaattgagatggcgcaacanatgtngtcgcccgcgggttcctatttatatgc

SEQ ID NO: 39874 - DNA, 272 bp, Zea mays
tgggcaccactgtacaagcctcctacactacctatctaccctggcttcgcttagaagcaaccctggataaatcgccgcaccgaccgaacgaatcgcaggagccatttacgcaaaggtggcctgacacctttatcctgacgcacgccccccggcagagcccaagtgactggcgtcacttccccgcttcacttgaccgggctgacaaaaggacagcgtcgcctgcgccactccgactgcagtgccacttgacagagtgagactgacaggcagtc

SEQ ID NO: 39875 - DNA, 405 bp, Zea mays
tctggtagaatatatgaagccattgtaccggagatcataatctatttggtggtatgtgagtttccagatgtatttccggaagaacattcccgtagaaggtaaggcttctcaataatcaaagactttgttttgcagaaatgcttactaagagtagatccttaaaaatccagttttatttgtcaagttaagtaaaattacctgcagctagagttctttctaccctagttcaatcacttgacctgcactagccaatttcttaacaaatcccttcatctttactggagttctacgtataggtcagtgaccaagtcttcataaccgcgaaggtacggcgatccgaatcgattatactcggctgaggatctccaatcacacgacatatgtagcacttaacccttgcatatg

SEQ ID NO: 39876 - DNA, 301 bp, Zea mays
cacctgcggcatgcaagcttacgaatgagctaaacatcttatattctttgaactccgattgaaacattgcacacattacatatttctatacctttgatcatgtctctttcttttggtacaaatacatatttcttattcttcttgtgccaaggctaagactaacatacttccatgagcatctctatgattagtcttatattgaaagggaaatggagtattcggcaaagcaaggcttccactccaactttgtcggggccatttatccctttgccttactcataaactctcaattggtgggaga

SEQ ID NO: 39877 - DNA, 313 bp, Zea mays
  unsure (1)..(313): unsure at all n locations
tcggcgatggttaanaaatttggcagcagaacagtgcttatatcaatgaatgctgtggtaacttcacacctactcgtctgtttatatagtactgcaggtaagaaggcgaagcgccaggatttttacaccaggcggacacccgcttgcactcgctgtgcggtggaccgcagagaccaaacagtaactctgcaaggtgggaccgctacgcgctgggaaattgaatcgtttctcgacaacgagctcagggaaggtggtttttggaccttcggctccccgaagcttaagagactnttttcacggatcaagctcgtta

SEQ ID NO: 39878 - DNA, 278 bp, Zea mays
ttgaagatagagagtatcctaaccatgtcttaagctctctaggcgctttatgggctcaagccagcgccaagagcatggtatgaatgccttatagatttccttatcgctaatggcttcaaagtctgaaaggccgatcctacactctttactaaaactctcgaaaatgactagttcgtatgccacatatatgttgatgagattatattagggtctactaacgagtctacatgtgaagacattacaggatcatgacacagaaattcgagatatctatgatg

SEQ ID NO: 39879 - DNA, 338 bp, Zea mays
gctcatgagctctgaagaagctgctacatctacaacggagtctattctcggtaatggaaactcattctttggacatgccttgttgaggtctgtgaaatcaatgcacattctccacttgccattagcattcttcaccataacagtgttagccagccactctggatatgttacttctgtgataacaccgacactgagaagactctttacttcatttcatgcaccttcggctgtatcatcagacattttctgaagcctctgctttcttggtctgaaagatgggtccacattgagtgaatgctcaatgacatctctattgacaccacatatatcattagctg

SEQ ID NO: 39880 - DNA, 351 bp, Zea mays
  unsure (1)..(351): unsure at all n locations
ntncatgtngngctngaacattccaatacgagcgcgcatctgaccgttgtgactgtcacaagttggtgttcttttgcagtccgaatacagcatgtacaaatcctcttcccctttctgtcttctccctgattcctaagcaaaacaagagtgcacgggtctccatggtctaaatatgatggacatgaactcaacagtgtaatcacctgatggttgagttgacgagcacgatcgcgagtaatatgaccacaaattggtacttgtatttggatagatgcatcagttgtgtggatgtcttcatcaaggcagtccccttcggatgtgcccacatcacttacattggacgcactggat

SEQ ID NO: 39881 - DNA, 365 bp, Zea mays
  unsure (1)..(365): unsure at all n locations
tcagccttagcgttagtctcgggcttagttagtcttagttagacagggtagttngctatatcctgtgcatttatgtttgtcatgatgaactatgtttggtttggatctttgtaatgattgtcaccaaagtgtgggtatcccctgccatttggtttacctattatgttaataaagttagttatatagttgggaaaccttttattccactntcctctttatctgagaagatgtgtggtctgtgttggagatcagtgaagatgctcatctgttcagtgctgttgaagaatcctctactcttttcttatgctgcaagatttgccagatcagttctgatgtgtggttgcattctgcagatgtcagagaac

SEQ ID NO: 39882 - DNA, 259 bp, Zea mays
tgagctgcacttactattatttgaaagaaagcttttatctgctaggctaatgctgctggtgggcatgccttaccagtgggataaaactccaactttaagggaaactggatggttaacatgtatttgaaaaaaaacctggcgctgtagcaggaacaagggagcttatccccaaatgtggacactcaaccctgagtgtcattgactttcgaccctccttttgctagaaaatatatgctatatgggtactttccctactggg

SEQ ID NO: 39883 - DNA, 381 bp, Zea mays
  unsure (1)..(381): unsure at all n locations
tgacaacactatntgacatttcacataaaatttctgagatcttgaatatttagttcattcctcaacatgcaaaagcgggtcttatcaagtggcttagtgaanatatccgcgaattgatcttccgacctcactccttctaaaatgatatctcctttagcaacatgatctctaatgaagtgatgacggatatcaatgtgcttggtgcgagagtgttgtacaggattattagcaattttaacagcactctcattatcacacaacaaaggtactgtntctagaactacgccatagtctagaagagtttgtttcatatataaaatctgtgtgcaacaagcacctgcggcaatgtattccgcttcggcagttgacaaggcaacacta

SEQ ID NO: 39884 - DNA, 442 bp, Zea mays
  unsure (1)..(442): unsure at all n locations
gaagtgattccacgtttaaatcaatcaaacattacagtgttcaaaatctgttctgacggatggcagaacacaaccagcaagttataaaattcataactcttaaactattaggcctgtggttatgaaactttaacacaagcaagataagaaaagcatctacaactttcttataatcgacaaggactgattctaacattacattangcaaacaatgcagtttctgaaatctgtacagaatttggacagattcagttactgaatatgtaaaaatcataactcctaaacgatcagacttatgcctgtcanatntaacaccagccagataatacagttatctatcgcttttctatagcacatatctatagaaaatacaattctgttcatcaaacatacagcactagcaaatcactgcgtgcagtccacaacagcaattactaaattt

SEQ ID NO: 39885 - DNA, 447 bp, Zea mays
  unsure (1)..(447): unsure at all n locations
gcatcttccactatagagcatgcttctagcaaatttaaaattttcattatctaagtcatgctcattgatcttagcactaagttgagctatgtgatcattttgttgtttaattaaagctaggtgatcatgaatggcatcaacattaatatctctacatctagtacaaatagtaacatgctcaatggtagatgtagagggtttgcaaacatttgattcatcaatcttagcatgtaacatgacattntcatttttaagattggaaacaatatcattgcaaacatttaaatttttagccttagcaatcaatttatcattntctatcttaaggctagcaatggattcattcaacttgtcaatcttagcaattaaactagcattgtcatttttaagggtgacaagagaatcatactaacatttaattctcaaccttacaatcaattatcattc

SEQ ID NO: 39886 - DNA, 416 bp, Zea mays
ttatcgagggaagagtgggatttacccccatctccgatgatgaaccaacccgcgcaggagaagaaccttttcaggaagaaatctgccgaccaaggaaccgaagccgaaatattcagcgacatcatgaagctagagagcgcgatccggcacagcccgtgtcgcgagatgagatctctgaggtgggagaaactctggatgaaccagtcttcagggaaaggagaaacctcccgccgagcgatcggctgaatgctcaagagcatgccgaacaggaggcgagacaacgtccagagaactctctctcggaccgaacctgaacccccactgtgcccgagctatgatcacaccaagcaaagtccgcggggtgttggctcggatagtcgatggactcttcccgacttcggacgccgatggctatc

SEQ ID NO: 39887 - DNA, 251 bp, Zea mays
taaggaaagcataaatgccctaaaataacttgatacattatcccctaagaccaaaaccctattggaacctgaaaacctgaactaacctagggcttatggcaaataatccactttggctaaagtgcaaaaccaaccaaaagatttaagtatttggtcaaaatatggacttgaagccaacctaattttgactatttgcaaaaggctcattttattctatctaattgaaaaggtatagccacttgggctggact

SEQ ID NO: 39888 - DNA, 364 bp, Zea mays
  unsure (1)..(364): unsure at all n locations
tcggcgatggttaaaaattatggcagcataacagtgcaaattgctatgaatgctgcggtaactttacacctactcgtctgtttatatagtgctgcaggtaagaaggcgaagcgccagaatttttacaccaggcggacacccgctcacactcgctgcgtggtggaccgcagagaccgaacagtaactctgcaaggtggggccgctgcgccctgtgagaatgaatcgtttctcgacaacgagctcaaggaaggtgtttnttagaccttcggcgttccgaagcttaagagactnttttcacggatcaagctcgttacgaaaaacgatctatcaccgcgaaaggggctactggtgtgcctatgcttca

SEQ ID NO: 39889 - DNA, 388 bp, Zea mays
  unsure (1)..(388): unsure at all n locations
tcgagagtgcgagctcttgaagcgctttatattccaaccttccgcctagaaggcaacgctggaggagccgacaaaaccaacaaagtatgaagctcccgctcaagaattccctgaaccaacaaggtgcctcatgatcttcggtggggccgaggcctatggcgataagcgccgcatcacggccgctcatagagaagtccatgcaatagaagtggtagttccatgataccttcggtggtcanaaatttcgatcgttttcgaccagcgtgaccacctcaatagcatcccacatcgcaaggtgtaccctctcgtcatcgagccagtcgtaggctctaagcacctcaccaaggtgctgatggatggaggaagtggacctcacatctgtacattg

SEQ ID NO: 39890 - DNA, 181 bp, Zea mays
  unsure (1)..(181): unsure at all n locations
agcttctaaaggagagcacattttgtgacttatcaatgctcattntgagaaagacagggtttgtagcgcatgtcaagcacggaagcaaattggtgcccaccatccacacaagaacatcatgacgacccgacgggcgcttgagctactccacatggacctattctggccgatagcttacatg

SEQ ID NO: 39891 - DNA, 374 bp, Zea mays
  unsure (1)..(374): unsure at all n locations
nntgaacgtactaagcacatgccgggaaaaatggtatccgtgtaacctagtacctgagtgaagccgggcgcggactttatccctcatgcgacctgagacagggtctcccatgctagctatggtgggtacaagtgcggtcactgcacggcggcagccggggtcagtggagcattgtatgccaaggcggtgaggcctggacgcgaacggngaatcgatggggacggttgtcatgtgtggggtcggagtaccctgacatgccgtgtgtttaggtttaccttgcaaggttaanaactcgattcgaatcgtctgcttctcgcagctaatgagactgcttgattccttgtactgcatcgagtaagaagtgaaatgtggat

SEQ ID NO: 39892 - DNA, 359 bp, Zea mays
  unsure (1)..(359): unsure at all n locations
atattacataagcccctccatttggttgctctttgctgatgtaatctgtgcatgcccagattgaattcttgaattgaaggttcttaattgaattatgggctaatgtcactgcacttgatgcaacaaaaacctaagggcctgtgtacatggtatgttttatatgtatatatgggttttggaaaagttccgtctcgctgtcattattcccccccccccacaaaaaaaactaaaatgtcgagctaggttcggcaaaacacgtatgtntatcctgatatgtttgtgcctcaccctgaataattctactgtcccagcttacatgctattgtatggagcctacatctccgctccataccacagat

SEQ ID NO: 39893 - DNA, 387 bp, Zea mays
  unsure (1)..(387): unsure at all n locations
tacanagtttcctattacttgctcgggagacattagtttatatctaggattaccacaaattaattgaacttgtgtaggattaagaaagacgagagatcttagaataaccttgaccatctcatggtcatcccatttggtgctcccgaggttacgcacttggttcaccaaggtcttcaagcggttgtacatgtcttgtggctcctccccttggcgaagccggaagcgaccgagctccccctcgatcgtctcccgcttggtgattttggtcacctcatctccttcgtgcgcggtcttgagcacgtcccaaatctccttggcgctttttaacccttgcaccttgttatactcctctcgacttatagaggcgaggagtataatggtggcttg

SEQ ID NO: 39894 - DNA, 377 bp, Zea mays
tcacgggagaggggttggccttggagttagccgtctgagttggcttccttcgcctccaccctcctcccctgggaaggccctggacattcccttctatagatacaaggagatgatccagctgtacatgtggggtgtagctatgcgctaacgtggcaggcggagaagtgcttgagccctgtggaagcgtagctggcggtgcagcccggggtcctgctgatgtttctttgccttcgtaatgagttgagaaacaaccgatgtcatggacgcatgcagggaaccatcattatctgttgccggagtaatctagatgggacaccggtcttgttccttcgtagcctgaggcagctagctaggggtagggtaatgatgtatccctt

SEQ ID NO: 39895 - DNA, 459 bp, Zea mays
  unsure (1)..(459): unsure at all n locations
gcttttccttgtcgtcatcaactttgacatagaaccactcagatttccagcctgctgcccatttgctacggtaactaattacaggaaacttagtagtttttcgataggcgaagttataacaaccaaaattgtcgtgcagtccatctcttctaaccttcgtttgataatgcaactcgtgaacccggcaaaagctgtccgcanatggttccactgcttggcttcggagtgcccagatataaacaataagcctaacgatagcattaggggtcagctgatgaaaatagatgccgaaccttttcaacacctctgcaataatcccatgtagagggaaccttaantcagcctctagaaagcttttgaanataacaatntcatctntcttcggttttggggtagtctcttctcccccgaagcgcaaaagcttcttctgattntcagtgaaaaagcccgattttacca

SEQ ID NO: 39896 - DNA, 135 bp, Zea mays
gtggtggaggctgtctgttcgatggcgcaccggacagtccggtgcacaccggacatgttcggtgccccagccacgtcaccagtgccgttagaatctgaccgttggagttctgacttctgggcccgccttgatgtc

SEQ ID NO: 39897 - DNA, 278 bp, Zea mays
  unsure (1)..(278): unsure at all n locations
ataatactaagcngaaggcgtttctcgaactcgaaaggacgcaatatttttgcgcaacgaaacaacaagctagccacaacatgtcaatgcaacgacattacacctgcaaataaaagcagcacataaaattagaggccttaccgcggtcgagggtagcgcgttacctaacaagattaatatggcataattcacatggcatttgatctatcttttataatgagataaaactatacctagttcgactgaaaaccatttaataggaatgagtacccaacagc

SEQ ID NO: 39898 - DNA, 428 bp, Zea mays
  unsure (1)..(428): unsure at all n locations
tgatgaagagcgcangctgacccctcttgtgcatcttcatattcaccctttgtacgtataggaagttatcatgaattgaccgcttttggatgaaggcattttgggcaacagatacaatatcgttcatacgcggtgccagtctgtttgccaaaattttggtgacaatcttcataaagctgtttattagactgataggtctaaacttatcgatgctatccaagacctctcttttcgggagtagaacaacgtttgcttcattaaccaggtggaggcttttacatctaaaattgtagaaatcgttaattgcagcagagaggtcctctttaaccaaggtccagtaacatctatagaacacgccaatgaaaccatccgggccaggagctttttctgaatgtatactcacgaccacattctcgatcttcgactct

SEQ ID NO: 39899 - DNA, 396 bp, Zea mays
  unsure (1)..(396): unsure at all n locations
ntagtgattagtgagagagatatgttgtgttcatgtgagctcttgctcttggattgcttctttatctcattctttcttgcgatcatctcaattgtaatcaaggcaagagacaccaattgtgtggtggtccttgcggcgaagtttggttctcgtttgattgagaagagaagctcactctgtccgagggaccgtttgagagagggaaagggttgaaagagacccggtctttgtgaccacctcaacggagagtacgcttgcaagaaccgaacctcggtgaaacaaatcccggtgcacactctctattcgcttgcgatatcgtttgcgccctctctctcggactcattattatttctaacgctaacccggcttgtagctgtgattaagtttgtacatttc

SEQ ID NO: 39900 - DNA, 178 bp, Zea mays
  unsure (1)..(178): unsure at all n locations
agcttcaattgtgtcaaagttccgtgttgtattatacccacgttcaactnttccatttcttgacatacgtggngtcaggtgttcttactgtaagacaatggcaggcagctttgcgactcaatgcatctgccaccacacttggcttttctgggtgataatggaattcccaatcataatc

SEQ ID NO: 39901 - DNA, 396 bp, Zea mays
tgccaatacctgtcaaagcaacagcacatgccagcgcatcatctgcagaccataccagtaatgtggcctttcgcatgctgtggactggatatgattggacctttcaagaaagctcaacgagggtatacccatgtattggtggcaattgacaaattcactaaatggatagagttccagcccattgcttccttaacctctgctaaagccgtggaattcatacaaagcataatattcagattcgggataccgaacagtatcattactgacttgagatccaacttcaccagctcagaattctttgacttctgcgagcagaagagcattcagatcaagtacgcatccgtagcacatccaagagccaactggcatgttgagcgagccaactgaatgatattg

SEQ ID NO: 39902 - DNA, 435 bp, Zea mays
tagaagcaagagctttatcatatgtcataatagaaggggatctatacaagcgtggtgtctgatcccgcgttgctcaagtggttatctagatccgaaggtatacaattaatgaaagaaatacacgcccgcctgtgtggatcttacattggatctaagcctttgctcgggaaagttttttgtcaaggatttattggccaaaggcagcttccgatgcagtggatttagtccaaacgtgcgaaagttgttagatatgtgcaagagataaaaaataaccttcgtctttaactcaattaatacaactcacttggccgttgaaaggtggcgccttgatttactaggtccattaccaccagcataaggacacttaagatatgttgtagtggcagtggaatatttttctaagtggattgacgcaaagcctctagccacaataac

SEQ ID NO: 39903 - DNA, 430 bp, Zea mays
  unsure (1)..(430): unsure at all n locations
tgcttacttggtaagatgaccaatgcgcccttcactgttttatcggagaggacattagatntattggaactcatacatactgatgtgtgcggaccaatgagtacgacatctatgggaggattccaatacttcataagcttcactgatgattntagtagatatgggtatgtctacttaatgaaacacaagtctgaatccttagaaaagttcaaagagtttcagaatgaagtagaaaatcagcgtggcaagaaaattaaagcactgcgatcggatcgtggaggtgaatatttaagtcatgagtttagcaatcatctaaggagttgtggaattgtccacagcttacgccgcctggaacgcctaagaggaatggcgtgtctgagcgacgtaatcggactctattggatatggttcgatcaatgttgagccagtc

SEQ ID NO: 39904 - DNA, 333 bp, Zea mays
actaggggtctggatgctgcatgtactccacacttgcctgcatggacttccctcaaagttgcttcccggggacgggaaacgcacttcatgaagacgctgacgccccctctgtaaatacctcccaatgagtgttagtgagctgatgtctgcaatgcctctgccgagtctgcatctggtctcttattcttattattaaaatcggtgtctcaatatcaagctgactcgttgtctatgagtgactctctattgatcgtcagatgctcgtgagaattctgcacaaacccggcggactgatcgacgatcgacttgcagacatcgcgcggtccatctttt

SEQ ID NO: 39905 - DNA, 493 bp, Zea mays
  unsure (1)..(493): unsure at all n locations
tcgaacctcaagaactcggtcctgtagttntccggagttccaaaggtgacaggcatgtagatgtgtccaagcaggtattctccttcggtcggcacaatgccaaagaaaggagtgtctgactcgtggagctctttgagtgcaactcccaggcctaagagtgtcatggggaaggtgacattgatgttgcttctcccgtccaccaacaccttctttaccctgctctctcggatcaccggatcgacgaggagcgagtacttgcccggatgatcgaagttgagccattgatccgcccgagtaaaggtgattgggtgttctgaccaccgatagggggcgggagcactggtggtcgccaccagtatctgtcggtcgttgagcttctattgccttttgttctcttatgaccncgtgtccgcanagatgacgttgacttctcatcgatgcacgggaacgcttcgcctccttccccttctgctgttgaggtgcgaggtctccg

SEQ ID NO: 39906 - DNA, 230 bp, Zea mays
  unsure (1)..(230): unsure at all n locations
ccacgtcttccctagcatcccggaagctctttgaccgtcaatgactatcggccggagaagccggattcttcgcgtcgacgagcatctccgcctgcgcacgtggaccggccgactccgaccattctcgacggtgacccgcacattgccgtgatcctcgagacctcccctacgtnctcgaccacctcaccgaagcaacctcgccgctggtaagcccctctgcctcttttttc

SEQ ID NO: 39907 - DNA, 371 bp, Zea mays
  unsure (1)..(371): unsure at all n locations
gcgccacgcgacactcacaatactcgcgctcgtcagtactcatcataacagctgcgtctaccagcatagcgtctgctgacnctgcctgtctcatgggctgctgtgtgctgaggactgcctgtgaacagaccctgcacaaagacgtcatgaggatacactcatgtactggctgctatcgacgactgcgctatcctgttatattcttggcctcttgatctctctcacttagctagagcgagggagctcgttcgggacatatcattcgcgctcggagtaccgtgccgactatatcccacctgcgatcaggcttctctctatggagacatgtgacttctctgaactgcttatcatccctgttcgatctgcgtcac

SEQ ID NO: 39908 - DNA, 321 bp, Zea mays
  unsure (1)..(321): unsure at all n locations
cgtcgattggaatcctactcggtgtagattccttcttttcttcttccgtcactctgaatgcgacgagatgcacctctggtgtggaggtgccgccttgctccaagatgacgatttgtttggagcctctgatcatcaattcaaagctcacaaacttccctataacctcttcgggagacattagcttatattaattgaacttgcgtaggattgagaaaaatgagtgatcttagaataaccttgaccatttcatggtcatcccatttggtgctnccgaggttgcgcacttgattcaccaaggtcttgagccgattgcacatagct

SEQ ID NO: 39909 - DNA, 243 bp, Zea mays
  unsure (1)..(243): unsure at all n locations
agcttcaaaccagatcactcttggcttttatttaagtcgaaacgaacagctnttggaccaaccaaccaattcctaaccaggtcattctattccatcccgaataacggccggaatgggcccaaccggccgaaccgtacgaggccctaaacagaatgtgntccaccaaagctacatggacattcaaaagcaatgattaaagttgcatgcttacacccatttatagggttactagaaattttaaaa

SEQ ID NO: 39910 - DNA, 447 bp, Zea mays
  unsure (1)..(447): unsure at all n locations
tattgtgatgctacttgggctagtgattcctccgattgtttatcactttctgcctattggggttttcttggtgattctcttattgcttggaagactaagaagcagtcagtagtttctcgttcgagtacaaaggctgagttgcgtgctatggctcttgtgactgcagaagttacgatgggtgttttaggattttggcgtttttgcttctatgtcgactcctctnttgtctaacagtacaagtgctatcagtattgctcgtgatacagtgaaacatgagctcactaagcatattagagttgatgtttcttatatacacgctcacgtctacgatgatagtatcttgctntgatatgtgccttcacaggccacaacttcagctggctgatttcttcacgagagaacattctcaaactcaatatagattnttcctcttgaactcactgtcta

SEQ ID NO: 39911 - DNA, 251 bp, Zea mays
gcgtggaccgagctatcaaggagtctcgcccaaatcctttcgctcatgtcttctctggcattccgtggaccttcctgacctaattgattgaactatctcgccctgaccaggccggtctcctcgccgacgacgagcaatcccgcctgcgcgcgtggaccgaccaactccgggcatctccgacggtgttccgcacaccgttgtgatccccgcgaacttcccttcaccctcgaccacttcaccggaacagtctc

SEQ ID NO: 39912 - DNA, 485 bp, Zea mays
  unsure (1)..(485): unsure at all n locations
tggtgtgttaatcaagtatgggtntaataatgtaatgcgtttactgaccttttgcaatngcctctgaagaatgaacagttccaagacgtgtttatcgaagtaaatgtttgctattgaaaatttattacgtattgatgacatgcacgaagactggtgtggcagtatatgctcggtagaagaaatgaaagctaagacattaaaaaggcaagaggctgctgctaagcgggaaagggcgatggcatatgctttaacccatcatgtaactttaaacaaaaatgttatatctggaatgtgtgaatagcttgatgttgatgcttgaaagatatatttcatatttgtacactaaaaaggctctttagagtctntgatcattntctctctctntctttnttctgattctggtattcagagtacatagtcacaatattctaatcaagaaagatatctgtgacttctgtccttgtangtgttatggattactatgt

SEQ ID NO: 39913 - DNA, 402 bp, Zea mays
  unsure (1)..(402): unsure at all n locations
agcttctaaagggagaacacgtgatanggttgacttatttcaatnncaanaagatagaccttgtgcagcttgtctagcatggaaacaagtgggatgctctcatcacaccaaaaatgtgatgaccacatcaagacccttggagatgcttcatatggacctcttcggacccgtcgcctatctaagtataggaggaagtaagtatgttctcgctatacttgatgactcttcccgcttcacttgcgtattccttttcgtatgataaatctaaaacccaagggaccctcaaacgcttcctcaagagagctcaaaatgagtctgagctcaaggtgaagaagataaggagcgaccatgggtcccgagttaagaaccttcaagtggaggagttccttgaggaggacggga

SEQ ID NO: 39914 - DNA, 430 bp, Zea mays
  unsure (1)..(430): unsure at all n locations
agctnnttaaaagctggactacgatttcccctgagcgagtttgttgtggaggtgctgaagatattcgaagtctatcttcatcaacttacccccgaggcgatcataaggctgaatatcttcgtgtgggccgtgagaagccaaggtctgaagcctgatgcaaaaagtttctgcaatatacacgaattatcatacgaaacaaaaccttggggtaaggaacagtatcacaataattttggctgctatagtttcgtttctcggtccgggtcaagctgtcctgtgccaacctttcggaagagatggcccggcgactagatgacagaatggttttatgtgaggaatgacctgtcagtacgagaagatatcaaaggtataattatgcgccccatttggcaaagcttcggccttcggaggccgaaggttgaaatgaatg

SEQ ID NO: 39915 - DNA, 378 bp, Zea mays
atcaaggaagaggtctatgttgagcaacctccccgctttgaagacagcgagtatcctcaccatgtttataggctctctaaggcgctctatgggctcaagcaagccccaagagcatggtatgaatgcctaagagatttccttattgctaatggtttcaaagtcgtgaaggccgatcctacactctttactaaaactcttgaaaataacttgtttgtatgccaaatttatgttgatgatattatatttgggtctactaacgagtctacctgtgaagagtttaataggatcatgacacagaaattcgagatgtccatgatgggggagttgaagtattttctaagattccaagtcaagcaactccaagtgggcacctttatt

SEQ ID NO: 39916 - DNA, 446 bp, Zea mays
agcttatctccacaggcgaaatagcttcctgtccataaataagcttaaatggagagactttagtagcacggtgtttagatattctatgagcccacaaagcctcagacaaaaccttatgccaatggttgggataatcagatattttcttctttataaggctaatcaatattctattactagactcgatctaaccattggcctgagcataatacgaagatgaattgagcaatttgatcttatatgattcaacaaactcgcgtacctggtctgtggttaaagtctagggaatgatgaacctatgaatgatatgctcagttataaactcaattctctatgtatcatattcttcagagcaacaacttcaattcatttggtaaaataatctatggcgaccaagacaaattgatgtccctctgatgatgaaggatgaatttctcctacaaagt

SEQ ID NO: 39917 - DNA, 358 bp, Zea mays
agcttaatgcccccaagaaattgtccaatgttgttaatggcttggatcccatggttcacgatagagaaggctacattttatatcatgtaaactatcctgagcacaagattacgaaaattcatgctaggaaacctcatcatgtctctcatcatgcatttatgtataaaaatgaggcttctagttctaggcattccactcatatcaaaatgcctaagaaaaaaatttctaatgcatcaaatgaacaaaatatttcattgtggagcttggaggggattgaatgctttgattgtgtctttggagtatttgtctttgctctagtattgaatatgaggatgtgaaagctctaattgcatgaatg

SEQ ID NO: 39918 - DNA, 445 bp, Zea mays
  unsure (1)..(445): unsure at all n locations
agcttctaaagggagaacacattgtgggactattcttgttcattntgagaaagacagggtgtgtagcgcatgtcaagcacggaagcaagttggcgttcatcatccacacaagaacatcatgacgaccgacaggccactggagctactccacatggatctattcggcccgatagcttacataagcatcgacgggagtaagtattgtctagttattgtggatgattattctcgcttcacttgggtactctctttgcaggataaatctcaaaaccaagagaccttaaagggattcttgagatgggctcacaattacttcggattgagaatcaaaaagataagaagcgataatgggacggagttcaagaactcttaaatcgaaggctttcttgaggacgacggcatcaagcatgagttctcttctccctacacaccacaacaaaatggg

SEQ ID NO: 39919 - DNA, 423 bp, Zea mays
  unsure (1)..(423): unsure at all n locations
agcttaccgcatntgaagcatgatcgctttcctttgtgtttagtcttgctcggctgtgcattgcgaccctttagcaccgtcttgaagcgcttaatgatgagagccatttcttcatcattaagcccggccgcctcaatttgcgccaccttgcttggtagtgcctccttgctccttgatgccttgagagcaatgggttgaggctcgtggattggaccgttcaacgcgtcatcgacgtaccttgcctccttgatcatcatccgcccgcttacaaattttccaagaatttcttcgggcgacattntggtgtacctgggattctcacgaatattattcaccaaatgaggatcaagaacagtgaaggaccttagcattatgcggacgacgtcgtggtccgtccaccgcgtggcttcatagctccttatc

SEQ ID NO: 39920 - DNA, 442 bp, Zea mays
  unsure (1)..(442): unsure at all n locations
agcttctaaagggagagcatattctangactattttatgttcattctgagtaagacaggatgtgtagcgcatgtcaagcagggaagcaagttggagtccaccatccacacaaaaacataatgacgacagatatgtcggggaccataattaggggtaccctcaagacgcctaattctcagctggtaacccccatcagcataaagctgcaaaggcctgatgggtacgattaagtcagggattactccacacgagtgactcggtcacgcttcacccgagcctagcctcggccaagggcagccgacctcgagagacttccgtctcgcccgaggcccctcattttacggcggacacacctccggctcgcccgaggccttggcttcgctcagaagcaaccctgactaaaatcgcacaacgactgaccaagttgcacgagcatttaacg

SEQ ID NO: 39921 - DNA, 434 bp, Zea mays
agcttaagggatatccaaaccctagaagtaacgtatacacaagatccaaagaagtatgcttgtgctttttgtttgacagtttgcttaacttttttaacaaatcttttattatttgtaatgaaatttgtgctaaggagtaacgtagacataaagaaacattgatctgcacatattaatatcggagcagtggtcaataatactttcagctgctcaaaggtttcattacattttgaagaccaattaaatttggtatcattcttcaataaacttgtgattggtttcacaagcttagaaaaatctagaataaatcggcggtaataaacatccagtctaagaaaacttcggacttgatgtacagtggttgggggtttccactccaaaatatccttgaccttgctgggaatcaccgcaatctcgttagcagacaatacgtg

SEQ ID NO: 39922 - DNA, 431 bp, Zea mays
agcttaggcctgatggtacaatcgagaggtacattgcaaggcttgtggccaaaggatatacccaaaaggagggtgaagatttctttgatacctactcaccagcggctcgattgactacaattagcacattaatagcccgggcagcctcttatggtcttatcattcattagatggatgttaagacagctttcctaaatggagagttggatgaggagatctatatggatcagccagaagggttcattgcggatggtcaagagaacaaggtgtgcacgttgataaaatcattgtatggcctaaaacaagcacctaagcaatggcatgaaaagtttgataatactcttacagcagctggatttgttgtaaatgaatctgacacgtgtgtatactatcggtatggtgggggtgagtctgttatgctgtgtctttat

SEQ ID NO: 39923 - DNA, 447 bp, Zea mays
  unsure (1)..(447): unsure at all n locations
cagctttaaatgtgttgtcatcaatcaccaaaaagggggagattgaaagtgcattcatcccttttgtgagttttggtgatttggataacaacacatttaaaggtctaacaagtttgctaagtgttgaacagggaattcagtatgatgaacatacttgaatagtgtataatgatcagtgaacaaagttcaacacaaggtcaaataaccagtgagacaatgcaaatggatataatatggtctctatattggtttgaatatatggacaagtcctgagaaatcactatgcataaatatgatcataatagaggttgaagtgattaagaggattggtcaagccaaagtgaacaagatatgaggaatcgtgaattggcttgaccatattactattagtccatatatgaatatatgagaatcaaactagagcttgattgatcttagcagntatat

SEQ ID NO: 39924 - DNA, 424 bp, Zea mays
gacgtgaaaagtgccttcctcaatgtgtctatcaaggaagaggtctatgttgagcaacctcccggctttgaagattgtgagtatcctaaccatgtctataagctctcaaaggcgctctatgggctcaagcaagcaccaagagcatggtatgaatgcctgcgagacattctaatcactaatggcttcaaagtcggtaaagctgatcctaccctcttcactaaaacaattgctaaagacttgtttatatgccaaatttatgttgatgatattatatttgggtctactaacaagtcatcttgtgaagacttcagtaggagtatgatacaaaaatttgagatgtctatgatgggggagttgaagtaattccttggatttcacatcaagcaactccaagaggacaccttcatcagtcaaactaagtaca

SEQ ID NO: 39925 - DNA, 355 bp, Zea mays
caaattgagagccaccgctctcggagtctataaattgagccccctctcggctccgccatgtactctactaactatcgcacccgcttgcattccaaacctcccaccagagagtttgaatttggaatttcccccaaattcgatccccgccaccgtgaaaccaagtccaccgtggccagccgaatctggtaacgctttgtccgattcaaaccttgtttaagtcttttcatagttcagtgatgctcgccaagccatcaatttgaatgtagatacctccaatcatcgggaacacgctcatcccgccgcaatgttctcggtcaccgtggccagagctctgtagtcggtccgtcgtgccatt

SEQ ID NO: 39926 - DNA, 334 bp, Zea mays
tgatactagagcccacccatattagtcttagcaattaagccagtatcgagttcagctctattgaaatcaactaagtatagctgaccctcgagtactcccttaaatgctattgaatcatcacttcttctaaagacagtaacacctatatccgtaaaaagacaattgtagcccattttggctaattgagaaactgaaagccaggtggtatctaaagaatctaccagaaaaacattggaaatagaatggtcaggagatatagcaattttacccaagtctttgaccaaaccttgattttcatccccaaatatgatagctctttggggatcatcttttt

SEQ ID NO: 39927 - DNA, 357 bp, Zea mays
gtgcgggcaatgtgttcgccaaacacatgggttatgcaccgctggtacgtcgcgcccgcattccttaagccaaacgggatggtgacataacaatacatgccgaagggcgtgatgaaagaggaggcgagctggtcggactcttttatcttgatttgatgataccctgagtaggcatcgaagaaagacaaggtctctcacccaacacgggaattcaccatctgatcaatgcgaggcgcaaggtagggaacattctgacatgcttttgtgagaacaatgtagtctacacacattcgccatttttccctttttttctgtgagccctaaaattgtataaggaaaaaaataaaacattatgtt

SEQ ID NO: 39928 - DNA, 355 bp, Zea mays
agcttcagcaatttcaacactcttttttggaattgttcttgaagacttaattgtctccaagacgtctagtacatttaccattcttttcctttttggggtcactgatggccccttttggttttttgctgtttcaatatttactgcaggactcaaaacttctaatgttttttccttagtcggctttttcgcttcttccattttttctgtggatggtgcttcggccatctccgcagtttctggcagcaaggttggctgttcagcttcggtggccgaagaagcttctccggtgaactcacgcaccgaagctggttcaatatagcgtggccggtgtgtgaggacttttatcctctatctc

SEQ ID NO: 39929 - DNA, 363 bp, Zea mays
  unsure (1)..(363): unsure at all n locations
gcttagcctacataaagtaccctacataaagnaccttttgctacgtgctacagcttcgtgtcgcttaaccttcgaaactccttcgtgctatcttgcgcttaaaagccaaaggtttgtaccatatgaagagaaaggaaataaaattctaaggcaaatgagatgaacttctttgttctattccattatatgatgtgtattccatgttgattacacttcacccttcgtgcttggatagttacacctaaaggaaaacaattcaaggacgaaggtttatactttctaattctgtggtgcctttgttttgatttcacatagcaattgaaaaccagtgaccaacagttgaagacagagtcagaaaagatc

SEQ ID NO: 39930 - DNA, 412 bp, Zea mays
  unsure (1)..(412): unsure at all n locations
gatagccagtcgagcagcttctatcttctgtgcaacaagnttctttgaagcacgtagatctctaatggtcgaatccttggttgataacagttgtcccagccgcagaacttcatcttgggatacttgcagctcgtgacgatgatgatccaagtccgacataatgaagcggaggctcctttccaaaatagtcaaggagttactatcgtcacagtataacctgttcagattatcatgagaggctacgagtgctcgtttctcctcctacgaacaagaagcaacattcagcacccagtcaacaataagtgtggcaaagtcaaccaagggaatttacctcatgctccatcctttcaaagtcaagctgagcattgagggaggaattcaaagaacgcgcgccatccaaagaagcatagac

SEQ ID NO: 39931 - DNA, 436 bp, Zea mays
  unsure (1)..(436): unsure at all n locations
gcaagcttctaaagggagaatacgtgatangtttgtcttatgtgcatttcgaacaagatagaccttgtgcagcttgtcaagcaggtaaacaagtgggaggagcgcatcacagcaagaatgtgatgaccacttcaagacccatggagttactacatatggacctcttcggacccgtcgcctatctaagcataggaagaagtaagtatggtctagttattgttgatgactttntccgcttcacttgggtattttttttgcaggataaatctgaaacccaagggaccctcaagcgctttctaaggagagctcaaaatgagtttgagcttcaggtgaagaagataaagagcgacaacgggttcgagttcaaaaaccttctagtggaggagtttcttgaggangaagggatcaagcacgagttcttcgcttcctacacacc

SEQ ID NO: 39932 - DNA, 326 bp, Zea mays
tagacaatcccctctatggattctgcttttagggcacgttccccatctgtaagatagagctctcctgtcatttggtgcagcgcccaacgcgcggagtgagcaggtcacattggacattgtcgacatggtctacccatacaacgccataatggggcgtggcttgatcaacaaatttgaggcaaccattcatgggctctacctctgcatgaaaatcacacgcccacaaggcgtgatccctgtctactgtgaccaacagacagcgcgcaacatctaaagagacttcgttccagggcaacaaaacatacactgtctcacaccagagcgtg

SEQ ID NO: 39933 - DNA, 415 bp, Zea mays
  unsure (1)..(415): unsure at all n locations
gcttagccatataataacactctcacgaattcataatacatgatgtacatttaatacttgacccactttctacgctcacacactttcaactggctaccagtgagcagnccactttctttctctccatttctatttcttttatgacatgacaaatctgatgtggcatacttgctcttacgaaactgagagttcgtgctaaagtcacctgctttgattgatcaccttcattgtattcgtactaaaatgcattcaaacgttggctcagaaaaaatatctattcatttatatgaaaacaaggtagatatgtgctatgatttgaatctctaatgagttattatcatcaaagtagtgtattgggttgagtcagatgaactaaccagggcatatatgtgtgcaatatgttttttggtttatg

SEQ ID NO: 39934 - DNA, 445 bp, Zea mays
  unsure (1)..(445): unsure at all n locations
ctgcagcttgcaagcacattgtggtacccatcgcttgatttgttcatcaagggtagncaataaagatctaggaacccaaaagtcctttgtgttagcacttggtaaactcattacctttctaacacaaggtgcgattttgggttgcctaattacatgtgaaataattgacaagctagaagtgggatcgttaccaatgggacaatccttgcattgatgtcccttctttcggcatatgtaacaaaggcgatcttcaagttttgaagatttcttctttccttgtttcttgcttgctacatggntagtcaatattttcttttctaacactatgtctttttattttaaataaggataagacttaaataagtgtcccttctttgagcatttaaaacaaagtttatcatccttgttagtaatcaagtcatttctaatataggaacatgaccta

SEQ ID NO: 39935 - DNA, 428 bp, Zea mays
  unsure (1)..(428): unsure at all n locations
agcctgcagctgcnagaattcagaaattataaactgcgttcataacaagcgttcaatgagaaggggatgtacactgtacagacagctgggggctggggcaacacaagaattcataaattatttgtcttggaagatttacctggaggatgtgaggcacccgcgatggtcatgaatgctatacacgctgaaagggctgcacctcttgctaaccagccaggcccaaacaacgagagggctaatacgcccaaagccgcacaaccgatctgggcgacgaacatattatatttctgcaagtttttatcagccgtgttagtactgattaccatagatgaagcacgagaacttttgattcaccattagagctgctaacttgctataagtttgtacaagcacaaacaagtgttactttgtaagtactaactaccata

SEQ ID NO: 39936 - DNA, 339 bp, Zea mays
agtgcggccccagtggacttagcagatttatatgtaaggattccgtcattacctttaaaatttcttctacttcagcaccagaaggcgttgcaggagtttcctcttccatctcaactgcttttggctccagagccgcagcctttctcttctttgaagcagctatcttccgctcaagactggtttttctctttttcagagcttcttcatctgctttcaccatcctagcagcctgtctgctcaaaacactaacaatcctttttctcttttgcccttccgcacccttgtttagtcgttcatagtcagggtattcaaaagttaaagcatccgtcacccgattca

SEQ ID NO: 39937 - DNA, 397 bp, Zea mays
  unsure (1)..(397): unsure at all n locations
atattntctatggataaactcaacacacgagatggccttagtagcacaagcactagtttcttatttaacaatcctttatatgtggaaggcaagcgagttgctaaaatagagaaacctcattatatggactaaattttccttgagccctcatgcacaatatattttgaatgacatggataatatgcatggttattcaatgaagtctaaaagggctgacttaatccatattatgggaagtgtctaataaagaagaatcaaatccaaattaactagatagagaatacgcctcataattntggattgttcaccatatgataatattcattgatcttccaaatagacctttatttcataatcaacaactgatgtatatcctcaagtgcttctttttcttaat

SEQ ID NO: 39938 - DNA, 440 bp, Zea mays
  unsure (1)..(440): unsure at all n locations
agctntatcaaatggatgtgaagagtgcctttctattggaccaatcaaggaagaggtctatgttgagcaatctcccggctctgaagatagtgagtatcctaatcacgtatataaactctctaaggcgctctatgggctcaagcaagccccaagagcatggtatgaatgcctaagagacttccttatcactaatggcttcaaagtcggaaaggtcgatcctactttatttactaaaacacttgcaaatgatttgtttgtataccaaatttatgttgatgatattatatttgggtctactaacgaatctacatgtgaggaatttagtaggatcatgacacagaaattcgagatgtctatgatggaggagttgaagtacttcttatgatttcaagtgaagcaattccaagagggcaccttcattagccaaacgaagtacattc

SEQ ID NO: 39939 - DNA, 438 bp, Zea mays
  unsure (1)..(438): unsure at all n locations
gcttacctttagtcttatgtaactaaatgttatattacttttaanaaggggagaaataattaacaaaaaagggaagtcataagaaaaacatatgatgaagaaagttgataagtgcattccatgtcatgagcatcacgtttattttatgacacactgcatgataaacccaacgggtagaagggtgcccgatctttcgatgagagatgatggaggtggaaaacttgttggagaacgacgttggctgcccgactaccacaaccaagatggtgtggcaccttgagcgacaggtacaccgtctcctgataactacgatttggggtggaggttgacgttgtgctatccgactacaacaaccacaagggtgctgcgccttagcgatagttacaccggctcctgttgttgctgctcttgccgtgccaagaacagccttgaacctgc

SEQ ID NO: 39940 - DNA, 446 bp, Zea mays
agcttggaaaaatctggaataaatcggcggttattatcagccagtccaaagaaacttcggacttgatgtatagtggttgggggtttccactccaaaatatccttgactttgctcggatccaccgcaatcccgttagcagacaacacgtgtcccaaaaattggatctcctccagccaaaatgcgcatttactgaatttagcatatagttgatgctcccttaagcgcgttaacacgatccgcaaatgccgagcatgctcctcttcattcttggaatatattaagatatcatcaatgaacaccaccacaaatttatccaactcaggcatgaataccgagttcataagatatgtgaagtgggcaggagcatttgttagtccgaaagacataactagatattcaaataatccataccgcgttgtgaatgcggtcttgggtatatcttcacg

SEQ ID NO: 39941 - DNA, 457 bp, Zea mays
ggatctttatcgacgcagctgcagcttataaaggacggaaaatgcctttcttatggaccgatcaaggaagaggtctatgttgagcaacctcccggctttgaagacaatgagtatcctaaccatgtctataagctctctaaggcgctttatgggctcaagcaagccccaagagcatggtatgaatgccttaaagactttcttattgcaaatggattcaaagttggaaaagccgatcctacactctttactaaaacacttgaaaatgatttgtttgtatgccaaatttatgttgatgatattatatttgggtctactaacgaatctacatgtgaagagtttagtaggatcatgacacagaagttcgagatgtctatgatgggggagttgaagtacttcttatgatttcaaagtgaagcaactccagagggcaccttcattagccaaatgaagtatactc

SEQ ID NO: 39942 - DNA, 415 bp, Zea mays
agcttgtagaacgcaactccatataaatgtatgttacttttttagattttaattaattttggttcattaattatttgctaggttagttaataaaattaatgcttatgtttataatgatataatggatatatttctcatgaaaagattgttctaacacaaggtttggaacaaattcttttagtcttgtcgtagtagtctctcctttaaaccatttctggatccgccactgtaaacacaccacaattgaatatgaaacctgccttagaaccactcatgcatgcatcggtaaaataatatcagtaatgcatattgaaagtcgcctagaggggggtgaatagggtgaatctgaaatttacaaacttaatcacaactacaagccgggttagcgttagaaatataatcgagtccgagagat

SEQ ID NO: 39943 - DNA, 436 bp, Zea mays
agcttggtccaagggcttgaaagatcgtctaatttatgtgtgtgttcccgttagggctatacctaaaaaggggggaaatttgttatatctctctgatgtaaagtcatggtctatttttttttcaaacttcactaccaatcttactccatagactctcacgaccaccaaattacctccttgtcctacctagtttgcggtgttttttaagtgggttttcctttttttaagttaaaaaaattatgttctctatctttattatacgaaagcactagttttttcgtccacagcttccaccgtcgttgtgcacttatgctccccatatttaaatagtaaaaatactaaaattatgcataaatgagaatttaaaccatgattgttggctctaaacctacattcacacaaatcacacccacctaggggtgaaaatgaaaactgt

SEQ ID NO: 39944 - DNA, 432 bp, Zea mays
  unsure (1)..(432): unsure at all n locations
agctnngctaaagtcttctcatctagtggctgggtaaagatatcggctaattgggtgggggtgctcacataagaaattttgatatcctccttttgttggtgatctctaagaaagtgataccggatgtctatgtgcttagtgcggctgtgttcaacgaaattatctgccatgcggattgcactctcattatcacataggagagggactttgatcaatttgtagccatagtctctaagggtttgcctcatccatagtaattgcgcacaacaatggcctacggtaatgtactcggcttcggcggtggaaagagctactgaattntgtttctctgaagcccaagacaccagtgatcttctcagaaactgacaagtccctgatgtgctctttctattcaatttacatccggcatagtcggcattggaatacccaatt

SEQ ID NO: 39945 - DNA, 446 bp, Zea mays
agcttctccttgtcgtcatcaaccttgacatagaaccactccgacttccagcctgctgcccatttgcttcggtagctgattacatgaaactttgtggttttccgataagcaaaattatagcaaccaaaattgtcatgcaatccatcttttctagccttcgtctgatagtgcagctcctgaactcgacaaaagctgtccgcaaacggctccaccgcttggcttcggagggcccagatataaacactaagcctaacgatagcgttaggagtcaactaataaaagtagataccaaacctcttcagtacctctgcaataatcccatgtagggggaatcttaatccagcctttagaaagctcttgaaaatgactatttcatccttctccggctgtggggttgtttcttctcccccgaagcgtagtagcttcttctgactatcactgaaata

SEQ ID NO: 39946 - DNA, 447 bp, Zea mays
  unsure (1)..(447): unsure at all n locations
agcctgacatcaccattgtatgatgtaaagtaaatttctgatacttagaatatttagctcattcctcaacatacagaagcgggttttgtctaaaggctttgtgaaaatatccgctccctaattgatcttccgatctcactcctaatattatatctcctttaacaacatgatctctaaggaagtgatgacggatatcaatgtgcttggcacgagagtgttgtacatgattattagcaattttaacagcactttcattatcacacaacaaaggtaccttttctagaactacaccatagtctataagagtttgtttcatataaagaattcgtgtgcaacaagcacacgccgcaatgaattctgcttccgcgggtgacaacgcaacactattntgctttttagaggtccatgaaactagtgatctccncagcaaatggcatcctctggatg

SEQ ID NO: 39947 - DNA, 445 bp, Zea mays
agcttattcatgcgattctcacttatatgacccatacgacagtgtcacatgtaggtaggactgaaatcattaagtcgatgccttttagcactaatattacagacaggtgcatcatcaagatttaaaatgaataacccattcataatggatgaaaaagccacaaacatgccattctgagagatcacacaaccattgttttcactcgcaaatgaataaccatccttcatcgaacatgaaagaaacataatgttttaactcatactacgaactagataacaattatttaacttcaaaataaatcctgatggaaggtggagttgcatcgtctcgacggtcaacgcagcaactcttgcattattgcctacgtggaaatcaacttctcatcttttcacgcttctacttcttatcattccttgcatcaaattgcaaatatgggcaaccgata

SEQ ID NO: 39948 - DNA, 342 bp, Zea mays
gcttggcctgcatctcgcggaattactcgagctgtgtgttctgaccccccgcacggactgggaccacagctagctcacgtgggatgtcaacgcgagacgcaggcacagggacgttgccatcttgcggcatgtcgaggcagttgtcctcgtcgtgatccccctgatcgatgtggaaacactcgcgactcgggtcgcaaccctcgtcgccgaggctgtggccatcgtcagagcaaccggagaggcagtagtcacacgcggacatgaagtctcgcatggcactatgatcactgagtccggagaaatcccaaccgaagtcggagtcgtcgtctttctctgaaccca

SEQ ID NO: 39949 - DNA, 444 bp, Zea mays
  unsure (1)..(444): unsure at all n locations
agcttcagccgaatgactgcgaaggttctccaatctcaaataggcagaaacgtgttaacttatgttgatgacatcattgtcaaaagcacgaagcaggagaatcatattgctgatctgcaggagaccttcgccagtttcaggcaagctggcttaaagttaaacccagaaaaatgcgtcttcggagtgaaggggaaatttcttggatgcttggtttcaacaaagggaattgaagctaatccaagtaaaatagaagctatacttcggatggagccaccaactacaaagaagggggctcaaagattgacaggaagattggcatctctcaatagattcatatccagatcagcagagagaaacttaccattcttcgaagtgctgaaatcagccgaagttnttcaatggggaccactccagcagagggccttcgaagagctgaaacagtat

SEQ ID NO: 39950 - DNA, 435 bp, Zea mays
  unsure (1)..(435): unsure at all n locations
gcagcttatgaaattttatcccacatgggctantttgcggtgccatagccaacccatgttagtcttaacaattaagcaagtgtcgagttcagctctatcaaaatctactaagtatagctgaccctctaacgctcccttaaatgctattgaatcatcactttttctaaagacagtgacacatacatcagtaaaaagatagttgtagcccatttgacataattgagatacggaaagcaaattgtaatcttatgaatctacaagaaagacattggaaattgaatggtcaggagatatagctatnttacccaatcctttgaccaaaccttgatttccatccccgaatgtgatagctcgctggggatcttggtttttctcgtaagaggagaacatcttcttctcacctgtcatgtggtttgtgcacccgctatcgatgat

SEQ ID NO: 39951 - DNA, 409 bp, Zea mays
  unsure (1)..(409): unsure at all n locations
agcttgctctaaggagatgataccatcgccattttggacaggaaagaatccctatgcctagttcgttcaccacatgcgtgcgtgatagtgtggtgtcttctaaaaggcactgcacacatactcatcacccaatggctttgagcatcgtgtgtggtgtctatggacatgtttgntatctggataatatctttggatgtaatctgttactccctttattattttaaattataaagatatttttcttaatgtattgttttaacacgtatctaacgaaatgctatatattacaaaatatcttattatttaaaatagaccgaataagacccacatagagggggctgtaggggcaatcaccaccgatgtcatcccgcgaagcgccaccttttgtgtgtcactgatgcacaaaccc

SEQ ID NO: 39952 - DNA, 421 bp, Zea mays
gcacctgaggatgaagctgagcaacatacttaatcttctacccccgaagctctgttcgaagatgttgattacattattcgacatgcttcggggaaaagattattcaaataggaaattttagaagccagacactacgcccaaaaactaaaatattcgaagggggccttattgttcaatggcacggacgaagatgatttcctatactttctcccggacaacaaagaaatatctgtttgctaggagatgccaaaagtatgggatttccgaagcttgaaactggcctcgccgccatgtcgaaggataaccttgcggatagctttgcatacaacagcctgaaggtacaggaattgtaaacttaaagtttatgaatttgggaataaagcttttattcttatgctaaacatttatctttatttttcac

SEQ ID NO: 39953 - DNA, 438 bp, Zea mays
  unsure (1)..(438): unsure at all n locations
cagcttntgaattgctgcaatgaatggcacaatttatcatatctacacgaagttcatgatttaatgagaacaatcacgatttaaaagtaactaatttttaagaatatacttacgtccaaaatagtgggtgttgtgatggaacggattgaagtgtattgcggtatgatccgaagactcgaggaactctagaattacacatttaaatctctgttacgaatcattataaagtaaaacttattgacagatgtgtttgcaaggcgtaaagacatgttgtaccttgtcttctgaaccgcctaaacatagtcccaattattatgccataatcctccttagccaacgcccagcggagtgcatttntgtttagtaggtcaccccacactttaatgatatgtaaagaccccctatgacattcattntggtaagaattggttagtaata

SEQ ID NO: 39954 - DNA, 353 bp, Zea mays
tggacatgaaaagtgcctttctttatggaccaatcaaggaagaggtctatgttgagcaaccttctggctttgaagatagtgagtaccctaaccatgtttacaaactctctaaggcgctttatgggctcaagcaagccccaagagcatggtatgaatgccttatggattttctcatcactaatgaattcaaagtcagaaaggccgatcctaccctattcactaaaactattgaaaatgacttgttcgtatgccaaatttatgttgatgatattatatttgggtctactaacgagtctacatgtgaagaatttagtaggatcatgacacacaagttcgagatgtctatgatgggg

SEQ ID NO: 39955 - DNA, 444 bp, Zea mays
  unsure (1)..(444): unsure at all n locations
agcttgtaaatntcagnttccgcctattcaccctccctctatgcgactttcagaaagtacgatggtacaactaacccgtcggagtttctgtaggtcttcgtcactgctatcatgatcgcgggcggggatggcaccatcatggtgagctacttccatgtagccttgaccgggccagcccagacttggcttatgaaccttaacctaggatcgatcaattcctcggaagagctctatgcgcggntcaccatgaacttcgctaatgcttaccagcagcatggcatggagtcccacctccatgcaatgaggcaagaactcagagagacactcagggcttcatctctcgcttcaccaaggtatgggggagctgttgggagccttcttattctgaaggtcctaaaaacgtgactaattaaccatatattntcagtatgacatagactatta

SEQ ID NO: 39956 - DNA, 441 bp, Zea mays
  unsure (1)..(441): unsure at all n locations
agcttaacttaagaaacacgtgccaccacaagggtggtatggaacgtccctggctgactaactaggaaagctagtggaggactaccttacccgataggggcaagggcagtatgggagtangcgtgtatggaggatcccggattgattntgctgcgatggcggtcagacgggggattcctgcattgctctttctagaaactgtagcgggttttctgaagctagtggaactttgtaaaggcctcgtagtggatctctagccattcacctcggtagtgtctaagggtctatgtaaccctggtgacaggggatacacgacttgtgggtacagggtataacctctgcagagtgtaaaactggtatactagccatgctcgtggtcatgagcagctcaggactctcacatgattaaattatggaactaaattcaatttgtcatttgca

SEQ ID NO: 39957 - DNA, 423 bp, Zea mays
gatcttatcccacatgggctattctgctgtgccagagccaacccatgttagtcttagcaattaagcaagtgtcgagttcagctctatcaaaatctaccaagtatagctgaccctctaacactcccttaaatgctattgaatcatcacttcttctaaagacagggacacctacatcagtgaatagacagttgtagcccatttgacataattgggaaacagaaagcaagttgtaatctaaagaatctaccagaaaaacattggaaatagaatggtcagaagatatagcgattttacccaatcctttgaccaaaccttgatttccatccccgaatgtgatagctcgttggggatcttggtttttctcatatgaggagaacatccttttctcccctgtcatgtggttggtgcacccgctgtcgagta

SEQ ID NO: 39958 - DNA, 369 bp, Zea mays
gaaaagcttcttgcaatcttatacccttgactattttctaaaagacttcgaaaagatttccaaaagaatttgcaaaaacaaaacaagtggtgcaagcgtggtccaaaatgttaaataaaaaaaagcaaccatgcctatctagtaaaaggataaattggtttaaattccaagcaacctttgcacttaccttatgccaactaattcaattctgcacttatatatttgctttggtttgtgttggcatcaatcaccaaaaagggggagattgaaagggaaataaggtttaaccttttcctataaataattttggtggttgaatgcccatcacaaataattggactataagttgctctaaattatatattctat

SEQ ID NO: 39959 - DNA, 358 bp, Zea mays
ctcgaccccaccatagcagaggaagaggtgattgtctttatatacaaataagagcattgagtgatgtattttatatggaatcctacataatttcttaaaaaatatgacaaactagaatggctctgacaagaataaaacaacctataatgccgtagtgaacagggcttttattattgtaccacttatccaaagaagcatatataagggatatactaacggatggttgggtagatctccacaacaacaaccaaaaatgtgaatgtaacattcattatggatcaaccgcaccacagctctcagatctatctagaatatataccaccgctcctaaagacacttcgactcacaataccctaat

SEQ ID NO: 39960 - DNA, 434 bp, Zea mays
  unsure (1)..(434): unsure at all n locations
agcttctanagggagaagagactgggggactttccttgncctttgagaaaacagtgtttgtagcgcatgccaatgaggaaagcaagttggtacccaccattcacacaaaaacattttgacgacagacaagccactggagttactccacatggatttatttggcccgaaagcttatataagcacttggcgggagtaagtactgtctagtaatagtggatgattattctcacttcacttgggtattctttttgcacgaaaaatcatagacccaagagaccttaaaggtattcttgagatgagctcaaaatgatcgtggactaataatcaagaaaataagaagcgaccacgggacggagttcaagaactcacaaatagaaggctttttgaggatgatggcatcaagcatgagttcttttctccctaatcacctaaca

SEQ ID NO: 39961 - DNA, 386 bp, Zea mays
  unsure (1)..(386): unsure at all n locations
gagagtctgtgggttaatataggcggcctgctggggccgtggtctggctcatatctggatggcaccggtccacgggttgtggaaagagggccacgaccggctcaacagctaatggggcgtcgctagagccacctgcaggagcctccgtaccgttgccaggcttgagcgagcgatcgttgctacacttattggagcgacaactcttaaaatagccacccccggagttcctagaggggcgggcctgttgtgatgtcgagtacatgagtgaagagaatgacaatgacctatcactgcccatggcgaggaccgcggtggaccgttcatgatcaccaatgcctatggtgatctcntcaagcagcaagagatggaacagatatatacccgtc

SEQ ID NO: 39962 - DNA, 405 bp, Zea mays
  unsure (1)..(405): unsure at all n locations
gattttctttatgtcttgtttctctttgttgcacgggagcgatgggaacaatgaatgaaacctgttgaatgaggccagcagcctctgagaagctattagaagaagccgcgagttctgaggttgatataagtggtaacgatgcgctatcaaagataagcgccttttctaaactaccttttcatacttgccccttcttttggttaatatnttctcagtagttaatgtatgccatgtgctgacatgttttcctgtggctttatctcgacttattcatgaaactgatattcttggatgatacagaaacctcgtcgtcactgtattacaaatattcctttatgcttggctgacatgccacatctttctagacttggctcgtagaagctactaatgcaatcttatcgctat

SEQ ID NO: 39963 - DNA, 434 bp, Zea mays
agcttctaaagggagaacacgtgagaggtctaatatatgttatctttgaaaaagatagaccgcgtgcagcttgtcaagtagggaaacacgtgggaagctctcatcatgccaaaaatgtgatgactacatcaagacccctggagttacttcatatggatctcttctgacccgtcgcctatctaaacataagaggaagtaagtatggtcttgttataactgatgatttttctcgcttcacttgggtattctttttgcaggataaatctgaaacccaagggaccctcaagcgctttctaaggagagctcaaaacgagtttgagctcaaggtgaagaagataaggagcgacaatgggtccgaattctagaaccttcaagtggaggagtatcttgaggaggaaggaatcaagcacgagttcttctgctcctacacacca

SEQ ID NO: 39964 - DNA, 394 bp, Zea mays
  unsure (1)..(394): unsure at all n locations
agcttncggaaaccaatactctgtgacagagtattctttaccttcgctccgatttgatctcggacgcagcccaatatttcatcgtcaacaccgccgaagagtagtgcccctgtttgatacccgctggatatggcgtattttttcaactcttctttctcagcttccgacaattcttgcccaattaagttttgaaagttaaagttttctttcgaagcttctttagctatttccttctccttcttaagtattgtagccatggcttcttcagcgggtgcgacagtttcttctgtggccatatccaaaagtatcttgtcaatgttagaaagtgtgctttctaaatgttcatcttcggttgtggcagcttcggcagctgcagcttcagcaactacagctt

SEQ ID NO: 39965 - DNA, 431 bp, Zea mays
  unsure (1)..(431): unsure at all n locations
agcttatgaagattcttcattccaacatgggctattcggcggtgccagagccaacccaagttagtcttagcaaccaagcaagtgtcgagttcagctctatcaaaatctaccaagtatagctgaccctctaacactcccttaaatgctattgaatcatcacttcttctaaagacagtgacacctacatcagtaaatagacagttgtagcccatttgacataattgggatacggaaagcaaattgtaatctaaagaatctacaagaaaaacattggaaatagtatggtcaggtgatatagcaattttacccaatcctttgaccaaaccttgatttccatccccgaatgtgatagctcgttggggatcttggttnttctcatatgaggagaacatcttcttctcccctgtcatgtggtttgtgcacccgctgtc

SEQ ID NO: 39966 - DNA, 433 bp, Zea mays
cacacatagctcttttgaatacctttgttcatatctcttttatatgctatgactaatgagttttcaagtttatttcaaaccaagtcataggtatattgaaagggaattggagtcttcggcgaagacaaaggcttccactccgtaactcatacttcgccaacactccgagcaactctctcttttttgggggagaaatgagcatcaaagaaaaggacttcatccctggggaagagagcaaaagctcaaaagcttcgctttttggtataatcttaactcatttattttatgaccaaaggggaagatagcacttagagggctctaatgattccgtttttggcgattcatgccaaaaagggggagaaatgagcccaaagcaaaaggaccgcgcaccaccaccaccaaattcaaaaacttagtgctttccaaaagtctt

SEQ ID NO: 39967 - DNA, 447 bp, Zea mays
  unsure (1)..(447): unsure at all n locations
agcttgtgaagattcttcatcccaacatgggctagtcggcgatgccagagccaacccatattagtcttagcaattaagcaagtatcgagttcagctctattaaaatcaactaagtatagctaaccctctaatactcacttaaatgctaccgaatcatcacttcttctaaagacggtaacacctaaatctgtaaaaagacagttgtaacccattttgaataattgagaaactgaaagcaagttataatcgaaagaatctacaagaaaaatattggaaatagaatggtcaggtgatatagcaatttgactaagtcctttgaccaaaccttgatttccatccccgaatgtgatagctctttggggatcttcattnttctcataggaggagaacattcttttctctcccgtcatgtggtttgtgcacccgctataaattatccaacttgag

SEQ ID NO: 39968 - DNA, 439 bp, Zea mays
  unsure (1)..(439): unsure at all n locations
agctntgacagtancaagagttggcatcttcgtggatttaaaaacagcatccaaaacattgaccatcctccttttcttatgagtcattgttgaggttgcagcacatgttagcttcgacaactcatttacgggtgggggactcagcagttttggatgctcttctgccggaccgacactatcttcgactatcgcagcaggagttgtcttcggagccaaggggatagctttggcatgttcagtaatctccatcttttctgtatcaagaactgcagctgtcctctctaaaggacgtggctttggcctgcaagtcaaaaccttagctcttctcagtctatgcttggcggaagaggatgaagttgccacttttttctctaacccttgttntcaggtaggaaagcagtaatcaagataaaaaaatccgatcacatcgaagactcta

SEQ ID NO: 39969 - DNA, 367 bp, Zea mays
tttggtcttgaacataattagcatgtatgccctcaagtaagccaccataagtggcaagcaactttttttgggaagacttacctattagtgagaagcttttcatataagacctcaatgggatgtaggtataacaagtgcaagtttcgaagtagtttatggaggttttgggtatggtagccagaattgggagggagaggaagtcttggactttgtagtagcttttgacctattgatagcccacaaattctttcggaagagacttctatttagtgacctacagtagtggccaatactctagtcagattgacttagtccttacaagaagagaggataaacgagcatgcttggattgaaggtgagtaatgtg

SEQ ID NO: 39970 - DNA, 444 bp, Zea mays
  unsure (1)..(444): unsure at all n locations
agctngccagaattgtttgaagaactcaagaaaaggttttctactgcaccaatactggtaatgccagacatccacaagggatttgatgtgtattgcgatgcatcacaccttggacttggatgtgtgctaatgcaagaaggaaaggtgattgcttatgcttcaagacagttgaggaaacatgagaagaattatcctacgcatgatttggaactagctgccgtagtgcatgctttgaagatttggaggcactatatgattggaaacaagtgcaaaatcttcacggatcataaaagcttgaaatatatattcactcagaaagaactcaacctaagacagagaagatggcttgaattgattaaggactatgatttggaaatacaatatcaccccggaaaggcaaatgtagtagctgatgctttgagccgtaggggcaagtgaacaaca

SEQ ID NO: 39971 - DNA, 307 bp, Zea mays
tcagcttcgtggctgatccatccaattgggccttcgggtcaccccttatgaagttttcctcacttgagaacgcgccaacactggcgaagctggttcttattttcttaacacattttatagattttttataacactttttcttggatgcacgaagctcttcaacatttttttctaaatgattggcccattgttcactaatttctcgttttgtttcttcaagtgtgcactcttctttagctctgactagctgtttccgaagatcctcaatttcgcgcttctgagcctcagcttgagctttgaaagcagc

SEQ ID NO: 39972 - DNA, 438 bp, Zea mays
  unsure (1)..(438): unsure at all n locations
agctctttcaccatattatcacggatatcttgataatgttgagcatgacactttcccttcaaacgagttaagctccttcttagcattccaacttcttccttgagctctttattttcttgtgtgatagaaatatcaccaattcctgagatttctagctcaatggaagattggcttgcttgataacaacaattgttagcacatggtgatatagtttcaatttcaacacatgtgcacatgtgaggttggtatgatttcaaattagttaacacaacctcatgagccatttctaacatgatatgggaatccataaatttattatgagagcatacaagcatatcatgtntttcttgtaaagctatattttcaatgtttagcttttctaccgtgttcttgagcataacatttttattttctaattgagcaatatatgatgaatga

SEQ ID NO: 39973 - DNA, 441 bp, Zea mays
  unsure (1)..(441): unsure at all n locations
agctntaccaaatggacgtgaagagtgccttcctcaatggaccaatcaaggaggaggtctatgttgagcaacctcccggctttgaagacagtgagtatcctaaccatgtatataagctctctaaggcgctttatgggctcaagcaagccccaagagcatggtatgaatgcctaagagatttccttattgctaatggcttcaaagtcggaaaagccgatcctactttattcactaaaactcttgacaatgatttgtttgtatgccaaatttatgttgatgatattatatttgggtctactaacgaatctacatgtgaagaatttagtaggatcatgacacaaaaattcgagatgtctatgatggggtagttgaagtattttctaggattccaagtcaagcaactccaagagggcaccttcattagccaaacaaagtatactc

SEQ ID NO: 39974 - DNA, 424 bp, Zea mays
  unsure (1)..(424): unsure at all n locations
agcttngggaactatgcccgtgtccaatctgtctgtttcagaactataagagcttgccagaggcccctgttcctgtcgaccacgaccagcacccaacataagacttccctagttatttagccaagaccagagccatgatagttctcatggtagcactgttttcccgggtggtcactccatgttctaattaatatgcaataatcttgtttaactatcgggttaacaacaataatgtaaacttaccattttggaacattaatatcataagcgggagtgactgcataaagttaagttgtagcaatagcatagctacttgattaaatcataatcccaggttaaacaaggagtaaggttggaaaggttatctaaatagataacccgtcaagttatgcatatatatccaaaagagtaaactttattaaat

SEQ ID NO: 39975 - DNA, 436 bp, Zea mays
  unsure (1)..(436): unsure at all n locations
agcttngttctgggttgcctcgggtcggtaatgcttacccaacagctggtttgggcagccgccgaagttcttggccggtccgagcaacgggatggtcggcggtgagcacgccgtggtctangggttggttaaagaagaaatagaactggaggggggttttgtaaggcatcagtgagacatgggaatagcgtcgtgacccttttccagttaatcaaaacgataggggcatttctgcaaagtcgacagcgcaggcgcgcgtgggcgcacttctgcctgtagctgggccggctcgggccaattttagcccagcactgtagagtctttttctttttccttttctaccagagctaaagaaattctagaaaattacagaacaatgctaanaataccagaccaattttgctaggcttcgaattttttatagatttaataaaat

SEQ ID NO: 39976 - DNA, 440 bp, Zea mays
  unsure (1)..(440): unsure at all n locations
agctcttcgagagagggaacggatcccaagtctctttataggtctagtgttgngaagaggagtttgatgttgagcgagctgtccggatcaatcccccccgccccttggaaggccctgggcatctccttttatatgcacaaggaggtgacccacctgtacacatgggggtgtagtaatgcgctaacgtggacggcggagaagtgcttgagccctgtataagcgtggctggcggtgcggctccaggtcctgctgacgttcctttgatttcgtagagagctgaggacggtcgacatcatggtcgcatgtcggggatcatcattacctgttactggagtaatttgatgtgacaccggntntgttcctttctancatgaggtggctagctangggtaggataatgtcatattccctgttcacgtagtcggcccgaagccgtctcg

SEQ ID NO: 39977 - DNA, 438 bp, Zea mays
agcttgagacattattgctgaatggtcatgtgttatccgaaggacacacttgaggtcatcatatagatgcaccaaagaaccatataaagccttcgatgtccatacaatctctgtaatggaccacactcgttcctttgaaaacaattcaaagaacttaaccaattcagatcagattttaagataagagggacttaaaatctcattcccaatgatactcatcaagtatccattttatgggaaaaacatgatcaacagaattgtccataacttttcatttcatcccaacaatgggatgaccaattcaatcttacccagcatggtaagtataatcacttgaaaagttataacatatgccacactttgtatgggaggatgtatgtagaatacagtccataagaaatgtttcagagaaacatatgcaatatccatcactatcac

SEQ ID NO: 39978 - DNA, 395 bp, Zea mays
agcttgggtcttaggtacctaacacttgttgggtcctacaacggtagttacaatagattttgaaacccaaatgcaagttttgtctctcttgcatttagatcctaactttctagcaactactttagtatttttacatgacaatacaaaagaagcattacatgtctgataaatagtagttggaccagtgcatactttcctatgcgcatgagaaacaacatgattacgcctaggcctacttctaccacgagcatgagaggagctagttgcaaacatggcatgagaatcatgataagcaggtaaagtagcatgattataacacctatcatgatgatcaacatttgaagtattcttgacatgagcataaagataagcatggttcttttggtcatgtaaag

SEQ ID NO: 39979 - DNA, 444 bp, Zea mays
  unsure (1)..(444): unsure at all n locations
agcttctaaagggagagcacattgtgngactaaccaatgttcattttgagaaagataggatgtgtagcgcatgccaagcagggaagcaagttggtgttcatcatccacacaagaacatcatgacgactgataggccgcttgagctactccacatggacctattcggcccgatagcttacataagcatcggcgagggtaagtactatctagttattgtggatgattattctcgcttcacttgggtgttctttttgcaggaaaaatctcaaacccaagagactttaaagggattcttgagatgggctcaaaatgagttcggcttgaggatcaagaagattagaagcgacaacagaacggagttcaaaaactcacaatttgaaggctttcttgaggaggagggcatcaagcatgagttctcttctccctacacgccacaacaaaatg

SEQ ID NO: 39980 - DNA, 435 bp, Zea mays
agcttgtcctttgagtgggatatattgcaccctcaactggctaattgccatattgaagtccagcattctttggatatcgcctcctggtttgttaccgctttctggaattctaatcatattaaaatccccgataatgatccagagtctatcagctaacacttcaaggttagaaaaccaatgaagaaaaacttctctgtcagcaggtgtacagggagcataaatatttgtaagccaccaatcttgtgtcatttttcaacgatagagaatagtgtggctgaactcattttgttgaatcaacttagcatcaaaatacaaactttttcacatagtaataattctccacaagcaccattagagggacagaaatacaatttgtccaacgatcttgtacataagttaccaatgtatgtttcattgaattgttctcctctttgt

SEQ ID NO: 39981 - DNA, 447 bp, Zea mays
  unsure (1)..(447): unsure at all n locations
agcttgagaaaatctntccacctgccttctttgatgtcatggtgcacttgtgtgtccatgttcccgatgaggcaatgcttacaggacctgttcagtatggatggatgtacccaatagaaaggcgactatgcactttgaaaaatttgtaaagaacagggctaggccggaaggatcaattgctgaggcatatatggcaagcgataccttaacattttgttctaggtacatgaaggatgttgacactagatttgaccaggatgatgatagtggtacagagatgccattgcctaatgacatgtctgtttttaagcatggtgctactcttgttggagctactaagactgagtacattgatgatgctatcgtgaataagttagtttggtatgtgctacataatgctgatgaagtacaggaatatttgaagtaagtatcgtttacatgtttgag

SEQ ID NO: 39982 - DNA, 353 bp, Zea mays
acaatgataccgtcaagtgttttttattacaagtcggggtggcatgcgagagcagcgatatctatgaatttgtgatgacaccgccagcgccgaggagtaacaccaacatccagtcctacatcaacctcgcctttgatgtccatgacgactcagcctgtgtcagcagcaaccacttcattgcagccaacaccttcttggaagagtatctgaagggaagatggagccggtcgtcgagctttgactgacggacccatggtcagagataaccctttattagcgcatacatcgctcttggtcttcgtctaatttaagcttcaattttgcgccttggatgagagttggcacctgcaatg

SEQ ID NO: 39983 - DNA, 440 bp, Zea mays
  unsure (1)..(440): unsure at all n locations
agcttaatgatcggcaagttgtagtagccatgatcagcgctccggctccttaccgatggtcggagcacatgatattcttcagccgagctgatcagtggcttaacttcgatcaccccggccaatatctgctactcgttgaccccgtgatctgagaaagtcaggtaaagaaagtgctggtggatagtggcagcagcatcaacgacacctttccccggacgctctatgccctgnggtcgccatcgatgacctcactgagtcggatactcctttcttcggcatcgcgccgaccgaaggggagtacccactangacacatctacatgttctgcacctttggaaccctagagaactatcgaactgagttcctgaggtttgaggtggcgcatttcgattgcactacaacgccatcattggaagactacggttggcaaatatcatggc

SEQ ID NO: 39984 - DNA, 444 bp, Zea mays
  unsure (1)..(444): unsure at all n locations
agctntatcaaatggacgtgagaagtgccttactcaatggaccaatcaaggaagaggtctatgttgagcaacctcccggctttgaagatagtgagtaccctaaccatgtgtataaactctcaaaggcgctttatgggctcaagcaagccccaagagcatggtatgaatgcctgcgagatttccttatcactaatggcttcaaagtcggaaaagccgatcctactatctttactaaaactaagatttgtttgtatgccaaatttatgttgatgatatcatatttgggtctactaacaaatctacatgtgaagagtttagtaggatcatgattcaaaaattcgagatgtcgatgatgggggagttgaagtatttcctaggatttcaagtcaagcaactccaagagggcaccttcttcagccaaaccaagtacattcaagatatact

SEQ ID NO: 39985 - DNA, 425 bp, Zea mays
agcttcacgggaaaagaataaggagaaattgaatcagtgttgggctgaaatcaaaccaggcggcccagtccataggggaaagcgcgcccgcgcgctggcatctttgcagaaagaccctcgggtttcaggctaactagaattatgttcttttactatttctatgtgtcgctgacggtttgcaaataaccccttccgtttctaattcttcgcgacgcgaggtccacgacggcgttgaacgcaaccgaagtccggcgagctcctggaccggtcgattggggctatgaccggcactcccgagcggctaacactcaattgaactctcctcgaatgactctcctaagttaatttctcatttggtaaactatcatgttctgtccacgtgaaccgcggatgatgaagaaaatggtatgtgttcccggcgatcc

SEQ ID NO: 39986 - DNA, 437 bp, Zea mays
  unsure (1)..(437): unsure at all n locations
agctgccttcgcttcagactatcatccgcagttcaacggnggcgnagagcgcgcccatgggaaaatattcacagctgtcaaaaagatgctcctcgatgaaagaaaaggcaaatggaccgatttactaccggaggcagtctgggcgctaaacacaaccgagtgcagagcgaccgggttcactcctttccgccttctataccgatcggaggcaatgaccccgcaagaaataaagcatgggtccccgcgtacagttccatcagccgtccccgacgtggatgagccaacttcaaaagatctcattgacggagaccgggtcttcgccttacaggccctgaacaaatatcaggcccagaccaaagcatggcgcgaccgtgcagtcatcctgagggagttcagcgagggggacctcgtactcatccgaacagctcggacggagt

SEQ ID NO: 39987 - DNA, 435 bp, Zea mays
  unsure (1)..(435): unsure at all n locations
agctntatataaatgatatgaacaacacagaatatcgaagttctccatagaggaatggaaactaatgatccaaaccacaaccatactccacatacaactccggcaataatcgagtagtagacatacacaccttcaatttctttattactcctgtccaatacttgtacacctgaactgttgggacatgatatactcaacggaaagccacaaagaccatagttgttgctgtaaattgaaggatcggctagcgtttggagttgattaccagttggtatctcacctgagagcatattgttagagagattcagtgaactaagagacgtgagttctgagatgcctgaaggaatgagaccagacagttcattccatgagaggtcaagggactcgagtagttctaaatctccaacgctagctggaatagtaccagagagatta

SEQ ID NO: 39988 - DNA, 448 bp, Zea mays
  unsure (1)..(448): unsure at all n locations
gcatgcaagcttggaaccataaacacaacgaagaattttatctatttattattctctntatgaactacataacttatgggaaaaatattgtgtgggttgcataattggatcatttttttatttgcatgaataaatgaataaattaattaatataaattatacttgcatcatgttgggtttgtttgtgcatctaacttaaaattttgaaaatttaaacctagatttgaattgaaatagaaaacacgaaataaaatagaaaataaaacaaaaaagggaaaaaagctcgtcgggcagcattgggccgattntctcctgtcacggtccaactcacttncactctccggccatctccctctttctttctttntttnctcgccagcccacctttctccaaccgctgacgggtgggccatagctgtcagccgacccaaccaccctcgctcgtgcg

SEQ ID NO: 39989 - DNA, 403 bp, Zea mays
agcttgccaatacttgtcaaaacaacaacacctgtcattacagcaactgcagaccataccagtaacctggcctttcgcatgctggggactggatatgattggacctttcaagaaagctcaagggggatatactcatgtattggtggcgattgacaaattcactaaatagatagagttcaagcccattgcttctttaacttctgctaaggccgtggaattcatacaagacataatattcaggttcgggataccaaacagcatcatcactgacttatgatccaacttcaccagttcagaatattttgactgttgcgagcaaaagagcattcagatcaagtactcgtctgtagcacatccaagagccaacgggcaggatgagcgagccaacggaatgatattggag

SEQ ID NO: 39990 - DNA, 428 bp, Zea mays
  unsure (1)..(428): unsure at all n locations
cactgtaaacataagacgactatgttttcttctttntacctcatgaatgagctcatgtaatgtaaccacactatcaagaatgtacgctcctattataaagccatattgacaatcactaatacttttattgatacaaatggccaccctattgtttagaacctttgttattattttgtaacacacattaagaagacaaatgggtctatagtttttcatttcattagcatttgtcaatttttggtaatagagtaaccaccccatggttaagcctttcaataggcaacacccctttataagtcatcaaacattgcaacaagatctccattaatgatctcctagaaatcctaatagaattcagcagacataccaacaggactacgagcactattatgctaataagaaaacaacatccttaatatcaccctctg

SEQ ID NO: 39991 - DNA, 392 bp, Zea mays
  unsure (1)..(392): unsure at all n locations
ggactcaatagcgaggcgcaggactcgagcagatgcaccgcgctcggagatcatatcggcgaggttgtctgtgatggagccgctgatcccagacagaacaacggcgttcatgcgagttcagttgggcgagtggtggacagtcattaaacagcaccgttggcatccagatagaatatggtgagggttatgaggaaggactcacgccaccgagagttgaacgtggagttgacttctaggaggagtggaacgagggcccggatgttctgcacggcgactgcttgagcgtgccgattgagaactgcacccgcttcgtgttggagactagcggtcaaaagctgggcgacggagtcagcaccactgccgncngaggtgaggtccgtgatgggtggaga

SEQ ID NO: 39992 - DNA, 443 bp, Zea mays
  unsure (1)..(443): unsure at all n locations
agctttgaggagaaggagttggtatgaatccttgtggtgcttaagagagtcaattcaatttttgttgactcaagctaccgatatccaagattgacccaaggttattttaaatntattataccttaaactcatatcatctcgagggaagttgttgatgttgtaggaaataaagaattatcctatgccgaacagtcaaagcctacaatatggaggaatgccaaaggatggtaacatctatgcttttaagtgcaagtgtcttaacttatcatttctcatgtgtcttgtgtagtcacatagaaaaaggaagcacttaagatattcgtcaccactctttgaagaaattcctcccatatggtagattgcatattcttcattcttatattatgacaatctacatgctttaaaattgctgctatttctcatggcaagggttacactattta

SEQ ID NO: 39993 - DNA, 440 bp, Zea mays
agcttgtgaggaattttatttctaagtcaaccatacagataactctatttagtatatattctttattctgagtgctttcaaacgtatatattgtttattctgagtgctttcaaacatgaatttcaacaatacgagatgtcacaaaaatagcaggcaacactaagatcatgaactgctatcatacctgacatgcaaggtcacggatgcttttcccaagtaccaattcagaatgtttggcagccttgctcataggaaaaccacggcaggtgtctgtgtcctcataagtatcctcagaaagcaagttgtaacagcagccaatgcttaccaatgcttttacttgttcacaggacacaaaaactctgtaaaaaagaatgtaatatttgaaggactttcaccaaggtggaaaatacttatattcaatatgcaacatttagcgagct

SEQ ID NO: 39994 - DNA, 442 bp, Zea mays
  unsure (1)..(442): unsure at all n locations
agcttcggcatctntgcttgccccttcttcatgagcccctggcgtccagtcagctatgaagtttgctagcgcctgagattgaattgaagatctatgcacgtagtcgatggtgaattcattgagctccgcggcccactttccaatccttccagtagcttctctgttcctcataatatcctttagaggctgtgacgagggaacaattatatggtaagcttggaaataatgccgaagcttcctggaagccattaacacagcatacaacactttctccaactctgtgtaatttttctttgataagctcaacacttcggagacaaaatatactgggacttgctttttattttgtccttcaagcttctcctgtacaagcgccgcactcactgtggagtgtgaagctgccacatacactagcagaggagccctggcgtgggtggagtta

SEQ ID NO: 39995 - DNA, 421 bp, Zea mays
agcttgagtcaatcattgtgcagaggataattgatgctcaaaaggataatctgggtatgaaacacatacgagagaagataagggctagaacagccaagtgtttcaaggaagacgatcaaggtgtgatatggtttaaaaaccgcatagttgtgccaaagaacgaagagctccgccagcaaattctggatgaagcacatcttagtcgttattctattcatcccggaagcactaagatgtaccaagatttaaagcaacattactggtggacaaaaatgaagattgaaattgcacgctatgtggcgaagtgtgacacttgcagacgtgtcaaggccatacacatgaaaactgctggtccattacaatccttgccaatcccaacatggaaatgggaagacatcagtatggactttattgtgggact

SEQ ID NO: 39996 - DNA, 442 bp, Zea mays
agcttagaacttcggagacaaagtatacttgggcttgctttttgacttgtccttccaatttctcctgcacaagcgccgcacttactgcagagtgcgaagctgccacatataatagtaacggagcccctggtgcgggtggagttaatgttgttatatcaatcaagtattgcttcagctcttcgaaggctttctgttgagctgggccccattgacagacttcagctgactttagtatttcaaagaatggcaagtttctttctgctgatctagatataaatctattcaatgaagccagtcttcctgccaaccgttgggcccccttctttgtgctcggcggttccattcgaaggatggcttcgatcttgcttgggttagcttcaatccccttcgttgaaaccagacagccaaggaacttacccttcttcactctaaagacacactt

SEQ ID NO: 39997 - DNA, 442 bp, Zea mays
agcttgacaacaccatgtgacattttacataatatttctgagatcaagaatatttagttcattcctcaacatgcaaaagcgggtcttatcaagtggcttagtgaaaatatcccctaattgatcttccgacctcactccttctaaaatgatatctcctttagcaacatgatctctaaggaagtgatgacggatatcaatgtgcttggtgcgagagtgttgtacagggttattagcaattttaacagcactctcattatcacacaacaaaggtaccttttctagaactacgccatagtctagaagagtttgtttcatatacaaaatttgtgtgcaacaagcacctgtggcaatgtattccgcttcggcagttgacaaggcaacactattttgctttttggatgtccatgaaactagtgatctaccaagcagatggcatccccca

SEQ ID NO: 39998 - DNA, 399 bp, Zea mays
  unsure (1)..(399): unsure at all n locations
agcttaaggaattcaaaaaattatactctctttgttcaaaatgttaaggtatttagcatttctagaaacattgcttttactatttatatagacataatatgtatctaagtctataaaaaactaaatcatttccaaaggaaaaaccagttttagttagaaaggagggactaatatacatatatacctggttcgtttcataataattgactttctagcattctacacatgtctcaaattagtttttattatcactcgtgaatatgcagcatgctcttctctaagtacatctctacctctctctatatattntcttgcgcattacacattttatcctcctccgtaattcatttgcctagatctaaatggtcatctacgtacgctggtatagaatctagcttc

SEQ ID NO: 39999 - DNA, 425 bp, Zea mays
gcttgcatgctgcaacgcgaatagaaagttgctattttgcttcgtttctttgcatattcagtttggtggatgcaagcgaagatgaatcttcgagttcatttcgtctttttgttgagcctgcacgcgttgactaatataagaaagttaaatcccaatctgttacgcttacacttcgcactgatttgagataaactgtgaagtatatatattagcatttgatcctgacgaaccatggttgatatgtccatcagccatagattggtgctctcatcaacaatcacattgctatgccttatttgagctatgtacatgaactagcatatgtaagctctgcatttggcatgcataattgtagcttggtaatctccttattgagatcgataatatatgtggggttctattttgtgaatattttgattacgttg

SEQ ID NO: 40000 - DNA, 428 bp, Zea mays
  unsure (1)..(428): unsure at all n locations
ctctgagtcacctgaggcgtgcaagcttcttgcgtcaggcttgagaccttggtttctcttgtcccacacgaaaatatntagccgtatgattgtctcgggagtaagttgatgaacatagacttctaagattttcaacacctccacgacgaagctgctcaaggggaatcgcaatccagctttctaaaagcttcgatacaccacaacttcatttttttcatggagtggacaagttttttccccttcgtccgccctcacaatggacaggtcccggaaataccttcctttcatattaacaagatgattctctttgatagttgatttaccataaactgaatggcttggtcgccaggggcgatcttctgagtcttcgccaccgctgtccacatcataactttcactgtcaccagtattcttagacagcccttcca

SEQ ID NO: 40001 - DNA, 472 bp, Zea mays
  unsure (1)..(472): unsure at all n locations
tgcgcatacttgtcanagcaacaacatctgctagcacagtattctgtttaccataccagtaacttggccttgcgcatgctggggactagatatgattggacctttcaagaaagctcaagggggatacactcatgtattggtagcaatcgacaaattcactaaatgaatagagttaaagcccattgcttctttaacctctgctaaggccgtggaattcatacaagacataatattcagattctggataccaaacaacatcataactgacttatgatccaacttcacaagttcagagttttttgacttctacgagcaaaagagcattcagatcaagtatgcatctgtagcacattcaagagccaactggcaggttgagcgagccaacgggatgatacttgaggcactcatgactaaggtcttctacaagaatgaaaaattcgcacgaaagtggataatggaattgccctatttc

SEQ ID NO: 40002 - DNA, 443 bp, Zea mays
  unsure (1)..(443): unsure at all n locations
agtcacctgaggcgtgcaagctttctcaccatgtatagcatgcttaatgaaacttcttacaatgatacagnataatacgaacacttggtcatcaaacagactgttgaccttctgaccagtcagcactaaagtacgtcatgtgcctttctggtagatctgattaagtcggccttagaagcaatggaaactagacttcaagagctttccaaaaagtacttatgggccttcatagcttttgggaatcaaaagatatgactgtttcttctggacggttctgttgcgctacattgactcggacataactcttattgctgattcgcccttgatatgtgttgtccttcctctctggtgaacctaagtaatatcaacatacacgacttacgtagcataaagatctcattagtgtttaattgaaattcataaagtagcgcgtgcacctcttc

SEQ ID NO: 40003 - DNA, 455 bp, Zea mays
  unsure (1)..(455): unsure at all n locations
tgccttcgcttcagtctatcatccgcaatccaacggngtctttttctcgccaatgggaaaatcttcacagctgtcaagaagatgctccttgatgaaaaaaaggcagatggaccgatttgttaccggaggcagtctgggcgctaaacacaactgagtgcagggcgactgggttcactcctttccgccttctatacggatcggaggccatgaccccgcaagaaataaagcatgggtccccgcgtacagttccgtcagccatccgcgacgtggacgagccaacttcaaaagatctcattgacggagaccgggtcttctccctatatgccctaaacaaataccaagcccagaccaaagcatggtgcgaccacgcagtcatccccagggagttcagcgagggggacctcgtactcttccgacagctcggacggagtccaggggcaagctggagcccaagt

SEQ ID NO: 40004 - DNA, 412 bp, Zea mays
agcttgtcaattctagtcttaaagggtagggtctctggtgtttcattaaaacatgctttactctggccaataatttgaagtggacagagtggggggaaaggaattgtggtgctgcaatgtgttgttggtaagctggggcaacgcaattactgattgacaacaccccagcaaactaccaactggggccattagtaatgtgtcctggtcaatttggctccctaaaaaaacttggtcggatgaaaagtaatatattccaaaggatgatattttagtgtaccaaaagcaacatgacacttgttcaacagcttcactattctagtgttagaagttatggaacgcatctgcagtaccacaagttttagaaaaagatgacatggaaatgcctctacgacatgattcttgcttattaact

SEQ ID NO: 40005 - DNA, 161 bp, Zea mays
  unsure (1)..(161): unsure at all n locations
accttcaaactcaacttgataagcctcangcctcctagctgtgacatccaacgttgtgtactatctgcacaatcaactgtctgaagctacagcttcaagaacgtactgtaagaaatatctgaatgtatatctcacactttgtgcgtttttcagatcctccc

SEQ ID NO: 40006 - DNA, 457 bp, Zea mays
  unsure (1)..(457): unsure at all n locations
agcttcgggaaccccatacttctagccatctcccggcagaaagataattctttgttgtctgggaggcagtataagaagtcatcttcatctgtgtcgttgaatactaaggcccctttcggatattttagttctcgggcatagtgattagcttcaaaaatctcttcttcagataatctcttccccgaagcatgtcgtataatgtaatcatgtattttggaagatgcttcgggggcagcagtgccagtttctccactcaaaatttgttctaccatttctgttttttcagcttccaaggatttcaccttggcgggctctgaaggcccggcttcagtttcagactgtggttntgaagcttcggcatcaaaggcttcagtttgtgcttcggaagttttaaccaatttctttggaggtgtgcttgaagaattgatagtctctaaaacatctagcacattaacca

SEQ ID NO: 40007 - DNA, 479 bp, Zea mays
  unsure (1)..(479): unsure at all n locations
tcctttcanaacanaacacagacgggaacgaacttatcatacagttccatttcatcactagtggaccaagcaaacaaggaagtccaacaagctaagaaaacctctcgagtcccaaagcggagttcttcagacacaaggtcgacatctgtatccaaatactgaagatacagttcgtttcagttgtagcttcgctcccttgtgaagctgttgcggtccgcttgcttggagtcgctgccgttgctgggcgccacgacgaggttgctgagggtcttcacgatctggagcttgacgccgcccctcctcagcggcggcctcttctccttctccgcgttgctgacgctgttgtactggtagcagtactccatcccttcctgccttcttggtgcctcgttggcagtgtgcgtgtgcgcgccccgttggttgagaggccaagtgcttgcttgcttgcttgccggagggatgcggagccggaaggagta

SEQ ID NO: 40008 - DNA, 444 bp, Zea mays
agcctcgcgtctctggccttacaactcttgtcaatatgaccaaaattactctgttaatagtttaagaaccgcccttctgattcccattgcctttaacttccgaagacccaaaagtaaagcttcttactcagcaatgttatttgtgcagctaaaatcaagtcttgatgcgtagcaagtgttaactttggagggtgcggcctacacaacggctgcacctgctccgaaggtttcccaagaaccatcctagaatactgtccatgcttcggcagtcttacttgcctcttctacctgagcccctggcgtgcagtcagcaatgaagtctgctcacgcctgcgactgaatcgaagatccgcgcacataatccatgcagaattgattaagctccgcagctcactatccaatgcttccagaagcttctctatatctcataatgtccctcaatgg

SEQ ID NO: 40009 - DNA, 403 bp, Zea mays
  unsure (1)..(403): unsure at all n locations
agctctaccttaatttacaaccaatctgtattntcttgagagtcttttatttaggcgggtaagtcttgctgagtaattgcgtactcatggttttattctcattattgctgcaggagagactattaacacttttgagttttgttaaactcatactggagacttttacttatgttctgtttatgtgtgtgctgcacgaaagaaaatttctttccatatgttgcaataagttagcacttgaacctacctcaggcatgtaataatatacacttcttggtctgtaacttaaaggtttgctaatgattattatcttatttgaaagacttccgtcaactcctatgttaaaagttacgctcatgttctgtattattataactgcaactatgggtgaacggttcttgaaatg

SEQ ID NO: 40010 - DNA, 477 bp, Zea mays
  unsure (1)..(477): unsure at all n locations
gacactataaaaaactcgagcttagccaaaataattcaagaaaacccgcaaatcaagcttcttttgttgggactcattgngaattctgagatgtagaattctgaaattcagaccttgagccaaagatcagggatgttcaccttgatccctaactcgaatcctaatggccccattgacaaatttgtgtctaactaacccctctgtcgtgtgccagaaaatggcattgggacgcgagccctatacacgacaaaacttgngatttgcctcgggtttgggcagggagacagaccaaatttcctggctccatatctctgcaaccagtaggcaaaatcctatgacctccacacaaaaatggtagcttgtatggaggagaagaagttctgtgcactggccaatgcgagagcatgctcggatgagcgaccacacgcgccagatgcttgggcagaacgcgcgggcacacgtgttctaccttggtcg

SEQ ID NO: 40011 - DNA, 426 bp, Zea mays
  unsure (1)..(426): unsure at all n locations
agcttgcaagatcagttgtgatgtgtgatttctttctgcagatgtcagaaaacacgcacagaggaggaatgtgtgctcagcaaaagtaagcaacaccgcaagatgaggcaccccagcaatagcaactgccacccccacccccgatgtccatcgagcagatgttcctaatgcagactcacgcagttcaagccatcggtcagactctggctgncattcagtagcagtagtagcagccaccacctcagcctcagatgccttagatgcccagggacaagcgtgctgaattaatgagaggtcatcccccagtgtttgctcactcttctgaccccatggatgctaaagactggctgcgcatagtggagcaggagatgcacaccgctcactgtgatgacagggagatagttctgtatggtcccagtctgttga

SEQ ID NO: 40012 - DNA, 426 bp, Zea mays
tattgaagaatgatgtttaattctatcggtcttcgaagtgtgatgaagcctttgaacaattgaagacattattaaccactgctctggtattggctcaaccggacatcaccaagccttttgatgtatattgtgatgcgtctggcagtggactcggctgtgtactaatgcaagagggtcgagtaattgtgtatgcttcatggcagttacgccgacatgaggagcattacccaactgatgatctggagctagctgctgtggttcatgccctaaaaatctggcgtcactatctgctgggaaatatctgtcatatctatacagatcataaaagcttgaagtacatcttcacccagtcagaattgaatatgaggtagagacgatggctcgagcttattaaggactatgaactggacattcattatcacccag

SEQ ID NO: 40013 - DNA, 450 bp, Zea mays
agcttagcatgatgcaacatgtcatgacttataagggtttggcaaaaataaataattaacctccaatagtttaggctatttctaatcaaaaaggaaaaaggtagaaagaatctagagagagagaaagcctagagtgagaaaaggaagagtaacacctgattttgggtgataattagaaagaaattttatacctccaaaatcagggtgttacagacctatcccccttaaaagaatctcgccctcgagattcagggctggttagaaaagagctcagggtacttggctttcagttcatcttctctttcccaggttgcttcttcttttgaatgatggccccacttgactttgcacatcctgatggtacttctccgagtgacccgatctgctgtctctagaatttgggttggcttctcaatataagtcagatcttcttgaacttcaagattctct

SEQ ID NO: 40014 - DNA, 355 bp, Zea mays
catatgttgatatgcatgtactcctaatcatacctctcgtggatcagagaacaatattatggctactatatttacatcatatgtttcagttggagcgatacctgcgagtattaaaaggttatgtgcgaaatcgcgctcacccagagggttcaatcatggagggatacactacagaagaagtgattgagagctgtatagattacatcactgatggaacaatgatatgtgtgcctggctctaaacatgagggtaaactatgtgcgagagggagaacgggcaagaaaacttttcccgttgaggattacaagctagtacattgtgttcatggtagtgtactaccactatttcactatag

SEQ ID NO: 40015 - DNA, 453 bp, Zea mays
agcttacgtgtcaatttcgactctcgtgtggatcaatcttctgtacaacaataactaggggcatatgtgtactgtgtaagcactaaccaggcaaatatgtacacgccaaaggacttgtcatcttacccatgctggagcagctatttccacactttgacagcaccgactctgctggctgatatcaatctctggctagacaagttgaaggatgccagcgcgagtattgcgtcacgatggcacccggcagaatctgcagctgcctccgcgaactgagtcttgggcgtcaaaccggataccgcggtattctgtttgtacatttcctgggcacaacacaaacatatatttacaaacagcagtttgcatacgcaggataccttgtttagggtgtgcttggttggatgacatggatgctatgtttggatactctagtatttagtacaatacagatgttga

SEQ ID NO: 40016 - DNA, 358 bp, Zea mays
cattttacttgctaaatgtcccatgtctaatgacagtgaccgaggtgacgactataacgggagaagaaaggataacaagaggtactactagaggaagggcggtgatgcccatgtttgtcgggaatgggattccgacgaaagctcaagcgacttcctcgacgacaaggacgccgccaacatcgtcgtctaccaagggactcctctttctcaacgtccggcacaagtgcctcatgtgaaaggacgtcatacggtaaaaggttaaatctagctccttcactatatatgaatctcctagtgatgacgatgatagggatgaggcgataatttgcgtattctctttgacaatcttaacatggag

SEQ ID NO: 40017 - DNA, 478 bp, Zea mays
  unsure (1)..(478): unsure at all n locations
ctcgacccgngatccttgagtcacctgaggcatgaagcttgcaacaaaaaattggctttctttctcacacgggaaggtttccaaaacctgcaaataaaagcaacgacatgatggctaacatgcacacacatttcattctataagaggatacaatctactaaaagaacgactttgtaaagacaaaataacccacgagggtattaatttggccttaaaaatagatggaagaaccttaacttatacaaattttactttaccactttgcatgacaagcccaaaaactaagaaccttaacttatataaattatacttcaccacattgcaagacaagccctacaaactaagcatgtcacatactaagatttattcctcatgacatcgcattaggttcttaatatttcaaaaattaaacatagatagtataacacacaaaggcctaatcaagttacttaatcatcaacaatgtcacacaaaatga

SEQ ID NO: 40018 - DNA, 364 bp, Zea mays
acgtgactcagcgggctggccgcggaggtcgaggcttgggcagaggtggcgggctgtggcgcgacatgctctatgcgaagtccggtgaacttcggcttatgcaacgcctgagagcgcgcacggaggtacaacccaggccttgggctgctttataggcaccacgaaggtgatggcgcgcggcggactagaccggacgttggggcgagcgcgggttgggcgaacgcccgcgtgccgaccaggttcaacacgtgtgcgcgttcattatgcccgagatctggcgcgtgtggacattcattcgagcctgctcttgccttggtcagtgcccaaaacctcttctcctccctataagctaccgatcttgtgt

SEQ ID NO: 40019 - DNA, 426 bp, Zea mays
gcttgcttcactcatctgcttttttttcagattaggagatagcctgaatagcaatccaataagctcatgagttctgaaatagctgctacatctacaagggagtctatccgaatttcattcgaacatgccttattgagatctataaaggcaatacacatcctccattttccgttggctttcttgaccatgactgtattggccagccactctgggtatgttacctctctaataacaccggcacttagaagtcttttcacttcatttcatgcaccttcgaccttgtcatcagacattttccggagcctctgcttccttggtctgaaggactagtctacattgaatgagctctcgatgatgtcccaattaacaccacagagatcattggctgtccaagcaaaaacatctgtgttgttaaacaaaaacctt

SEQ ID NO: 40020 - DNA, 303 bp, Zea mays
ctgaaccactctaaactctcgcgagttcatgtagttgatgaccccttgctctgacatacgcacaccttaacccccttcctcatcttaagatatatggcggtgcgcactgcgccacactgccggagaatctactgtccgacggtctctaattacataatcgcacaatggaattgcactgacagtatagaactgtacccaggacagatactgctcaacatcgcactctgtacagcagcatgaagcagacttaactgacgatcatatcatgttgaatgctgctcatcaggttgtaattgcttgatt

SEQ ID NO: 40021 - DNA, 449 bp, Zea mays
agcttctaagaatccaccagactcagctaattccgagttggactgcaggttagattcctaaaagtacaggggcccggctgcaaagtttcttaaacaaatgggcacggactccctactgccaccagatccgaaatggacgtcccagattagatcaactctcaaccgaaccggtacgcattataggtccttggatctcgatccgatggctatggttttaaatcgcgcggatcgcacgacatccgcccaatcactgatcgacggccagcgcgtgctagttcaaaccggtaacttctaggtttaatcgtgaccgctcatgtggatccaacggcgagtggacatcgtctccacactatgccagaccgcatggtcttgcccacggcgcatgacggcagcctcaccggcgagtgctccctagacgcccctcggtcccgaaatccaccccaagtagt

SEQ ID NO: 40022 - DNA, 446 bp, Zea mays
  unsure (1)..(446): unsure at all n locations
ggcgcctgcgctcctctcgtttgacgcgcagtccttatggcanggaacancatataattaattataggaattgaagtttagtgcagaaactaaattataaactcattttattcatagataatacatactaactcctttttagtccattccagttcctataattatgtaatattgtggtttatcatctagcaccactgttttcacatgaaagccacattaataattatatcctatttaatcttgtacaaaacacatagaatctcttaactccgatttgatccattcaagccgtgttagtctcgtacaagtatttactatgcaataacaacatttattataccatgtctcattattttatgattagatctttatttaatctatggttggtaggctcgttaacctacttaccattataatctactaaaatatgatctatggtcaattca

SEQ ID NO: 40023 - DNA, 411 bp, Zea mays
  unsure (1)..(411): unsure at all n locations
agctngagtcagtcctcttgcaaaggataattgatgcctctaaggataatgggggcatgaaacacattcgtgagaaggtaagggctggaaaagccaaatgcttcaaagaagatgaacaaggcattgtatggtttaataaccgcatagtagtgccaaagaatgaagagctccgccagcagattcttgatgaagcacatcttagccgctattctattcatcccggaagcactaagatgtaccaagacttgaagcaacattactggtggacaaagatgaagatcgaaattgcacgatatgtggctagatgtgacacctgcaggcgtgtcaaggccatacatttgaaagctgctggtccattacagtcgctaccaataccgacatggaaatgggaagacataagtatggatttta

SEQ ID NO: 40024 - DNA, 468 bp, Zea mays
ctacccaatactcaagcttatcaaaagagaataatggcaagagctcgtccatatgtaataatataaggggagttatacaagcatggagtctgttctccattgctcaaatgtctatccagaaccgaaggtaaagagctgatgaaagaaatacatacaggcctgtgtggatctcacatcggatccaggcctttattgggtaaggtttttcgtcaaggattctattggccgaaggcagcttcggatgcagcagaattagtcaaaaaatgcgaaggttgtcaaaaatgtgcaagagatcaaaaacaatcttcgtctctaactcaattaatacagcccacttggccattgcaaagatggggccttgatttgctaggcccacttccaccagcacaagggaacttaagatatgttgtagtggcagtggaatatttttctaaatggattgaggcaaagcctttagccacaataact

SEQ ID NO: 40025 - DNA, 357 bp, Zea mays
agcttaacatgttcgatgcggatgagagatatttttctatctactgcagttgcaatccatggagacaaaacactatataagttgtataagccggtacggattaaagccaagcgaacaaagattccagcctgacactacagtaaactctgattgtgtgcatctgagtgtcatacgcgtcactgtttgatatttgacacaatgccccccacatatgctaagatatagtaatacttcacacttagcctaagtatgtgcaatttggcattgaggcaaaagttgagattttcacgtaagcacatatttagggggagcattctatagcttagaattcacaactgtgctttaaattttaatatt

SEQ ID NO: 40026 - DNA, 464 bp, Zea mays
tgtgaagattcttcatcctaacgtgggctagtcggcgatgctatttccaacccatgctaatcttagcaattaagcatgtgtcgagttcagctctattgaaatcaactaagtatagctgactctctaacactcccttaaaagctattgaattatcacttcttctaaagacagtaacacctacatctgtgaacagacagttgcaacccattttacataattgtgagactgaaagcaacgtataatctaatgaatctaccagaaaaacattggaaatagaatggtaaggtgatatagcaattttacccaatcctttgaccaaaccttgatttccatccccgaatgtgatggctctttgcggatcttggttatctcataagagaacatccttttctccctagtcatgtggtttgtgcacccgctgtcgataatacaactcgagcccctggatgataaacctcaaaaca

SEQ ID NO: 40027 - DNA, 420 bp, Zea mays
cgcttgtgaaggttcttcatccacacatgtgctattcggctatgccacagccagcccatgctaatcttagcaattaagcatgcatctataccggcctcttcttttgcaaaatcaactaagtatagcttgccgtctaatacacccttaatagctaatgaaccatcacttcttctaaagacagacacatctacatttgtaaataacagtcatatcccatatgacataattgactaacagatagcaaattatatccaagactttccactaaaaacacattagagatagaatgctcattggagattgcaattttacctagcccttttaccttgccttgattaccatcaccgaatataattgaatcttgggaatccttattcttgacataggaggtgaacatcttctttctccccgtcatatggt

SEQ ID NO: 40028 - DNA, 479 bp, Zea mays
  unsure (1)..(479): unsure at all n locations
cttgagcatgattatcttcaaacttctcttaacaactatgcttattttctanagcanagatgttctccttaattnggtctacaactttgatgtggtgacctaaggcaaaatctcttttgtttagaagttacaaggtctcaaagatgagcacaatacactgaaattcagacttagaatagaacctaattgaggtccattttgcatttaagtccaaaatccaatgtttggctttcaagtccacacatttgtgaaccaaatgacttataatacttatttgacttggtttttgcactttagtccaaaagtggactaattntgcacataggtccctagggttgggatttagggttttccagggttctaattaagatntttggtatcccaggggtataatatgattcaactntgtttttggngacactttatgactctttctctgaagcctttangctntctcatctagggttaagttttactcc

SEQ ID NO: 40029 - DNA, 454 bp, Zea mays
  unsure (1)..(454): unsure at all n locations
agcttctatagggagaacacatatagggactaaccaatgttcattttgagaaagacagggtttgtagcgcatgtcaagcaggaaagcaagttggtacccaccatccacacaagaacatcatgatgaccgacaggccgcttgagctactccacatggatttattcggcccgatagcttacataaacatcggcgggagtaagtactgtcttgtaattgtggatgattatcctcgcttcacttgggtgttctttttacaggaaaaatctcaaacccaagagaccttgaagggattcttgagacgggctcagaatgagttcggatcgagactcanaaagataagaagcaacaaccggcggagttcaagaactctcanattgaagactntcttgaggaggaggggcatcagcatgagttctcttcctcccacacacctgaacaaaatggtgtagtggag

SEQ ID NO: 40030 - DNA, 224 bp, Zea mays
  unsure (1)..(224): unsure at all n locations
nttcctgcacaagcgctgcgcttactgcataatgcgaagctgtcacatataataacagaggagcccctggcgtgggtggagttaacgttgttaggtctatcangtactgcttcagctcctcgaaggctttctgctgagctgatccccattgaaagacttcggccgacttcagcacttcaaagaatggtaaaattctctctgctgatctagatatgaatcaattc

SEQ ID NO: 40031 - DNA, 482 bp, Zea mays
  unsure (1)..(482): unsure at all n locations
agcgacctgaggcatgcaagctggccttcgcttcagtctatcatccgttgtccttcggtgtcgaggagcgcgccaatgggaaaatcttcacagctgtcaagaaaatgctcctcgatgaaaaaaaggcagatggaccgatttattacctgaggcagtctgggcgctaaacacaactgagtgcagggcgactgggttcactcctttccgncttctatacggatcggaagccatgaccccgcaagatataaagcatgggtccccgcgtacagttccgtcagccgttctcgacgtggacgagccagcttcaaaagatcttattgacggagaccgggtcttcgccctacaggccctaatcaaataccaagcccagaccaaagcatggcgcgaccacgcagtcatcccgagagagttcagcgaaggggacctcgtactctgtcgaacagctcggacggagctcaatggagagctggagcccaagtggg

SEQ ID NO: 40032 - DNA, 472 bp, Zea mays
  unsure (1)..(472): unsure at all n locations
tactcagcttgctcagggccttcttcttttctccatagcaggaaccttatctgtattactatcccacttaaaaagaatgaggtagaactcttgaatcttgtggatntgaactccttgaagtaccacataacaagggtgttacggggccttcttctactgttgttgcttgaccaggctgcggagagatgactgacacagggttgattctgggagaaccttcttatcttttcttcactatcttcttttctcttctcacttttcacttttcactgcctctttctttctctttgctcttcccactggaggattctatcgatgagtattaccatcatacagaggaggaaatcaaagactatgaaccatgtgcaacagtcttcaacccacgaattaccaagcattatgatcttacgggcgagggagtggaaaatggagttgcttgcgacttggcagaggggatttatctggagtgtgc

SEQ ID NO: 40033 - DNA, 183 bp, Zea mays
gaagacacagcccaaaggacggcccccaaacagaaaggacggccgaaatgaagaacgacaacctgagaagaacaacccgccaaacaggacaagcataagaggaacggcggaacgacaaaaacacacgagaagaaatcagatgaagcaaacacgagacacacacccgacggcacaagagcgcaa

SEQ ID NO: 40034 - DNA, 353 bp, Zea mays
  unsure (1)..(353): unsure at all n locations
aactcaagcgggggaagggacnncatccgcacacgagctaagcggttatgtttcagccagcccatgctagacgcagcgagcaagcatgcagtcagaccggactccattctgcaaaatcaactaactaaacgacgccgcctaatacacccatcaaagctagtgaaccatcatagctcttgaagacagacacatctacattacggaatacacagtcatatcccacattgcgtaattgactaacagactaccaaatagatccgagagactctactacaacacattacagataggaggcccattcgagatagcaattctacctaacccgtctaccctgccatgagtcccagcaccgc

SEQ ID NO: 40035 - DNA, 460 bp, Zea mays
  unsure (1)..(460): unsure at all n locations
agctnggcaaatgcactacataacttttattatctccaagaagttattccaggtttaatcaaatcaaacattacagttttcgaaatctgttatgacagaggacagaacacaacaaccagtttgtaaaattcataacttttaaactatcaggcctatggttataaaattttaacacaagctagataagaaaagcatctacaactttcttataacgaccatgaacagattgtaacattaacttaagcaaacaatgcagcttctgaaatctgtacagaatttggacagattcagttactgaatttgtaaaaagcataactcctaaactgtcagacctatgactgtcaaattttaacaccaccaagagaataaagttatctaccacttttctatagcacatatctacagaaaacacaatntagttcatcaaacatacaacacaactaatacagcgcgtgcagcc

SEQ ID NO: 40036 - DNA, 471 bp, Zea mays
  unsure (1)..(471): unsure at all n locations
ctttaggcaataatcaccttgggcaaggaaggattgaaccttgtgctctccctctcttgaagctnttagttgagagaaagattatgcaaatgcacatttcataatttaaacccttaaccaaagattaagagtaccaaaatgtttgcaaaagacagtaaaggaactttacaaaaagacccctataggacccctaaatcagcccccaagtggagaacactatggaatcacccccattccttaagtccaaaatcaaccataatctatagagcaggggtgttcacctagctaatggcatcaaaaccctagggtctaaataacaaaaaggagccaaattatctaatgaactccccggaagagtttgaacccaagccaagaccgtttgacacgagttggcacctgttttgtctcgggttgaacagtgtagacagacaagacttggcgccaccatatcttctaaaccagacccgatct

SEQ ID NO: 40037 - DNA, 456 bp, Zea mays
agctatgcaagaagatgagatggtatgaatctctgggatgctcgagggagttaattcaattcttattaactcaagctatcaaccttcaaataatctacattctcaagattgacccaaagttattttaatttgttatattcaaaactcatatcatctcggaaagatattaatgttgtaggaaatgaagaatcatcatgtgcggaaaatcaaggcctacaacatgaaggaatgtcaaaggatggtaacactcatgcttttaagtgcaagtatattaaattatcatttcttatatgtcctgtgtagtcacatagaaaaaggaagcacttaagatgttttttttaaattatgtcaccattctttgaagaaatttctctcatatggtagattgtgcattcatcattgctatattatgataatctacatgcttaaattgttgcaagttcccatggcatattt

SEQ ID NO: 40038 - DNA, 449 bp, Zea mays
ttaagtcacctgaggcatgcagcttgggacgaacctgcacaattcttttttctactcccggcttaatgatacatgacaatttggcccattcaattaagtttcagactgcctgtttactgcagctttcactttcacctaaatttgcagacgaaacattatgttgtcacctcatggagtgccatcaacacaacacatttaactaactgatctatgacatgagtcaatagctatatacagaaaaggaatgttcacaagcaagccgctcaatgaaccatggtagtaaaattgtgtctaattggatcacctacatctaattttcaaaattcgagccccatcctgcacaaaagaactaataacctactgcatgcctatctgtgcaagataaactacgatgagcagtaaccatatgggcaacgcacgagatggacctaccgagtgatatatatcta

SEQ ID NO: 40039 - DNA, 368 bp, Zea mays
cgtacaaagcccgctggaattaatcttaggagaaactctatctgttgcatatgacacccgaaggtgcaacacaacacgcaatgagtgagtttagaattattgcatagcatatcatcacaagggacctgtgtaaaagttcttatcatacaaagctattcccactttgagagaatgggaaaggccgaagctacatggggaaaataaagaacgagaactccaacgattaccttactatcttaagtttaaaaagtactttaaatcaccttgccaagatcggctagatacgaccgaagcactgtgtaatgaaatacttggcacttattgcaaaaagaagacaattgataccgcaccttttgcactctcaaaac

SEQ ID NO: 40040 - DNA, 447 bp, Zea mays
  unsure (1)..(447): unsure at all n locations
agctnttaagttatctcaacttgtgttgtgtcttacccctttaaccactattgaagggtaagtcacttaaccagggctctatttgccaaaacattaaaacaatacaacttgactgaaattattacctaatgaatgcactctatgtgtgtcaaacatatgcaatgccaatgcttatgatgccatgctcaagttttatatattagtaacaccagcggtgttacattctttcccccataaaagaatctcgtcccgagattaaaaattctagggtaaataatggaaaaggaaacgcggaatactttcatttccttatttctggtacaaagcacgggtgatgtgggggttcattcctttattgcacaattatagaggctatacaatttacacgaggctagaaagcctaggaaattcttattcaagaagtcttgagttttccatgtagactca

SEQ ID NO: 40041 - DNA, 430 bp, Zea mays
agcttaaaggagaaaagaaagatagggagcttgtccgactaccctattattataagtttaaaaaatattttaaagcactctgccaagaatagctcgatacaattgaaataatgagtaatgaaattcttggaaattactccaaaaaagaggaccagctgatgacagcagccttcggcactcggccgaagcgaaggctgaacagggtgcttgatgctataggatttgaatatgctgattatggtcgactgagcggagacgctgaaggcccgaagcgaaaaagaattggcagcgctactgacgaagaggtcgccaaggtagccaaaaagaaaaagaaagattctgaataacttatccctgaagagttaaactctgagccgaatgtggccactacaagaaagagaataagtgcatctcctaaaccggaaacgct

SEQ ID NO: 40042 - DNA, 472 bp, Zea mays
  unsure (1)..(472): unsure at all n locations
acacttagatactcngcttctgtgtacaaaccgacttagagatagaatgaccttcttgttcataaagggctgagtcaatgtggtaaacttatatgaggagcatcattgtaattcttcacaggttgtctcctgcgtctataaatagcgaacagtattcctttactgttcacgcattcttgtaattgcaatcgcatcattcgggaaccaatctttgccaaggcagaggtataactatattcaatgactcaatatattaagtaaatataatatgattcgcttatgatccatttacctttgataccctttattttatgctattctatacaatctattaagattcaattacaaagacttaaccttcggaatcatattctcatcaaccttcgtccaaggatcattatcctcaatggaataatgcttcgtggaccaaggaccttaacatgtaacatattatgttgacttgtccttattc

SEQ ID NO: 40043 - DNA, 452 bp, Zea mays
  unsure (1)..(452): unsure at all n locations
agctntccananagtcttggatcactatttttggtggtctgaagattaagttacatgtgtttgaagtgtgaagactgaatctgtccagttttggacagcacagccttcatagtatattttacccttgatacatgctaaaccagccatggatgtttataaataatttgtaggacatttaattagctttccagaaagtctaggatcacttttgtttggatgtctgaatcttttgttgtgaatttttgaagctgcaagtctgaatctgtccaaatctggacagagctgctgtgtctgcacaattcgaccttgctaagtgtttaatcaggttgtgatgacaatactaaagttgtagagcactttttaagctttccagaaagtcctagtttgatatttttggactaacacatgaagagttatgaataaaacaagcaactgttgtattgctgccaaaa

SEQ ID NO: 40044 - DNA, 475 bp, Zea mays
  unsure (1)..(475): unsure at all n locations
tgtgttgagagacaactcactccccatgtatcaccttacaatccatttatgctcctttatcctctnttcttgtgaggacaaagtcaatctgactagtgttggccactattatatgtctctaaatgggggtctcttcctgaaggaagtattggctatcgacatgtcaaaaggtttttatgacttcctctccctcctaattcctactatcatgcccaaaacacccatgaattgtcttgaaacctacacttgttgtatctacatacccattgagacctcctatgaaaaaaacttctcactcactagtagtagctctaaccatgccatctaaattcccataagcctcttactactctcatcatggcctacttgggggtttacttgctaattacattcaaggccaaatcacccacgataagctngactaagaataatttatctccttctcacatncaccatactattcttgagaatctta

SEQ ID NO: 40045 - DNA, 402 bp, Zea mays
agcttaacaactgtccttgcggagcggtactattgttcttgttgttcctaacacaacatcgagcacattcgccatacttctccttataagagttacggcagaacccatttgtaccttcggtactggtgcctctgttggagggctcaaaatctctggcatcttctatattttttcaatttttggctcttcaaccttatcaaccttcggttcaaccagctcaactgtaagcatcttaggcattacagctggctcttcagtgctctacacagctggagcagtttcttttatttcagtagcagaagaggtccctgcgccaaactcatgcaccacggccggttcaatgtaacgcggtcggtgggtaagaaccttcaccttttagcccttcggcacaggctcaactgc

SEQ ID NO: 40046 - DNA, 461 bp, Zea mays
acatcatgtgcatctattaagttaaagcaatatcattttcttaccatgattaacccaaaaaggtaaaaaaagggtaaggtaaatacagactagtcaatacttaagtttcaaaaaaataatgcgggacaatgaattacaaagtgagtaggacatgataggtctaaagacacttgccttcaccatgttgttgctcagagggatcttcggtaacacactcaggaaccacttgctggtcgttgtctaactaaagcgagcatagatataatacatttggaaagtcaaaatgaacatcactgcacacatgtacaaacattggcatacaactcagaaagggatagtattcagtacaggggaatgaggtcgcgttattaaatggactaatcctaattggagaatttattactctctaagtgttgggaacatagctcaacaagtttagtagtaactaaactataaaagat

SEQ ID NO: 40047 - DNA, 460 bp, Zea mays
  unsure (1)..(460): unsure at all n locations
agctgtgganaatgtccgatgataaagacgattgtgcactatatgaattaaagagacttctcagtgccagcgttatcagagaagtaacatatccagagtggctggctaacactgtcatggtgaaaaaagctaatactaaatggagaatgtgcactgatttcacaaatctcaataaggcatgttcgaaggatgaattccctctaccaagaatagattcccttgtagatgcagcagcttcttcagaaatcatgagtctattggattgctattcgggttatcatcaaatttggatgaaaaaggaggatgagccaaagacaagcttcataactcctagtggtacctattgctaccttcaggtgtctcaggggctcaagaatgctggaggaagctctcgcacaatgactgccaaggttcttcactctcaaattggcaggaatgtgctgacttatgtcgatgacat

SEQ ID NO: 40048 - DNA, 460 bp, Zea mays
  unsure (1)..(460): unsure at all n locations
tcggcgtctntatatgtttcttcttcctgagccgctggcgttcaatctacaatgaagtctgctaatgcctgtgactgaattgaggatctatgtacatagtcaatactgaattcgttaagctccatagcccattttccaatccttccagtagcttctctgttcctcattatgtccttcacaggctgtgatgaaggaacaattatgtgatatgcttgaaaataacgtcgaagcttactggaggccattaacacagcatacaacaccttcttcagttctgtataagttttctttgataaacttagaactttggagacgaagtatactgcggcctgcttcttgaattgggcatcttgcttctcttgtacaagcgccgcactaactgcatgtgagaagctgctacatacatgagtaatggagcccctggcanacgtggagttagagttgttagatctatcacgta

SEQ ID NO: 40049 - DNA, 474 bp, Zea mays
  unsure (1)..(474): unsure at all n locations
ttaagtaanctgaggcatgcaagcttgagcacattagcctgcacactactgtttttttctcccgagcttacaatgatgagtgttcgtcttgtgattcagcatgatatccatcaaggatctgacgagtctgtgatatattctaaaacttcagatcattaatgaccatcagccatgaattgtcatttccaactggttatggctggaatcaggaaactatgcacgctcctgacttgtgattaactgcatgtacaagttcccctatggttcttagcacgttggaatccgtgagagattttccatgcgtaaattgggtatgttcccaatctcaccaccggagcatacatgtatgggcacacattaaactgggaattctatgagagaattccttcttcgtctatcattcaggtatagaatctcttctgagaagtgtttacagcccgtacacttgctgaaatcaaagctttccaagcatta

SEQ ID NO: 40050 - DNA, 147 bp, Zea mays
cgcttcgactccatctatgttgaggattgtttgtgtatctgtccaactcccttcagcccttgtagcagcctcttgactgccatggacaacaatgggcccttaatctgaacgtatctttatgcatgagtatgctggatgaagtttgct

SEQ ID NO: 40051 - DNA, 433 bp, Zea mays
aagctcgtccatcactcttatgctcctcctcagccgaggcaggattcttctttctgtccaacccggcggcaagatggacggccaagtcacatccagcaaccacgtactccacagaacctgtgaaattatgcctcaagcaaggctgagtatactaatactcagctagacttacccggtgtgaggagactactcctctacctctatacatgcagctgtatggctgatgggtttggttaccaaaagcactacatgagttcatagatcaaggtttagctttgtcaagttttagagtgactctcttaatactaaatgtatacctagctactcatacatgtgatcaaacatttatcaatcaacaacttttgtcaagccatcacattaccacttcgtactcaatgtaccaacatggatcaagcactctcattatctgcga

SEQ ID NO: 40052 - DNA, 444 bp, Zea mays
  unsure (1)..(444): unsure at all n locations
acactatananactcaagctcgctttgtgccttancacatcttcaatcaatcgaattatttctttattcgcttcgcattcaatctttctattgatgcgatatgatgcatgatgtgatgctatgctaaatgatgctatgataggatgaaatatgatgatgctttaacacccacacgtacgcccacactggtacacggaagactctgcatccccttgggaacgtcttttgagactaagctctgcatccccttaggaacgacttttgagcttcttcaccttttatttcggcggtataagtattgcatcccctcaggaacgacttttgaacttcttcgccttatatttcagcagcatttggctctgcattccctttgaaatgactttngagcataaaacttacatagtgctccattaggaacgactttcgagcttcttctccttatat

SEQ ID NO: 40053 - DNA, 450 bp, Zea mays
  unsure (1)..(450): unsure at all n locations
agcttatgcctgattttctctcttttaatttacaacaaanacaacaacccagtcctccaaattcattgaaccattcatgatgaaaacttcttggattttttttctccaagctgtgaagagggaaaattatatgcaggaggttggcaaagcccattctctaaatatttccttcttcctttctcccaaagtttcggatggtaggcgtcaatttcctttctcaagcctggatcatatctaattccctcctcaaaattaatctcacgtacacatattggtatgtttgcatgatcatgctctttctctggtgcttatatttttttaattttaaaaaaaatctttccataacctattatttagaataatatttgtattttacttgatcgtagattgccttgtgatcgacctagaagtagaggtttggaaacataaggcgcgagcggcatacaacct

SEQ ID NO: 40054 - DNA, 439 bp, Zea mays
tgaagccatggtaagtagcatgggctaataatatatttatttactcaagcctagctacgggtgcataggtttcaccgaaatccaaaccttcgacttgggagtatcccttggccacaagtcgggctttgttccttgtcaccacaccatgctcgtcttgcttgttgcggaagacccacttggttcctacaacattttgattaggacgtggaactaaatgccatacctcattcctagaagttgttgagctcctcttgcatcgccaccacccaatccgaatcttgtagtgcttcctctaccctgtgtggctcaatagaggaaacaaaacagtaatgctcacaaaaatgtgcaacacgagatctagtggttacccccttatgaatgtcgccgaggatggtgtcgactgcgtgatcttgttggattgctcggtggactcttgggt

SEQ ID NO: 40055 - DNA, 457 bp, Zea mays
agcttcagcagaatgacagcgaaggttcttctttctcagatagacaggaatgtgctaacttatgttgatgatatcattgtaaaaagcacgaagcaagataatcacattgctgatctgcaggagaccttcgctaattttagacaggctggtttaaagctaaacccagaaaaatgtgtcttcggagtgaagaacgggaaatttcttggttgcctagtttcaacaaaaggaattgaggctaatccaaacaaaatcgaagctatccttcgaatggaaccaccaagtacaaataaaggggctcaaagattgacaggaagactggcatctctcaacagattcatatccagatcagtagagagaaaattgccatttttcgaagtgctgaagtcagccgaagtatttcagcggggaccagtccagcagaaagccttcgaagagctgaagcaatatttaatagatc

SEQ ID NO: 40056 - DNA, 466 bp, Zea mays
  unsure (1)..(466): unsure at all n locations
ctcgcgaagaaaagatgcncgaagtgtggacgaggagattcttgtgagacatgtntgcacgacaaaatgacgtaaatatactctctcgaatatgaagcgctctcatgtaagaaatagtagcaagaatgtacttccataaacagtggcataaaggatcaatctataaataggtgaacaatgtgatcgtctcttgagggtcgatcatttgttgagaatctgcttgtagctactcttgtgttaacaaagagcttccaaagtgacgatgcccaagactatgttagtgattgatagcacctcttatgtttcatcacacctaaagtttatgttcggctatatgacacatcttaccttatggacattgctatcgttttagatgtcatactctttgtcgaccatgactacacgactatatctatatcctccaaggaaaaggcacaaaacttatgcaccccctgaacttgcagga

SEQ ID NO: 40057 - DNA, 401 bp, Zea mays
aagaggtctatgttgagcaacctcccggctttgaagatagtgagtaccctaaccatgtttataaactctctaaggcgctttatgggctcaaacaagccccaagagcatggtatgaatgccttaaggattttcttatcactaatggcttcaaagtcggaaaagccgatcctactttattcactaaagctcttgaaaatgactcgttcgtatgccaaatttatgttgatgatattatatttgggtctactaacgagtctacatgtgaagaatttagtatgatcatgacacacaaatttgagatgtctttgatgagggagttgaagatttcttatgattccaagaaagcactccaagaagcaccttcctaactcaacgaatatactcagatattctagcatgtt

SEQ ID NO: 40058 - DNA, 413 bp, Zea mays
  unsure (1)..(413): unsure at all n locations
ggatatgttaataaccgctctttcagaagctcgaccgaaggtgcttttattgtttccaaaaatacttccgaaggtaaaggcagcccctgtgctgctgacttggccaatagatcagcgtattcattttctccacgaggaatatttttgacatagaatccttcgaaagaagcctcaatccttccgactgtatctaaatanttttcaagcttcaggtctcttgctttatagctcttatcaatatgaccagaaataacttgggagtcagttttaagaatggcccttctgattcccattgcctttaacttccgaagacccaagagcagagcttcgtactcagcgatattatttgtgcaactaanatcaagtcttgccgcataacacagtttaactttggaaggtgacatcaacacacc

SEQ ID NO: 40059 - DNA, 424 bp, Zea mays
  unsure (1)..(424): unsure at all n locations
agcttcgcgagagagggaatgagtcccatttctcttgagaagtctagtgttgcggagtggagttcgatgtctgagtgagttcgtctacatcgtgcttgccgcctccgcctcctccgggaaggccctgngcatccccttttatagatacaaggggatggtccagctgtacatatgggggtgtagctatgtgatacacgggccagccgagaagtgcttgagccctgtagaaacgtaactagcggtgcggccctgggtcctgatgacgtttctttgccttcgtagagagcttgagaacaatcgacgtcttggacgcatgcagggaaccatcattacctgttgccggagtaatctagatgtgacaccggtcttgttccttcgtagcctgaggcggctagctagaggtanggtaatgatgtatctcctg

SEQ ID NO: 40060 - DNA, 441 bp, Zea mays
  unsure (1)..(441): unsure at all n locations
ntaagctctntgacaataaaataactacatctattttattctaagatgcattcatgcaggagtgaaatcttaagaggtctaactaggtatgaagcacggataatgcatggacatgctttctctttcttttatacaagacatacaaagaatgtatataaaaggaagatttatgtacatgtgtaaataaagggaagtagttttaccgctttgtaccttcacatacggacgctctcttcattgtgcttcgtccttagtcttagatgcttaagacctatactcaatgacaatatatggaaatattttgcacaacagagagtttaacaactactgatccttttctaaagcattgtcagcatatatcanacggatcacaaattggatatcatgaattctcctcttaacttagtgcatatcaagacatatattgattgagagtatata

SEQ ID NO: 40061 - DNA, 449 bp, Zea mays
agcttgaaaaatatctagatacagttcgaatgattgaggcttcctttgaaggattctccgttaaaaatattcctcgtggagaaaatgaatatgctgatctattggccaagtcagcagcacatgggctgcctttaccttcggaagtatttttcgaaacaataaaagcaccttcggtcgagcttcttgaaagagcggtcctcaacatatccactgtctatagtgaagattggagaactgaaatcatctctttccttcagggtaattttctttcagacgacgaagcttataacaggaggatagaagcaagaactcgaccatatgtcataatagaaggggagctatacaagcgtggggtctgttccccgttgctcaagtgtttatccagatccgaaggtatagaattgatgaaggaaatacacgcaggcttgtgtggatctcacattggatct

SEQ ID NO: 40062 - DNA, 394 bp, Zea mays
ctcgcctttaacttgtgcggaatcaaagtttatttttcgctgtaagcctcccttatgagcttcttcgccttttactttcagcaatattcgcgttgacttttcgcgcttcgccttttacttaggcggtgtcagcgttgacttttcgctgaatgctctgcattccttttggaacgactttggagcagaaaacttacactgcgctccctttggaacggctctttgtgacttctacaaacttactctgcgttccttagaacgactgtttgttacttcaaagaattatcgataatctgaaggtcctcttttgtagcgccaatctttatacttcaacagcttaatcctgtgacgaatatatattgtctttgtgggaattcaacaacatatttacttgaaa

SEQ ID NO: 40063 - DNA, 459 bp, Zea mays
  unsure (1)..(459): unsure at all n locations
agcttgacaacaccatttgacattgtacataaaatttctgagatcaagaatatttagttcattcctcaacatgcaaaagcgggtcttatcaagtggcttagtgaaaatatccgctaattgatcttccgacctcactccttctaaaatgatatctcctttagcaacatgatctctaaggaagtgatgacggatatcaatgtgcttggtgcgagagtgttgtacaagattattagcaattttaacagcactctcattatcacacaacaaaggtaccttttctagaactacgccatagtctagaagagtttgtttcatatataaaatctgtgtgcaacaagcacctgcggcaatgtattccgcttcggcagttgacaaggcaacactattttgctttttggatgtccatganactagtgatctaccaagcagatggcatcctgcagaagtacttttcctatc

SEQ ID NO: 40064 - DNA, 452 bp, Zea mays
  unsure (1)..(452): unsure at all n locations
ggccaaaataaattaaataaaactctaaacaagcttctcatgtgtgatttcattanggaattctgaaattcagaattctgaatttcagaccttgagccaaagatcaagcgtgttcaccttgatccctaactcaaatcctaatggcccattgacaaaaatgtgcataactaacctccctgtcttgtgccagaagatggcattgggacgcaagccctagacacgacaaaaccctggatttgcctcgggtttgagcagagagacagaccggatttccgggctccaaatctctgaaaccagtaggcaaaatcctatgacccccacacaagatcggtagcttgtanggaggagaagaggttttgtgcactgaccaaggcgagagcaggctcggatgagtgaccacacgcgccagaacttgggcagaacgaacgggcacacgtgttcgaccctggtcg

SEQ ID NO: 40065 - DNA, 461 bp, Zea mays
  unsure (1)..(461): unsure at all n locations
agcttgaaccatacgtcggattatcatcctttgtttctttgtatatgggtntgtgccctgcttctatcatggtgtatgtatgcacgtcctaggagagaaccacctgtctttctttgaacatgcgaagtcgtttgtataatttgagtggcagaaagtatgagctcctcatcatcgattgaagaagattcatcaaaactcgtgaagaaatccctatactttgacttgtatcacctagtaaataaattatttgatagcatgtcatgagattacataaatgagtatgtcgagagactaaatttataacatatcatccaaaaacaaatttgtaatcaagaatgaataagcaataataatccctccatcctaaaatatagntatttctagtccactgttttctgtctatattcatttaaaggataatgaatatagacatacatataatctacattcatatgttactt

SEQ ID NO: 40066 - DNA, 480 bp, Zea mays
  unsure (1)..(480): unsure at all n locations
tgaggctggcctctgcgccatgacgaagaacgatcttgctgttattcttgcatataacagnctgaaggtacaaaaattgcatatttggaagtttatgaattttgaattattcgtttgttcttatattaacccattcattcttttcatatagggtttaatacttagcaacgccttaagggcgcaaaagaatgccgaagacgagagttgcactattgctctcaataaccttcgaaaagaggttattaagctgaggaatgaagctttgaaaaaagacaaaatcctacttacgttggtggacaaagtaaaaggggatgaagctaactacaagacccaatctgaaatccaaaggaacgagattaaaaaccttcaaaaacaactggccgaagccaattgaaatgcgctattgccgaagctgaacgagatgccagtgaatactggaagtttttttntgtaaaaacaattgcagagcttcgctcatcg

SEQ ID NO: 40067 - DNA, 441 bp, Zea mays
agcttagccatggcaattctatatgaatatagtgtcttccaaccatgtgtagccaaaagggtgaactaacaattaattgagcacatgcagatttttaggacagcagcacagcagttattagttttaatcatatctcttcaaatattcatccaaaaatagcaaactaggattttctggaaagcttaaaaagtgaactataactttggtattttcacctcaacctgattcaacacatagcaaggtcaaaaagtgcaatcacagcagctctgtccagatttggacagattcagacttgcaacttcaaaaattcacaactagagattcagacattcaaataagttgatcctagactctctggaaaggtaataaaattgtctacatatcatttataaacatctcaaggtgattcaatatttaacttaggataaacatcactagaag

SEQ ID NO: 40068 - DNA, 456 bp, Zea mays
tcagctccatctatgttatggatggcttttgagtcagaccattttctctcgagccttctggcagcttcctgacttccatgaatagcgatgggtccttgatcccaacgtatcttcatgcaaaggtaagcacgatgaagaattgcttcgaaagcattgagggtgccacgaccaataattgcattgtaaaggtattccatgtcaacaatgtcaaacacaacttgctcagttatggtgttgttgatgaattcgaacgtcactggcatggtgatctttcccagtgctacaatctgtcttcctccgaagccacagagacggtgtgtagcatcatgaatcttatcttctggctcctgtattcgtctgaaggccttggcaaatatgatatcagctgcactgcctgtatcaaccaagacattgtggaccagagaccctttgtaacacatgacataccatagcatc

SEQ ID NO: 40069 - DNA, 456 bp, Zea mays
  unsure (1)..(456): unsure at all n locations
agcttncttatagatatttaagtatcgccgtattttatataaacttaaaagaatatgtagaccatatgttacttaataaaaatagaagataaatatatgtccaattaatagattatttatattttcttaattaaaagataacaagagtgattgcttttataaactaaaatgataggttatactttctcctttcaaatgatttaggtcatatgttcctaaattgaaactaactataatcaatagattatttatattttctcacaatttaataactagacttacatttcaatttgtccataactagtaatgtaaacgtgattaatccgttcatcacattgaattcatattattaatatatatcatttagtggtccctaaagaataaaataaagaaaattagtgttcatgttcttcttataattaaaataggtagttacatatttgatttgtatatagc

SEQ ID NO: 40070 - DNA, 495 bp, Zea mays
  unsure (1)..(495): unsure at all n locations
acctataaaactaagctagctacggtgctaggttcaccgaatcanaccttcttttttgagtatcccttggccacaagtcgagctntgttccttgtcaccacaccatgctcgtcttgcttgttgcggaaaacccacttggttcctacaacattttgattaggacgtggaaccaaatgccatacctcattcctcgtgaagttgttgagctcctcttgcatcgccaccacccaatccgaatcttgaagggcttcctctaacctgtgtggctcaatagaggaaacaaaagagtaatgctcacaaaaatgtgcaacacgagatctagtagttacccccttatgaatgtcgccgaggatggtgtcgacggcgtgatctccgtggattgcttggtggactcttgggtgtggcagccttgattcttcatcctccttgtctagctcatttgcatcttccccttgatcattgccatcaccttgaggtggctcatctctttgatct

SEQ ID NO: 40071 - DNA, 394 bp, Zea mays
  unsure (1)..(394): unsure at all n locations
atcttacatcacctgngctgcagctgtgcttgtttggtaagttaattttcttatgaattgaactagatgtgtatggcttgatgaatgaatgacttgactctctgagatgtgattgtgaatttgaatggttgtatgagctatggtgatgaattcaaattgttatgtgatcgatgggtgtgaatcggatatataatgtacgtgaattctgatatatattatctgcggtttgtgtgcttcaattggataagaaatcacgaaaattggttgctatagcagcaccacagaataatttacatcggctatgatcaagccgacgtgagctaaactgttactataatagaataacttctatcagactaaccattaccgacaggagttacgatgctgacgagac

SEQ ID NO: 40072 - DNA, 201 bp, Zea mays
accactggcttttgccgctcacacaagcgggcggatatctagtttgcacaaaaaacagcagcaaaacttcagctggctgagaagacgtggctcgccgcggaggggccacgactggcggagatgtcaagaaatacttccatgcagctaaggcttcctgtgcttctgaagaccactgaaactagtccaccctcttgagtagct

SEQ ID NO: 40073 - DNA, 404 bp, Zea mays
agagctgaccgtgtggcatgcagacttcctcgaggaagagggcatattgtattatttctcctctgactacacgccacatcaatatggtgtgcgtggagaggaacaatcgaactgtattggacatggcatgaactatgcttgatgagtacaagacaccgtaccggttgtgggccgaatcggtcaacaccgcctgctaggacatctgacggttatatctttgcctaatgctcaagaagacatcctacaaactcctaaccggtaaaaagcctctcatttcatactttagaggttttggtagcaaatgctttattcttgttaaaagaggtataatatctaaatttgcacctaaaactgtagaacgctgtttactaggatatgactcacacacaagggcatgtagagtc

SEQ ID NO: 40074 - DNA, 378 bp, Zea mays
atgtcttttaatatgtaggagcctggactttcgaagctgacaccagaaagggatctaaccactttacttacaatatgtttgctgtagaaatgataaacacccttcgggcgcctagaagacgtggcaatatgagtttgagcttgacccttctatcttgccaccataatgtctctaattggagctatcatatatgctagattgacacgagccttgattcttctaaggccatcttcaaatttgtttgttgtcactcaccataccgtcacagatatatcattagcgataccaacctgatctctatgcgggtgactgatccaacttgatgagatgctgcgaggttgaaaacaacacatgtaaattgaatatttgtgtcaacac

SEQ ID NO: 40075 - DNA, 457 bp, Zea mays
agctcaaatactaacagaagttggttgtttatattcatcggcccgaagaacctcatcaatcaattctccaaatgtagcagctagattggactgctttgtaccaatagtattcaaacattgcttgatagaggcaaatattttgccaacctctaagtcataatcaatcaacgtagcttggaacttctggcgatgatgtacaggaagcatctgaatcttatttgccatcaagtcttgcataagagggagttggatgattatattgggaagtcgatcatgttgatttgggtcttcatcaaaagtatctggcctcataagaaactgaagtaaaaaaagataataatgatatgataagtatggttaagcaacagacaaacaaagatcatagtgggtatatgacctaacctcaatctagcaagtagttggcgaatttgagatgtaacatgtctcactgttgcta

SEQ ID NO: 40076 - DNA, 476 bp, Zea mays
  unsure (1)..(476): unsure at all n locations
cgttatgactaacataacctatagtctaaactgaatgttttcttgagttanaagatcatattacctatagcacaaatgtcatgtgattctgactattttaagaccaacaaaccatttggaagccaaacaaatccctgttcaatttgcctcatagcaacatataagaaattacatagtcagcttctgaatacgtgcactgctcttaaatgaagaaaactggagccaggcaaacaaataagtgaaactatacccacaaataacccagtgaaatcataaagctaatggtgcacatggatcggacacaatcgtatatcactaatattacatttgtttccagatttctattcggatttgaatatggatagtatcaactagctatgtcggataggatacaaatggatatcgacatcataaacagatttattngttctgatatggatgcggtatcggatgttatacatccagactcaataccg

SEQ ID NO: 40077 - DNA, 455 bp, Zea mays
  unsure (1)..(455): unsure at all n locations
agctntaatgcacaaattctccccctttgttatttacaccananaccatactcaagcaagaacatatgatgatgtccagggacagcagggtgttaaggaggaaaaacacactatcaaaactcccccttactatatgcactaccaacatttgagtaagatacatatacgcaaaaaaagctcaatactttcttttgtacctttaccatgttgtggtgtacttcccatcttgaaagtattaatctctcgggagcttctccacacttgtgtctgattctttatcctaaccttttcttgttgctaagacaccaagcttagagcaagttatagtattggcacaagatgaagctactattctactgattatcaaaagatgtcaattgaagcaaactatcacagctaccaattgaaaactcaattattatcatagctccatgttatgtaacgataagcatcta

SEQ ID NO: 40078 - DNA, 400 bp, Zea mays
  unsure (1)..(400): unsure at all n locations
acacaaanaccaaccgggccagggaacacaaccagaagcttttttctacgctgcgcgncaccggagctcgtacgggactccgaagcggccaacgatgttctgctccaagaattcttgggcagtctttgatgagattgtggaaacagccctcgcttcaatccatatggtgaactattcgacagctacgaaggcgaacctaacgttcccctgaacggcgggcaggggcccgacgatgtttacgccccacccttggagaggccatgtatcggccatcagctcctgatattggcagggggtgccctgaccgatgggagaactcttggcacgctttgcaagacctcgtgacccgattagcggcgcagatcattgcgggccactaaaaccctcgtcggacaccttg

SEQ ID NO: 40079 - DNA, 447 bp, Zea mays
  unsure (1)..(447): unsure at all n locations
agcttcatccatggcaacattcatgttattttctataatttgaatnnaaaatgtgaacacgcgatttgattcaacaaatgaacaatcatgagcaagggaaccccgaccacacaccagagcaatgttacaccttagcgccaagatcaaatgatcattgaacattccaaaaatgaacacctaaataaaactgcttcatatattaaaccatgtacactgcagggcgccaggacaagacatccatcccacctagtgatcagaatactttacacaaacaatcctacatgtctaaaaatcaaattgaggacgccgcagtacataatcacaggaaatttcaccccaactttcttcaacccaccgaaaacaaaacacttatgaaacaaacgcgttagctatcagagtatgatttatactaaaagaagaagaagaaaatcacaacgtctggaaacc

SEQ ID NO: 40080 - DNA, 423 bp, Zea mays
  unsure (1)..(423): unsure at all n locations
agcttcttcctattctcctttgagggtggttatacctggagagcagcttgacgagcctttacctcggttggttcctttttccttgtgatccgtgtccatctntccatagaagaggtggtcagcggagtccttcgggtagtcggatcttctgctcccggctggtgggaggtagtcttcgctcggagcgctggagggtgcgttatttctggctttgctccgactttccaatagagtgttggggaaggcttcctcttcggtggatctgcgatgcgatgtaaagttccttcttcggctgccacgaacgacatggtaccgaagcagaatacggatccacggaagacgatgatcttgtgctggatagtgatagccaacgagctagctttgatcagcgacacaacccctacctggcgtgccagctgtcgg

SEQ ID NO: 40081 - DNA, 389 bp, Zea mays
gctaagactaacatgggctggctgtggcatcgccgcttatcacatgtggggatgaagaaccttcacaagcttctaaagggagaacacgtgataggtttgactaacgtacagttctaaaaaaatagaccttgtgcagcttgtcaggcaggtaaacaggtgggaagagcgcatcacagcaagaatgtgatgaccacatcaagacccctggagctgctacatatggacctcttcggacccgtcgcctatctaagcataggaggaagtaagtatggtttagttattggtgatgacttttcccgcttcactagggtgttctttttgcaggataagtctgaaacccaatggaccctcaagcgcttcctcaggagagctcaaaatgagcttgagct

SEQ ID NO: 40082 - DNA, 407 bp, Zea mays
atactctaaaggcgagctgctgcatgcaaacttggagatcatgtgtgttgatatattattttccagtcatccaccttccaccaaactccatattcttagacgatttggtgtcctgacaataacttgtgaatatgtactacacgcatgttattatgttatgcacttatgctactattgaacgaatatctggatgatgccatattcattacgtcaacacacttggactcacaccatgtatttctcgtcaccagcccattaaccactctttctcaacttctttcaccatatataatgcagtagagtatacactgttatgcattttcttgatgccactggcttagatttgtctttatttgcattctgttaatactctatgtaaagccgagacgggacgatgtatggatcat

SEQ ID NO: 40083 - DNA, 440 bp, Zea mays
tgtggaggttcttcatccacacatgtgctaagtggttatgtctcaaccagcccatgcaagtcttagccattaagcatgcatctagaccggcctcttcttttgcaaaatcaactaaataaagtttgccgtctagtacacccttaaaagctagtgaaccatcacatcttctaaagacagacacatctacatttgtaaatagacaattatatcccatattacataattgactaacagatagtaaattatatccaagtgactcaactaaaaacacattagagatagagtgctcatctgatattgcaatcttgcctaaacctttcaccttgccttggttcccatcaccgaatatgattgaatcttgggaatccttattcttgacgtaggaggtgaacatcttcttctcctccgtcatatgggttgtgcatccactgtcgataatc

SEQ ID NO: 40084 - DNA, 437 bp, Zea mays
  unsure (1)..(437): unsure at all n locations
tctaagcaactgcagcatgcaactnacctgacacagtttctttttcgttcaagannggagacccactctgcgttgctgcgaggtctgataaaatcagcttctagcagccggtggatcttgtccttgatgcgtgggagaagatctggacgaaatgatctaactctctgcttgacaggtctgaaaccagaattaatacgcagccgatgctccacgaactctcggcttaatccaagcatctcagtgtaattccacagcaagcaatctgaatattccttcaatagaccgatcatctcatctctaggatcggactccaaggtcttgtttacaaaagtcagccctggagatataccatcttctatgtcaatctcctccaaaggatcggtcgatgtaaacccttcgtctaatttatcaagatctctgagattctctatcatgct

SEQ ID NO: 40085 - DNA, 331 bp, Zea mays
  unsure (1)..(331): unsure at all n locations
gcgctggctcactacattctcaaccgaagctgaacatttttctcacgctnncgcaccagaaagagcgacggcaaagccaaaaaaaatgcaacatcgtcaaagacaagaaacacaatcatcagatggccagggtacgctcaacagctaaggagacacgcgacggagaagaaaccaaagctacccaaaccgctccaatctccgaagtgaagaaacgatcagggctgggatagtaaccgaagatgcccctgccgctgaaccagagcaggatgaagggaggaaattgaatatgaagaagagtacagtgccatgccatctaaacacagccacctgg

SEQ ID NO: 40086 - DNA, 446 bp, Zea mays
  unsure (1)..(446): unsure at all n locations
agctnttgtcaaaccgaaagtttatatgacgttggtatacattacggtttagcagctcccattctgtagctaagtagtcgacgcaaccggctctctccatcactttgtgttccagtggacctccagagaacatctccattaacgcactgacctgcaaatacagaatttgagatgccaacagaaacatctgagagtgcatttatgacattctagatgtgtgttcattggcaaggcacaagactcacgtcgacagaaagaacggccgagtagacttctgacatttttacatcttcgttggccaatagagaaccttcttcataagggttctctttcagttcaggttctttatcaatcacctcacctttttgttccagacctgatgaccgcaatttccaaattgccataataattctgtcaaaaagttgtttgatacattaacataacta

SEQ ID NO: 40087 - DNA, 475 bp, Zea mays
  unsure (1)..(475): unsure at all n locations
ngaatataaactgtagaagaaaaactctaagaatcttgttttattcttataaagaataatgtaattaaattttactctataaactttgtccataccttgtaatatatttttacctttccgtcaatgtataaagtgcttcggtgtgaacgaacttagcatttttgagccgaaggcgaaaaacaccttcccttcttttcgtacacagtgaagcataaaactgcttctttttcttttttccgaagccttgtctttagagccgaagcaactgcctatgttatgatgatgatgatcctatgtatgtctaaatgaatgtttatgaatgcaaatgtatgatgtaatgtaccgtgctaatgaatgttcaaacacacgcatactaagccacaaccatagccttcattcccttatgaataaccaaagtctgtttgcgtntatatttcagcatcatcgcttatagtccggtgtatcagcgctgact

SEQ ID NO: 40088 - DNA, 404 bp, Zea mays
  unsure (1)..(404): unsure at all n locations
agcttcgtcaattgctttgaactcatctggtttgccaccttctccttcttcctctgcacttggtgatgtagcatctccatctctctgatttcttggtctagctcttcttcctcaagcgtcgggctaacagcttttctcttctggcttctggcctcccgaagagagaccgtctcctggttgtggtccagccggtgtagtgctgcagccccagccgctgaagctntcttcggcgccatagcgaaggtctatagcttccgaaggtgttcacgaagactcgaagtggaagtgagttcaccggaggtgggcgccaatgttggggacttgttctcaagtgcctagagttaagaacaaggccacataaaaagtggtaagtggtaaaatccttccgtcttcgaangcatatg

SEQ ID NO: 40089 - DNA, 476 bp, Zea mays
  unsure (1)..(476): unsure at all n locations
ntaattggttgtgttgcttagtaattagaacgtattcatgttttttcttaacctagcttatgtcaggtggcgtttgttgttggtttcctgaattacgtatcctctanaagaagtttgtcaacttaccatatctatgtttaaggtgtgttagttctctcctaccccaagcatggtaaccccactctatataagagatacaagtttataacaaagttttagccctttatcttgttacactaccttccataagcgatgtttgtttcaacttttttctagattttggacgctagaagttgctgcgggttatcaaacgtccaacttttcagctcgcttctatgacaatcgctttggtgaaaaccgtccaaaatcaacatgaacatataatcgactgagtcatcacgatagtaacaatctgtcattttctagatcataaaccctataaatcccttcatctgcacttaatctccatgatactc

SEQ ID NO: 40090 - DNA, 447 bp, Zea mays
agcttcattgaattcgctggatcattgcttgttttatctgtcatggcgttcggcaagctggcaaggcaacgctgctgtgcaggtgcagccaccttccgtggtgtctcgtcttgattcaccgtatgcgttaattttatttaagattattatatttagttacttatatgtgtgagttacagactacataaataaatgcaaaataagacattttaatgctacggacaggccttgcgccgcctgcgcgttgcacgtcgatcagaggtctggccaggccatgtccacatggctcaaatcaccgcacgaatcttcatgccaaaaatgttttcaacggcgatgataggacctgtgcggccacatatacatgcggaaagttcactcccctcaaagctccccagtagctaaactagctcaatttatattggcacggcatagaagcacccaaataca

SEQ ID NO: 40091 - DNA, 485 bp, Zea mays
  unsure (1)..(485): unsure at all n locations
actaagctgatgctaaatcaaaacttcagtgcacttgataattattatcatcaatgcctcatctttagtgattgaatctaagtctagctccttacatgataatttttgcaaacattgtgccaaatatcatgcttcttgttgtctaactaaccatgcaaggaagaatagcccacaggtgaaggtcaaaggaatattgaaaagatgctctagcaatgatgggttaaagaaagttgaacccaagtacaagtccctaaagcccaacaatggaagaaggaggcttgggttcaactcatccaaggaaaaccctagcacagtgcataatgcgtggagatcccccaagttcatagagggaaccaccctatatgatgccttgggaaggattcactcctcaaatgacaagtcacctcaagtaaatgtaaacttgagttccacaaagagtaagatgaaggaagtgngatcctcaagtggacaacaatctaatgctc

SEQ ID NO: 40092 - DNA, 455 bp, Zea mays
agcttcggtattattatcaagcatatcacattattgttccatcatcacagcccttgaaggatatcatgaggaatagagaagctactggaaggattggaaaatgggccgcggagcttaatgaattcactattgactacatgcacagatcttcaattcaatcccaagcgctagcagatttcatcgttgattggacgccaggggctcacgaagaggggacaagcaaagattccgaagcttggacagtgttttacgatggttcttggggagccttcagtgcaggagcagctgcggtcctagtatcaccttcaaaagtcaaaacatgttatgcagtcaaactggatttcagttgtacaaataatattgctgagtacgaagcacttctattggggcttcagaaactaagggcaatgggaataagaagggccatcctaaagactgattctcaagttattgtt

SEQ ID NO: 40093 - DNA, 484 bp, Zea mays
  unsure (1)..(484): unsure at all n locations
gganatgtgttntcctccatcattnnttgatatgcaagtacttcttatatacatctcgnggatcagataaaaatattatggccactatatttacatcatatgtttcagttggagcgatacctgcgagtattaaaaggttatgtgcgaaatcgcgctcacccagagggttcaatcatggagggatacactacagaagaagtgattgagagctgtatagattacatcagtgacggaacaatgataggtgtgcctgtacctaaacatgagggtaaactatgtgggagagggagaatgggcaagaaaacttttcgtgttgaggattacaagctagtacattgtgctcatggtagtgtactacaacatctcacgatagccgagccttacatagaggaacacctgaatgagcttcgtatagaatatcagaaccgcacagaggactggatcatgaaggagcacaaacatcgtttcancgaatgggtaatgg

SEQ ID NO: 40094 - DNA, 445 bp, Zea mays
  unsure (1)..(445): unsure at all n locations
tgaccttgacacaatagagtngtagtttccaccacctttattaattcatctggccactctcctttgggttgattaaagatcgacttcattattcctattgttataattccttttgctctatctaccagtccatttgacttcggatgcctcactgacaccaagtgtatttttgtaccgatctggctacaaaaggtgttgaatgtttcagcatcgaactgagttccgttataacagatatagccttcggcatggcgaagccacaaacaatattctaccaaaagaatttatgtattgtggtcgaagttattgtagcttaagggatttgtttcgatccacttaaaaaactactccactggcaccacaacatatttcaagtaccttgtgctggtggaagtggagctaacaattcacgcccccctctgcagtggccagttggctgattact

SEQ ID NO: 40095 - DNA, 474 bp, Zea mays
  unsure (1)..(474): unsure at all n locations
ngagaagggaaaattgcagcaagtgttaagctcaatttttttattgttcccaaagctataaatgaagaaatcaacatgaacgaggaaaaaggtaaaaattcaattagtcatgttgtttgtactaatcatctctccatgaccttcaagcacaaaaagggaagaggaaaaaggaggtgtttcaaatgcaaggagataggccacctcatcgcatcctgtccgtacaaggacaaggatgaagggacaagaagttgctttggatgcaaaaataaggaccacattatcacttcatgtccggtcatgaagaatcaaggatgtgcatcctccatgatgaccctcaccaaagaaaatgacgaacagcaagtgtcatgtcaggttgagcgacgcttctgctacaaatgtggtgagcagggtcatatatcaaacgtatgttataaaggtaagattcctaaagaagtgaatgtgtgtcaatctcat

SEQ ID NO: 40096 - DNA, 406 bp, Zea mays
  unsure (1)..(406): unsure at all n locations
gatcttaagtcgactgagctgcagctttaaatgcagcagattgttgttttttcacgaagctataattgagaatttagagagcaagataaaagaccaatcaactgttattgaanagaaagacttcgagattcagacaaccgaaggcttattggtagaagctgaagctaaaatagcagaattaaatacgaagcttctctgccaatcagaacactttgaacaagaaaaggaagagcttaacacaaaatttgaggccgaggtctagaaaaattcagatttgaaaaaatcaatgacaagccttcaaaacaaatgtttggaattcagtaaacaatgtgttcaatggctgaagcagatcttctattccgttggagcaagcagcgaaaaatttgatccttcgtctgaagacccg

SEQ ID NO: 40097 - DNA, 469 bp, Zea mays
  unsure (1)..(469): unsure at all n locations
actaagcttgttaaaagnttggcgaaatttgagattattaatttctctatnttattctagaagtatggatgttggctattttaaatgtcccaaatttccctatttgaactaaaaatcaggaaactatttttattaaatactataagaaattagaagtctagcaaaattggtctggtagttttagcatttttctacaattttctagaaattctttaactctgacagaaaaagaaaaaggaaaaagcatgaacagttctggaccggaacgggcccaagtcggcccatcaacaagcggaagcgcgtccgcgggcgcctgcgttgctggttatgcagaaatgcccccacggtttgaataactggacaagaagtcatggcactattcttatgtctcactgacatttgcaagaacacccccgcgttctaatcctcacagcccgaagtcacgacgtgagcgcggtgaaccattccg

SEQ ID NO: 40098 - DNA, 441 bp, Zea mays
cagcttggcgtacaactggcaatctcttattttctaaagcaccttcctcaaatgatcctcatgcttttactcattctggaaatatacaagactatcatcaatgaacaccactacaaacttgtcgaggtagtccatgaacacactgttcatcatgaacatgaagtaagttagcgcattcgtcaaaccgaatgagataaccatgaacttatataatccatacttggtgatgaatgatgtcttcggtatatctaaaggtcggattctgagctgatggtaacctgacctcagatctatctttgataacacactggctcctctcaactgatcaaataggtcttcaattcgaagcagggatactcgttcttgatagtgacttcattcaaagctctataatcaattgcacattctcttcatgccatccttcttctacaaaataacact

SEQ ID NO: 40099 - DNA, 476 bp, Zea mays
cataaatactcagcctttgatgaaatactcaccgatcgtggagaagtctgcgctttcttttgtgcacgagggggcacagcccatttggaaaaagccggttgtgaacatgtcaaggccgcagcctatccggaatctattttctcagcagatgacactaaggaccgctcgaccgaagcctctttgctaggcgggaggttctattctgatgttcggatgaacggcggtcgtgagatggctgatgaagccattaaaaagaatgagaaagaatctcacgatgcccaagaggaggctaaacaagttgaagaagctgctgaacgcgccatgattataggtacttttttaaagttttgcttcattgttcgtttctagcttcaaaattcaccaacatattcttcactacatccggccgttcaccaccactggagccgtacaattccgaagccgacccgattatgaaagaagctcttgatataatg

SEQ ID NO: 40100 - DNA, 232 bp, Zea mays
tcgtcccggatccttaagtcacctgaggcatgcaagcttaagcgtgccgcgtatcagagcttgtttcttcgggagagcgatgactgagcagctgctgcccccgcatggtaccaaacgccgtcgcattggattgtccaaaccttctttgtggacggttcttgccgtgctattggcccgggccaaaccacgaccacatacgctaaaacttgtgacttgaacgctgcccttggct

SEQ ID NO: 40101 - DNA, 381 bp, Zea mays
tcctcgagcgaacggcgtgcctcatgatcttcggcagggcagaggcatatagcaacaagtgtcgcatcaatgccgcccatcaagaggtgcatgcagcagaaccgaccatcccacaacatcttcagtggtcagagattccgatcgtcttctattgcggcgaccaccctgatagatacccacatcctgtggcctaccccctcgtcgccgagccagtcgtaggctctaagcgtctcaccaatgagctcatggatggtggagtggccttaacatcatgtacatcgagaccttctaccgaatggggattgcacgcttcacgctacgaccgagcacaacgccgttccacggcgggatcctcttccacctggtctacccactctggca

SEQ ID NO: 40102 - DNA, 462 bp, Zea mays
  unsure (1)..(462): unsure at all n locations
agctngacattgtatccctgctggaagcctttgctatccttaatgcccgggcgtctcccattatagagcatgcttctagcaaatttgaatttttcattttctatctcatgctcattgatttttgcagtaagttgagctatgtgatcattttgttgtttaattatagctaggtgatcatggatagcatcaacattaacatctctacatctagtgcaaatagaagtatgttcaacagtagaagtagagggtttgcaagatcttaattcctctatcttagcatataaagtagcattctcatttctaagacaggaaatagaatcattggaaacatttaaatccttagccttagcaattaatttatcattctcaatcttaagactagaaattgattcattcaatttgtcaatcttagcaattaaactaacattattcattttaagattggtaattgaatcatcacaa

SEQ ID NO: 40103 - DNA, 300 bp, Zea mays
  unsure (1)..(300): unsure at all n locations
agcttcgtctcgtgatcgattatttatgatcttgcgagngcctcccgctcatggagtagctcggtgttgaactacgaaacatggatgcatgcttggcgttggtttatgaacatgactcacaagtttgattcatggaagaaacaatattaccaaaaataaatgccacacatgctataaaagagaatctatgtataatgcattatgtcagccaaagaatagcattgcaagctcttgtttaaataatattacctccatccaaaaatataattcacgaatctccgtgatacttatctactacta

SEQ ID NO: 40104 - DNA, 366 bp, Zea mays
  unsure (1)..(366): unsure at all n locations
atacccaactcatagacagtttttttttttcgaancggccgcggatagaacaaccatattgccctaaacaaagacccaagatatctaagcttctcatagattcacttacaatagtctaagcagtcgttcccaacacggcaatatgtatcaagacctcagcgacaccgttagagttgccgagtatttcttgcgggctctccaatttgcttgagcgaagtcaccgaagtccgccttatcattagaagaataatacctaccagcatttttattcataacttgacttaaaacctcgaggtcgagtgtcttccttcaacgctaaaacagttttacaagctgcatcatttgcgtctgagagacaccttaaca

SEQ ID NO: 40105 - DNA, 409 bp, Zea mays
  unsure (1)..(409): unsure at all n locations
agctngcacacttcattaaaatacatgtatatcattaggagtttatattcctatcacacttcaagattccatatttatattatgttactttggtcatatgctttattcttttagcttagttataaacatgtataattctttatggtagaaataacaacatttagtcaaaacaataattacacatatgataatttatttattgcatgtattttaactaggtgaaaaaatagaagctatagtttagagagaaattagattacccaattcaccctaacttttgtacgccaccattcatttccgttaagaaaattatcgtgtcaacacttatctttgtgttgatttgtaaattattagcactaacttgcatatacttcttcatactactggctcagacggcgtgatgcaattt

SEQ ID NO: 40106 - DNA, 396 bp, Zea mays
  unsure (1)..(396): unsure at all n locations
tctanaaggagaacacgcgataggtccaacctttgcttattctttaaaagatataccctgtgcagctcgtcgagcaggtaaacaagtgggacgagcacatcacagctagaatgtgatgaccacgtcaagacctctggagctgctgcatattgacctcttaagacccgtcgcctatctcagcataagaggaagtaagtacggtctagtcattgntgacgacttttcccgcttcagttgggcgttctttttgcaagataagtttgaaacccaatggaccctcaaacgactccttaggagagctcacaatgagttngagctcacggtgaagaatataatgagcgacaccgggtccgaattcaagaatattaagtcgaggagttgcttgaggaggagggg

SEQ ID NO: 40107 - DNA, 446 bp, Zea mays
  unsure (1)..(446): unsure at all n locations
agctaggaggcgtctatcgggtgcgactatgtttatactttccttcnnctcctccgtagccttgaatgcaacgggttgggcttcagatgagacaccaagctcgttgatttttctcgagccttctatcatgcactcaaaacttacaaaatgcccgataacttcctcgggggtcattctagtatatctaggattactacgaatcaattgaacttgagtgggattaataaaaatgagagatcttaaaataacatttaccacttcgtgaacgacccacttcttgctcccgagggtgcacactaggttcaccaacggtttgagccggttgtacatgtgatgtggcttctccncttagcgaagccggaaccgaccgagcttcccctcgatcggtttccgcttggtgaacttggagagctcctactcctcgtgtgctggtttgaacacaatcc

SEQ ID NO: 40108 - DNA, 395 bp, Zea mays
  unsure (1)..(395): unsure at all n locations
atgctcacatagttatttttgttttgaaacacatncgagagagagaaattgctggagttatcaactgcttcacggaacactatcaacgtgtgatatggttcaaataccccatattactgcctaagaacgaagaactccgccagcaaatttctggatgacgcacatcttagatcgctattctattcatcccggaagcactatgtacgtatcaaagccttacaacaacattactggtggactatgatgaagattgaaattgcacgctatgtggctaaatgcgactcttgcagacgtgtcaaggccatacccatgataactgctggtccattacaatcattgccaattctaacatggaaatgggaacacatcagtatgtactcttattggggattacc

SEQ ID NO: 40109 - DNA, 451 bp, Zea mays
agcttgtgttagcatgcaccatccttcacttctgtattcttagatatgggctggattcacattttccttcggaaaacacttgggctccaaacattgccaatgtggaaggtgccattgatgcagttcatgataaccaaacttggacccaacaaagagatgctatatcaactcaaatgtggcaacataaggggtctagccgtgtgtaatttctttgtggttttcttctaaaaaacattgtaatctgcagtgatgattttgttatcagccttacaatctgagagaaattgtgatctgcagtgatgttttttgtggaacttaattatttttatatgctgagagaaattgtgatctgcagtgatgggttttgtggaacttaattatttctatatgctaagagaaattgtgatctgcagtgatgttttttctggaacttaattaaatttatatgctg

SEQ ID NO: 40110 - DNA, 365 bp, Zea mays
tgctgccgcgctcacaggactcggtatttcctctcgaggtgcactctgtcttcttcttttggcctttccacttgaatagccttgttggagaggtgagagacgctgtggaagtcttggctggcgaggatggtcttaagctctggtcttaaccctctcagaaaacgggccattattctggcctcggtgctgacatcctcagtcgcttaacgggcctgttctgtgaacttgtgcacatactcattgactaacctgtcgccctgagttcactacctgaactcatcctccttgagtcgaactatcccttggggtacgtggtgctcacggatagttgcttcgaattctgcccatgtcgcatctgtgacggc

SEQ ID NO: 40111 - DNA, 456 bp, Zea mays
  unsure (1)..(456): unsure at all n locations
agcttcgatgagaagatggtatgtcagttcttttttcttctacgatctgctagaagcattacacacacctgattacttttgacttttgagtcaatttatacaataagtttatctcaatcctcagtaggttttagtgtgcatttttacaagcaacttttgtacggataattgtttctgatgtgcaaccaaaagatatattattgcaccagtgttgctggctaatatttntgtgtatttacattaatgctgattttataaaaattaatgctatggtacagctaagaggggtcaccagctgctgtcttttgccataatacatcaagttcgagctggacattctttatgtactctcggttcgaaataggttggcttgtcttntctatatacatacgcaaaactgcgtgccaaaaaaaaacgcccaattatttgaaatggactacttgctaatgacatgca

SEQ ID NO: 40112 - DNA, 433 bp, Zea mays
  unsure (1)..(433): unsure at all n locations
agcttgccaatacctgtcaaagcaacagcacatgccagcacagcatctatatattataccagtaacttggcctttcgcatgctgnggattagatatgattggacctttcaagaaagctcaaggaggatacacccatgtattggtggcaattgacaaattcactaaatggatagagttccagcccattgcctctttaacctctgctaaagccgtggaattcatacaaagcataatattcagaattgggataccaaacagtatcatcactgacttgggatccaacttcaccagttcagaattctttgacttctgcgagcaaaatagcattcagatcaagtatgcatctgtagcccatccgagagccaacgggcangttgagcgagccaacggaatgatattggaggcacttagaataagggtctttgataaaaac

SEQ ID NO: 40113 - DNA, 372 bp, Zea mays
gcacacataggtcataagagagccctgattatatctattgtatatgccatgactaacgcgttttcaagtctataacagaccggcccattggattattgaaagggactaggcgaaccccttgaagacgaacgcttccactacctaacttatacttcgacatcacttcgagcaactctgtattctatggcggagatatgagctattcaggcctgaacttcatgcctgtggaggagactaaaagctccataactaaactactcgcgctactgtcactcatttattttatgaccaaaggggaagacaatactgtcagggctgtaatcattacagtcttggcgattcatgccaaacaggcggagaaatgagcccttg

SEQ ID NO: 40114 - DNA, 468 bp, Zea mays
agtcacctgaggcatgcaacgctaaaaaatgtagataatcagcgtctttatttatgtatgcacaagaggcatgactggccatttcgttaaatccttgtcaataaattactggtgatcggtacggcttcttctctgcactgcagcccaagtgaagcgacaacactgacatctagtgctattgttcgtggttcaataaatttgtgatcaaattcaaagttagatcacaagcccacgtataccatttcacaaacctattatttttgttttcattttagattaaattgacatccatgatcgatcacatgagccaccaccagctgagacgacatctccatataatcacctgtcatacagctgagtcaccgtaactcaccttttgcaacctgttctatccatcgctactgtaccatgcccagccatcttcctcccccaccaagtacccaatcatatgtaagcacaaacagccac

SEQ ID NO: 40115 - DNA, 488 bp, Zea mays
  unsure (1)..(488): unsure at all n locations
acccgagatcctctnaaacgacctgaggcatcaagctagcaatgaggagatggcgctttgtttctatatcttccgccaagacctcaaacaaaggatggggaaagactacaagtcccgctccaagaaggtttgctacaaatgaggtaagcccggtcattttattgctaaatgtcccttatctagtgatagtgaccgaggcgaccacaagaaggggagaagaatggagaagaatagattctacatgaagaacggcggcgatgcccatgtttgtcgggagtgggatttcgacaaaagctcaagcgactcctccgacgacgatgacgccgccaacatctccgtcaccaaaggacttctcttcccaaacgtcggccacaagtgtctcatggcagaggacggcaaacggaagaatgttaaatctaactcctccactaaatatgaatcttctagtgaccataatgctagtgaagacgaggatagattgcgtgttc

SEQ ID NO: 40116 - DNA, 467 bp, Zea mays
actcagcttgtaagcgaggaagagacgccaattgtgtggtggtttcttctgtgtctaagcgacccgcgagactaaggaagaagcctcactcggtctaagtgaccgtttgagagagggaaagggttgatagagacccggtctttatgaccacctcaacagggattaggttctttggaaccaaacctcggtaaaacaaatcaccgcgttcatccgctttatttcttggttgatttgttttccctctctttctgactccgattttattctaacactaaccccgacttgtagcgtgtttaagtttgtaatttttaaattacgcctatccaccccctctaggcaactttcagtgggcactggacatattcgatgatccttgtcgaccgttgcctactgatgtggccaacgatgttcacaaccgaatgttggcgtgggcgaagagcaattgctcgctaggcacaacagacatg

SEQ ID NO: 40117 - DNA, 250 bp, Zea mays
ctagaaagaatcctctcaacgaagatgcaatgctttgaccagttgactaataaacatgaagagcctaaatgctctcatgttgatttggtccaaaggtatgaaactaattcaattgcacaagataaccctttacattgtagcacccaattaaaccaaatgattaccttgcttaccgaccccgtcgaaaagacagaagttgaaaaactacccatctcacagaaatatgaattgctcctacgctctccagaaa

SEQ ID NO: 40118 - DNA, 469 bp, Zea mays
  unsure (1)..(469): unsure at all n locations
tcccaacaatccacacacggtggagtagagtattattctctttctgtccgaaccactttaaatcctagcgtgttcatgtgctcgatgttcgcttaacatgacatgcaaaacacttaagcccttactcatattatgatttagggtgggtgcactacaccatccggcccgagaattacctctccgacacattggtaggctaactccagcaacgttgtgaacatgtatcataatgttttacactgtagatacactgtttatataaataagtttaaaatagtgagtaaaataaagagtgaaataaacagtctggtggagatatntttatgccatctcatttttttggtcgggtccatctctcgacgtatataaacttctttgactttatttttctacctcatctgttcacagacgcgaacaatcactagccgatcgtatgactgcacgagacacgcaattcatcactggagct

SEQ ID NO: 40119 - DNA, 464 bp, Zea mays
  unsure (1)..(464): unsure at all n locations
agcttctccttgtcgtcatcaaccttgacatataatcactccgacttccagcctgctgaccatttgctgcggtaactgattacatgaaactttgtggttttccgatatgcgaagttatagcaaccaaaattgtcgtgcaatccatcctttctagccttcgtctgataatgcagctcgtgaacccggcaaaagctgtccgcaaatggctccactgcttggcttcggagtgcccagatataaacactaagcctaacaatagcgttaggagtcaactgatgaaaatagataccgaacctcttcagtacctctgcaataattccatgtagggggaatcttaatccagccttcagaaagcttttgaaaataacaatttcatccttctccggctttggngtagtctcttctcccacaaagcgtaatagcttcttctgatttcattaacaaagccgacttaccatcttgaa

SEQ ID NO: 40120 - DNA, 442 bp, Zea mays
agcttgagaccagccttcctgatattggcttatgttccttgtcgatcggcaatgtgatgtttttgcttcatgcttttcactatgatgtcatcgatatatgtcagaatattcctgccaatctgagagctgagaacttgggcagtcattctgctgaagcttcctccagcattcttgagcccctaaggcatccaaaggtatcagtaagtcccactaggggttatgaagctcgtcttacgttcgtcttctttcttcatccagatttgatgatagcctgaataacaatccaataagctcatgagctatgaagtagctgctgcatccacaagagaatctattcttggcaatgggaattcatccttcggacatgccttatatagatctgtgaaatcaatgcacattcccattttccattaactgtcatcaccatcacaagattggccag

SEQ ID NO: 40121 - DNA, 281 bp, Zea mays
tgctcaacaccaagaggacttcaaagaacaatccgaagctcgcacagtcaatatcactgtgctatagtacgaagcacatttattgacaaatatactaccttgatcctatacttatacattcagatttatttcctgtgaagtgaaagacactatttaaatcgcatgctatatattgattggttgtcacatggaaaatacatcttacccacagggttaaggtgtaggagcttacagatttgcgatatcacagatgaccttcctattatcataaaattattgta

SEQ ID NO: 40122 - DNA, 356 bp, Zea mays
agctttcctgcctcctgtgagcaatgaacatgaattttatgaaccgagacaaataccctagctttcaaaaaaactctcagtaaaccttatagactttaccttgagctcgttgtacttgttcattagcttcctttcgcgaagatcagctggtgaacaaaaaatcaaccatcaagttgaggaacagatagtaaccatttgattagaagatagaccgacagtgaggagaggaaggaggtattgggattgaggaactcacgtttcttcagatagtatggtcgttttccagcctttgctgtctccctctctttcttgatatgctcacacaagatttctgattcaacgttctttggaggatg

SEQ ID NO: 40123 - DNA, 416 bp, Zea mays
  unsure (1)..(416): unsure at all n locations
gtagttctcttctncctacactccacaacaaaatggtgtattggagaggaagaatanaactctattggacatggcaaggacaatgcttgatgagtacaagacttcggatcggttttgggcggaggcggtcaacaccgcatgctacgccatcgcccgattgtatctacaccgaatcctcaagaagacatcgtatgaactcctaaccggtaaaaagcaaatgttttattcttgttaaaagaggtagaaaatctaaatttgctcctaacgctgtagaaggctttttactatgatatgattcanacacaagggcatatagagtctttaacaagtcctctggactagttgaagtttcttgtgacattgtgtttgatgagactaacggctctcaagtagagcacgttgatcttgatgagcta

SEQ ID NO: 40124 - DNA, 451 bp, Zea mays
  unsure (1)..(451): unsure at all n locations
agcttccttcgaaggattntctgttaagaatatccttcgagggcaaaatgaacatgctgatttgttagccaggtctgcagcacaggggctgccgctaccttcggatgtattcttcgaaacaataaaggcaccttcagtggagttacttgaaagagcagttcttactatttctcctgtgtacagtgaagattggagaactgaaataatttcttaccttcagggcaacttcctatcagatgacgaagcttataataaaagaatagaggcaagagctcgtccgtatatcattatagaaggggagttatacaagcatggagtttgtgccccgctgctcaagtgcttgtctagagccgaaggtatagagttgatgaaggagatacatgcaggcctttgtggatcccacatcggatccaggccgttacttggaaaagtgttccgtcaaggattttat

SEQ ID NO: 40125 - DNA, 474 bp, Zea mays
  unsure (1)..(474): unsure at all n locations
tagatggttatattatcatgcacatatgtaggaggagtcatctcataaccttgagctntgtaatggattattttctttccaaaaagagacttcaaagttaagataagtcattcgaaactcaccctcaaatccttattatacctaggatattagaatgatttgaaccccaaccgacctcttgagatatgttgtcaccaattaccaaaaaggggagattatgaagcatctaggcccctaagtagtgtttaggtaattaatgaaaaacatgtgtggacaacaatttcttgaggaaatgagaatgcaggttggttcattgacatgtgtgctacataaagtcttaagaactttggtatggattgttggatagctcaagacaaatgtaaatcataggttnttgcttttgtcgatcaaagaggtgtttagagaagtatattgaccagattagtagcctagatagtcgtactatcaagatgg

SEQ ID NO: 40126 - DNA, 423 bp, Zea mays
agcttccacagcatcatcaatttcaaccttctgttctttgaggccgaagcgggaccaaatggggcgcataataacttccttaatatcttctcttgccttcaagtcattcttcacataaaaccattcctccatccaggccccgggccaccttttccggaatgttggcaccgggtagcttgcgttggggcgggcgataaatccataacatccaaaattgttatgatattgttctttgcccatggccttcgtctcgtatacaagttcgtgcatactgcaaaagcaatttgcgcttggctctagtccctggcttctcacagcccaaacaaaaatccccattctaataatagcttcgggggttatctgatgaaggtaaatctgataaatattcagcacttcaactacaaacctgctcaatggaaaccg

SEQ ID NO: 40127 - DNA, 472 bp, Zea mays
  unsure (1)..(472): unsure at all n locations
ttaatgcacaaattctcctcctttgacatcaaacaccaatattgnattatatacaagaacatagcttgatgataagggacaatagggtatgaaggagggaaatgcaatcacactaacattactccccttaccaattaaacaaatgcaacacaagcataggaggggatcaaggtacaaatactcagaatgagagtgacaataccaccttttgtactttataccatgtgatggtgccctttttcttcccgaagggtctcttttcatccattgaaaggttcccacttgaaggtttcgtctctagggagcttctccacacttgtgcctgatcctttattacgatcttttcttatagctaagacaccagacttaatacaagttataacataatggcacaagagaaacttctattctagtgatcaacacaaaattccaattgaaaagcactaccaaggctatcaattgtcagattact

SEQ ID NO: 40128 - DNA, 451 bp, Zea mays
  unsure (1)..(451): unsure at all n locations
agcttatgcatgatttgtggtgaagttgtgttcttatttttgttaaaaactcgacttacgatttggatttggcactgtcgagtattcggtacaaataaatcgtttagccgagtagtgtgggacaagtcgctaacaattgccgaagtggacaaataataggatcaaaactagttttacgactaagcgttttgatttctaagccacaaagcgtttggacaaataataggatcattagggagttgttatttaagtaattataaaatttataaaggggtttggttgtgtccgctcgtgccgagcaacttcgaaatgtcgagaatntaattaaaaaaatgaaacttggtgcaaatttgaattattcgaaacccttgtgatttaaagtctaattaagttgagctgtgatgttaaaatcaaatctagggacagttaatgctttagtaatacgaatggt

SEQ ID NO: 40129 - DNA, 450 bp, Zea mays
  unsure (1)..(450): unsure at all n locations
tgacaatgagganatggcgctcgtcatcaagagcttccgctttattctattcaaaggagggggaaagactacaagtcccgctccaagaaggtttgctacaaatgtggtaagcccggtcactttattgctaaatgtccattatctagtgacagtgacaggggcgacgacaagaatggaagaagaaaggagaagaagaggtactacaagaagaagggcggcgatgcccatgtttgtccggagtgggactccgacgaaagctctagcgactccttcgacaacgaggacgccgccaacatcgccgtcaccaaaggacttctcttccccaacgttggacacaagtgcctcatggcaaaggacggctaacggacaaaggtaaatcaacttctccacaaatatgagtcttctagtgatgataatgctactgatgaggaggataatntgcgtgtcctc

SEQ ID NO: 40130 - DNA, 386 bp, Zea mays
  unsure (1)..(386): unsure at all n locations
ctgcacgcatgcgagctaggactattcttctcataacactaaagtattttttgataaacgaagangcttcttcaccaaacatgtttagaagggagagtgctgttctcgtcaaacactcaagaacgctatgtacgtaagattgcgcggctcctcggaattgacctagaaacagttattccttcaggtacagatttaccattttctttcagaagttttacacagccttaggcttccctaagtattactaccacagctatgttcaggagttggttaacaacttgatccatgatagcttcagccctccttttaatttcgtcgtcttctttccggtgagggcccggagacgctctaatacgatctggatgacgacacgatatggctacatt

SEQ ID NO: 40131 - DNA, 470 bp, Zea mays
  unsure (1)..(470): unsure at all n locations
ggatcttaagtcacctgcggcatgcaagcttcttgtagctgctgccaaanatgagattgttactgtgttcctcgatctgacactatcttcttcggcacaccatgaaagcagactatccgtgacatgtataactcagctaacgttgctccggtgtatgttgtcttcacgggtatgaaatgggccacctttgttaagcggtccacaaccacccagatggaatcatatccggcccgggtacgaggtaggccaactataaaatccatcccgatctcatcccacttccactgaggaatccgcaatggctgcaacaatccggcgggcctctgatgctctgctttggttctttgacagctatcacagatggcgacatattctgcgatctctcttttcatgccataccaccaaaacctcctttgtaaatcctgatacatcttctcacttccagcgtgtatggagtaggctgtctcatg

SEQ ID NO: 40132 - DNA, 440 bp, Zea mays
agcttcacgaattgacgtagagcgctcgtctattcgctaaagcgccactgtttagcgttaaaacactttgggccgtaaaaaagccacatttcgtcgctttttcagatttccaacccagcacaggcctcctaacctaaaacagggggcatcattcctttgtcacgcctgcagctagccgtcacggactcacgctacgcgttcgtccgacatccctaggcttcaccgctggccggtaagaaccttgcttgagctcgctgcctccctcccctcctccctgagttgctccctgctcgcgccacgctacctctcccccgcgggcgcgctcggcgctcgttgctccttggtccctgctcgcgctcggcgccgacgctagctccctgtgatgcactccctgctctcgttcggtcagctcgccggtcctcacttagttgcctcactgc

SEQ ID NO: 40133 - DNA, 407 bp, Zea mays
gaacaaaatgtataaatgttatcccccatgtcacaaatttcatcagtagtaaaattgtgtctaatctataggcccagacagcagacagtcttattcggacgcttatatttgagattgagatttacagcactagttccataaattcgcaaaatgaagttgctaaacgggtacaaacaagctcaacgccacatcaacaatagaacctaaacctacccaccagccatcgtactctacccaaccgagagatatatgaacccttacgcattgccttccaaagttcaccgagcagatatggtcgaatcatctaccgagtaggagatactgaattccggaaggattccaaaattcgaagtgccaggatcaaacagaaattaacagagaaggaaagaacctcggagccgctgatt

SEQ ID NO: 40134 - DNA, 433 bp, Zea mays
  unsure (1)..(433): unsure at all n locations
cgcccgagacaggatgacataaaggtcatgtgttgttcgaaggacacacttcaagtcagcatatagatgcaccaaataaccacataaagcctccaatgcccataccatcgatgtaacggaccacactcgcttcttagaaacaagacaaagaacttaaccaactcagatcagaccttaagacaacagggacttaaaacctcaagccccaacgaaactcatcaagtatccatcttatgggaaaaacatgaccaacagacatgaccataacctagcatttcatcccaagaccggaactaccaactcagacgtaccaagcccgggaaagaacatcacatgaanaagtataacatacgctacactctgcacgggaggaagcatagagaatacaccccaaaacaaaacggttctgagaacataagcaacaccaacacta

SEQ ID NO: 40135 - DNA, 451 bp, Zea mays
  unsure (1)..(451): unsure at all n locations
tcttgaccacctcaacgntcaccaagtagtgcagctccatcattttgatggcatgtacacgacagtccttgactatgaggaacatgttgaagaggttgtggcgttgtctgttgatgacgtcactagccatggcactcacagcttgttgcacaatcaaggccttatacgtcaccgtcgccgttgtaccaaaaacctcttcatcaccatcataagtctctgcaatgctagctccaaagtatcttcatcttcaacatcagaagcactgacatacccaccatcatcagtagcaatgtatgcccgtttgctggggcaatctcgctgaatatggccaagtacctgcatctgtggcacttgatgtcagaggagcggtctgtggaagaggtggtctatcacgctttgctgttacacccgaatgcaccaaagacttgttgttgtcgcgtccctgtgatgc

SEQ ID NO: 40136 - DNA, 398 bp, Zea mays
  unsure (1)..(398): unsure at all n locations
agcttcngctcgcaacgaagcagagtaatgttgtttatggtcgaaggaggaaaagactacttagtcctttataattcgaattacggtcatgtgtaaacattaaggacataaatgtacttttgcttgggctgcgtctcgtgcctataaatagatgaacagtaacatcgtacgggacacgctggattgtacttttactctctctcatcctcgccttcgaacaagccaaaggtatcaatgtaatattacgatattcttatatgtttcatggaatagaataataaatgaattatcaagatactgtcatcatgtttattcctttgtatttcatgtttatttattgaatgatgaaggtatgtccttctacacctttatctgatgagtattatacccatggggag

SEQ ID NO: 40137 - DNA, 229 bp, Zea mays
ggtctcatgcgtggaagaggagccagcaacaattatctcatttaattgcgctgaccaggatcataactcgaaacatctggctctggcaccatattaaattgcatgcaccaacaaatacaaaacaaaagcttaaactgatgcgcggacaatccacttatattatattccaacatgctcacatagctccgccctcgccagcgactcgactacagcctccactccacagcgg

SEQ ID NO: 40138 - DNA, 173 bp, Zea mays
caattgatcttttgcggaagttatacacggattgttattcgaacaactccgctcaatggttgacccactcctttaaactccacaaagccagaggctctcctataatgtcttgaagacaagagccgaacgtagctcggaactgaagtcaaaaagactcctctgtgcgggagtta

SEQ ID NO: 40139 - DNA, 456 bp, Zea mays
  unsure (1)..(456): unsure at all n locations
agcttcttcaccatgtgatcacggttatcttgagaaggttgggcaatgcatttcccttttagttgtgtcaagctcttccttggcctctcattttcttctttgagcttttgatatgaatcatcatttgttcctgcaaattctacctcaaaggaagatttgcttgttgacaaacaacaagcattagcacatggtaatatagtatcaatttgaatacatgtgcatgagtgaggttgttgggattttaaattttctatcacaacctcatgagcaatgtttaatatgatatgatcatctctaagattntcatgagagcataggagcatatcatatttttcttgaaaagctagattttcaatttttagctcttccacttggtccttaagcaaggtattcctatttactaattgagcgatacaatgtgaagcgttatcttgctcaattgaaatagtttcatac

SEQ ID NO: 40140 - DNA, 348 bp, Zea mays
atgctgttgcatgtggcgacaacaagtgttgaaagggcattttctgcaatgagtcttggtgaatgactaaagtggagaaacaagatatgtgagagtctcttggatgattgtctagttacatacatcgcgagggatattctcttccacctgaatgaagaagatataattgaaactattatggccttgaagaaacgcccgccagataagtataatttgaccgcttctcagacccgccatgtccgtcagccaaccagtgaattacgtgtgcgtgcccgtgcccacatgggctgatgcaacatggaacacactatggaatagaagcttatgttattctgcacccggtgctct

SEQ ID NO: 40141 - DNA, 392 bp, Zea mays
  unsure (1)..(392): unsure at all n locations
agcctggtgccaatggagaatcantaatccttgtaagctcggctgccaaactgcttgccggtgtcaactgttaggtcggacggtactcacaaacgtgaaacaatgttttgccaaaagaatctttgggcagtttttgatgttattggggaaacatgtcttgcctcgatccatttggcgaagtactcgacagctactatagccaacttaatgttcccctgagcggtgggcaggggcccgacaatgtccattccccatcgctggagaggccatgtgtgggcgatcagctttgtatactgcgaggggctgcctgaccgaagagagaacttctggcatgcttcgcaggaccttgtgacccgatttgcggcgcccatcattgatggtcaggaaaagcc

SEQ ID NO: 40142 - DNA, 421 bp, Zea mays
tcccaaccttagcaatataattggcattctcatttcttatgttggaaataatatcacggcaagtgtttagctcactagttaatttttcacatttttctacttctagagcataagcatttttcactttaacatgctttttgttttctttaattaggaagtcctcttggctatccaagagttcatccttatcatgaatagcactaattaattcatttaatttttctttctgttgcatgtttaagatggcaaaaagagtaaacaagtcatcctcgctatcactagaattagcctcatcgctagatgttacatatttagatgaggattttgatattaccttcttcctttaccgtcctttgccatgaggcacttgtggccgacattggggaagaggagccctttgttgactgcgatgttggcggcg

SEQ ID NO: 40143 - DNA, 399 bp, Zea mays
  unsure (1)..(399): unsure at all n locations
agcttctcacaattgtctgtgttgtcattgtgagaggncttgagctcctcaaaagacacttggaggtttttatacaattccttcaaggccttaaatatttctttttctttgtgcatgtagtcatcggcctcacctaacattctaacaagatcatcatatgaatagccatcatcatcaacatcatcgatatcatcatcatcatttatatcatttaaatcggtgatgaattttaccttagcatctccctttgccatgaggcaatggggggatgagaagagtgagggagcttccttgatggcaattccggcattaagcttggatgaggtggcatcatcatcatcattcgagctatcatccgagtcccattccactaagtaggctttggcatctttcttcttg

SEQ ID NO: 40144 - DNA, 460 bp, Zea mays
cgcattgcatggttaagtttcttgtattgcatctatgtcttgtctaacctagttgagataaccgccaacaaagcgagtgaaaaagcttaactcggatcaaacttgacaagtcttagttttaagcttttagcacttgaattcttactttttatgcaaatgttggttcttgaaatatgcatgaggtactgcacttagggggagtattcaaaactcaaatcactcatgaaaacccctagtgcaaggccaaaatgcaaatttcaccatttgcctattttctctaaaaattatctagcctatggcaaaatattttgaaaaaatatgagaaaatatatgagggtgccaatacctgtcccaacaagtgttattttgtgtgattataagttgcgatttggtttggttggaaattagatagaacaattcaaaaattccaatcttccctctgtctgggctcaccggacag

SEQ ID NO: 40145 - DNA, 432 bp, Zea mays
  unsure (1)..(432): unsure at all n locations
agctgtngaatgaactgtntaacttacgaaatgataatcgctgttagtcctcatgcaaatgcgactacttgatgctctatgaggcactacggtttacacagatctaagtcattgacccctcttaatagtacggctatctagcctactaatccggtcaggtatcttctgtaaactcctctagaccggcaaaagtaaaacctatattatgcctttgccttcatctgatccacaaccaatgcgtatgactcttcaacatttcatttctatgtggaccaaccctgcattcttatttctccaagaatcgttaggccacaagtagttgtcattaattaccaaaacattatcaaaggggcttagatgattcacacaccagttaccttgttggatgcaaaggatggtgggacagtagttggtgatgatgtcacgacgatg

SEQ ID NO: 40146 - DNA, 478 bp, Zea mays
  unsure (1)..(478): unsure at all n locations
gctagagggagaaacacatttgngactaacaaatgttcattttgttaaagacagtgtttgtagcgcatgtcgagcagggaagcaagttggtgttcatcatccacacaagaacatcatgacggccgacaggccgcttgagctactccacatggatctattgggcctcgatcgcttacataagcatcgacgggagtaagtattgtcttgtaattatggatgattattctcgcttcactcgggtgttctttntgcaggataaatctcacacccaagagaccttatagggattcttgaaacgggctcaaaatgagttcggcttaatgatcaaaaagattagaagcaacaatgggacagagttcaagaactctcanagtgaaggctttcttgaggacgagggcatcaagcatgagttctcttctccctacacgcctcaacaaaatggtgtagtggagaggaagaatagaactctactcgacat

SEQ ID NO: 40147 - DNA, 456 bp, Zea mays
  unsure (1)..(456): unsure at all n locations
agctctntcaaagtcaattgtaagaatcaccccactttgctttttttcttcacttcatgaagaatttcattcagagaaaccacaccatccataatgtacctacctttaataaatccatactggtaactactagtcactttagtaatgcaggaagcaagtctattagtcagaactttagtaatgatcttatagcagacattcaggagacaaatcggtctaaaattcctcatatcagtagggttatctactttaggtaacagcgtcactgaaagttccctttgacccgggaacaggatctggatgtcgcctagagggggggtgaataggcgaataaaacttattactttaaaacttaaattcttactctactcgaagacttattacgccgnggagtaagaagactcttcgagtaggttgcagcggaatcagagatcctgtctcaaaaatgtccttgac

SEQ ID NO: 40148 - DNA, 462 bp, Zea mays
  unsure (1)..(462): unsure at all n locations
tgctnggtcattatattgctaactgtcctgtttatgaatgtgaccaggacaaggggaacaaaagggagaagaagaggcactacaagaaagccaagggcgaggcgcatctatgaaaggagtgggattcggattgctcctcctccgactccgacaatgagggactcgccgccaccgccttcaacaaatcggccctcttcctcaacgagcgtcacacgtgtctcatggctaaggagaagaaagtaagtactcgaaactctacttatgcttcttctagtgataatgattctagtgacgatgatgaaatagactattctagtttatttaaaggtctagatagaattacaattggcaaaattaatgaattaattgatgcattgaatgagaaggataaactcttatagaaacaagaggatntattgtatgaagagcatgactaaattttagaagctcactaatctcatg

SEQ ID NO: 40149 - DNA, 462 bp, Zea mays
agctcgacaacaccatgtgacattatacatattatttctgagatcaagaatatttagttcattcctcaacatgcaaaagcgggtcttatcaagtggcttagtgaaaatatccgctaattgatcttccgacctcactccttctaaaatgatatctcctttagcaacatgatctctaaggaagtgatgacggatatcaatgtgcttggtgcgagagtgttgtacagggttattagcaattttaacagcactctcattatcacacaacaaaggtaccttttctagaactacgccatagtctagaagagtttgtttcatatataaaatgtgtgtgcaacaagcacctgcggcaatgtattccgcttctgcagttgacaatgcagcactgttttgctttttggatgtccatgaaactagtgatctaccaagcaaatggcatcgcccagaagtacttttcctatcaat

SEQ ID NO: 40150 - DNA, 424 bp, Zea mays
taagctaagcctggtaagacaaggccctaatatacaatttttttttctactcccgggctaggttcaccgaatccaaccttcacttgagagatccttggccacaagcagctttgtccttgtcaccacaccatgctcatcttgcttgtgcggaagacccatttggttcctcaacattttattatgacgtggaactagatgccctacctcactcctaggaagttgttgagttcctcttgcatcgccatcacccaatccgagtcttggagtgcttcctctaccctgtgtggctcgatagaggaaacaataaagttatgctcacaacatatgtgcaacgccgagatctactagttacccctttatgaatgtcgccgaggatgctgaccaccgcgtgatctcgttggatgcttggtggactcttgagtgt

SEQ ID NO: 40151 - DNA, 444 bp, Zea mays
  unsure (1)..(444): unsure at all n locations
agcttagtagaagtcccatatttctgaaattctctccaccggtcccaaaattgacagtgcatggtgaggctatacttctttacggatgtgtagccttaaacttgcctcccaattccaaccgagaccgctgcggctttgattttccccttttctgttacccgcgagccaggatcctccgcgccccgtggacagttcgtcccaggtctgctcctgctcgtttaattcatgttccagtatctggatacgctagtgatgcttatcggcccgaccctttttgcttagtcacaatcaatcaaccggaacacaggaatntacgtcggtattcttccgccatcgtggtcagtctaaaccaaggctgtaactacgtaattgaaacccgttctaaggttgtctcacgcccgtaacactcacccagtagttaaatcaggcatccactaccgatct

SEQ ID NO: 40152 - DNA, 476 bp, Zea mays
  unsure (1)..(476): unsure at all n locations
tgacattgcctnnctgttggaagccaatgccatccttaatgttcgtggcctctccactataaagcatactacgagcaaatntaaaattttcattttctagttcatgcctcggcaatttagcatctattgctatatgatcatnttgttgtttaatcatagcaatgtgatcatggatagcatcaacattaacatctctacatctagtgcanatagaaacatgactaacagtagatgtagaggggttgcaagcatttaattcatcaatcttagcatgtaaaatagcattctcatctctaagattggaaatagaaacaatgcaaacaattaaatctttagccttagcaattaaattttcattctcaatcttaaggctagcaagagagacanttcaattatcaatcttagcaatcaaactagcactatcatttctaaaatggcaattgaatcatcacatacatttgatntctcaacttaac

SEQ ID NO: 40153 - DNA, 455 bp, Zea mays
agcttgggaagattcttcatcccaacatgttctagtcggcgatgccagagccagcccatgttagtcttagcaattaagcaagtgtcgagttcaactctatcaaaatctaccaagtatagctgaccctctaatactcccttaaatgctattgaatcatcacttcttctaaagacagttacacctacatcagtgaatagacagttgtagcccatttgacataattgagatacagaaagcaagttgttatctaaagaatctacaagaaaaacattggaaatggtatggtcaggtgatatagcaattttacccaatcctttgaccaaaccttgatttccatccccgaatgtgatagctcgttggggatctctggttttctcataagaggagaacatccttgtctcccctgtcatgtggtttgtgcacccgctgtcgagtatccaacttgacccgcggat

SEQ ID NO: 40154 - DNA, 205 bp, Zea mays
aagaacacacccaagcttttcccaaaagggcgcgggcaaagaagacccgaaagggacgaggactcaactccgcccagcccaaagagacgcgcgaccgagcacggaagacgccgaaacccaccaccagccgcccccacaagggaaagacttccccccctcggagagctcccctcatggcgaccccagaacccggtagaggcgccgc

SEQ ID NO: 40155 - DNA, 452 bp, Zea mays
agcttagtcgactgagacctatctggctgtgtcgtgtctagccaaggtttgctgaagtagtcggatgagttcaaccaatagagtcctggttgactaaggtttgaccagccaacttgctgatattatttggtttggagttttccagaaaacccagacttggtacccaatggatgtgtatgtcgtcttgtacgcagagcagtttcttaagctgataggacgcaatgatacgtgtgagcagttcaattattgacctcttatgccgtgttacgaatatgtttgcaagaagtgtgagtcgattagggtttaccacgcaggggagcgctcgtcagcacaacagtgaaggagctcctccccgtctccactgcaggtcacacctagtctaccaccgcccggatccttcaccatccggtcgatctacatatctccttacttgatttaagagagactgtgac

SEQ ID NO: 40156 - DNA, 474 bp, Zea mays
  unsure (1)..(474): unsure at all n locations
ntagccggccaaacctccctcaagctaaatttagtcggctatatgtcgtttagcaaaaaactcgacttactcacaaccaggccaataaaatgatcctctgaagaaaagatatcgggaaccattgagtagattgttgctcaactcaactcaaagctcgggggctacacccattgggtgcaccgataacatgggaaaagaagttacacttaaagacaatcaaataacatagttcattcttggtgtctcgagcctattatccttganaattcgcttgagccttgggggattntgggagatagatgtcccatgggccactaaggcatagatacattccatgggccaccacagaggcccctgataagtcacccaatatagcgcatagtgggcctcgctcgggtgggacaaataataaccgaagtgacgacgtggngaatangctgaaatatcgaagaatattgcacgtgtataccgatg

SEQ ID NO: 40157 - DNA, 442 bp, Zea mays
agcttcatggaaaggaaccttcggttatcttatgcaaacagcttcagccgaaagccgcttctcccttgaagaccttcggcgacgaagcatagacccaacacatcctggtgacacaatggaattcggcgtgtcgcggatgtcctcggtccgcgtgcacgacatgcaacagcttggatatttcggtggcggagtggcgcgtgtcccggtggcggaggaggtccccgagccagaaggcgagttggtcgacttcgaggcctttttcgccgctggccttcgtctgcctgcgcatcgattcgtggcggaggtcctgcgtagattcgaggtccaggtccaccagctgacatcgaatgttgtggtggccctggcaaagtatgtctgggcgacgacttcttacggcgggcagccctctgtggaagtcttcgcgaagcattattgtctgcat

SEQ ID NO: 40158 - DNA, 411 bp, Zea mays
agatatattgaggactgctctttcaagaagttataccgaaggtgcttttattgtttcaaaaaatacttccgaaggtaaggacagcccctgtgctgctgacttagctagcaaatcagcatgttcattttctcctcaaggaatgtttttgacagaaaatccatcaaaggaagcttcaatccttctgaccgtgtctaaatatttctcaagcttcaggtctcttgctttacaactcttgtcaatatggccagaaataacctgcgaatcagttttaagaaccgcccttctaatccccattgcttttaacttccaaaggcccaagaagcaagcttcatactcaggaatattatttgtgcagctaaaatcaagtcttgctgcgtagcaagtgttaactttggagggtgctactaacac

SEQ ID NO: 40159 - DNA, 454 bp, Zea mays
  unsure (1)..(454): unsure at all n locations
agcttggggggtgagaagacatggtcacatatgcatttgatgtgacattggttatcagaagtgacttttagcttttcaaaaagcacatatatctgttgaaattaaaacgtaacatggacttctgaaacaaatactaaaacatttagttggttgagatgataataaccagtgttaatatttttgtgttaacaaaaaatacggcttgaatatcttacactttgcatgtatgactttgtgcaccaatcaactatgtgcctgagttgtcaagtcgacgttatgtacttgcattggatgggtgtatatgtttgtcttggatgatgggactgcaacttcaaataaaaaactagagcttacggaataaagttttagatgaggacataatctgacattttaaggaagtggtctggtatccttgttctttttatgtgctngcttgatatggaacctaacactt

SEQ ID NO: 40160 - DNA, 440 bp, Zea mays
  unsure (1)..(440): unsure at all n locations
tagcagaagaaatntctagaatcaagaatattgagctcattctttttctggtaaaagattgttcatcaagtggcttggtaaagatatcggctaattgatctttagtattaatgtaagaaatctcgatatcccccttttgctggcgatccctaagaaaatgataccgaatggctatgtgcttagtgcggctatgctcgacgggattgtcggcccatttaattgcactctcattatcacatagcaaagggactctggttaatctgtaaccgcagtcccgcagggtttgcctcatccaaagcaattgcgcgcaacaatgtcctgcggcaatgtactcggcttcggcggtggaaagagcgaccgaatattgcttctttgatgcccaagacaccaatgatcttcccaagaactggcaagatcctgatgtgctcttcctattaatt

SEQ ID NO: 40161 - DNA, 322 bp, Zea mays
  unsure (1)..(322): unsure at all n locations
agcttgatggaggccatctttactatatatagtaccttctnctactctatgtaagttctctttgacggactaagttcttcagagacgaagtacactgacacttgcttcttcggttggacatgttgattctgttgcgccaacgctgcgataactgcagcgtgagaagtagctacatgcatgagcaatggtgcttctgacaaagtggggcgaatgttgacagatgtattagatatcgctacagctttgtcgaagccttttgctgggatgcgccccaatgaaagacatctgctgattttagcacttcaaaaaatggcaagatcct

SEQ ID NO: 40162 - DNA, 288 bp, Zea mays
ccaaatctacttggctggccaataaactttttctttttagcctaacgatcaggcttgcattggctaacctatacttggcttcctgggaagaatgtcttttcttccattacatgatgggtaagtcttactttctgcagagaagactatggtgatacataagtaatcctacatatcgaggatggtatgattgtcgtcatctgtacaaacataattatgcctgtgctgaaagtggcttataaccaccaactttattgtccaaatgaagaaccttgcaactgaaggtatccc

SEQ ID NO: 40163 - DNA, 385 bp, Zea mays
agctctatgaaaaggatgctaaatgtgcatttttaaacggcttcataaatgaacttgtatatgtcgagcaaccacctggatctgaagaccctagatatcctaaccatgcttacaggtagtccaaggtgctatatgggctaaagcaagctccaagggcttggtatgagcgtcttcgcgactttctcattgaaaaggtcttcaagatcgggatcggcgacacaactctatttacaaagaaacataacggtgatattttcatttgtcaagtatatgttgatgacataatctgtggctcgacaatgactatcattcgaaggaatttggtgaattgatgttgaaggagttctagatgtcagtgattggcgagctgacgtacttcctctgc

SEQ ID NO: 40164 - DNA, 216 bp, Zea mays
gtattgacctttgcacacaatattgcaatctacgaactacactctactctataaagatcgaccctaccctgaaatagatggctaccctcccattaatgaccgaagagcttcgatgtgaaccaacacctgacctcttgagccacaagcgaaaaacaccctccctctctttcgtacaccacgaaacatgattctgctctccaagccgcattcttagaa

SEQ ID NO: 40165 - DNA, 402 bp, Zea mays
tcagctggggaagagggttgattcctacatgagctaaacaacgatgccccaaccagcccatgctattcttatcaattaagcatgcatctataccgggcttctcttttgcaaaatcaactaaataaagtttaccgtctagtacacccttaaaagctaatgaaccatcacttcttttaaagacagacatatctacacttgggaataagaaattatatcccatattacaaagttgactcacaaacaacaagttatatcccagcgactcaactaagaacatattagaaatagagtgcttggatgaaatagcaatcttccctaaccctataacactgccttgatatccggcaccgaatatgattgattcttgggagtctctgttcttgacgtaagaagaaaacatct

SEQ ID NO: 40166 - DNA, 446 bp, Zea mays
  unsure (1)..(446): unsure at all n locations
gtggggaggaccacatcatcagagcatatgagttcttgttatattaagtggncacccaagntccgttgatgaagcgccagaagactaatcaaggaaggaatccatgtgggagttcgcaagagaaaggtttgcgtgttggcatcgatgcttcctcaataagctaagcaaaacctataagcctgaagatgatatttgagtagctagaatcagcgtttgcaatcagcaaccggatgctcctgagaggccagatattgttgaagttccatctcctccaagagtctgcaaggtgaagatatgtanctgaagtaaagctatacccataacccttctaagccaaatctcgaggacgagaatnctttcaagtgtggtagatttgtagcatcccaaaaattcaaattctgcaatattctcaaacttgctctaaatcaaaaagaattcaaattttg

SEQ ID NO: 40167 - DNA, 417 bp, Zea mays
  unsure (1)..(417): unsure at all n locations
gctaattctcgtcgtgcgatgagcgacgctttctctttcgcctnctgctannggggctggggcggggggtgctagtaagaaacatctctccatctttggcgttggtttatgaaaatgactcacaagtcagatccatggaaaaaatattacggagaataaatgttacacatgtcaataaggaatataagttgaaaacattattcagacaaaagatattgcatgcaaggctcttatttaaatactactgcctgcatccaaaaatataatgcaagaatcttggtgatacttatctactactacacattgggcacaggtaacacgtgggctttgggagatatgtagtacatgtttttactgttatacatgtagacatgaacacacatgtggtgtagtggtagctacgaccacatttgcttg

SEQ ID NO: 40168 - DNA, 282 bp, Zea mays
tttccctatgtggggggccgaatggtgttacccagcctcctttttggccgattggccagcactatctgagactgtggccctgttgacacacctgctgattgtcaaaaacagcttatctgataacggtgaaaaccaccttctgctagtggctgctttaatgatcctacaatcactgaactgatagctgctgataagcatctgtttgcctaacttctgttaaattgagagaactgaaatacctgtgccaacggacctgtgctaaagtatacattcttccgcgtg

SEQ ID NO: 40169 - DNA, 401 bp, Zea mays
gtcgctctagcgtctttgaggccgaacggtttggagggatagcacaaagcaccgaatggagtgatgaacgctgctgtttcctcgacttcttttgccaggctaatctgatgatacccagagtagcaatccaagaatgacagcatagaacatccaccggcggaatctaccacctgatctatgctaaggagcccaaagggatcctttggacagtgtctgttgagatccatatagtctacgcacatgcgccaatccaccttattcgttttgagtacaagagcagggttagctagccactcgggatgtaacacctctctaagtaatccagccgcgaccaaccgagccagctcatcgcgaatggcctctctcttgtcgggcgtgaaacgacgtaattcttgccgaat

SEQ ID NO: 40170 - DNA, 339 bp, Zea mays
gagcttctaaagggagaacacatcttgcgactaacttatgttcattttgagaaagacaggggtggtggcgcatgtcaatcagggaagcaagttggtacacaccatccacacaagaacatcatgacgaccgacaggccgcttgagctactccatatggatttattcggcccgatagcttacataagcatcggcgggagtaagtattgtctttgaattgtggatgattattctcgcttcgcttgggtgttctttttgcaagaaaaatctcaaacccaagagaccttaaagagattcttgagacgagctcaaaatgagttcggattaaggatcaagaaaata

SEQ ID NO: 40171 - DNA, 469 bp, Zea mays
  unsure (1)..(469): unsure at all n locations
ggtgaaggttcttcatccccacatgtgctaagcggcgatgctccattcagcccatgctagtcttagctattaagtatgcatctagaccggcctcttcttttgcaaaatcaactaaataaagtttgccgtctaatacacccttaaaagctagtgaaccatcacttcttctaaagacagacacatctacatttgtaaatagacagttataccccatattgcataattgactaacagatagcagattatatccaagagactctactaaaaacacattagatatggagtgctcattanaaattgcagatttacctaaaccttttaccttgccttgattcccatcaccgaatacaattgaatcttgggaatctttattcttgacgtaggaggtgaacatcttcttcttccccgtcatatggtgtgtgcatccgctgtcgataatccagctcgaacccccggatgcataaacctg

SEQ ID NO: 40172 - DNA, 404 bp, Zea mays
  unsure (1)..(404): unsure at all n locations
atccttagagtcacctgcggcgtgcaagctntatcaaatggacgtgaagagtgccttccttattggaccaatcaaagaggaggtctgtgttgagtaacctcccggctttgaagatagtgagtaccctaaccatgtttataaactctctaaggcactttatgggcccaagcaagctccaagagcatggtatgaatgcctaagagattttcttatcgctaatggcttcaaagtcggaaaagacgatcctactctctctattaaaaccattgcaaatgatttgtttgtatgccaaatttatgttgatgatatcatatttgggtctactaacaaatctacttgtgaagagttcagtaggattatgattcaaaaattcgagatgtctatgatgggggagttgaagtatt

SEQ ID NO: 40173 - DNA, 207 bp, Zea mays
gctcaccctgaacgccgcgacctgcagcagcgcaccagccgtcggaaagagcacacagttagcaatgggggccgcaggccgaccatacaaagaagagactgcctcacgccgagacacaggggcacgaactcaagcttaaggacaccgagccatgaaaaaaaccccaacgccaagcccagacacacgaaggaataaactacgcacacc

SEQ ID NO: 40174 - DNA, 358 bp, Zea mays
ggcttcctcctaacagaatctggcatgtgcgcgtgtttgtttatgagaaccgtggcgagctcggccgggagttgttagagatcattcgccaactcggactcctagcatggccatatatgtggacgctgcgcaccgcctagccatagcttgcatgccatatggattcgctcattgatagatatgagagtttcattacaataaaaatgcgttccatttacaaccactccccaaatactagaatgaagagaaaataaatgattgcacattttatgactaccaaaagaataatcttccccatcaaagtgaggtggtgcccagtggaatggataataaatgagtattggaattggatggaata

SEQ ID NO: 40175 - DNA, 456 bp, Zea mays
acacttagaaactcaagcttacacgccctgtttccgcgggaactgagggcccagcttcatcttcaacccgagttacgacaacttcggcggtttcctttatatttttctcactcatgctaggtacttctgtagaggcaggagttagtacctttgtcgattccatgacagcgtctagtacgctggccattcttctcctctttggagttactgcaggaatttttgataccttcggcagctccgtctcttgtggcgggctcaaagacttcggttgctctaccgatttcttcaattctagcttctgcaggacactttggcacatcggccatctcggctttcggattctctgctgctgccttcgaaattggctcttcggctgatcccactatggcttcggcagtagcgggacgatatggctcagtggcacaagaagactgatggggactctgtctcaaatgc

SEQ ID NO: 40176 - DNA, 394 bp, Zea mays
agcttatactacctttaacatgtaagttgttcttatatttagattcaaggggcatgtgggggtggggttatggattacgtaccgactcctttgggcagaaagtctgggaagcgagaacgtagaaaatcctcagtctcccatgtagcctcctttactgaatggtgactccactgaaccttatacattctgatcgaccttgcccacgttgatctctccttttagtccattacctttacgaggagctcttgataagacaagtctggttctatcttaatctatggttcagatagtacttcagtgggtaagcggacacattttcgtagctgggatacatggaacacatcatgaactgctgacatgtggcatggcaacttcaattgatatgctaccggtc

SEQ ID NO: 40177 - DNA, 471 bp, Zea mays
  unsure (1)..(471): unsure at all n locations
actcagcttagaactttttacggatcagctcgttcgaattattatctatcccgcgaaaggggctactgttgggtctatgcttctgcgccgaacgtcttctangaagaagcggcttttggctgaatctgcttgtgtgagatggccgaacgtttttcttcacgaagcttcggtattataaaccgacttaaggatagaatgaccttttcgcccataaaggtctgggtcaatgttgtaaactcttataaggggcataattgtaattcctcacaggctgtgtcctgtgcctataaatagtgaacagtattcctttactgttcacgcgttctggcaattgtaatcacatctttcgggaaccaatctttgtcaaggcagaggtataattgtattcaatagttcaatatattcaataaatagaatttaattcgtttgtgattcatttatctcctcataccctntactntatgtcatttt

SEQ ID NO: 40178 - DNA, 294 bp, Zea mays
  unsure (1)..(294): unsure at all n locations
catggtcccaagacggacgcggcgaccggaaggctctcgttcacgtccccactcaaaggacgcggaccagacattatagccaaagagccggaggttggtccgtaagcggcgctgacggccttgacagcggagaagctttctccagctgccaccacgttcgcaccgacagcggcgtccgcatgttcaccaacgccgaaccggcgagcgtgggccgctacanagcacaccggcaggtcctcgctcccgtcctcgccacgaaagcgaggacagcggacggaatgttgcatcctagct

SEQ ID NO: 40179 - DNA, 454 bp, Zea mays
  unsure (1)..(454): unsure at all n locations
ctacaacataattggtccttcatcacaacctctgaaggtatttattatgaatcgagaagctactggaaggattggaaaatgggctgcagagctcaatgaattttgtattgaatatgttcatagatcttcgattcagtcacaggcgctggcagactttattgctgattggacgccacggactcaggaggaggaaacgaataaagacaacgaagcctgtacagtgtgttgtgatggatcttggggaaccttcngagcaggagcggctgctgtgttggtttcaccttccaaagtcaaaatttgttatacggcaaagcttgattttaattgcacaaataacattgctgagtacgaagcattggttctaggtcttcggaagttaaaagcaatgggaatcagaagggccatacttaatactgattcccaggttgtttcgggtcatattgacaaaagttgt

SEQ ID NO: 40180 - DNA, 406 bp, Zea mays
  unsure (1)..(406): unsure at all n locations
tgcaagctatcttaagatgtgcttgagatctancttatataccaacactaaacatgatatggggcctaaatgctgtaagatacaatgaactaccaatcatggatcggtagagagttcgatcaaccgggttacctccctcatatatgtcgagatgtccattatttagcatgggagtctagattcgtttgcacttctccatattgaatcttttcaacaaggctatgtatacttctctcgtgagaggaagtttccatctttaatttgcttgacttgaaagctgataaagtatgttggatcaccaattattgacatcttgaactccttcgacatcaactcaccaaattccttgcagtgataatcatttgtccagccaaatattatatcatcaacatagacttgacaaatg

SEQ ID NO: 40181 - DNA, 477 bp, Zea mays
actaagctaagagagcctgaatacaaagcgcagtagaagataaactattctaagccacaggcagatctgggtgtagacacagcccccttctagtcgagcatagcagaaaagaagtcttcagctgctgaaaaacataaataaatctaggtgaatacactaggtattctgcaagcccatcccgcccatatggagaaaggggcctatataatacatgctttatatggtggagttgaagtcactcttctttatcagaaaaaggcaattctttgatgattttcccccaagaaggcagtagcacattttcacactcaaccaccactgagcttcctgctctcgtggcattgtttttattttcaaaaacatacccactcacacattcccctgctcgcggaggttacaaaacactaattgtcataccacaccagactcgtccataccagtggacacggactattcgaataggtttgaactctgcgc

SEQ ID NO: 40182 - DNA, 309 bp, Zea mays
  unsure (1)..(309): unsure at all n locations
gaattgatctaacgcgcctccgtataacctccctcctgagccccagctctttatgagaacacctgagagcctccttccttctttgagcaaaatcattatccgcccgagagtactctatcatctattggagcagactacgcaaagtttgaggaagcttctttaataaatactgagctgacggtcctgtgcgaagcccattgattatggactaaatgacaatttcgttgggcactgatggagcctgtgcccatcaacgcangaacctatcgacgaacgcttgaaggtactcttcgggagcctgcgtgcact

SEQ ID NO: 40183 - DNA, 445 bp, Zea mays
  unsure (1)..(445): unsure at all n locations
tactcaagcttgtacgctgctgcaccaatccgggccagcaccgtataaggaccataatatctatacgccaatttgggacatggacgatccaccagtgaagtttgcatgtacggctgaagctttaataagacttgctcacccactgcaaactgacgggctgaacgtttgcgatcagcctgcaacttcatgcggttctgtgctacgaccaacatctgcttgagcaaaggggtgtgggcttgctgctcctgaatccactgatcaacggaaggatgagctgggcatgcattggttggtagagcagtgagtggtggatcgtaaccatacaatgctttgaatggggaacaaccgangcccgagtgaagagaagaattgcaccaaaactgcgcgagaggcatgcacttacgccactgtttacgggaatgatgcactgaacaacgaagataca

SEQ ID NO: 40184 - DNA, 459 bp, Zea mays
  unsure (1)..(459): unsure at all n locations
tgtcaatgaatgttatcgcgcaagtttcatctatggcactctctntgtagnagggtttatttgtacctgctggtcgtatcgaagattatcaatcatttgtttcatgtttgcacaattgcacattctgcattcagatcttttatgctgntagttgtaatgtctaacgaacatatatgcacaccatatcaatacttatcaggatgatttcattattagcagtgaagccactcacgctagcacttctattatgcatgtttttttcttcatttttttctataatgatttgtttgtaatctatcttggatttgacaaagcatacacgatcggttttaaggtttgctatgatgtgaaatgctagctgactgatgccattgcctttgtgttagtgtgttacatacatgttatttgcatcttaagctttccaaacctcgatgaattatgatatcaccttctttacat

SEQ ID NO: 40185 - DNA, 302 bp, Zea mays
  unsure (1)..(302): unsure at all n locations
tacatgctcgcagcccttattcttcttaatggnggcaanccccctgggcccgcgaggaagcacatatgtcttcgccgctatttaaaatttccttgaacgtctcagcttcggattaataccttcaatgggatctcctgggttcgctctagtaaggtttcttctctctacaaagcgccgacgctgccgaacctatctttcactccttgacgcactccaaaaattggtataacatttttcttgaccaacaaactttttaacagttcctctaatgagtgcccatgatcgctagatctcccttattc

SEQ ID NO: 40186 - DNA, 380 bp, Zea mays
acttcttgctgccttctttgggacgtgtttttgtgtttggcctacatcttgcgtatacgatggatcaatgaatataggtggttcggagggctcggatatgtcaactatatgacttgtgatgatgcttggactcccacaccttgaagtggccgcatggggtggtatttatagccaccaaccaaattgttgttattgcaaaaggctgatggctatgggcgcaccagacaagggatcgtgcggaggcacatctccgctgtcttagggcttaaaactaggcaaccgttggaggctttgttctaatgctgtaccggacaaacctgcgccactctgacctattgatatagacttcgcgcgctactgtgtagcactgctcatatgtc

SEQ ID NO: 40187 - DNA, 444 bp, Zea mays
  unsure (1)..(444): unsure at all n locations
nagctngngaagggtcttcatacacacatgtgctatttctttatgccacagccagcccatgctagtgtgagcgattaagcatgcatctagaccggcctcctcttttgcaaaatcaactaaataaagtttgtcgtctagtacacccttaaatgctagtgaaccatcacttcttctaaagacagacacatctacatttgtaaatagacaattatatcccatattgcatagttgactgacagatagtaaattatatccaagagactcaactaaaaacacattaaagatagagtgctcattggatattgcaaacttgcctaaacctttcaccttgccttggttcccatcaccaaatattattgaatcttgggaatccttactcttgatgtangaggggaacatcttcttcttccccgacatatggattgtgcatccgctgtcgatgat

SEQ ID NO: 40188 - DNA, 341 bp, Zea mays
ccattatagagcatgcctcgagcaataataagtatatggtactataactcatgctcggcgaatatagcacttaacttaaccatgagatcattatgctcttttatcatagcaatgcgatcattcatagcatcaacacaaacatctctacaactagtacaaatattgacatgttcaacagcagatgtagatggttagcaaacatgcaatacttctatcattagcctttaaactaccattctcatctataagacaagaaattgaatcattgccaaagctaagctctttagatacatcttcacaatttcctactgcaagagcacaagcatcttttagctacacaa

SEQ ID NO: 40189 - DNA, 290 bp, Zea mays
cgaacaatcagatgctaaagatatgcgagagccgcgcggtgcaggacaagtcagatgggacaaaggataccgctgcagaattctcctacagcaatagttaccacagccagcttgaagatgttaccgcattacgcactctatgggcggagttgtaagactccgctgcattgggaccaacctgcagagagacaggtgttatgccccgacatttagcttgaagccgaagagaatatcaaaatggttcgggagaatctgaagatcgcacaatcatggcaccgaagctatgctga

SEQ ID NO: 40190 - DNA, 407 bp, Zea mays
gccattggctcttgggtgtgctactgatgcgtacttgatctggatgctcctttgctcacagaaatcaaagaactcagagctggtaaagttggatcccacgtcagtaatgatgttattctcgtattcccaaccacaatattatatcctggatgaactccattgcttttgctgaggtcaaagaggcgattggctcgcactctatccattctgtgaatttgtcaatggccaccagtatatgagtatagcctccctgagctctcttgaaaggtctgatcatgtccagcccctagcatgcaaatggccaggttacaggaatggtctgcagctgctgtggtggtaagtgttgttgctttgattagaactggcatgcttcacacttcttgactaactcgacaacatcattattc

SEQ ID NO: 40191 - DNA, 462 bp, Zea mays
agcttctaaagggagagcacattgtaggattaacttatgttcattttgagaaagacaggatctgtagcgcatgccaagcagggaagcaagttggcactcatcatccacacaagaacatcatgacgactgacaggccgctcgagctcctacacatggacctattcggcccgatagcttacataagcatcggcgggagtaagtactgtctagttattgtggatgattattctcgcttcacttgggtattctttttgcaggaaaaatctcatacccaagagaaccttaagggattcttgagacgggctcacaacgagttcggcttaaggatcaagaacattagaagcgacaacgggacggagttcaagaactctcaaattgaacgcttccttgaggatgaaggcatctaacatgaattctcttcttcctacacgccacaacataatggtgtagtggagaggaaaa

SEQ ID NO: 40192 - DNA, 346 bp, Zea mays
  unsure (1)..(346): unsure at all n locations
agcttgngaagagcgttgtgggcattgctgttgtgctttctcgatcattagctagagcagagttatggattgaccgaacatgcctcgggtgaaatcttcctccgaagcccctggtcatttcagagaacctgaatgcttcctcccttctttggcggaagtcattgtcagctcgaatgtattcgcccatcttctggagcagcttctccaaacgtgtgggtgggttcctggcaaagtactgtgctgatggtcccggccgaagccccttaatcatggcctcaatgacaattttattgggcactgttggcgcttgtgccctcaagcgcagaaaacctcggacatacccctg

SEQ ID NO: 40193 - DNA, 445 bp, Zea mays
actcagctgctagcagctgtgccaacaacgtgattagaaggactcattctattgttggaatatgggtctgcctctttgggtcagcacgagcacggcccgaacacatgagcctaagacacggtacgacacgaaatattacgggtcgagctagcacggcacaaaggcgggtctgagccgggctttaaattcctgcccgtcgggcctcggcacgacccgcaaggatgggtcggcccttggtcgacacggcccaatgaaacccaaattgtttaatttctttaatttagtaagctaccaactctatattgttgtgatatttggagtttattgggtcaaatgatgctaggattggttaatatctttaatttagtaagttatagactttatgtagctgtaatattttgattttatgtggggaaatatatggggcgggtttgggtcgcataat

SEQ ID NO: 40194 - DNA, 448 bp, Zea mays
  unsure (1)..(448): unsure at all n locations
agcttctcctggacaagtgctgcacttactttgattgcgaagctgccacatataataacaaaggagcccctggcgttggtggacttaatgttgntagatctatcaaatattgcttcagctcttcgaaggctntctgctggattggtccccattgaaagacttcggctgacttcaacacttcgaagaatggtaagtntctctctgctgatctggataagaatctgttgagagatgccagccttcctgtcaatctttgagcccccttttttgtacttggtggttccattcacagtatagcttcgattntgcttggattagcctcaattccctttgttgaaactaggcaaccaagaaatttccccttctttactccgaagacacatttntctggattcagctttanaccagcctgtataaaattagcaaaggtcttctgtaaatcagcaat

SEQ ID NO: 40195 - DNA, 470 bp, Zea mays
tagctggtgatgaagctcgaagtcacctcaagtcggttattttgtcatacatgatgcttaccttctccttgaaacttgagtttaccttataacgctttgttatgtacaggatgacaaagccgaagagcaatgatccgaagcttggcggatggtgatgaagctgaagacactgctatgaaaaaactctagagaaattcttgaattatccttgtaaacaatattgtaatttaagaatcagatactactctgtaaatttgtccataccttttaatatatttttacctttctgtccatgtgtgaactgctttgatgtggacgaaacttgtatttttttgagccgaaggtgaaaaacaccttcccttcttttcgtacacaacgaagcataaatctgcttctttttcctcttgtcgaagccttgtcattagagccgaagcacttgtctgtacttctatgatatgatgatgatgatc

SEQ ID NO: 40196 - DNA, 166 bp, Zea mays
aagagagcgagcgacccccccggacgaaaaggagacccaaccagtaaaaaccacaagcgcgtcagggcgcaacacccccaaagatgggcgaagcccacaaaatccccaccccaaaggactccaagtcggaaaaggcgaccctaccttattaccaaaacacacgaaa

SEQ ID NO: 40197 - DNA, 414 bp, Zea mays
  unsure (1)..(414): unsure at all n locations
ccatactccgctgcattggtagaggccgggaatagcattgtttgtggtacttgacgagcgcgcctccaggagcggtgaagaggatccttgcccctgctccctgcagctccaccgagccatcaaaataacatatcgccacactctctgcagcttgctggattatcaagcactcgctgttctgtccactctgatacaacatcaaccacagcttgagtattgacggcagtgcgacgccggaactcgatgacctgagggcccagctcacaagcccacttggctattcgtccaatggatcccttgtngtgaagaatgccccctattggaaaaccagtggacactatgactttgtggcccacaaagcagaggcgcaacttgcgggcatgtataagtactgcatataacagacttctgaac

SEQ ID NO: 40198 - DNA, 401 bp, Zea mays
tagcttacaacaaaagaatagaagcaagagcttgatcttatgtcataatagaaggggagctgtgcatgcatggggtctgttccccgttgctcaagtgtttatccagattcgaaggtatagaattaatgaaggaaatacacgcacgcttgtgtggatctcacatcggatctatgcctttgcttgggaaagtggtttgacaaggatcttattagatcaaaggcatcttctgatgcagcggatttaatccaaaagtgcgaaggttgtcacaaatgtgcaagatatcaaaaacaaccttcgtctttaacttattaatacacccacttggtcgttgatatgtgggccctgattactatgccattacaccccacagggacttatatgtgtgtatggagcggatattt

SEQ ID NO: 40199 - DNA, 475 bp, Zea mays
  unsure (1)..(475): unsure at all n locations
ggacattgtctctctgttggaagccaacgccagccttaacgttctgtttgtctgtcactatagagcatgcttctagcacgagtaaatgtttcattttataagccatgctcattaatcttagcactaagctgagctatgtgatcattttgttgtttaattaaagctaggcgatcatgaatatcatcgacatatatgtgtctacatctagtacaaatagtaacatgctctatggtagatgtagagggtttgccacatttgattcatcaatcttagcatgtacatgtcattttcatttgtaagattgcaaataacaccattgcggacatttaaaggtttagccttaacaattaatntttcattctcaattctaaggctagagagagacgcattctatttgtcaatcttagtaatcacactatcgttatcatttctaagattaacaattgaatcatcataaatatctagcttctcaacc

SEQ ID NO: 40200 - DNA, 468 bp, Zea mays
  unsure (1)..(468): unsure at all n locations
tagtacccataagcctcatgagcttctgccagaacgtctatgtgatcacggngtcgcggtcggagacgatggactgtggaacgccgtggaggcgcacaatgtcggtgaagaatgcctgtgacaccgtctctgccgtgtacgggtgcgcgagtggaatgaagtggcagtacttgctgaagcggtcaaccacggacaggatcaccgtcttcccattcacgcggggtagcgcctccacaaagtccagcgcgatgtcggcccataccgccgagggcacgggtagaggcaagagcaaccctgctggatggagatgctcggacttgtaccgctgacaagtggagcacgcccgcacaaattcctgcaccaaacgtttgatgttggggaaatggaaatcacggcggagccggtgcaatgtacggtggacgccctcatgcccgtcgccgttgacgggctccaaaaatcttgtattag

SEQ ID NO: 40201 - DNA, 304 bp, Zea mays
  unsure (1)..(304): unsure at all n locations
agcccgagaaagtgctgcacttccttatgttctctacgcngacgcccaaacagcccatgatcccttggctatcgagcatgcaatgatgaccgatctcttcttatgcagaatcaactatataaaggctgtcggctggtacccctcaaagctaagaaccgcgttttttaagacagaacagtatatttaaatgacatatacccatgttgttaatgctaaacataccgattttccaacaactctctgacacacatgtagataagagtcatatacattgtattgtactaaccctttaccttgcttgaac

SEQ ID NO: 40202 - DNA, 390 bp, Zea mays
aaaactcagcttaactatcattatggatgcgtgtgtttttttttcccatggcccttctggcagctgactgactttcatgaatagcaacgggtccttgatccgaagagtattttcatgcaacagtaatcatgatgaagaattgctatgaaagcattgagggtgacactaccaataattgccttgtaagggaatctcgtgtcaacaatgtcaaaaacaacttgattaaatattgtgatgttgatgaatacatatgtcacatggcattgagaatattcccacctctataatcttgtttgctctgaaatcacagagagggtgtgtagcatcttgtattctaatttgtgacttttgcatttgtctttatgccttacaaatataatataactgctc

SEQ ID NO: 40203 - DNA, 368 bp, Zea mays
  unsure (1)..(368): unsure at all n locations
agcccaagaggcggangaaatttctcttatatactcggaaaatggcagccgaaaaatgccccaccaaatattgaagaagagtgaataacatattcatgatgctcgagaagcggctaaaaaagctgaagacgctacctgacgcgagagacgaataggactcatttaacggcccctagcttcgtcagttgtatcatgactacaaacaatggatgtttctaccgcagctgaatacctctacacggatccgttgacccactggccgacccaaacaaaaaagcatacacacatcatatggctgagctattgtcatgagccggaataaatgctaacaaatggtgaaaagatcgaagaaaatacattttgaaaac

SEQ ID NO: 40204 - DNA, 471 bp, Zea mays
  unsure (1)..(471): unsure at all n locations
acataaaactcagcttataaacccangagacaactactacctttgttcctttgggctcaagaagctggagaagcttcagcaggatgactccaaattccccactcccaaattggcaagaatgtgttgacatatgttgatgatatcatagtcaaaagcatgaagcaagaaaatcacattgctgatttgcaagaaacatatgctaatgaaatgtagttaatattcatacatgttttatgaaatgcatatatgtatgaattaatgaaatgcagttaatgtcttcatccttttacattttcattcacatattaaatgatggaggtgtgtccttcttgaccttcgtctgatgagcgttattcccatgtggagataatgcttcggaggacgaanggccataataattaacaattgtgttgccttggtcttggctacaacatttgagaacaagtgacaacatgtactcgatttcgttga

SEQ ID NO: 40205 - DNA, 328 bp, Zea mays
  unsure (1)..(328): unsure at all n locations
taanaacgagcagcaccacacacctaaggaaaatactttgtcccctatactagcaccctatggaaacgatcgttgagacagaagaaagcgggcaaaaccgacgcgtcaaagagcggcgggatactgcggcacaccgtgtgaaagcacgccgacagtgaggacgcgcagcgtctaaagagaccgagcagcaacacaaacgcgtttaaggcacgccacgaggaagtgacccgcattcaagaaggccacgatgaaacagtcaccttaagcacgccaggatggagcactccggctaaagaagccacgataaacaagcacgtttaaagcaccc

SEQ ID NO: 40206 - DNA, 471 bp, Zea mays
  unsure (1)..(471): unsure at all n locations
tcgcctngaccagacacttgnatacccgcaacctgattccttttatacttgtncacatattccacttggaaaacattgtcaaatcatgtttttgaggaccttccgaagccgaaggccctcaacagtagcccctcgcaatattaatttgctgtaatgataaattcatattgcgacatggatgaaggctttaagccgaaggtccgaaaaaacaccttccctttgctagaatagcaacagtcattgacaggcgggaccctcctgatctccacgcactgggtgtataaataagagctcaacacgattttatttggcacgctctcttgccatctgctcttgcttaccctacttttagcctgtgcgtaacaacacttgcttggcgttttaaatatttaagcttcgcgttcgagagcacttttctcagcgtttgtgaagatgtctgaagataacaacactgttgttgaatcgaagctg

SEQ ID NO: 40207 - DNA, 326 bp, Zea mays
  unsure (1)..(326): unsure at all n locations
agcttgngcagacatggcaggcggaatagatgctctttctgaccaaagaggggcacctagccagcgagggtgaacacgaggagaggcaaggcgcgcccggagagtctttaaaggagccggcgaacatggccgatggcgaaggcgcgcgaccgacttgaccggacgctaatgcgagcgcgcgcggcggttgggcgaacgccgacgtgcacaccagggtcgaacacgtgtgcgcgttcaatacgcccgacttctggcacgtgtgtgcaataatccgagcctgctcacaccttggtcagaacacaaaacctattatccctataagctac

SEQ ID NO: 40208 - DNA, 479 bp, Zea mays
  unsure (1)..(479): unsure at all n locations
actaagcttcganatccatactcttacctatctcccggcaaacgggtttttttttgttgtctangagacactatacgagatcatcctcgttagtgccattaaatactaacgctcctttcggatatttcagtctttgggcataatgtctggcttccaggatttcttcttcggataatattccccgaagcatgtcgaaaaatagaatcaatatctttaactacggcttctaggacaggagaatttgtattttctgccatgtcttgccctgctgccatgctggtatctgaagtttgttgatcagctttatcttcaggggcgatagcctctctctcaataggcgctgaaggcccaactttgtctttcgcttgggctttggcagcttcagcagttttcttagtaagaccaccgctcaatgcctttgtagtctccaagacagcgtccagcacgttggccatcctcctcctcttgcgagatgcgac

SEQ ID NO: 40209 - DNA, 386 bp, Zea mays
  unsure (1)..(386): unsure at all n locations
taagtcacctgcngcatgcaagcttgaantggcaaccttttggaagcttttgttttttcttatcccacggcgactcccactatggagcatgcttctagcaaattcaaaccttccattttctaagtcatgctcatttatcttagcgctaagctgagctatgtgatcattttgttgtttaataaaagctaggggatcatgaatagcatcaacaataatggttgtacgtctaaggcaaatagtaacctgctcaacagagtatgtagagggagtgcaagtatttaattctacaatcttatcatggaaaatagcattctcatctctaagattggaaattagacattgggaacatttaaatctctatccttaacaattaatcttttcattct

SEQ ID NO: 40210 - DNA, 368 bp, Zea mays
aacttcacaggccaccagcaaagacaaccgtatgttttgcgtggctaagaagagactggagtgggccagccatggtggtcgcggctagggcagcgatggcgggcaaaagagagctcgctggagctaatgaggggcgtctggccaacgagggcgagcaccgggtgaggtgaggcacacccggggaggcttaaaaagcgcgggcgggcacaaccgatggcgagggcgcgcggcggacttcactgaacgctgacgcaagcgcacacagggggtgggcgaacgccggcgtgccgaccagggccatacacgcgtgcgcgctcattctacccaagatctggcgcgtgtgggcaatcatgccagcctgctctcgc

SEQ ID NO: 40211 - DNA, 468 bp, Zea mays
  unsure (1)..(468): unsure at all n locations
taggggatggngatgaagccgaagacattgctatgattattatctttagagaaactcttgaattatccttgtgaagaatattgatatttaagaatcacatagtactctgtgaatatgtccatacctcgtaatatatttttatctatccgtccatgtatgaactgctttgatgtggacgaaacttgtattttttgagccgaaggcgaaaaacaccttcccttcttttcgtacacaacgaagcataaatctgcttcttttcctttcgttgaagccttatcattagagccgaagcaactgtctgtatttgtatgatatgatgatgatgatccgatgtatgtctaaatgaatgtatatgaatgcaatgaatgatgtgatgtatcgtgcaaatgaatgtccggacacatgcttacgaagccacatcaaaactcttcattctcttaggaatagctgaaatctctttgcccgtta

SEQ ID NO: 40212 - DNA, 450 bp, Zea mays
agcttgtctcaggagggtttgactcggttgtttatgtctggggattcaacaatggtagctggaagctggagagtgctcttatctctgacatgcacacagattgtgtgagggatgtcgcgtgggcaccagttttgggattggccaaatcgaccattgccagcgcttcacaagacgggaaggttgtcatctggaccaggggaaaggatggagacaagtgggagcggaagctcatgcgtgactttggttcccctgtctggagggtgtcctggtccttgactgggaacatattatccatagctgctggtgggaacaatataaccctctggaaggaagggtcagatgggcaatgggaggaggtgatgaacgttgaaacatatgatgtccgtcaagttctctgaagataaagtgtggtttactagtggtttctgcagatccatgtttcgacgtgga

SEQ ID NO: 40213 - DNA, 406 bp, Zea mays
attcgaattattctggccaagcttccttatttttattgtttcttattaaatatacttcaatgtttataattggcccaagccatgattctaaatttttcacactcttttccccattttcttgaattttgttcatagggctcaattagggtttttgttggggctgcacattttgcctttatgaaaaacccatttgctttgatcatgatacttttaagtataggcttggtggatcctttattcttaagtcaatttgattctcatacttaaatttggttcacataagatgatggttcatgggttagcactttgagagaaaccctacgtgacactggtgcgccacaggaatatcattgccatccatattctttaatctgtaaaaccgggccttgatgaatataccccacaa

SEQ ID NO: 40214 - DNA, 412 bp, Zea mays
  unsure (1)..(412): unsure at all n locations
agcttatctgcgcatagcttcgtgatgatcncttcncttgtcacgagcgccttccttcccattcaagcttcagtctgaccatactcttatatactcgcaatccaattccgaagatacctactcacacatttcacttggaaaacattgttaaatcatgtttttgaggaccttcggaagccgaaagcccccaacatcgcatttacactaaataaatattaagtaaaacatttaattcgatattatcaaatataaataatatctatcatttagttcgatcaatatgctatactaacaaatgtcagtaaaataagtaatttaattaacaccagagattctacgcgaggggaatatacgacgcgtgaaacaacacgacagcatgcaaccgacgcgcggacacacatggtttaacata

SEQ ID NO: 40215 - DNA, 426 bp, Zea mays
gatgccagaaccaacccggccatagtaggcttagcaattaagcaagaatcgagttcagctctattaaaatcaactaagtatagcggaccctctaatactcccttaaatgctactgaaacatcacttctgctaaagacaggaacacctatatccggaaaaagacagtcggaacccatttcgcataattgagagacagaaagcaaattggaatctaaagaatctacaagataaacatcggaaatagaatgagcaggagatatagcaattttaccaagtcctttgaccaaaccttgggtgccattcccgaatgtgatagctctttggggatcatcattttcttgtacgaagagaacatgcgtttctcccctgccatgtgggttgagcacccgctatcaatgatccaacctgagcctgcggatgcataag

SEQ ID NO: 40216 - DNA, 388 bp, Zea mays
tggcaagaggctacaccgtggtgtatctgtgctctcggttggcgtgaacctgatctggtcttaagaacctctgtggcaagttgacatatgcaagggctaagagctacatatcgctcgtgattggagatcctcatctgagtataattgattcagatcgccgtaacttcaccgacatgaatacttggtcactgacttacacgcagcattccagcgaataagacgggttgttaatataatggctcttatatgtcacgcgattgatctatggtagaaagaactctacatgcacgtaactttacttaacctgacaagtacatatggatctttaacgatctctatttagaatcatctctgcaaacagagtcttcgattattcgataaccttacc

SEQ ID NO: 40217 - DNA, 417 bp, Zea mays
  unsure (1)..(417): unsure at all n locations
agcttgtgaagattcttcattcgaactttgtgctttcagcgatgccagagccaacccatattagtcttagtaattaaacaagtgtctagttcagcttgattatcattgaaatcaactaagtatagctgaccatctagcattcccttaaatgcaattgaatcatcacatcttctaaagacagtaacacctatatcagtaaaaaacagttgtagcccattttgcataattgagaaactgaaagcaaattgtagtctattgaatctacaagaaaaacattgaaaatagaatggtcaggagatatagctattttacccaaacctttgaccaaaccttgatttccatcctcaaatgtgatagctctttatggatcatcatttttctcatangaggagaacatcgttctctcccatgtcatgt

SEQ ID NO: 40218 - DNA, 324 bp, Zea mays
ctcagaagaatgtaatctacaggtacaagtttaataccggcttaagatgacttcaagcttcatcaccagctatgttctgcccacctttccgccaaaattgggttataaatctatttccaatgcttaaggctaggctggggatatgtgtcaagtccgctggtgataggctgaagttcgtcctatttacaatcttcccatgcgtacaaccagccttcatataagctacaactgtgctgcgagaagctagcagggcacagaagtcaccatgcccagctataacttcgtcaagcgcctcaacttctctctcaatattgtcgaaggtgc

SEQ ID NO: 40219 - DNA, 366 bp, Zea mays
agctgggggaggggtttcatccgcatatgtgtctttcggcgaagccacaaccagcccatgcaagtcttatccattaagcatgcatctagaccggcctcctcttttgcgaaatcaactaaataaagttcgccgtcgagtacacccttaaaaactagtgaaccatcacatcttctaaagacagacacatctacatttgtgaatagacaattatattccattttgcataattgactaacagataacaaattatatccaagcgacttgactaaaaacacattataaatagagtgctcagatgaaaaagcaatttacctaacccttttaccttgccttgggtcccatcaccgaatataattgaatcatggg

SEQ ID NO: 40220 - DNA, 448 bp, Zea mays
  unsure (1)..(448): unsure at all n locations
tcatcagaacactntggatatagggatgttttatgataatccttgttcacgaagcatgaaaagaagggaaggtgttttttcgtcgaagactcaaaaacggtatgtgtttaaaatttcatgcatcgttaagaattaaaccataaaaaacaagtatattacattcagggttacaagatattacacatattacatttcaaatgtttttacaatagcacctagtcttccctaagtactacttctgcagcttcgttcaggagtcgatcgacaacttgatccatgatagcttcagccatctntttaatttcatcgccatctttaggctgagggcccggagacgcttcaataagatctgagggaggacaggatacgactacattactattacagattgcgagcgaagtttaatatcaaaagttacaacacaataaaaaccattagttaataccta

SEQ ID NO: 40221 - DNA, 296 bp, Zea mays
  unsure (1)..(296): unsure at all n locations
gcttgagctactncacatggatttattctgcctgatcgcttacataagcatcggcggaagtaagtattgacttgtaattgtggatgagtattctcgcttcacttgggtgttctttttgcgagacaaattacatacccaagagaccttagtatgattcttgagacgggctcaaaacgagttcggattaaggagcaagaaaataagaggtgacaacgggacagagttcaagacctcacaaatagaaagctctcttgaagaggagggcatcagacatgaattctcttctctctacacac

SEQ ID NO: 40222 - DNA, 336 bp, Zea mays
ttaagcaacgcagcagcaacacggggggaagaatacctctgttctttatcaaaaaaagacctcacgataggcccacaggcccaataaatcgcaaggtcatcccttcatgggcctaaggaagaacgaccacctgaaccagatcgacataaagccggatcggagccagcccggatggcccaacgacattgggcaagcaaccacaacagagacctgactttcccgcgctagaaccctgtacaacggaaccacgcgaggataaatcggtagaactatatgaagatagattcaatcagttcactatctcttaagagcgcatcgttatcacaaccgcatgta

SEQ ID NO: 40223 - DNA, 472 bp, Zea mays
  unsure (1)..(472): unsure at all n locations
tctaaaaggagaacacgngataggtctaaccaacgtttctttttttatagatagaccntgcgcagcttgtcaagcaggtaaacaagtgggaggagcgcatcacatcaagaatgtgatgaccacatcaagacccctggagctgctacatattgacctcttctgacccgtcgcctatctaagcataggaggaagtaagtatgggctagttattgttgatgacttttcccgcttcacttgggtggtctttttgcaggataagtttgacacccaagggaccctcaagcgcttcctaaggagagctcanaatgagtttgagctcaaggtgaagaagataaggagcgacaacgggtccgagttcaagaacctttaagtggaggagtttcttgaggaggaagggatcaagcacgagttctccgctccctacacaccacaacaaaatggtgtggtagagaggaagaacacgacgctcatc

SEQ ID NO: 40224 - DNA, 158 bp, Zea mays
ctattgagcatgcttctaacagattgaattcttattttctaagacatgcctcttaagcctaacactaacttgagctatgcgaacattttgttattaatgcaagctaaggggacatgaatagccagaacattaatgtctctacgtctagtgcacattat

SEQ ID NO: 40225 - DNA, 412 bp, Zea mays
gcagccttacatacgaggaactatgaagtaacaagagcactgcaaaagtctacacaccactggtctagcggtaagagagcccaataacccacactcatgcaagcgatattggggacctaccaaccataccgtagatctcgtaacagcaacgaaaagatatcatgaaaccactacctgtgcagaagaatgagcgagctataatcaatataccgcgtacaacatctatgtcaactattatagtactaggacactatatacgtaacacgacgcctgatggatcctaaccgaacacctctaacgctctaaccctagagtgcaaatggggccaatccaccgtgttggaagggaaaatagacgtaaaaccaaaggcgtaaatcttggttcaactcacctgacatgatgaatacccact

SEQ ID NO: 40226 - DNA, 453 bp, Zea mays
  unsure (1)..(453): unsure at all n locations
cttntttttaacacccacttacaacccatatgtttatattcatagggnccatcagtgacttcccacgtaccatntgaaagaatggagtccatctcattatgaactgcttctttccaatcatctgcatctggagatgcaaatgcttctacaatggtagtatgagtatcgtccacaaggtacacaatgaaaccatcaccaaagaatttttcaaccctttgtctcttgctccttttatgagcatcattgtcatcctccttaacgacaatttcatctagttgttcacaactctcaacaggtgtactatgtttaggagttatctcagaagagtatctacagctgctatgaatgtctttcattggaaatatgtgttcaaagaaagtagcatcacgtgattccataatagtattaacatacacatcaggaacttcatatttaactactaagaatctatat

SEQ ID NO: 40227 - DNA, 464 bp, Zea mays
  unsure (1)..(464): unsure at all n locations
agctntaccaaatggacgtgaaaagtgcctttcttattgtaccaatcaaggaagaggtctatgttgagcaacctcccggctttgaagacagtgagtatcctaaccatgtttataagctctctaaggcgctttatgggctcaagcaagccccaagagcatgatatgaatgccttaaagatttccttatcgctaagggcttcaaagtcggaaaggccgatcctactttatttactaaaactcttgaaaatgacttgttcgtatgccaaatttatgttgatgatattatatttgggtctactaacgagtctacatgtgaagaatttagtaggatcatgacacaaaagttcgagatgtctatgatgggggagttgaagtacttcttgggagttcaagtgaagcaactccaagagggcaacctcattaaccaaacgaagtatactcaagacattctaacaggtcgggat

SEQ ID NO: 40228 - DNA, 394 bp, Zea mays
taagcaagtgtcgagttcagctctatctaaatctacccagtatagctgaccctctaacaactccttaaatgctattgaatcatcacttcttctaaagacagtgacacctatatcagtgaatagacaggtggagcccatttgacataattgagaatccgaaagccaaattgtatctaaagaatccacaagaaaaacattggaaatggaatggtcacgagatataacaattttacccaatcctttgaccaaaccttgatttccatcccccaatgtgatagctcgttggggaatcttggttttctcatatgacgagaaacatcttttctcccctgcatgtgtttgtgcatacgctgccagtatcaacttgacccccgatgcataacctacacacaag

SEQ ID NO: 40229 - DNA, 453 bp, Zea mays
agcttatgccgcaagtggaagagcatggctttttttatctcattagatcctttggattatattgacaatttattattgtctgcgaataaaaggacatggccgaataaaaggacagatctcaataagagcatccgtaagattgggccatgcttgttaaatgctcaccgtcttggccatgtcaggtgtcaaccacctgatccaccgacacaagtagcagaaaccaaacacagggtggatttcagcttgcattcagcaagatattcctcagtctttccagaccctgaaaaagccacatttcactgggcttggcaatcaaacatgagaacatggacatctttatgttctcgaaactccaagctactcatgtcagttcaatgttcattttttttttgatatcgtacgtcagtcatctcattataatatagtgcggaatgcacttaacagtcaaacatt

SEQ ID NO: 40230 - DNA, 442 bp, Zea mays
tctcctcaattggcgccactcctactctctctcgatatcattatttctgactcggactctccttgtgtggccacatatccagcgcaacatacgcatctctgccacacatagttgttggacatgtcgtcttttagtgggccaacattctgctccatacaacatagccggccggattgctgacctgtagaatttgccttttagtttgtgtggcacccgggggtcgcataagacacccgccgcttgccgccacttcaaccatccagctttaattctatgactgacatcctcatcgatgtctccatccttctgaagcattgatcctaagtaacgaaaagtgtctttcttgggtaccacttgcccatcaagactaacatcgccatcttcataccccatggcactgaaatcacactatcatatactccgtttagacctactaagccta

SEQ ID NO: 40231 - DNA, 445 bp, Zea mays
  unsure (1)..(445): unsure at all n locations
agctaaacgtactaaaatcttatcggtattttgtttttgctatgangcaaaactctatcaaatgattctcaagagtgcatttctcaattctttattaataagctagtatgtggtgagcaaccacccacttttgataaaattcaaagaaacccaaccatgtggacaagcttaactaagaaggccttatatggtataagaaagcaccaagaacatggtatgagggatgaatagacttcttactctcaagtgattttgagacggggaaggttgacacaacactctttaccaaaagaattacaagtgaattgttcgttctccaagtctatgttgatgacatcatatttggatcaccaaatcaagtattttctgaacaatttataaaaatgatgcctcgtgagtttgaaatggtaataatcggagagctcacgtattccctcggtcttca

SEQ ID NO: 40232 - DNA, 460 bp, Zea mays
  unsure (1)..(460): unsure at all n locations
acacattttgataacaaatgtgcattttatatttactggttnggagcgcatgccacgcgggaaagcaggtntgagctcatcatccacacaagaacataatgacgaccgacaggtcattgtgagctcctacacatggatctattctgcccgatcgcttacataagcatcggcgggagtaagtactgtctatgtattggggatgattattctcgcttcacttgggtattctttttacaagaaaaatctcaaactcaagagaccttaaatggattcttgagaccagctcaaaatgagttctgcttaaggatcaagacaataagaagcgacaacgggacggagttcaagaactcttaaatcatatgctttcttgaagaaggagggattcaacatgagatattttcttcctacacacctcaacaaaatggtgtagtggagaggaagaatctaactctattggaca

SEQ ID NO: 40233 - DNA, 389 bp, Zea mays
  unsure (1)..(389): unsure at all n locations
agcttaagcatntttcctgaagttctgtaatggttttttgcagatttgagtatttgtccacttcagtctttaggcttgcttcaaaatatttcttttcttgctcgaattgttctgattgacggagcaattcattctttaatntgtcattttcaggttggacttcagccaaagagccttccatggtctgaataataaaatccttcttttctagtacaccttcgtgctccttgaccatgatttcaagatcttgaattgcgacgtctttctttttcagattggcttcatgattttcaactttttcacccaaatcttgaatgatggttgttgttttctcgtcctccagatctttgtgcatcttcagaacattgcttaanaatatgctctggtga

SEQ ID NO: 40234 - DNA, 371 bp, Zea mays
  unsure (1)..(371): unsure at all n locations
gcttctaaagggagagcacattgtgggacttttcttgttcattctagaaagacgggtttggggcgcatgtctagcacggtaaccagctggtgtncattatccacacaagaacatcatgaccaccgacaggccgctcgaactactccacatagacctattctgcccgatcgcttacataagcattggtgggagtaagtattgtcttgtaattgtggatgattattctcgctttccttgggtgttctttttgctggaaaaatctccaaccccagataccttaaaaggattcttgagaccggctcaaaatgagttccgcttaaggatcaagaacatttgaatcgacaactggacggagttcaagaactcttaaa

SEQ ID NO: 40235 - DNA, 442 bp, Zea mays
  unsure (1)..(442): unsure at all n locations
aagcttcaaagggagagncacatttgagactaaccaaagttcatgttgagatatatcaagatatgagcgcatgtcaagcaggaaagcaagttggtgtccatcatccacacaagaacatcatgacgaccgataggccgcttgagctactccacatggatctatttggcccgatagcttacataagcatcggtgggagtaagtattgtcttgtaattgtggatgactattctcgccttacttgggtggtcttttgcaggaaaaatacaaacccaacagaccttacagggattcttgagacgagctcacaaagagatcggcttaaggatcaaaaagattataagcgataatggaacagagtccaagaactcacaaatagaacggttccttgaggaggagggcaatcagcatgagttctcttctccctacacaccacaacaaaatg

SEQ ID NO: 40236 - DNA, 397 bp, Zea mays
tgcatgctatctctaaagggagacacgtgactgcttgatttacgtgcatctcgagaaagatagagcttgtgcagcttgtgctgcaagtaaacaggcgggaggagcgcatcacgacaagaacgtgatgaccactttcagacccctagagctgctggatatggacctcttcggacccgcctgctatctgagcaaaggagggagtaagcatggattagttattgttgatgacttttcccgcttcacttgtgtattctttttgcatgataagtctgaaacccaaggaaccctcaagcgctctctcaggagagctcataatgagtttgagctcagagtgaagaagataacgagcgacaaccggtcccagctcaagaaccttcaagtggaggagtttcttgag

SEQ ID NO: 40237 - DNA, 474 bp, Zea mays
gcctttgaaagctggactaatgttatccctgagcagctttctttgtttaggtgttgaaaatattcgaaggctatctccaccaacttacccccgaggcaattataaagctgaatatcttcgtgtggtccgtgagaaaccaaggtctgaagcctgatgcaaaaagtttctgcaatatacacgaattatcatacgaaacaaaaccttggggtaaggaacagtatcacaataattttggctgctatagtttcgtttctcggtccgggtcaagctgccccgtgccaacctttctgaaaagatggcccgacgattggatgacagaatggttttatgtgaaaaatgatttgaaaacacgagaagatatcaaaggtataattatgcgccctatttggcatagcttcggccttcggaggccgaaggttgaaatgaatgatactgccgaagaatgccagagagccttctgtgttatctgttctt

SEQ ID NO: 40238 - DNA, 383 bp, Zea mays
tggcaaagaatggtgtggtaacttcacaactacccgtctgtttatatagtgctacaggtgggaaggtgaaccgtctagtcgcccacacccgctgaacaattacccccatccactgaacgatggaccactcgacgcttggaggagaatcgccagaccgcgcgtacccactgcatggtgggccacctcgcgctcggaatattttaatcgtttctcgacaacgagctcatggaaggtgtttttcggaccttctgcattccgaagccttggagatattttcacggatcaagctcgttacgaagaacaatctagcaccgcgaaggggctactatcgggggtctgctttctcgccgaaggtcctttaataagaaacaccttcggaagat

SEQ ID NO: 40239 - DNA, 444 bp, Zea mays
agaagtcttctgattgagagatttgtttttgtcgcctagagggggggtgaatacggcgaaactgaaatttacaaagctaatcacaactacaagtcgggttagcgttagaaatataatcgagtccgcgagagagggtgccaaacaaatcgcaagcgaataaagagtgtgacaccgcggatttgttttaccgagggtcggttctcgcacacctactccccgttgaggaggccacaaaagccggatctttttcaaccctttccctctctcaaacggtccctcggaccgagtgagctttctcttctcaaatcaaccgtgaacaaaacttccccgcaaggaccaccacacaattggtgtctcttgccttggttacaagtgagttttgatcacacaacagaatgagaaagaagatagcgatccatgcgcaagagctcaaagaaacacaac

SEQ ID NO: 40240 - DNA, 471 bp, Zea mays
  unsure (1)..(471): unsure at all n locations
tttaaactcagctgcctaccctccctgccgggcgacggatnactcttatcgtcgtcgagctgtcgccgntacgtgccacgtgtttgtgcgctggtcctcgtcgtagtgactcactgggtgcatgtccggtgatcaccggagtgactgccacggtaaaagccacctatgtctgacgccgcgttcttctctgtttccggccgccagctttgcccggccaaattgagcgccaccgctgaagcctcctataaatggatggcccgggcagctgcgctacatcggcgcgaaaccagagccccactcccaccctcaatcgttctccagcgttcaccaatttcggattctccccaaattaatttccgccaccataacagccgcctctccgtggcccgcgctcctcaggttagaacatacctaattgcttaatgtcctagcctctgttaagtaccttattgctcgtaaatctgtccaatt

SEQ ID NO: 40241 - DNA, 185 bp, Zea mays
aaaacgaaccaaaagaccgaggagccaaccaaaaaaaggacacaacaaaaaacacggggaaaagcaagaagcacaagacggaagaaacaggcagaacgaacggccgccgaagaaagacaccccaagcaagaaggaaaaacgaagcaccagccaaaaagaaagcgcaacaaaagaaggaaaaaaaa

SEQ ID NO: 40242 - DNA, 274 bp, Zea mays
agcgcggatgctccacaccagatggacattatagagcagtcctgaactcgtacatacaatagcactgtgccggagtccaagcgcatctattgacaagtatgctaccttactagcgatctctttcatctcagatgtattttgtgaaatgaaggacattgcttaagtctgatgcaattaattccggtgattactacaaggagaatatatatgtcttcacaagcttatattggatatagaggcaagacttgtgaggaccaagaggaccttagaacta

SEQ ID NO: 40243 - DNA, 460 bp, Zea mays
  unsure (1)..(460): unsure at all n locations
agcttatgaaattatgcagattattattattattcattacgatacaacaagagaagaatataataattagagtgtattaatatatctctagaaacttacaaacaaaatagaattatctggtggaaagaagagaacatacattaaaattgttgaaaaataccaaaacactctaattgtgtgtaaacacgtattgaaatctccacataacatagaaaatgtgagacacaatcaacacaaatgcataacatgaatgcattcattattaatgtatggcgcatctcgtatttttattacaacgctttggggattttctagttttttctattttatacaagccaaatcacattctagaagcttctacataaatttntatgagagctaaatatttcggtatgattcacgatacataccaaatatgtctctacgaatttcttggaatttttagaggtgtatagttatg

SEQ ID NO: 40244 - DNA, 341 bp, Zea mays
acataaaactcagcttaccggcattaccaggcgcgtgcgagcgttctgtgatattctgagacctccgagctgccggcagagccgggagagtctctccgggactacattcggcgaatcttgaagtagcgcaccgatgctgccaacatcaccaactcggatgagatcgacgcggtcctcgccggcaccacctgccgcgacctggtgagcaagttgggtcgcaagacccccacacatgcgagcgagctgatggacatcgccaccaagttcgcctctggccacaaagctgtcgaggctatcttgcgaaaggacaagcagtcccatggccacccattggaagatgc

SEQ ID NO: 40245 - DNA, 288 bp, Zea mays
gatcacatcgtcatgcgccatcgatatcatgggtactgccaggggacacttactgtatctatgagattgatgtaaagttgcgagtgcatggtagtgtcttgacttgtctataaccacagataccttggctgcagtcctgttactgtttgtcacagaataacgcctactgcgcgtaaatatagatatgacccacagcgatgcgtacatcagcttaaggggctatgatgtttgaaagacaagctgatgattcgatgaattctatctcgtagatcatccctgctctctctt

SEQ ID NO: 40246 - DNA, 408 bp, Zea mays
  unsure (1)..(408): unsure at all n locations
agcttgtgaagattcttcattccacatgttctttctgcgatgccagagccagcccatgttagtcttagcaattaagcaagtgtcaagttcagctctatcaaaatctactaagtatagctgaccctctaacactcccttaaatgctattgaatcatcacttcttctaaagacagtaacacctatatccgtaaaaagacagttgtagcccgttttacataattgcgaaactgaaagcaagttataatctaaagaatctactataaaaacattggaaatggagtggtcaggagatatagcaattttacccaatcctttgaccaaaccttgatttccatccncgaatgtgatagctcgttgggaatcttggtttttctcgtaagaggagaacatcttcttctcccctgtcat

SEQ ID NO: 40247 - DNA, 429 bp, Zea mays
  unsure (1)..(429): unsure at all n locations
acatacagtccgcagggctgaagcgtgcttctattgtttctctgncaacaacatacctgcggcgagaagatgaatacagctgatctattgcctaattcagcaatccaggggctgcctataccttctgaagaatatttcgaaacaataatagcaccttcggtccagcttcttgacagagcaatcctcaacatataccctgtttatagtgaaaatcggagaactgagatcatgtctattcttcacggtaattatctttcatacgacgaagcttatgacaggagaatatacgcaagaactcgaccatatgtcataatacaatgggagatatacaagcacgcggtctgctccgcattgctcaagtgtttatccagatccgaatgtatagaattaatgaaggacatacattgcaagcctgtgtggatctcacat

SEQ ID NO: 40248 - DNA, 365 bp, Zea mays
  unsure (1)..(365): unsure at all n locations
agcttganatctgccatacgtgatgaatttacttggttacaaatttctctatactgctagatgatgattccaggtttgttaatctgtgaaaaatgttatccacattatttgtctaaaaaaaatctattactactgatatttaatggtttcccttgttcatttcttaatgcagtatacctttttcacttgatgatattacaaagacattgccggtcattgagctggctgatgacgactttctgccatttgtccatgaaaacccaagctttgcgtttttattgcaaagaggggagtagtctttattttttgtcaccattgtgacttcacctacctgtggataagtcaagattcctgctatgatgtac

SEQ ID NO: 40249 - DNA, 406 bp, Zea mays
  unsure (1)..(406): unsure at all n locations
agcttncatgtccaccaccagcaccaccagtccttgtgttatacatgtccagaaagcacgtggcccgttagcacggcacgaagcacgagtttttagcacgacacgagcacgacacggcacgagttattccgggcctgggctcagcccggcccgacgagcgtgtcgggctcgacagccatctcggcccgttggactagcccgagcacggcccgatatttggtgggcttcgaatccggcccgctacaaattccaatttccaacccagcggcccagccacgcgcccacgaaacaggctagcggcccagcccagccgcaagtcgcaggctctgcgcccgcctggatatatgggcgtcgcggccgtcttattctctgccccgcccgccgtaaccctaaccctatgtttcta

SEQ ID NO: 40250 - DNA, 405 bp, Zea mays
  unsure (1)..(405): unsure at all n locations
agctnttaggttntctcaactccctatgtatgtgtttatttccctatccagggtcctatttgcaaaacactaaaacaatacaacttgtttgaaatttttgcctactgaatgcactctatgtgtgtcaaacatatgcaatgccaatgcttatgatgccatgctcaagttttagttatagtaacaccaggggtgttacatcatccttccccctgggggagatcatccaatgccgataggcctccggtaagattgcaaaatgggcggtggaaatcatgagcgagacaatctcgttcgcccctcggaaggccatcaagacccaggtcttggcggactttctaaccgaatgggtcgacacccagctaccgacagttccgatccaaccggagctcttgaccatgtttttca

SEQ ID NO: 40251 - DNA, 377 bp, Zea mays
agacagggagcgctgtgtaaccttatttgttgtggacgaccattattgattgggaagacatcctatgctggagtccccacagcttcactgaaaaagagttttctatgaatgacttatgggaagcagcatatattttgggcataaggatctataaagatacgtctaagaggcttatatgattaagtcaagacacctacattgaaaatgttttgagacagttcaacatggaacagtccaagaaagggctcttacctatgtcacatggtatacaccttagccagatgcaatgtcctgcgaccgctaatgagcgggagcccatgagtaaggtaccatacgcctcagccattggatcaatcatgtatgccatgatcagtaca

SEQ ID NO: 40252 - DNA, 208 bp, Zea mays
tttttccccccaacacccgaagtgtgttaacaactctttaaacaaggcactgatccttattacttagatttcaaaaggaacgatattgctgccatcattaacatcctgcaataaccctgaataacaattgcatcgctgcgctagaatagacgaatttctgccatataggataccgacaaattttactgacgacaacatggcttaatgt

SEQ ID NO: 40253 - DNA, 291 bp, Zea mays
gaatgcgaccggttgtgcttcggacgtggaggggccatcaagctcgttgatcttctttgagcctttgatcatcaattcaaagctcacaaaattcccgattacttccccgggagtcattagtgtatatctaggattgccacgaattaattgaacttgagtagggttaaggaaaacaagtgatcttagaataaccttaaccactttgtggtcatcccattttttgctcccgaggttgcgcacttggtcaccaaaggtttgagtcaggtgacatgtcttgtggtcctcccttgg

SEQ ID NO: 40254 - DNA, 437 bp, Zea mays
  unsure (1)..(437): unsure at all n locations
ctgtgtggaatttgcagacgattgatctctcgactgtgcnatattcgaatgcctcacctctctgaagtggttggaagtgtgaaaacttggatgacttgaatgtgcggcggctggcggcatttacactcctcacctcccttctcttcccctctcctcccttcctgctttcccattctcatccatttttcctctcctctcttcttccccatcttcttccccgcttctcctccaaccttcactccttccttcctcctcactctttctccatctccttccctcatctctctcttgcctcctcttatcccatctcttcctttccttcatcctcccctcccaccttctttttcctccatctcctcccccctctcttcttcctccccccttctccccctttcccacttctccctcctctctcctctccctcccttcccttccct

SEQ ID NO: 40255 - DNA, 301 bp, Zea mays
  unsure (1)..(301): unsure at all n locations
gctgacactgtctgcctcgaggtttcttttgttctatnccntaatccaaggcgacggccaatatatagcatgcttctagcaaatctaaattgctcatttcctaagtcatgcccattaaacctatcactaacgtgagctatgggagcattttgttgcttaattaaagctaggtgatcatggatatcatcaacatttatggctctacgtccagtacaaatagtaacatgatcaacactctatgtatagggcttgcaagcatttaattcatcaatcttatcatgtaaaggagcattttcattct

SEQ ID NO: 40256 - DNA, 392 bp, Zea mays
ctgcgcagcttgtcaagcacgtcatcaagtggtaggagcgcatcacggcacgaatgtgatgaccacttcacgacctctggagctgctgcatatggacctctctcgacccgtcgcctatctgagcctaggagggagtaagtatgggttagttattgttgatgacttttctcgcttcacttgggtgttctctttgcaagataagtctgaaacccaatggaccctgtatcgcttcctcaggagagctcagaatgagtttgagcgttctgtgaagaagataatgagcgacaccgggtccgaattcactaaccattgagtggaggaatttccggaggaggaagagatcatgcacgatgtctccgctctctacacaccacagctaaatggtgtggttg

SEQ ID NO: 40257 - DNA, 385 bp, Zea mays
agctggggaagactcttcatctcaatttggtctattctgcgacgccagagccaacccatattagtcttagcgatctaatccagcatccagttcagctctatgaaaatcaactaagtatagctgaccctgtaatacacccttagatgctattgaatcatcacttcttctaaagacagttacatctatatctgtaaaaagatagttgtagcccattttacataattgagaaactgatagcaagttataatataaagaatctacaagaaaaacattggatatggaatggtcaggtgatataccaatcttaccaagtcctttgaccaaaccttgattttcatcctccgatgttaaagctctgtgggaatcatcgctgttctcgcaagag

SEQ ID NO: 40258 - DNA, 445 bp, Zea mays
tgattgaacattgccatatcgatgggcattatgttattgatggtatatgaagattcactggtggtcataagtcagataaataaagaatgggagtgctcgaatgactatatgggcaagtactgcacagccgtccgaaagctggaaaacaaatttgaagggctgcgaatttcatcatgtggagagagatcgcaacgcggcagtagacgcgttgtctaaactatgatccagtcagaaccacgtcccacctggggttttcgtccaagaagtaccatgctcgagtatttccttatatcaggcagaagagtgcaatgttctgagtcagccatagtcaaatcctaatgactggagggagccactcatcagatatatacataatgtagaggaaccggatgacacagctacagcataacgtatcgcaaggcagtcagctcactacacccttatt

SEQ ID NO: 40259 - DNA, 385 bp, Zea mays
  unsure (1)..(385): unsure at all n locations
agctttgtatggaatcagattgtgttattgttatatattntgatcaacaatctccccatcaaatagagagcctttccaaattgttatgaagcccccagaagcgccaatagaaggatcgaattctaatttatcaaatgatctgctgcagaagcgacgaatgttggaatcatcaaaggactctttttttgtctcttggatacatatgatatcacatgtagagtccgagatgttatttcctaaagaaatccatttaagctttgagctaattcctctaatgttatgaaacaaaattttcaaggagcggtgtaagttctgagggccggaagtcatggtatactatcagttttaaaaataaggaatttcggtatgcatatcatacaccaat

SEQ ID NO: 40260 - DNA, 434 bp, Zea mays
  unsure (1)..(434): unsure at all n locations
ttcagctncatctatgntatggattgctgttgagactgttctgttttcttcttgccttctggcagcttcttgacttccatgaatagcaatgggcccttggtccgaaggtatcttcatgctaagatatgctaaatgaaaaattgcttcgaaggcatttgaagtaccacgaccaatgatagcattgtaagggtattccatgtcaacaatatcaaacacaacttggttcagccttgtggttgtataaatctgaagatacttccattgtgattttgcaagtgcttgaatctgccttcttcgaagccacaaggggatgtgtggcatatggatcttgtcttcggctcttgatctgtctgagggcttgcaaatatgatatcaccgactgcctgtataaccaaacaatgtggccagaaatctttgatcacacagaataacat

SEQ ID NO: 40261 - DNA, 364 bp, Zea mays
  unsure (1)..(364): unsure at all n locations
agacggccttagcgtgagtctattatacgttttccaacggagncgtggagcgcgccaatgggaaaatcttcacaggcatcaagaacatgctccttgactagaaatagggcgaatggaccgacttgctaccggaggcattctgggctctgaacacaaccgagtgcatggcgaccaggttcactcctttacgtcttatatacggaacagaggcgatgaccccgcaagatataaaacacgggtgttcgtgcacagctccgtcagccacccctgacgtggatgagccaacctccaaagatctcattgacggggaccgggtcttcgaccttgatgccctanacaaatacgcaactcacaccaaagcatg

SEQ ID NO: 40262 - DNA, 478 bp, Zea mays
  unsure (1)..(478): unsure at all n locations
gacacaaacaccngcttgaagtagaagtgagatagaaagaaagctttctctattatcaagagcaccacagaaacaaagaggatgctctcacaagtctaaatgcggtatagatgaattggagactttgagcggatcgatcacttgaattgtgtctctggagtggagtctattgctcttgtattgaataaggagtagtgaatgcttggatggttggagtggaggtgattgtgaggtatttatagcccccaaccaccaattcaaccgttggggcaagctgctatcgatgggcgcaccggacagtctggtgcgcaaactggacaatgtccggtgcgccagccacgtcacccaaccgttatggttctgacggtttcgaccgttggagctttggcttcatgtggcaccggacagtccggtgccgcaccggacaggcactgttcactgtctggtgcgccttctggcggctgctctgacctctgcg

SEQ ID NO: 40263 - DNA, 290 bp, Zea mays
cgtctcccactatatagcttacttctagcaaacttaaaatcttcattttctaagccatgctcattaattgtagcactaacttgaactatgtgaccattttcgttgattaattaaagctatgtgatcatggatagcatcaacaataaggcttctcctctaccacaaatgaaaacatgatcaacaatagatgtagagggtctgcatgcatttaattcatcaatcctagcacgtaaaatagcactctcatttctaatatcggaaaaacaaacattgcaaacattaaactccta

SEQ ID NO: 40264 - DNA, 443 bp, Zea mays
  unsure (1)..(443): unsure at all n locations
tcttaacagttatgtctagaagacttttttcctcgntcacacaattgaacaaatgagtctcttggtggatgctcaatacgatgtgactcacgaatggctcgatagggtgaagatagcaaggaaagggcttctaggaactaagcgaaggtgaaggccaagcgactgctttgttaccgaagtaccatggctaacgtgaaaaagagagtacttgcactaagccgatgaactaatcagctatgaagagatacaacatgttgatgcatcagtaaggtgacttgaagccatgatttgaactcatataacgtgatatggtacaagtcatagaatttgatttgaggttgcttcacaaggtgacacaaagatgtttgtgatccttatgaagccatgccatgtggaaatcacacctgagacaccaatgacctcacggagttccttcattttat

SEQ ID NO: 40265 - DNA, 289 bp, Zea mays
caagagacgacaagcggacatgggcaagccggagcacaccggaccagacggacaccaagcccggggcgccaacggcataaacacaaacagcaactgtaaacggctaggacacggggcatggcacgggcaccaccagacagaccggggcacccgaccggcgcgccgcagaaagcagcaaaactgcattccaacggctatagaagagaagaggctataaagacaacacgcaaccggacaactggaggagagggagcccaagcaaacaccaaagcgaaacgagacaaacgca

SEQ ID NO: 40266 - DNA, 419 bp, Zea mays
gttcagaagggaagaagctgcttcgcctgttttctctatacccatgctcttatgcgaggacatatctgatcagaaggtgctactgggatctcaactgtccgaagaacaggagaaaaccttgattaggttcttgttcaacaacaaagatgtttttgcttggtcagctaatgatctttgcggagttaacagggatgttattgagcactcgctcaatgttgatccatccttcacaccaagaaagcaaaggcttctgaagatgtctgatgacaaggccgaaggtgctcggaacgaagtgaaaagactcctcagtgccggagttatcagagaagtaaaatatccacaatggttggctaacactgttttggtaaagaacgccattggtaaatggagaatgtgtttcgattttaccgatctccaca

SEQ ID NO: 40267 - DNA, 301 bp, Zea mays
ggtttccttgaggtcctatgatcctaaggaagaatgtgttagtctttgttgctaatactgaacatatgcttcttgtcgtatcatatggtgataataccataactagtgttttcgatgatatgaatcaatcgtgaagaatgtgtcaatttttttataaaactgattatatgcttcttgtagtatatatggagataatacataattagcgctctcccatgatatgaatcaatcggtatctattgcgtgtgccctatacacatacgccatacggttctggtgctctaaacttggtatctcaatg

SEQ ID NO: 40268 - DNA, 414 bp, Zea mays
  unsure (1)..(414): unsure at all n locations
caagcttgggagagaagatagggaagaggcttttatgatctttgaanagatgtgaacaaaccagagaagctaagaggttatttatagaagggaaaggcaaccgctcacttctaaccgtggtcactgaacagtcgcaaggcattcaataagcacttccacccacccgaagacacgtctgacggcggacgccgtttcatgcaacactacacccattgggactccagtcaacagcgcgaaggatatgattacactatccgtcccatcgcattactacttagaggcaactggctaatacactcagcgtaccaagccgtcccttgcccacacccattggggggggacgctcatgaantattggtatattattcaaccggcacatttgtgcagagcatgcagtgaataccttaagaaaaa

SEQ ID NO: 40269 - DNA, 317 bp, Zea mays
  unsure (1)..(317): unsure at all n locations
aagtgactgagctgcagctcaagaaacaaacactcttttctttttcgcngcaaaaaagaagctgaactccgagccaagaactgagcaccaaaaactcttcaacctctactgtgaatactaattttaagtaatgactgatcttcccatcaactgtatttttgagccgactgcaaactttcaaaatgagaccttcgtacaagaaagctacgcaaaaacaaaatgtattatgcacctttacgacccccctgctcgctcaaatacccatccaggccagcactacaactatcttcccactcagtctgcaaattaatttaatt

SEQ ID NO: 40270 - DNA, 242 bp, Zea mays
tttttccagagggaggagacgcgagtgggctatgttggacttttccaagctatattaaaacggcactagaaagttatggtaaatcttttcttaccatattctctaggattatgatttggacaagtttaaggctactttttatgccttttactataagataatttatgatttgaagttataacaatgatttatataatatgttgataatatagagaacgaaatactcgatacaagtgcttact

SEQ ID NO: 40271 - DNA, 395 bp, Zea mays
actgacggacagactgagaggacttatcatgtattggaagatatgttgagagcttctaccctttatgatggaggcaggtgggagaatatgctaccatacgctaagctctcatataataatagttaccagaccagcctgaagatgtcaccattcgaggctctatatggcactaaatgcatgactctcttctatattgagatcagactggagaaagacagttctttgggcctgaactgattcatgaggcacaagaccaagtctgcataattcgagagagtttgatggtagctcaaacatggcagaagagctatgctgataatacgagtccactggaatttgacgaacgagatcatgtgtacctcaatgtgtcaccactctctggaatgaggagattc

SEQ ID NO: 40272 - DNA, 345 bp, Zea mays
  unsure (1)..(345): unsure at all n locations
acattagtgcactagagagaaactcatngaaaggactaaacaaatcacactgtcatgacctgcgccaattatataaggtgtaatacacttaataacccacaaaaaatagggagagagtgttctcagatagattatgctaaatccccaaaccagccactcaagtgggagctccaaaaaaaaacaggatttcagagctctgaaagtcagccctctcacaaaaatcagacgcgttcaccacgttctcaaacgcataaccacttggcccaattgacaaagtgccacccaaagacccccagaacaccctaacgaagttgaaaacaaaacaatccagtgaccaactggcat

SEQ ID NO: 40273 - DNA, 461 bp, Zea mays
  unsure (1)..(461): unsure at all n locations
atatctanggcatgtggccaggtcagatattttttgatcatataggcctacatacgcatccaatgcttaattaacctgcgtagagcatcacctgttcctagcccacgtcttgagttaagtacttccagccttacgattgttttgtgttcctaaggatgaaaagatcattatagggaactttgcagtaagatcccaccatgctcccaatgaaaatattcttgcaggtcgaagccatccttactcacgataacccctgagctaggcattattgcaaaagacaacctcgatccacaagatctaagcagggctaagcatttctgtaaacaatatatgatacttccaaagaagtatcaataataggaatggatatcaaggtagtcaatgcatcacatagtttctaaacaattcctataaacttaatgcacgtttcactagacttaagtgtatagaagtctctttta

SEQ ID NO: 40274 - DNA, 252 bp, Zea mays
aaaagaaaaagttatagccaacggaaccaaggccagccgcactcccaaacacaaaacacgcggagcaacggaaaaaaaccaaggacaagaccaaagacagcaggaaccaaaaaaaaggaaggcacaagccaaccccaggaaacaaacaaaccaaagccgggccaccagcgatggactggggaaccacccaacaccccgccagaaccctcacacccaaacccaagcccgaacccgagaagcgaccaacaaaaa

SEQ ID NO: 40275 - DNA, 442 bp, Zea mays
  unsure (1)..(442): unsure at all n locations
ttacacccttcgacacgtactgcttcgtgcgaatgtcttttgtactcaagaacgncngctcaaccttgtgtcgcctcaccaagagggtcctcgacaaccaagtcagccgctacatttttacttacgtcgacgacactgtcgtcgcaagcaaaagcaaagatgaccacctggccgacctcatagaaacattcacaaacatgcacgacgcacgactccggctcaaccctgagaagtgtgttttccgagttcgccaggggaaaatacttggttacctagtatcgcaccgagtgattgaggccaacccaaccaagatccatgcgatcatcaacatggcacctccacagtccagcaaggacatccagcggctgacaggaagattggtggctctgaatagaattatctttaagtccgctgagcaagcctagctttcctcaaaaactat

SEQ ID NO: 40276 - DNA, 443 bp, Zea mays
ctgcagcatgcaacttcaatcttataattaaccttgtttctgatcacttgcgcttgcgctctcgcctcccttcgcaatcggctgctgaagctccaccgcgcgcctctccctggagctgcgctctccatgcgcgtgtggctccttctcaccgacgctcgagtcccagccatggtggctccctctaccggtccccatctttctgctcggatgtcgtccagctcggcgctccgactgctccactgcgccaaactgcatatctccctgcttgacgcgtctgcctctatttcccccgcgtcttcttcttcctactgcggtttttcgacgcccttgcttcctgcacacactggtcgactacactctcgattccataatgtgctgcaccctgccgctagtctcatcttggcattgtaactgcgttctggatctagccaatttgcaccctt

SEQ ID NO: 40277 - DNA, 274 bp, Zea mays
tcgccggtttgtagagcggaatgaacggaatatgcattcttccggagtatatctgttgatgctcttctctactactataactcacaagactaatctatgtattctgtgcacacatatgtgcttctatccgctcgggatctccacgctatatatacacgatctacctgctttcgcttgaggtattaaggaaaaatgccgtcttccggtgcaatcgcccgatgcgtatgcctactactaaaaaacacaacaataatgcatgcgttattgtcacaca

SEQ ID NO: 40278 - DNA, 353 bp, Zea mays
  unsure (1)..(353): unsure at all n locations
actgcgaagaggtggtctttttaactatagcgcgaccggtccggagttagccagcgttccgaatgtccccggcgtcttggaggtcatcgcaaagggcgatggccggaggctgctggagggagacaaanggaatggagcagagccggaccggcgtccaagatgttgatcccgagaccgaccggctgcaacctatatagacgtttgaaagatngaccgttgaccaatcagcgatcccggggccggaggggagggggtgcgtctcttactggccgnggctgctgcgcttcgcaagaagccgcggccacactttcccgctagaagattctcctccccacccatgagggtctagggtc

SEQ ID NO: 40279 - DNA, 460 bp, Zea mays
ggctggacgtcaccctcgtacctgagacgacggtgctttcattctccgacgcgactgtatcgccgctcgtcgaccgagaggtaccgaccgattcccatcccacatcatttggattcagcctcaacccgcctagcgaccccgctttggcgggcgctctcgtataggcgagtccgaaccctctggggtttcgcatgcggtcgccttgggaccggctgacggacgtctcgacctacgggccctctgggtccgaggaagacgacgagcccagcatctgttgggatttctctggacttggcaaccccagtgccatgcgggacttcattaccgcatgtgactactgcctctccgactgttccgacggtagccgcagcctctgcgacgaggactgcggcccaagccgcgaatgtttccacgtcgatctacggggtcccaccgaaggcgatcatctcggcatgccgga

SEQ ID NO: 40280 - DNA, 419 bp, Zea mays
  unsure (1)..(419): unsure at all n locations
agctttagaaataacaatttctttcttttccggctctgnggtagnctcttctcccccgaagcgtaatagcttcttctgagtttcattaaaaaagcctgactttaccatcttggagagatcagccttcgaaacagtagactctccgaagtccaagtggctgggcttgctatgcatggcaatgcgataatcatcttcgggatcagtttcctcaatatcctcttcttctgcttcggcaactgcttgttctgcttgttccgcatcatcactggggatcttttccgacgttaccagtccggatctttgcatcgcttcggagatgggaatagtctccgaactgtcagcttcgcccccctcatgctcaaccctagcggtagaacgtactctggccatgtaattctgaatttgtggaaattgaatac

SEQ ID NO: 40281 - DNA, 442 bp, Zea mays
  unsure (1)..(442): unsure at all n locations
aaaacacctacgcgcggaccgtgcggtctcttgtggtggaccgtccgcggcgccaaggtgaccctcgcacaggaacactgcataaacacaattctacactacggaccgttcgatggagaagcgaacaccgtccgagaccaagcgtggaccgtacggcctcatgcgtggaccgcccggtcgtgaagaaccagaaaaacccgaaggtgatgggttcgataaaatgaattataagcgtcctctcggaccgtctggagtgcacgaccggaccatccacgactgctttatctgacatctgacgacacattaaatgctntatagcctttgatatagccgttactgctgaccgttgcgattgtagccattgatgtgcaggggtggaccgttcggaccatgagcgcataccatccgcggctggcagaaagggaacaactgctaggaagtg

SEQ ID NO: 40282 - DNA, 175 bp, Zea mays
agcttaaaccaaagacacgtttcttctttattgcgaaaccgcgctcaccggaggtcattgctccgacggctcacgtggaccgtgttaatcactgagccattttctgattcaatgcacaagtagcctctacctctttccaagaagataactcgagccattggagtggactatgacg

SEQ ID NO: 40283 - DNA, 352 bp, Zea mays
agaccacaccaccatgaacgctccgggaatgacacactttcgttgaaacacactatgtcgctgattctgctctgccttctccatttgtgcactaagcacacgctgtatcatgaggctctcataatgctctgcaataagtgcaccaatctggacttcgggtggttccttaatgcctgccatcatcagccacaatccaaacaaagtgtagcttcatccaaatgtctagcagaggaataccgaccattgacttttaccaccaaaacacgcttgattagacaatcacgctgcacctgtccatagccctcgcatcgataacacagaacatcttttgttctaccctggaagctcccga

SEQ ID NO: 40284 - DNA, 327 bp, Zea mays
  unsure (1)..(327): unsure at all n locations
atccttctgctcgctgacgaacgatcgcttctctctgtcgttgatcacgataaccttccccttatgatccatctcttcaggcaatgatgtccctttgtgaacataacggctcctataccaattgagagcacctacatggggggtgaatacagagatcctgtgacacttacaacttangccacaacaacttggctaagtgttagctattaaccgccaagtggctctagaggaatgttcacaataccaatactccccaaatctatccggagatggcgcggggtataccgtgttggacacaacaatgcttggctactcacgttgggtgtc

SEQ ID NO: 40285 - DNA, 328 bp, Zea mays
agcttctaaagggagaacacgtgataggtttgactaacgtgcatttcgaaaaagatagaccttgtgcagcttgtcaagcaggtaaacaagtgggaggagcacatcacagcaagaacgtgatgaccacttcaagacccctggagttgctgcatatggacctttttggacccgtctcctatctgagcatatgagggagtaagtatggcttaattatttgtcgatgatttttcccgccttacattggccgtttttttgcacgataagtctgacacccaagggaccctgcagcgctttctcaagagagctaaaatgagcttgagctcaagtg

SEQ ID NO: 40286 - DNA, 453 bp, Zea mays
  unsure (1)..(453): unsure at all n locations
tataccgcctcaaactgcngacaaccagctgtatgtcttttatgatagcttccgaattctctgattcggttaccacatcatctacgtaggcctccacactcttgccccagagatccgctaagcacgcttgaatggctctctgataagccgctccagcgttcttgaagccgaacggtatggaggtataacagaaagcaccaaacggagtgatgaacgcgcgctcttccttgacttctttcgccaaactaatctgatggtctccggaatagcaatccaagaaagacagcacagaacatccagcggtggagtccaccacctgatctatccttgggagcccgaacggatcctatcgacagcgttctgtgagatcagtatagtcgacacacatgcgccaatccactttattttttttgacacaagaaccggttggtaaccactcgggtgcacaccttc

SEQ ID NO: 40287 - DNA, 331 bp, Zea mays
cggccttgcctttcttatcatatcatgccttgccaagatgtaacacctcaataccatctactaaaaataatacctttagaatactattgctaataatattaaaacattttcttcaagcgtttaattataattgcctttacaaatactttttgcttgcccatatatgagatatggttgttgtctcgaaattcttttatattgaaacgcccattaacgtatatataaacattggtccaaaaaataatatttcagtcataaataattatggtataattattatgaattttagaaatattttaaatatatttgttatattttaataaaaataaaa

SEQ ID NO: 40288 - DNA, 374 bp, Zea mays
  unsure (1)..(374): unsure at all n locations
agcttcggcggtggttaanaattgtggcattaattcttgcatatagcaatgaatgctgtggtaacttcacacctactcgtctgtttatatagtgttgcaggtaagaaggcgaagcgccaggatttttacaccaggcggtcacccgcttgtactcgctgtgcggtgggccgcagagaccaaatagtaactctgcaaggtgggaccgctacgcgctgggaaattgaatcgtttctcggcaacgagctcagggaaggtgttttttggaccttcggctccccgaagcctaagagactnttttcacggaccaagctcgttacgaaaaacgatctatcaccgcgaaaggggctactgttgggcctatgcttcgtcgccga

SEQ ID NO: 40289 - DNA, 444 bp, Zea mays
  unsure (1)..(444): unsure at all n locations
agcttggcagctatatagagtgcggtgatgtgaagttagnggccagcgtgcaacactgcgactacctctaataatctctatctctagcgaatacctttactacgtccataataaattcctctcttttcttgaaaaaaataataactaaaaaaatctaaagccagaaaaaaaataactttgcggggcccggagtccggagaaacttctccgggtaaatctagcggtgcaaacctttgacatcttttggacctttgtgtcggtaataaacatgttttggagttncgtgcctgtcgctgtcgggtgtgtggcgtactgtaagtccatgaccatggccatcttttcacactcttctgtgtgattactggctttctacctccgctagacgttacctaanagtaagtgtacgtgtactaacgctgccagtgaaaaattacgccccatata

SEQ ID NO: 40290 - DNA, 414 bp, Zea mays
  unsure (1)..(414): unsure at all n locations
tccccgcaagggccaccacacaattggtgcctcttgccttgtttacaattgagtnttgatcacaagaacaagtgagaaagataagaagcaatccaagcgcaagagctcaaaagaacacgacaaatctctctcgctaatcactaaagccttgtgtggaattggagaggatttgatcacttgggtgtgtctagaattgaatgcttagctcttgtaagtggttgagaagtggaaaacttggatacaatgaatggtgggtggttgggggtatntatagccccaaccaccaaactagccgtttggtggggctgactgccgtatggtgcaccggacagtccggtgcgccagccacgacaccaaggccgttgggttccgaccgttggagttctgacttatgggcccgccaggatgtccggt

SEQ ID NO: 40291 - DNA, 350 bp, Zea mays
gttaacacactagggctatataacaccaacaccatcatgattcttaagaggtttcacttgctaaactcaaggtgtttggattggggtctttctatgaatataacagaccacattctttttgtaaaaaggggtgaacaattacaataccacctagatagcaagacaagataaacacataacacgacctaacaagacttactaatctgaaacgaggtaaggcatttctaacatagcagtacatcacattattcacaagttcttattatttgaataacggtgagggaagcatgttggtgcacaagagacaatgaaaagcgacaatcatgatcatgctcattctagtcgtcttc

SEQ ID NO: 40292 - DNA, 459 bp, Zea mays
  unsure (1)..(459): unsure at all n locations
tagtcccgggcggngctctcttctacgtgagacagtctgtattgttaatgcgagttttgcatagttccggtgcgaggcacaccttgttgtcgcggacggcccgcccgaagggcacgaacggtccacgcataggtgaattcttcaaaaagcttctcatgtccggaataatctacggtattccggacaatcgacttagaattgacagagatggacttatgcacctgagaattaatcaactaggcaaactagttagtccataagatttgtgatggtcgtcaagcaccacaatccaatatagaaaatggttaaggtcgctcccctttaaaatttcccacacagtgcgatatgggagcgtctctatgtcgattgcatggtgtaatgggcgattgttctgtctaacggcggttggcatgattctaatgagcaatgcatgcgggttggtgaggtatatacgagcaa

SEQ ID NO: 40293 - DNA, 458 bp, Zea mays
  unsure (1)..(458): unsure at all n locations
ctgacaagagaagttaagctgtccagctacattattgattgtctttgttcttctggccacaacaaattagacgctgcttataagcaagtgccatgacaaaataattggcatgacatacgcttcacagccttgctaatatcgataaagacatgagggccaatgcttagattgcaaaatcaagctgttaggtgagcaagtcccctatccattgctcctctatgtacttctgaataatggcatcaacgaaaagaaaagctgggtcttatatgggctagatgcaatccaatgcagagcagcaggatgtcacaaaagtcacttcagtttggcccccatgtgcactcaactttgcagatcataagggtacaggatatccaagaaaagctagatcccatcagaggaaaggctagaaatcagctagccagtacatacaatcatattanataaaactctctttcctg

SEQ ID NO: 40294 - DNA, 348 bp, Zea mays
  unsure (1)..(348): unsure at all n locations
agcgaccgcagcatgtcactctaaaggagagcacanctttgattattttgcncccncgaaaaagacgggtctgnacccatgccaaacaggaaaacacagcggcgttcatcatccacacaagaacattatgactactaacaggccacttgagctacttcacatggtctatgcggcccgataacttacataagcactcgcgngagtaaacattggctcgaattggggatgactatnttccttcacttgggtgttctttgtacaggatatattttaaactccagagaccttaaagggattcttgtaacgggctacaaatgagctccgtttaaggatcataaagaatagaag

SEQ ID NO: 40295 - DNA, 418 bp, Zea mays
tgtcgacacccacgacgcggacttgctaacgtcgcacaggcggaggcgaaggaggaagctctgctcctagcacacgcaagcatcgagctaccttcagcggcaccggccgcagtggcactccaccttgatgagtcgaaagcacgtgcttttctcggcgacagctccagcaacgacatgatcgaaggatggtgcctcgacaccggcgccactcatcacatgaccggccaacgagagttcttccccgagctcgactctagtgtccgaggctccgtcaagttttgggacacctccggcgtagagatcaagggtgccggctcagttgtcttcaccgtcgcgtctggtgagcacaagttgctcactggagtctactacatctctgcgttgaggaactctatcaccagctcgggacagctggatg

SEQ ID NO: 40296 - DNA, 386 bp, Zea mays
ttgtatagccattcgcatcctactgccgatgatccaagcggagtatattttcatcgtaagttgatgtgcacaaatactgtcacattgcttgacaacatgatcaaattccactaagggtcattactatgtgagaataatagcgcaataaaatagccacctacttgattcagcactaaataattgatattattaatatcttggatgactgtataagagatactcacaccaaatggaacgtattgaaggtcaactcgccaatattattaccaagctagccacttaatggagcaaggtgttgcaatatttagaattattcaattattcttggtttctctagcatgagttggatgcacatcatatgaataacataaatctccttcacctct

SEQ ID NO: 40297 - DNA, 379 bp, Zea mays
  unsure (1)..(379): unsure at all n locations
agcttctaaagggagaacacatgatatgtctaactaatgttactttcgaaaaagatagaccttgtgcagcttgtcaaacagggaaacaggtgttaagctctcatcatgccaaaaatgtgatgacaacatcaagacccctggagttacttcatatggacctcttcggacccgtcgcctatctaaacatatgaggaagtaaggatgggcttgttatagttgatgaattttcccgcttcacttgggtattctttttgcaagataaatctgaaacccaagggaccctcaagcgctttctaaggagagctcaaaacaagtnttaactcaacgtgaagaagataatgagcgacaatgggttcgagttcaagaacctacaagtgga

SEQ ID NO: 40298 - DNA, 463 bp, Zea mays
  unsure (1)..(463): unsure at all n locations
tctaagggagaacacgttntaggactaaccaatgtgtctttttagaaagacagggtttgtagcgcatgccacgcaggaaagcaagttggtacccatcatccacacaagaacatcatgacgaccgacaggccgcttgagctactccacatggatctattcggcccgattgcttacataagcatcggcgggagtaagtattgtcttgtcatagtggatgattattctcgcttcactagcgtattctttttacaggataaatctcaaacccaagagatcttaaagggattcttgagacgggctcaaaatgagttcggcttaaggatcaagaaaattagaagcgacaagggaacggagttcaagaactctcaaatcgaatgcttccttgaggaggagggcatcaagcatgagttctcttctccctacacgccacaacaaaatggtgtagtggagaggtagaatcaaa

SEQ ID NO: 40299 - DNA, 441 bp, Zea mays
taaaatcactgtaaggaaaccggaagggtgactactgttttctaaaagagacaccttgtgcagcttgtcgagcaggtaaacaagtgggaggagcacatcacagcaagaacgtgatgaccacttctagacccctggagctgctgcatatggacctcttctgacctgtcgcctatctgagcataggaggaagaaagcatgagccacttattgctgatgacttttcccgcttcacttgcgtgctctttttgcatgaagaatccgaaacccaagggactctcaaacgcttactcacgagagctcaaaatgagtttgagctcaaagtgaaaaagacaagaaacgacaacgggtccgaggtcaagaaccttcaagtggaggagttccttgaagaggaagggatcaagcacgagttttccgctccctacacaccaacaacaaatggcg

SEQ ID NO: 40300 - DNA, 427 bp, Zea mays
agcttcactgctaattctatcacactgatttgctgcaacagaaggaacaacaaagctttttggactcaatcaagttggggtacaccacaaatgggactcaacatgagccaccagcaaaaagggaaagttgtatagtatatgcaagggaattgatgccagttctcaatagggagagggagaagagagaaagagagagatgggaggaaaataatggttaccgtcattttgcagaccaactagtaattcagtttcttcacctgctagtacaactgcagcaagattaaaaaaatataggcattattggttgctgtaatcatgagataaactatatataattaaaggaaaatcacatgctgtggatatattcatggaggtcttgtaaatgatgaaaattttcagtttaagaagttattgcaagtgatcaata

SEQ ID NO: 40301 - DNA, 389 bp, Zea mays
  unsure (1)..(389): unsure at all n locations
gatatatttccagagttcagaaagtctaaattgatgccacgtgctgctggtccatataagattttggagaaaataaatgataatgcatataaacttgaattgcctcccgagttccggggtagccctacatttaacattgcagatttgaaaccgtatttgggggaagaggatgagcttgagtcgaggacgactccacttcaagaggggggaggatgatgaggacatcactcccatggattcaaacaacactcccctagttgatgttcaaggtccgattactcgctcacgcgcaagacaattgaattcgcaggggagctncgtcctatgtacttattcttgtgcattagagaatagcgtgctacctaatgaattaattggtcctaggaatg

SEQ ID NO: 40302 - DNA, 382 bp, Zea mays
  unsure (1)..(382): unsure at all n locations
cctttttaatattacataattcataggttggactaacaatcataaactattgttattaaatactatagaaatgtaggagcctaacaaacattggtcgcatatttctagcatttttctacgattttctatgaattctctaatcctcgtagaaaaagncacagataactaatgaacattgatgggctcatttcagcccggaacggtccactataggtgaaatgcccctgctcgcgctcgcgcggataggtatgcagaaatgtccctaccggttcanaagatcagaaagcacgtctcggccctattcacgtgtctcactgacactatacattaaggtactctattttctatttcttcttcaaaacagaacctagccacgatgtgc

SEQ ID NO: 40303 - DNA, 255 bp, Zea mays
  unsure (1)..(255): unsure at all n locations
ttacgcccaccacacacacacacaagcgaagccaaagccccgacagtattccgttttagccctgctagtacagtagtcctctcttcggncatgggaccatgctgccgtgtgtcgtgtcgcttcgctgctggtcggtcagtggttagtggttctaatgccggaccgaggttccttgnggggtggaaaaatgaggaatcatatcctacacgcgcagatacangtccgttctatgctttatcattcatgtggactaat

SEQ ID NO: 40304 - DNA, 434 bp, Zea mays
  unsure (1)..(434): unsure at all n locations
gctgagtattgcttctaaagttggtctttattntattagcaattactaagtataagtagatatcaacccanataagtagtatatcataattgataacaacacccacaatgcaatgcatatgacaaataaagtttaatttcataagttaatcatgtgagggtccgagctgctcatgaccatgagcacgactgatatagcagttttacactctacataggttgcacatctttaccaacaagtcatgttacccatctgccaaggggtcatgaatctcatacacctctaccaaggaagcgaggcagggtaacactacgaggactttacaaagttccactagctctagaanacccgctacagtttctangaagctncaatgcagggatcactcgtctgaccgtcatcacagcanaatcaacccaatgaccttcctacac

SEQ ID NO: 40305 - DNA, 240 bp, Zea mays
  unsure (1)..(240): unsure at all n locations
acattgacaaggttctgaaaccgttcaacatggaacagtccaagaaagggttcttacctatgccacatggtatacaccctacccagatgcaatcgtctgcgacggctcatgagccggagcgcatgagtaatgtaccatacccctcagcaattggatcaatcatgtatgccatgataagtacacgcctagatgtttcgtacgctataagngctaccaataggtaccacgctgactcacgtg

SEQ ID NO: 40306 - DNA, 473 bp, Zea mays
  unsure (1)..(473): unsure at all n locations
gctccctctatcatcactttgagtggagntatgaatngacctgacatgcctcgtatgaaatcttcctccgaagcccctggtcatttcagagaacctaaatgcctcctctcttctttggcgaagtcattgtcggcccggatatactcgtccatcttctggagcaacttctccacagtttgtggtggctccttgccaagtatngcgctgaaggtcccggccgaagccccttaatcatggcctcaatgacaatttcaatgggcactattggcgcttgtgccctcagacgcagaaaccttcggacatacgcctggaggtattcttcatggtcctgggtacactggaatanagcttgagcagtaactggcttcgtctganacacttggaagctggttatcagcatatccttcagcttctgccaaaggtgattgtcccctgccggagaaaggagtaccacgtctgagcgacactcttga

SEQ ID NO: 40307 - DNA, 199 bp, Zea mays
  unsure (1)..(199): unsure at all n locations
tatgttgatgatatcatatttgggtctactaacgagtctacatgtgaagagtttagtacgatcatgacaccaaacgtcgagatgtctattgatggcggagttgaagtacttcttgtgatttcangtgaaccaacttcaagaaaggcaccttcattagccaaacaaagtatactcaagacattcttaacaagttcgggat

SEQ ID NO: 40308 - DNA, 478 bp, Zea mays
  unsure (1)..(478): unsure at all n locations
ctgcagctgagaaattttccactgcttcttgatgtttggtgcacttgagtgtccatcttcccgatgaggcaatgcttagaggacctgttcagtatggatggatgtacccaatagaaaggcgactaggcactttgaaaaattntgtaaggaacagggctagggcggaaagatcaattgctgaggcatatatggcaagtgataccttaacattttgttctaggtacatgaaggatgttgacactagatttaactangatgatgatagtggtacagagatgccattgcctaatgacatgtctgtttttaagcatggtgctactcttgttggagctactaagactgagtacattgatgatgctatcatgaataagttagtttggtatgtgctacataatgctgatgaagtacaggaaatattgacgtaagtcagttcggatgtgctacataacttatgttatggttattacaattgaaatat

SEQ ID NO: 40309 - DNA, 492 bp, Zea mays
  unsure (1)..(492): unsure at all n locations
tctcagctttaaatctgcttaggagaagtcaaggtgtacttagttcagcagttttttaattgtcaagaagctacctgatgtgttgccacagcctcaatgatggcacaaccaagatccaagttctcattgattagcgtgtgaataagttgctcgatagtttcactgtcgctcataaggttctgaatgagattccgaagattagaatatagtgcaacacgaagaggttcctatagcagagaaaaagagaaatacaattattagttgtattcaacagatacaaaatgttaggggttaatagaatcaacaagcaggtatagcactgcatcaacagcacaaaggcctcaagcagaaataccttgcaagtaacatgtgccagactttccgctaatgttccaaccatcanatgtgcggatcaagtatcgtattgtatcagactccagtgcataatccttcaagaatatgtgcaacagtatcacacactaacatcttaaa

SEQ ID NO: 40310 - DNA, 416 bp, Zea mays
  unsure (1)..(416): unsure at all n locations
gttgagttcatcatccacacaagaacatcatgacgaccgataggccggttgagctactccacatggatctatttcggcccgatgcttacataagcatcagtgggagtaagtatggtcttgtaatagtggatgattattctcgcttcactcgggtattctttntacagganaaatctcanacccaagagaccttanagggattcttgagacgggctcaaaatgagttcggcttaaggatcaagaaaataagaagcgacaacgggacagagttcaagaactctcanatcgaaggcttccttgaggaggagggcatcaagcatgagttctcctcttcctacacgccacaacanaatggtgtagtggagagaaagaatcgaactctattggacatggcangaaccatgctcgatgagtac

SEQ ID NO: 40311 - DNA, 485 bp, Zea mays
  unsure (1)..(485): unsure at all n locations
tcaccgaggcatgcagaggctatctcgagggtcagacggtgctttttatggctanggtggccggtctacggtggtcgggtctcgggcggccgctggcacgccgtgcgcagagcgatcgccggtgaacttgcgctccggcgaggttgatagtgagcggtggtgtacggtcgaagcctcggtcggctntatatgcgcgggcgccggcgtgggcacgagtatggcttggcgcggcgtggtgcgcgcggtgccgagcgccggtgcatgctctggcgcgccagaacgcgtcgaacacgtgggtgtttgtttctgcctctgttcaaacgcttgcagggatcacaaacgtgcgaatctcgccaagggtcatgtgcaaatctcttcctggacctatggctagctattatgtgtgagttccgatgggagatatgccctaagtcacaagatatgtgggcgcccagtcagcactgtcggcactgtcaactcgagac

SEQ ID NO: 40312 - DNA, 450 bp, Zea mays
tggagaaacagaaatccttgaagtcttggctgttatttgcttgtccgtgcaactgttagttcggacggtactccgaagcggcaaacaatgttctgccagaaaaatttttgggcagtcttcgatgttattgtagaaacagccctcgcctcgatccatttggtgaagtactcgacagcgacgaaggcgaacttaatgttcccctgagcggtgggcaggggcccgacaatgtccaggccccagcgctggagaggccatgtgtgggcgatcagctttgtgtactgcgaggggctgcctgaccgatgggaaaacttctggcatggcttgcatgaccttgtgacccggcttgcggcgcaaatcattgcgggccagtaaaaaccctggcggatcatcttatcagcgagggcccttggccctgcgtgtgagccgcacgtgccgctgtggacttcacgt

SEQ ID NO: 40313 - DNA, 386 bp, Zea mays
  unsure (1)..(386): unsure at all n locations
agcttgcacttacgaccaaggcgcacnctcttttatattatcattcaaggctcaacaatagcggtaagggtcaacgtaaccaagttggtaccaattaatcttgcttattggtcatatcgcgatgatgttgactgtgatgttgcgcctatggatgcttgtaatattctgctacgtagaccatggccatttgaatcacattgcatgcatcattggagatcaaatcaatattctctcatacaccatgataagaaaattattttgcttcccatgtcccctgaggctattgtgcgtgatgatgttgctaaagctaccaaagctaaaactgagaacaacaagaatattaaagctgctggtaataacaaagatgggatanaattgacaggaca

SEQ ID NO: 40314 - DNA, 427 bp, Zea mays
  unsure (1)..(427): unsure at all n locations
ntanactggagtaccatntaataataattgtcttacccttgatattatttaaattacatatatatatatatatatatatatatataaatctgaaaatcagcaaattaataatatgaatgtaaatgatttgtttgacggagttatccatttatgaattatgcattaaagagaaataagtaaataaataaataagtaacccaaataacaactataataacatcatgctgggtttcatgtgttgttgcatttatgaccaaatttgagactcagatttgaattgatgttatgaatttaaacttgaatttgaaataagacaagaaagaaaaaaaatgaacctgttgcttgtgggccaaaaccatcgcggcccatttacttcatcccgcgctagcccacattccttcaaccgctgatgggtgggccaccttgg

SEQ ID NO: 40315 - DNA, 342 bp, Zea mays
  unsure (1)..(342): unsure at all n locations
atctcacttatatgacccaaacgacagtgccacatgtaagtaggacttaaatcattacgccgaggccttntagcacttatattacagataggtggcatcatcagaattaaaatgaataacccaatcataatggatgcaaaagccacaaacatgccattcttagagatcacacaaccatcgttntcactcgcaaatgaataaccatccttcatcaaacatgaaggagacataattgttcgactcataccaggaactagataacaattatctaacttcaaaatacatcctgatggaaggtggagtngcatctgtccgacggtcaacgcaacaactcttgcatta

SEQ ID NO: 40316 - DNA, 425 bp, Zea mays
  unsure (1)..(425): unsure at all n locations
tgtgcanagtccacttgaactaatcttcggagatttcctttcttgttcaacatgacaccagaaggtccaacccaacaagcgttggatgaattcagaattatttcagagcatatcagtacaagagacctggttcaggagtttttggctttcagggtttttcctagtttaaaagaatgggaaatgccgaagctagagggggagaaaaaagaaggagaacttgtgcggttgccttactatttcaagtttaagaaatactttaaaacaccttgccaagagtggctggatacaattaaagtaatgtgcaatgaaatactcagcaattactccaaaaaagaagatcagttgatgactgcggccttcggcacccgtccgaagcgaagattgaatcgagtgctggacgccttgngttntgaatacattgacta

SEQ ID NO: 40317 - DNA, 500 bp, Zea mays
  unsure (1)..(500): unsure at all n locations
ggcttcagctgaaggatcctttatatcatctatggagattgttttttctgcctgggccatggtcttgatgtgatcacatcccgccttctccaagatagctgaaatcccccgcgcaccagacaacgcgcaaatatccccgcgatcacccaaaatttcttcgaagctctcggcttatccacttatccattcaataacaccttcggggtcgcctcgtatgaagttttcttcggtagagtaggcgcccacattggcgaaactagcttttattttcttcacacagtccaaggatttttcaaagcatctttccttggatgtgtgaagttcttcaacattnttctctaaatgatttttccaatattcgctgatttcttggttagcttctgcaagtgcgcattcttctttagcttcagccagttgcctccggaggtcttcaattcaatcttttgagcttcggcctgggctttgagctagcttcatcttctttgaactatgtaacaaga

SEQ ID NO: 40318 - DNA, 473 bp, Zea mays
  unsure (1)..(473): unsure at all n locations
ttgantanacctaccattagatntcctcanagacaacccatttgtcaccttcattctagnggaaagcgtcgtcttgggccaaaataggatgaattangtttccttggactattctcaatttaacgacttagatttgctccaactacaagcaaggaaacaaaattcactattgaaaacaaatgtatccaagcaacaactacaaaacgaacaaatcatggtcacaagaagtggcaagttattccaaaaattacatgaaaggtaatcatataaatggaaaacattgtagtccccaagaaacaaaaacatagagattgtataacattggcttatggatgctacaaacaaaacataaatgacaataagtgaacagtatgtcaatgcaagaccaaaagtaatatgttcctacgatcaagtctcatgtcaatgtccacaaaaggaagtattcataacattcaactccatcanagttcatg

SEQ ID NO: 40319 - DNA, 354 bp, Zea mays
ctttgatcataggcttgatgaccatctcatttggcacccttggagcatgggccttgaatcgcataaacccttcgacatatgcttgcaagtatttcttatggtcatgcatgcactaaaataaggcttgggcagttactggcttgctctggaaccctgaaagctggtaccaacatgtccttcaacttttgccatgacgtgatccgtcccgggcgaagagaagaataccacgtttgaaccactctcatgactgccgtgatgaaagattccccatgacagccatgttgccaccatatgatgatatggttgcctcgtagctcataaggaactacttcggatcagaatgcccatcataca

SEQ ID NO: 40320 - DNA, 430 bp, Zea mays
  unsure (1)..(430): unsure at all n locations
tgccaatacttgtcaaagcaacaacacatgccagcacagtaattacttaccataccagtaactnggcctttcgcatgctgtggactggatatgattggacctttcaagaaagctcaagggggatatacccatgtattggtggcgattgacaaattcactaaatggatagagttcaagcccattgcttctttaacctctgctaaggccgtggaattcatacaagacataatatttagattcgggataccaaacagtatcattactgacttatgatccaactttaccagttcagaattctttgacttctgcgagcaaaagagcattcagatcaagtacgcgtctgtagcacatccaagagccaacgggcaggttgagcgagctaacggaatgatattggaggcactcangaaaaaggtcttcgataagaatg

SEQ ID NO: 40321 - DNA, 386 bp, Zea mays
  unsure (1)..(386): unsure at all n locations
ggatgaagcaactcaatcggctaaccaagcatgacttagttcgacgcttaaaagaagtgaaagttgaaaagaacaaaatgtgtagctcttgtcaagccggtaagcaagtggccaatactcatccaaataaaagtcaaatgttcactcatcgacctttggaattacttcacatgggattatttgggcccacatcttttgtaagtattgggggtaattcttattgtcttgtgattgtggatgactattcaagatttacttgggtttatcttctacgagacaaatccaatgtgtttgaaacattcaagtcatttgctatattggcgcanaatcaatcngactttgacatcaaaaagggtagaagtgataatgggtcggaatttcaaaat

SEQ ID NO: 40322 - DNA, 405 bp, Zea mays
  unsure (1)..(405): unsure at all n locations
tgtgatgtagcatctccatgtccctgatctcttggtctagttcatcctcctgaatcgtcgggctgacagccttcctcttctggtttcgggcctcccggagagagacggtctcctggttggggtccagcggttgcagtgctgcagccccagtcgctgaagctttcttcggcgccatagcgagggtctatagcttccgaaggtgttcaaaaaactcgaagtggaagtgagttcaccggaggtgggcgccaatgttggggacttgttctcaaatgctaagagttaagaacaaggcaacatanaaagtgttaaatgttaaagtccttcgtccttcgaagcattatgtcccctctcggaaataatgagttcggacgaaggtcataagagacataccttcgtaaacataac

SEQ ID NO: 40323 - DNA, 413 bp, Zea mays
atgctagtcttaactattaagcatgcatctagaccggcctccttttttgcaaaatcaactaaataaaagttggcggctaatacacccttaaaagctagtgaaccatcacttcttctaaaagacagacacatctacacttgtaaatagacagttataccccatatgacataattgactaacagatagcaaattatatcccagactctctactaagaatacattagagatagaatgctcattagaagatggcaatttacctacaccctttatcttgccttgattcccatcaccgaatataattgaatcctaggaatccctattcttgacgtaggaagtgaacatcttcttctcccccgtcatatggttcgtgcatccgctgtcgataatccagcttgatcccccggatgattaac

SEQ ID NO: 40324 - DNA, 444 bp, Zea mays
  unsure (1)..(444): unsure at all n locations
accttgatactcagctaaggtaaaaattaatcccttttgtctccggacattgtgtctacaaatttaagtaacctgtatctagtcgagtgttcgagtagcgaatggaattcgtctgaagtcaactgaatcaagtgcagattaaaatacagaagccgaaatccatttaactcagcccgtatgtttcttgccagctttaaatcttcggatataaatacctggtanaaagttatctgactacaaaatattcatcacatcaaatattcgggacgaaaacagatgaatttatccgaatccgaaatatttgtgatatccgttataaaaaaaggggaaaatgaanaaaaaaatctgaaaaaaaaaatctcgtggttgatccttccagccgtctcccttatccctgccgcccctctactcaagaattttgtcaccgtcgtttntatcttctac

SEQ ID NO: 40325 - DNA, 287 bp, Zea mays
  unsure (1)..(287): unsure at all n locations
gagttcaccttgatccctaactcagactctaatggccccattaacaaaaatgtgcataactaaccgctctgtcccatgccagaagatggcattaggacgccagccctaaacacgacaaaaccctgatttggcctcggcttgagcagggagacagaccggaattccgagctccatatccctgcaaccagtaggcaanaatcctatgacacccacacaagatctgtaccttgaaggaggagaagaggttctggcactgaccaagcgagacaggctcgatgatgacacac

SEQ ID NO: 40326 - DNA, 512 bp, Zea mays
  unsure (1)..(512): unsure at all n locations
tactaagcttaactatgaattactggntgaactaatatgatcatgttgtattccttattttgaatcacttatagatattcactttntgatggattcatttactcgtcgttagtgagatctcataggacgggttcatcttcccgtagctcatgctctcatcgactgaacgggcagaagttggagattatgaggatgcctgaggagatgagacatcaacggggaattatggaggcttacaatgcacataacgaagcgatgtatcaagtaagtatagataacccacactctaaattcttatatttcaatacaacatcttcaatagtaacacctatgttaaacagtaatgcaacaatagggcatggcaccaaactttccaccgccaccacaatggagccagtttgcatccataccagctccggtacgttaatcttagcannatctcgtaataacattctctatactagcanttcatatagttagtgtagtagcaaaacatgaactatatacttaac

SEQ ID NO: 40327 - DNA, 292 bp, Zea mays
aaaccttgataagattttatttaacaacaaagatgtctttgcttggtcagccaatgacctttgcggtgtcaacagagacgtcattgaacattcactcaatgtcgacccatccttcacgccaagaaagcaaagactttggaaattgtctgatggtaaagccgaacgcgcttcgaatgaagtaacaaaggcttctcagtgctggtgtcatcacagaggtaacatatccagagtggctagccaatactgttatggtgaagaacgccaacggcacatggagaatgtgtattgactt

SEQ ID NO: 40328 - DNA, 507 bp, Zea mays
  unsure (1)..(507): unsure at all n locations
tcagtatatcaccatccacctagaccaagatatcacaatccatccttcttataagaccaatgtcctcgtcgatcaaccctaagccaagaacctctcctcttggccacgtatttatgtctagtgtcgtcatatgccatgccatgtcaccactctgggcccacatgcgccatgcaccatataccagaaccccctagcccacacacgcccgtgaagcgagtgttggctctgataccatttgtaacatcccatccactcctagatcagtagtatttactcctggcaaccctctatgatcatatatcatcccacagaccaacatgagtctttntgtgtacacattgtcctcaatcatacgcacccaagaagacttcccgatcggtcacccatcccaagatttctctatgccaagcacgcttaaccctaacatgcttncgaaaaagaagatgcgcctngttggtatgagtactctattaattctattaagcattgagccaggatatcaccatc

SEQ ID NO: 40329 - DNA, 430 bp, Zea mays
  unsure (1)..(430): unsure at all n locations
ctgacgacaacatatcgncggtagtttgttctattctaatttcaaggtaaaaactnttcttcggctgttcattattttaacaacgaaggagttttctaatgaaggttgtttttgcacagagtatgctattaagtaaagctttgaagatgcaacaggaccttgaagacaaaaaaacatgaggttataattgaagatttagatagcanaataaaagatcatgcaacagctcttgaaaagaaagattntgaacttcaaacagtggagggtttactggaagaagctaaagccaatactgaaaaattgaatagtgaactcctctcanagtcagaaagcttcgaacaagaaaagcagaaatttgatgcgaagtttgaggctgaagtcgaatagagtttaaatttgcagaaattactgaaagagcttcaagataaat

SEQ ID NO: 40330 - DNA, 490 bp, Zea mays
  unsure (1)..(490): unsure at all n locations
acacaagaaactcagcttaacccttataggcattanaggggtaaaacctaacttatttttgtatatacctaaagctntagggtaaaagtcataaaatgaccccaaaaataaagttgaatcacaattatacccctgtgataccagaaaccctaattggaaccctggaaaaccctaaaaccaaaccctaggggcttatgtgcaaaagtgatgaacctttggactaaagtgtaaaaactactatgtttaaacatataaagtcatttggttcacaaatatgtggacttgaaagccaaaccctaagttttggacttaaatgcaaaatggacctcatttgagttctatactaagtctgaaattcagtgttgaaggctccactntggggctntgtaactntcaaagcatagggtttttgccctatgtcaccacatcaaagttgaagaccaatcatatgagaacaactnntgttaaggattcaagccatgatcctatg

SEQ ID NO: 40331 - DNA, 480 bp, Zea mays
  unsure (1)..(480): unsure at all n locations
agcttcggctccatctatgtngcggattgcctttgaatctgtccaactcccttcagcccttctggcagcttcttgacttccatggacggcaatgggcccttgttccgaacgtatcttcatgcataagtatgctggacgaagtattgcttcgaaggcattaagtgttcctcgaccaatgattgcattgtacgggtattccatgtngacaatgtcaaaaacaacttgctcagttcttgtgttgtggacataactgaaggtaactgacattgtgaatttgccgagtgccacaatctgccgtccttcgaagccacaaagagggtgtgtagcatcatgaatcttgtcctctggttcttgcatctgcctgaaagcatttgcaaatataatgtctgctgcactgcctgtgtcaactagaacattgtggaccagaaatcccttgatgacacaagatatgaccatagcatcattgtgaggatagtcttt

SEQ ID NO: 40332 - DNA, 504 bp, Zea mays
  unsure (1)..(504): unsure at all n locations
ctaagctaataatagggcanaaattagttgcactaatngactggggttttaataattntaagaaagttgtatctacctactaaaccaaacaaaaatgttaaacctctctgtccactccattaaagttagttttaccccttattctataatatgtttaaggataaaaaaaatagaaaatgtaatttaaacaatgaaccagagagtacctttatttttgttaggatacttattcaatatagttcactggaaaaaaatatcataccctgttttagtataaaataagtaggatcccttttgttttaataaaacaagtgaaacttagaaaaactctacaaaaataaccccaaggtaaaaacacccccaccttgggaataactaatttttattaataagaacttatgaaaaataggaaatctgctgtttgacattnttcanataataatgtagtagaaaagtgccttttgacattaaacttaagaaaatcataactaaataaccaccctt

SEQ ID NO: 40333 - DNA, 324 bp, Zea mays
ccgaaacccatgcttttatgcgaagatatcgcagagcaaaatgtgctgttgggatctcaattgtctgagcaacaagagaaaactttgataaaggttctcttcaacaaccaaagatgtttttgcatggtcacctaatgatctttgcggagtccacagggatgttattgaacactcgctcaatgttgatccatctttcagacccagaaagcagaggcttccgaagatgtctgatgacaaggccgaacgtgctcggaatgaagtgaaaagactcctcagtgctggagttatcagagaagtaaaatacccacaatggctggctaacac

SEQ ID NO: 40334 - DNA, 391 bp, Zea mays
  unsure (1)..(391): unsure at all n locations
tcgggaatccgatgctnttacctatctcccagcattcttatatttcttgttatccgggagacagtacaganaatcttcttcgtcactaccattgaacactaatacccccttcaaatatttcaatttttgggtgtagtgtcgtgcttctagcatttcttcttgggatagttcttttcccgaagcatgacgaataatgtagtcagtgtttttgttcgaagcttcgggagcaggagcttcaaccttttcaggtgcaatctgtcctgtcatctcttcctcacgtgcgataggcttcgtcgcggcggtcgttgaaggcccagcttcgatttcagcctaagtttttgtagcttcgacttctgcctgcttagtatcagtttcgggttgcgctttggca

SEQ ID NO: 40335 - DNA, 450 bp, Zea mays
tgcagcatgccagcttaaagaaagcctaacgaaatgatcgtttgttttttcacaagcatcgcaagcaatggctataataagagggcaatccttcttaaaacatgcgcgacctatactttataaaacaagacatgagcttaaaaatatcttaattagaatatacaaatattacgtccaccaatttatattcttttataaaacgtcttatgtgatatgtctaagattaacgcgctataagatgataaaacacgttatagcaatattaaacctttttaatatcttataaaagatatatgttatatatccaaggctaatgggcgactaatcaccgtatacatctctagaagcattatggaacatataatccatcgtgaacctatcacttatgataaactaatatatacgtctaaatatgtcttatgtgaaaagatcattactattaaacacata

SEQ ID NO: 40336 - DNA, 513 bp, Zea mays
  unsure (1)..(513): unsure at all n locations
acctatgaaactcagctgactactcctaagtgaaccactcgagactgtatgttctttctcttaatttaaacctgtataagctagtctaagggttttagaaggcttgtgagcaccgggaggaaaatgagagggaaaatgttgcatcctagattttggacgaagaggtggctttatttcttttggtgtaatcgccaagttgatgccatgtangggatacatgggttttgggaagcgggcctcacgacggtgatggctccggaaaccagacatgtgggtaaaccgcacacctctacgcagagttaaaaatctatttttacaatgcatatccactagtatggatgagttatgccttggttctaacaactagtgttttgtttttaaaaatatttagaaaaaatagttctagaaggtctagtggtcgatccatgagctatgtggacatgaagtctagtagtagctttctctttattaagttgcatgcaccaaccaattcaacccanaagcttaagctga

SEQ ID NO: 40337 - DNA, 478 bp, Zea mays
  unsure (1)..(478): unsure at all n locations
ctatgaagattcttcattccaacatgtgctagtcggcgatgcctgattcagcccatgttagtcttagcaattaagcaagtgtcgagttcagctctaacaaaatatactaagtatagctgaccctctaacactcccttaaatgctattgaatcatcacttcttctaaagacagtgacacctacatccgtaaaaagacagttgtaacccattttacataattgcgaaactaaaatcaagttgtaatctaaagaatctacaagaaaaacattggaaatagaatggtcaggtgatatagctattntacccaatcctttgaccaaaccttgatttccatccccgaatgtgatagctcgttggggatcttggttnttctcgtaggaggagaacatatntntctcccctgtcatgtggtttgtgcacccgctatcgatgacccaacttgagcccccggatgcataaacctacagaacaagtttag

SEQ ID NO: 40338 - DNA, 292 bp, Zea mays
ttgtaaaaacatgatgaccctaaacaatggtgaattaacatcatggttaacgacgagaacgtgttattcatcgggccagtgcgaaatttttcttcggtgaaatcaccagagctctgaacacatcgagtgaatgatgacctcatgatgtattgtagacacacacttttggcctggagcttctcggcaccgtgtgcttctgaattggtgtgacacgaaatataaagaccaattcacctatacacatttaatatttctacctcccaacatgcaataatataaggaatgacaaggg

SEQ ID NO: 40339 - DNA, 352 bp, Zea mays
ctacaccaacattcgggcactcccgtggccttgccaccacctaaaccacccgtcaagtcatctcatggtcacaataagagttattatcgcccctaggatacaaagttcaggctccaactctatcatagcccctaatacaagaagtcctagcataaccaaattgtacaaatatacgacacatcttacaaattgatgaatgattagtaacttttactaaaaaattacataccacttgcaatggtcagaaatcaaggaagagtcaagtcacattgtaaaactatgacaattcctacaatctgaacatgaaatattgaatccttctgtataaaatggaagatgaaatatctactta

SEQ ID NO: 40340 - DNA, 411 bp, Zea mays
  unsure (1)..(411): unsure at all n locations
gagagagatatgcctgttgtctttctagctcttgcgcctggatggctttcttctctcttgaatccttattgcgatcaaactcactcgtaattgaggcaagagacaccaatcttgtggtggtccttgtangaactttgtgttccaagtgattgagaagagaaagctcactcggtctgagggacccgttgagagagggtaagggttgaaagagacccggcctttgtggcctcctcaacgaggagtaggtttgcgagaaccgaacctccgtaaaacaaatccgcgtgtcacactcttcattcgcttgcgatttgttttgcaccctctctctcggactctntattatttctaacgctaactcggcttgtagttgtgattattntgagaatttcagtttcgccctatttcaccccc

SEQ ID NO: 40341 - DNA, 466 bp, Zea mays
  unsure (1)..(466): unsure at all n locations
tataataagagaatagcggcaagagcccgtccatatgntaataatatgaatgttgagttatacaagcatggagtctgttctccattactcaaatgtttatccagagctgaaggtatagagctgatgaaagaaatacatgcagggttgtgtggatctcacatcggatctangcccttgctgggtaaagttttttgtcaaggaatttattggccgaaggcagcttcngatgcagcagaattagtccaaaaatgcgaaggttgtcaaaaatgtgcaagagatcagagacaaccttcgtctttaactcaattaatacagcccacttggccattgcaaaggtggggccttgatttgttaggcccacttccaccagcacaagggaatntaaaatatgatgtggtggcagtagaataattttctaagtggattgaggcgaagcccttagccacaataacttcggtcactgttc

SEQ ID NO: 40342 - DNA, 392 bp, Zea mays
  unsure (1)..(392): unsure at all n locations
atgtgctatatggctattccacaaccagcccatgcaagtcttagccattaaacatgcatctagaccggcctcttcttttgcaaaatcaactaagtacagattgccttctagtacacccttaagagctagtgaaccatcacatcttctaaagacagacacatctatgtttgtgaataaacagttatatcccatattgcacaattgactaacagatagtaaattatatccaagagactctactaaaaacacattagagatagagtgctcattggagattgcaattttacctagcccttttaccttgccttgattcccatcaccgaatattattgaatcttgcgaatctttgtttntgacgtaggaggtgaacatcttcttctttccccgcatat

SEQ ID NO: 40343 - DNA, 437 bp, Zea mays
  unsure (1)..(437): unsure at all n locations
agctgggtggctgcggctggtatcactcatttgcgagatgggtctgttacttttattttgaaggatcgctggctgaatggcaaatgtattaacgaggtggcacctgctgtcttcggtatggtgcccaagcgtattgcttctagacgcctggtcaaggatgccttgcctgatctcaattggttggctgatctgagaggggctatttctgttgcagcccttgctaatctcatggacctttgtgacttactcgaggggatggttctgcagccggatgttcctgatgtgcatacctggaggtttagtgaatcgggtgaatactcggctagttcagcttacagggctttgcttcttggctctgttagctntgagcctgctgaacgcatctggaaatcctgngctgcatgaaagtgtaaattcttactctggcttgtggagca

SEQ ID NO: 40344 - DNA, 484 bp, Zea mays
  unsure (1)..(484): unsure at all n locations
ctaagcttctanagggagagcacactntgngactaacaaaggggcattntgagaatgatctggncngnagcgcatgtcaagcaggaaagcaagttggtacccaccatccacacaagaacaccatgacgaccgacaggctgcttaagctactccacatggatttattcggcccgatcgcttacataagcattggcgggagtaagtattgtcttggaattgtggatggttattctcgcttcacttgcgtattctttctgcaggaaaaatctcaaacccaagagatcttaaggggattcttgagacgggctcaaaatgagttcggattaagaattaagataataagaagtgataatgggacggagttcaagaactcacacatagaaggctttctcgaggatgagggaatcaagcatgagttctcttcttcctacacacctcaacaaaatggtgtagtggagaggaagaatagaactctactggacat

SEQ ID NO: 40345 - DNA, 357 bp, Zea mays
  unsure (1)..(357): unsure at all n locations
acaatagaataagctaccgacaagacggtgcccgccggaacggcttatgtccgtcctaagcttcacgaaacccatactncttgatagaagaccgataaccctcgctccggttgatctcggacgcagcctaacttttcatcgtcaacaccaccgaagagtagtgcccctagctgatatccacaagatatagccatatcttttaactcttctttctcaaccttcatcaactcttggccaactaacgtttgaaagttgaatatttcttcttccgaagcttctttccctatnnttcttcccttctcacgactggagccatgaattcttcagtggctgcggcagctctctctatgggcatat

SEQ ID NO: 40346 - DNA, 491 bp, Zea mays
  unsure (1)..(491): unsure at all n locations
gcggagcaactttgctcagatatggaagaagacttctttatatgcctcgacacttcggtccgttcaatgcgtttggggcgatgtgttaaaaccttaactttcttcgacctcggcgtgctagaagtcactgaagcagcagtatttcttttctttccttgctttcgtgaaggatagccagaatctgggtatacaaacctgatgacatcaaatactctattcagcctcttcttgcctcgagccctgaagggccgtgtcatagcatcatcttcagccttcgagtaggcaccaagcaattcatcactggttgcttcaatggcatctagacagtcatcanttggctcatcaaactggctcctgtatttgaacgtgtacttcaggtagattaaaccaccttggctagacccagcagcaaccttccttcggcatctccacccacttgcaagtggccacactctatancaatgtgctctagactaaatcttggtgctatg

SEQ ID NO: 40347 - DNA, 489 bp, Zea mays
  unsure (1)..(489): unsure at all n locations
tcatccaaggccaccggaccatcgccgtcagaggcgccttcgtatattggttcgaccggcgaagacaagacgccggttcgccgacaatctcgtccatttgtcgactgcgactgcagctgtcgcatggatatgactccccttgtgcatggctgacggtgcangaaaaggaggagggaggaggagacgctccgccaccggcggcatctgccagcgggccggccgacgaggcgtctgagtcggagacagcagcaaaggtatgctcgtgcatgcattcagcattggcctcgccacttttgggacgcattttgcgttctagtcgtctgccatgcattccctgtgaagagaaattcgattctgctgcttttcttactagatgattacctctatagtttgaaagcatatagtttcaactctcgctaatgggctttactggttctatgatgatgaaacggatcangacgtcgatgctgctggaggcggctaaacgcc

SEQ ID NO: 40348 - DNA, 420 bp, Zea mays
aacattcttaacccaacgggtgaactaaccatcaaatgagcactaccaaaatttttggacagcaatacaacagttgcttgctttaatcataactcttcaatgggtagcccaaaaatatcaaactaggactttctggaaagcttaaaaagtgctctacaactttggtattgtcatcacaacatgattaaacacttagcaaggtcgaattatgcaaacacagcagctctgtccagaattggacagattcagacctgtgacatcaaaaattcacaactgaagattcagacatccaaacaaagtggtcctagactttctggagagctatataaatgttctacaaattaattataaacaatcctggctggttagcatgattaacgtaaaaatactatgaagctggctgtcaaactgacagatcac

SEQ ID NO: 40349 - DNA, 509 bp, Zea mays
  unsure (1)..(509): unsure at all n locations
ntcctttaaccncganacgcgatacacccttcattggtgaatctttcaagtagacataatcgccttccagaaagcataagggttgtcgtcgtcggtctgcataactcttttgtcgaatctgagctttcttcatattatgaataattctctgaaccttttcttcgacctctttcaccatatcaggcctaaagaattatttttttccaggttcagaccaatttagcggagtacgacatcgtcgtccatataaagcttcaaaaggtgtcatcttgatactttcttgctagctattattatatgagaattccgctaagggcaaactttcacctcatttctgtgggaattccagaacacatgcccgtagcatatcttccagtatntggtttaccctctcagtctgtccactggtttgaagatgataggccgaactgtggagcagtttagtacccagggatntatgaagttcttcccagaatttggatacgaatngaggtccacgatctgacact

SEQ ID NO: 40350 - DNA, 469 bp, Zea mays
  unsure (1)..(469): unsure at all n locations
agcttgtgaacagtacacgactcacgaccggatatattcttttctagtagatcagtcgaagcctatgctcttatgtgaggacatagcacagcagaacgtgctgttaggctctcaactatccgaagagcaccgaaaaaccttgataaggtctttgttcaataacaaagatgtttttgcatggtcagccaatgatctatgcggagttaatagggatgttattgagcactcgctcaatgtcgatccatccttcagacccagaaagcanaggcttcggaaaatgtcagatgataaggccgaacgtgctcgcaacgaagtcaaaagactcctcagtgcaggagttatcagagaagtgaagtacccagaatggctggctaacactgttatggtaaaacaggccaatggcaagtggcgaatgtgcatcgattttacagatcttaacaaggcttgtccgaaagatgacattccacta

SEQ ID NO: 40351 - DNA, 524 bp, Zea mays
acacaagaaactaagcttcgctgacatgctcttgatacccgaacctaatttcattatgctctgctcgcatacttggaaaacattgtcaaatcatatttttgaggaccttcggaagccgaaggcccccaacacggcgcatctccaagctcgcgccccccaccaactggtgctgccctctggccatcctaggccgacagtggtacaaatacttccaaaggccaaactggggcaaaacaccaagaaaggcttcgcataaatgaacaaaagcagaaacttgcagaatagaattggggttcagatgggtcagattcaagcgatagaaatcaaggagaccgcggaagaaaggagaaatgggaagagcaagtccgcggataagacaaggaacgtaaatgacggattcgtgggtgtcttctgtcggaacagtgaccccatggcagatccgccacgaacagaagctccttctgaggaagaactctgatggaaacgagatgaagaaagtcccgattagagacacatacatatgg

SEQ ID NO: 40352 - DNA, 321 bp, Zea mays
  unsure (1)..(321): unsure at all n locations
attttgagaaagacaggatctgtagcgcatgccaagcaaggaaagcaagttggtgcccatcattcacacaagaacatcatgactactgacaggccactggagctcctacacatggatctattccgcccgatagcttatataagcatcggcgggagtaagcactgtctagttattgtggatgattattctcgcttcacttgggtgttctttttgcacgaanaatctcatacccaagagaccttaaagggattcttgagacgggctcaaaatgagttcggcttaacgatcaagaaaattagaagcgacaacgggacggagttc

SEQ ID NO: 40353 - DNA, 504 bp, Zea mays
  unsure (1)..(504): unsure at all n locations
cctatgaaactcagctaatgccctaaanattgtctaatttgtaagggttatgctcncatggntcangataacgagggttacattntataccctgccggttatcccgaacacaaaattaggagaattcattctaggaagtctcactctggctctgatcatgcttttatgtataagagtgaggcatctagttctaggaaatccactcatgttaaattgcctaagaagaaaactcctactgcgtcaaatgagcctaatatttcatttaatacttttgatgcttcatatgttttaactaacaaatcaggcaaaatagttgccaaatatgttgggggcaaacacaaggggtcaaagacttgtgtttgagtacctaaggtgcttgtttctaatgtaaaaggacccaagaccgtttgggtacctaagaacaaggcctaaatntgttntgtaggtttatgcatatggnggctcaagttggataattgatagcgggtgcacaaaccacatgac

SEQ ID NO: 40354 - DNA, 420 bp, Zea mays
  unsure (1)..(420): unsure at all n locations
atccacatccaacttagagatctaatatctttggtcaagacaagaaaaacacacaagctactcttgagatagctcattaaagcgatgatcaaactctgtggtgatagaatctattgcagcatagaaagtatcaaaacgataaaaatgctctgtggtaatattatttctcccaccttttcttgatcgaccaaatcgtggtacaacatcactcatatttggtattgcgatatcatttgccaggcagaatgttgtggcttcttccaacaatggctcccaaccatcatttctcaaatttatcanacatgttctcacatcaacaaccaaagacatggcttggacaancgtctgatcctttctttgcaagagaagaganaactcatttgtgatacggaggatctgtaacatcatcttcatcataaa

SEQ ID NO: 40355 - DNA, 427 bp, Zea mays
  unsure (1)..(427): unsure at all n locations
tcgcgagagagggaacgggtcctaggtctcctgaggagtcttttgtgcggagnggagttcgatgtctgagtgagtccgtctccgtcgtccttaccgcccgtgcccccctccccccttgagaaggccctgngcatccccctttatagatacaagaggatggtctagctgtacatatgggggtgttgctgtgtgctaacgtggccggcggagaagtgcttgagccctgtagaagagcagctggcggtgcggccctaggtcctgctgacgtttctttgccttcgtagagagcttgagggctattgatgttatggacgcatgcggngaaccatcattacctgttgccggagtaatttagatgtgacaccggtcttgttccttcgtagcctgaggcggctagctagaggtagggtaatgatgtatcccctat

SEQ ID NO: 40356 - DNA, 181 bp, Zea mays
gcagctcgcaatattttttgccatttaagacagaagttgcctatctgaccaagtgctgacaattccttgccgatggctgactattttgatttcaaagtgaggattcttaaaccttacgcgatcttctttactagtgcatgattataatggctaatatgatagacaaacagtagaagaactc

SEQ ID NO: 40357 - DNA, 488 bp, Zea mays
  unsure (1)..(488): unsure at all n locations
tacagccatggtaagtagcatatgcaactaatatgcgaattgtcttatgcctagctacgggtgcataggtttcaccaaaatccaaaccttcgacttgtgaatatcccttggccacaagtcgggcttagttccttgtcaccacaccatgctcatcttgcttgttgcggaagacccacttggttcctacaacatcttggttaggacgtggaactaaatgccatacctcattcctagtgaagttattgagcttctcttgcatcgccaccacccaatctgaatcttgtagtgcttcctctaccctgtgtggctcaatagaggaaacaaaagagtaatgctcacaaaaatgtgcaacacgagatctagtggttaccccccttatgaatgtcgccgaggatggtgtcgacngngcgatctcgttggattgcttggtggactctcgggtgtggcggctctggacttggtcatcttcctcatcatgatcatgggca

SEQ ID NO: 40358 - DNA, 385 bp, Zea mays
gggaagctctcatcacaccaaaaatgtgatgaccacatcaagacctttggagatgcttcacatggaacctcttggacccgttgcctatctaagtataggaagaagtaagtatggtcttgctataattgatgacttctcccgcttcacttgggtattctttttgcaagataaatctgaaacccaagggaccctcaagcgctttctaaggagagctcaaaacgagtttgagctcaaggtgaaaaagataagaagcgacaatgggtccgagttcaagaacccttcagtggaggagtaccttgaggaggaaaggatcaagcacgagttctccgctccctacacaccaccagcaaatggtgtggtagagaggaagaacatgacacttata

SEQ ID NO: 40359 - DNA, 517 bp, Zea mays
  unsure (1)..(517): unsure at all n locations
ctattacgtgacctataaaactcagcttgtgatcttctttgagcctctgatcatcaattcagagctcattattattccaattacctcctcgggagacattagtgtatatctaggatttcctcgaattaatcgaacttgcgtagggttaaggaaaacgagggatcttacaataaccttgaccattcaatggtcatcccatttcttgctcctgaggttgcgcacttggttcaccaacgttctgagccggttgtacatgtcttgtggctcctccccttgcgaagtcggaagcgaccgagctccccctcgattgtttcccgcttggtgattttggtcacctcgtctccttcgtgcgcggtctttagcgtgtcccanatctccttagcacctttcaacccttgcaccttattatactcctctcgacttacagaggcgaggagtatagttgaggctcgngagttgaagtgttggatttggccactctgcctcatataacttcattcctaggatggacctgtca

SEQ ID NO: 40360 - DNA, 334 bp, Zea mays
ttccgctgaagttgttcgtatgagatgaccgaagttcctcttcgtgaagcttcggaatttataaaccgacataaaagtagaatgaccttttagtccatatatgtttgagtcaccgttgtaattccttatgaagggtataattggtaattctcacaggccacgccctatgcctataaataggtgaacagtacctctgtactgttcacgccatcttgtaatcactggcacatcacgttggaatcattgccttctgctaagacgaaggtataaatatacctacatggtatgtttcaatattaagcttacatcataacatatatacgaatatagttat

SEQ ID NO: 40361 - DNA, 487 bp, Zea mays
  unsure (1)..(487): unsure at all n locations
ctaagcttgtcaggagagctgtcgtgaccgtgatgttctggcttgccgtnggaaggacaaaagtatcacctccaataatgcatcagcaaacgtctcgcgccatggcacacgcacgcccaccacttcatcgtggttgggatgatcgttgttgtggcgtattcgatccgtcccttagaaagcgctagttaccttgggcgtgactctgacatgctngtggtagccttttctatacttgggcgaaacacagtgaggcagacgtcgctgtgagcactgacatgctttgttggagttctcttggagctacgtatgtttggggtgcgagcttcaagagtgttggtcatgaagcattcctgtgtagggtcatggcttgccctgctaaacggggtactaataaggctatagtcgaaatcgaatagaaggaggtcatgggatgaatccctaacggggtcggtcatttccacgaactcaaggcattcgtgtcctagca

SEQ ID NO: 40362 - DNA, 423 bp, Zea mays
  unsure (1)..(423): unsure at all n locations
acgagtctttgaaacttgattttccttaccttgaatcctcttaaaaccagcatacccttgagagtcttttctttagttgggtaagtcctgctgagtacttgcgtacttaggatttattcccaattgttgctgcaggttacgagtcactttgattgtgatcgttgttaagttcccgtgagctcggccttcttatataagtatatcccatccttagcttatgtattgaggattgtcacttaagctagcatgtattttcaaagttacacatattttataatacttcanattgtaattctcttgaaccattttttaatcacttcgatgatgtataatgaaatctcgatgtaactctgtatcattctgtaataaagaatctatctccgctgcacgtggctgtatgtgagtcgtgtttacttaatcttg

SEQ ID NO: 40363 - DNA, 434 bp, Zea mays
  unsure (1)..(434): unsure at all n locations
tacccatgacgaggcatgtgaccagntaaaaggtcctcgatcagcttgcctacatcgagacggtccttaatcgactcagacggagacactacaccgagactctcttctcgtgcaagtcacccgtccggttttagctttatcatttaaaacccaaagtttggtacctggcagaggtacatcttttccgatgttgaacccatcatgaccatgatggatccaccatncaagtttatttttaaaacatcccatccactgtgaagcatcctcttttgttttaaaacaaaacatttgtttttctaaagtaggactaagcatcagaaaaaccttttaagaaaataggtaatcaaggaatggtaaacagattcaaggaaggaaatgcagcaattggtttaacactcaactcctatcacctaatgcatcagtcaagtgataaa

SEQ ID NO: 40364 - DNA, 406 bp, Zea mays
  unsure (1)..(406): unsure at all n locations
cgactagtgttctggatgccgcatgtacttcacatttgcctgcatggactctcttcaaaagttgcttccccgtggacgggagaatgcatttcatgaggacgcctgacgcgcccctcctgtataatacctccccaatgagtgtatagtgagccgattgtctggcaatacgctctgtcgagttcttgtcatctgattcttcttcattctttatatacttaataatcggccgtctccagtcatcagagtcttgactcggttgatctatgaacgcgcactcttctgcttgatccattgagatactcggctgcaggatntcttgcacgaagaactcgggtgggacctgagttcgaccggatccgagcttggacagtacatcggctgccgtcgtccatctcttttacatgat

SEQ ID NO: 40365 - DNA, 483 bp, Zea mays
  unsure (1)..(483): unsure at all n locations
tgagcagcacttgngttctgatgttcttcaacagatcctcaatatagttactgataaaaggatcatccattattgttcttctattactctgcagaaagaagttgataacactcgcattagtacatggaaaattaagagataaaatttctgaagaaatagacgctgaccttcacgatcttttcaaactccatgatgtgggtcttctggtacgctgcaatcaggtttgtcattgcaaggatttcactatcgttcttgtacctgcaagcatttgagttttcagggtgggaggtaaatcaagctacaagatttatgcgggatcatcagttgtcttacggcttggcctcttgtccatcaaaaggattcacttcagacttcatcaacatattggcaatgacgagatatctaatgcacagcaaataataatgatatgtatcacagtgttctagaagttatgtacctatgaactaacatcacgaagaagtg

SEQ ID NO: 40366 - DNA, 494 bp, Zea mays
  unsure (1)..(494): unsure at all n locations
tctncttcttgacantttggtatttctcaagtccttgctggtcctctccaatgttcctaatcattaaaacatccatggcaccaagcgtaagctctaaaacacaattgactaggttagagcgaacctggagatttagctatcatgcacatgctcatgttatcggtccatgcattgtttatatgtgagtgatgtcctcgtcactttggctaanaagggcccccaacagtagccctcatggaattagttattnttccataaagattttagaccgcggaaatgatatagtcctcgtgttgaaggtctgaaaaacacattccctaagcacgttattgaaaatagaataaaataagttatacggtccacaaggcaatgggcgagagagatgcattttctcggcttccacacccaccaacctatataagttgatctctccatatggntaccacaacatttactactcgtaccaacctggtgccaccaaattccttgctttg

SEQ ID NO: 40367 - DNA, 476 bp, Zea mays
  unsure (1)..(476): unsure at all n locations
ctaagcttggggacacactngaagttcagctcagcttaccacccatagacagatggttcttcagagagaaccaatcagattctggaggatatgttgagggcttggtgcttgcaagacaagataggttgggacaagagattactatatgcagaattctcttacaacaatagctatcaagccagtttgaagatgtcaccattcgaagcgctctatgggaggaattgcagatttccattgcattgggaccaacccggcgaaaggcaggtgttcggtccagaatatttgcttgaagccgaagagaacatcagaatggtccgagagaatttgaaggcagcacagtccagacagcgaagctatgctgacaccagaagaagggaactcagttntgaagtgggagattatgtctatttgaaagtgtcacctatcataggaaccacaaggtttggactcaaaggcaagctagcaccccgatatat

SEQ ID NO: 40368 - DNA, 473 bp, Zea mays
tctctgggacaagcgccgcacttactgcagagtgcgattctttcacttacagcagcagaggagctgtcacacccggatttcggtgcaccaaaaccggggcgcgaacataatcaccaggtgtgctgggaccaagtctcacacatatgatgaatcatggcacaggatcgaatgtcacatctttactatataatcggagtcttgtacacaataaataaataattacattatatggagacaacggtccagcaacccgaagttgactgggagacgacggcctagacctctcacgaacacatcgcaagcatcctccatgcgcctcatcctgtggtacctgttcttgacctgtggggggggtgtgagacagcaagagtgagctcacatacgttcatcgctcaacaagttgtggggaataatgtgcataaactcgccaaaggtgggagctcacgtgaagtataaggcttaccaaagaggat

SEQ ID NO: 40369 - DNA, 308 bp, Zea mays
atttggcctcctgtgacacatgtttctgtcgtccaacagcgatttcgtgccttccgaccgccacccattatttgaccatatagactggtaaggttgttctgtgctcccgtgagctatagcacacgtttcatggcccagcgaccatttttatgcccgcgttcctccacacgtgtttttctccccggagcaccttaaagcggttcttggccttccgcgagctatatcacacatttccgtggccaaacagcccattttatgtatccgacctgccaccctcgttgtagaccggagaggccgctatggcattt

SEQ ID NO: 40370 - DNA, 474 bp, Zea mays
  unsure (1)..(474): unsure at all n locations
actcagctactatggttnggagactcanacttcattgtactatggtttgtcttctaaaccttctagggtcggtgtttaaggatagggtttatggattggatctggggtctaggttaccataaaaacatgtgctatagctcacttgtggcaaacaatgttgtaacggcctcttcggtctaaaatgtatgtggcaggtccgatacatgaaattggctcttttgccacgaaaacgtgtgctacagctcgtgggaggccaaggaccactttaaggtgctctgggaaccaaaaaacgggtggtggaacacgtacttaaaaatggtcgctcgaccatgaaaacgtgtgccataacctacgagaggccataaacagccttagcagtctcagtggccaaatcatgggtggcggacgggaggcatgaaatcgtcgtntgacgatgacaacatgtgtcacgggaggccataaatagccttaccg

SEQ ID NO: 40371 - DNA, 485 bp, Zea mays
  unsure (1)..(485): unsure at all n locations
agcttctaaagggagaacacgtgataggtctatttattgttactntcgcaaaagatagaccttgtgcagctggtcaagcaggtaaacaggtgggaagctctcatcatgccaaaaatgtgatgacaacatcaagacccctagagttacttcatatggatctcttcggacccgtcgcctatctaagaataggaggaagtaagtatggtcttgttatagttgatgatgtttcccgcttcacttgggtattctttntgcaggataaatctgaaacccaagggaccctcaagcgcttcctaaggagagctcanaacgagtctgagctcaaagtgaagaagataaggagcgacaatgggtccgagttcaagaacctctaagtggaggagtatcttgaggaagaaggaatcaagcacaagttcttcgctctctacacaccacaacanaatggtgtggtagagaggaagaacacgacgctactacacatggcg

SEQ ID NO: 40372 - DNA, 429 bp, Zea mays
  unsure (1)..(429): unsure at all n locations
acaggcctagcgcggaccgtccgggcccttgttgttgaccgtccgcaacaccagaatgactctcggacagaaccaatgcaaaaatacaagtttccactacggactgtccggaggaaaagcaaagaccgtccgaaccctcacgcggaccgtccggcctcaggcgcggaccgtccggtcggtaagaaaccgaanaacccgaatgtaacgggttcggagaaatgaattatagggggcctcgcggaccgtccggggtgcacgaccggaccgtccgcgactggctctgtctgacatctaacgacgcattaaatgcaatatagccgttgatatagccattactgctgaccgttgcattntcagccgttgatctacangggcggagcgtccggacctggctcgcggaccgtccgcgctcagcagaatggcccaacg

SEQ ID NO: 40373 - DNA, 425 bp, Zea mays
  unsure (1)..(425): unsure at all n locations
gatgccagagccaacccatgttagtcttagcaattaagcatgtgtcgagttcagctctatcaaaatctaccaagtatagctgaccctctaacactcccttaaatgctattgaatcatcacttcttctaaagacagtgacacctacatcagtaaatagacagttgtagcccatttgacatagttgtgaaacggaaagcaaattgtaatctaatgaatcaacaagaaaaacatttgaaatggaatggtcaggggatatatgctatttacccaaacctttgaccaaaccttgatttccatccccgaatgtgatagctcgttggggatcatgaattttctcatacgagaacatcttcttctcncctgtcatgtgggttatgcacccgctatcgatgatccaacttgagcccccgaatgcatatacctac

SEQ ID NO: 40374 - DNA, 226 bp, Zea mays
  unsure (1)..(226): unsure at all n locations
ccacacaatngctaacctttaatttataaaccctctacaacattggagtaaattattcttaatcatttgcaccaggttggaaaagatcgcatattggttgctatgtcgagatctgatttgcctgtggctcaacggacaattggtttaactaaatcaagcaccaccagtggagggcccatccttggaaaggcattttgcgaagttattgtaactttgtgtgctaaaa

SEQ ID NO: 40375 - DNA, 452 bp, Zea mays
  unsure (1)..(452): unsure at all n locations
cttgatacacggatngaacatcgccatgtcactgggcgtcattatattgatggtatacgaagattctctggtagtcatcagccagataaacaaggaatgggattgttcaagtgattcaatgggaaaatactgcgctgccgttcgaaaactggaggataaattcgagggtctggaatttcatcatatagaaagagatcggaacacggcggccgatgtactgtccaagctcggatccggtcgaactcaggtcccacccggagtcttcgtgcaagaaattctgcggccgagtatctcaatggatcaaacagaagagtgcaacatcataaatcaactcgagtcagattctgacgactggagaagaccgattatcaagtatataaagaatgcagaagaaccagacgacaagaactcggcagagcgcattgtcaagcagtcggctcactatacactca

SEQ ID NO: 40376 - DNA, 318 bp, Zea mays
tagggggaaaattgattcttttcaacccaaggacgcaaggaagtgcaaaagcaatagggtggggacaatccttggcgggaggcgattaaacacatatgtggcagtggataaaccctcacctatagtgagcgggaagagggccttaaacagcagggagcgcatgacatttgttcatgttgcaaattatgcgctcaacacttgcattttgagaagaagtgcacgggaacgacattctcagttgaacgtcgtgagaaacgaagaagtactccgacacaaaattatcaaagtgccacccattgtcacactggatagcatgaa

SEQ ID NO: 40377 - DNA, 390 bp, Zea mays
  unsure (1)..(390): unsure at all n locations
gaagacgcncaacttcctcaatcacattgagatttgatccaaagatcaagatgtcatcaacataaaggcacagcataacagactcacccccaccataccgatagtatacacacgtgtcagattcatttacaacaaagccagctgctgtaagagtattataaacttttcatgccattgcttacgtgcttggtttaggccatacaatgaatttatcaacctgcacaccttgttctcttgaccatacgcaataaacccttctggctgatccatatagatctgctcatccaactctccatttaggaaagctgtcttaacatccatctgatgaatgatgagaccataagaggctgccacggctattaatgtgcgaatggtagtcaatcgagccac

SEQ ID NO: 40378 - DNA, 485 bp, Zea mays
tatgaagattcttcatcccaacatgagctagacggctatgctttatccaacccatgttagtcttagcaattaagcatgtgtcgagttcagctctatcaaaatctactaagtatagctgaccctctaacacacccttaaatgctattgaatcatcacttcttctaaagacagtgacacctacatcagtaaaaagacaggtgtagcccacttgacataattgtgaaacagatagcaagttgtagtctaatgaatcaacatgaaaaacattggaaatagaatggtcaggagatatagcaattttaccaagacctttgaccaaaccttgatttccatccccgaatgtgatagctcgctggggatctaggttattctcgtaagaggagaacattcttttctcctcggacatgtggtgtgtgcacccgctggtgagtatacaaattgagcctccggatgcatatacctcacaaacatacttagttcttgac

SEQ ID NO: 40379 - DNA, 463 bp, Zea mays
  unsure (1)..(463): unsure at all n locations
cctgaggcatgcaagcttgcacctgagacgtgaacatgaccttgtgggctacaataatttaagctgtgtctccacaaaccggctcatccagcaatcttttgctgaaacacactggctgctaaccaactactgctcattccgaactgtactgtacctgaggatactgtgaggaacattgttggaggacaaggactgccactgccagccaggagatggtggtatcgacggcatgagacaacatggaactcatggtgggtgcctctgttattgttgcacgttatttgttgcaggttagaccatgtacaacccagagcccttggttcagttnttcaagtataggaaacaggtaatagactgcataatacaatcaagagcccctacatcataaatgtagtgaagagaatatatatagaaagtcgtgataagaaggctcttcttgacgtctcttggtttttttcactaa

SEQ ID NO: 40380 - DNA, 489 bp, Zea mays
  unsure (1)..(489): unsure at all n locations
tatgaagattcttcatcccaacatgggctagtcggcgatgccagagccaatccatgttagttntagcaattaagcaagtgttgagttcagctctatcaaaatctaccaagtatagctgaccctctaacattcccttaaatgctattgaatcatcacttcttctaaagacagtgacacctacatcagtgaatagacagttgtagcccatttgacataattgagatacggaaagcaaattgtaatctaaagaatctacaagaaaaacattggaaatagaatggtcaggagatatagcaattttacccaatcctttgaccaaaccttgatttccgtccccgaatgtgatcgctctttgtgggatcttggttnttctcgtaggaggagaacatcttcttctcccctatcatatgagttgtgcacccgctgtcgagtatccaacttgagcccncggatgcataaacctacaacacaaagttagttcttgacttt

SEQ ID NO: 40381 - DNA, 475 bp, Zea mays
  unsure (1)..(475): unsure at all n locations
tcagctgcttatttctaccatcatggttttctacatttttttgaaatcgagtctaaactgtttctcccataatttttcagaatcactggcgtctcggtcagcttccgcaattgcacattntaattttgcttctgccagctgttcctgaagatcttcaatttcgcatttctgggcttcagcttgggcttctgaaggagctttcgtcttcttttacattgttcaccaatgagttcaatattttatctttttcaagaccttcgttccttagttcgattacctcggaacgaaggttattcatagctatagtgcatccttcgtcttcggcactatttngtgccctgagggcgttgctaagaatgatgccctgcgaaaggagtgccggattaagtataagacaataaaaaatctttcgttttaaagacaaaagttcatctcgacctctaactatattgctaagtgcggcaattcattttga

SEQ ID NO: 40382 - DNA, 431 bp, Zea mays
  unsure (1)..(431): unsure at all n locations
gcacgtcaggcacgaaagcaatgtggagcccatcatccacacaagaacatcatgacgaccgacaggccgcttgagctactccacatggatttattcagcccgattgcttacataagcatcggcgggagtaagtatagtcttgtattgcggatgattattctcgcttcacttgggtattctttttacaggaaaaatctcatacccaagagaccttaaagggattcttgagacgagctcaaaatgagttctgcttaaggatcaagacaataagaagcgacaacgggacggagttcaagaactctcanattgaatgcttccttgaggaggagggcatcaagcatgagttctcctgttcctacacgccacaacaaattggtgtagtggagaggaagatatcaactctattggacatggcaagaaccatgcttgat

SEQ ID NO: 40383 - DNA, 511 bp, Zea mays
  unsure (1)..(511): unsure at all n locations
tctcctgtctggaataatctacggtattccagatagtcgattttatattttgtatgatgaaccttggcacctgtagaacttataatctagagcaaactagttagtccaattatttgtgttgggcaattcaaccaccaaaatcatttaggaaaaggtttgaccctatntccctttcaatctccccctttttggcgattgatgccaacacaaaccatagcaaatatacaagtgcagaattgaactagtttgcataaggtaagtgcaaagattacttggaattaaaccaatatacatttcataagatatgcatggatgctttcttctattttaacatttangaccacgcttgcaccacttggttttttgcaaatatttttggaaattcttttcaaagtcttcttgcaaatagtcaaaggtaaataaataggatttcgagaagcatttactcgagtcggtgcgacatgctcacgcttacttgacttatgatgaccactataccctactaacggag

SEQ ID NO: 40384 - DNA, 514 bp, Zea mays
  unsure (1)..(514): unsure at all n locations
gcctcggatctcgtgccttgctgctcttatccacatggccagcaattacttgttatatagtctttaggatggcccttcttattcccattgcccttagtttccgaagccccaatagaagtgcttcgtactcagcaatattatttgtgcaactgaaatccagtttgactgcaaaacatgttttgacttttgaagtgccactatgaccgcagctgctcctacaccgaatgttccccaagaaccatcgcagaacaccgtccaagcttcggtatccttgcttgtcccttcttcgtgagcccctggcgtccagtcagtgatgaagtctgctagcgcctgngattgaattgaagatctatgcacgtagtcaatggtgaattcattgagcttcgcggcccactttccaacccttctagtagcttctcttgttctcataatgtgcttcagaggctgtgacgagggaacaactatatggtaagcttgaaaataatgtcgaagcttcctggaggccattaataca

SEQ ID NO: 40385 - DNA, 207 bp, Zea mays
  unsure (1)..(207): unsure at all n locations
caaanacggccaccaaagacaagaattttaacccacatgcaaacataaagaatccacacctagacccggcgaagagcacaaagaaaaaaaaaagtaacaacaacgattgaatcaaataaacgagaaaagagaaggaaactgcaaaaaaacaagaaaaaagaaaaaggttaacactaaagcagggaaacattccacgaaagtccctaa

SEQ ID NO: 40386 - DNA, 449 bp, Zea mays
taccgcatttgaagcatgagcgctgacccttggctctggtcttgctttcgctgccctcgcgacctttaagcgccgtcttgaatctcttgatgatgagggccatctcttcatcattaagtccagccgcctcgatttgtgccatcttgctaggtagcgcctccttgcttcttgttgccttgagagcaaagggttgcggctcgttgatcggcccattcatagcggtcgccacgtacctcgcttccttgatcatcattcgcccgctaacgaatattcctaggacttcttctggcgacattatggtgtacctgcgattctcacgaatattattcaccaaatgaggatcaagaacggttaaggaccttatcattagtcggacgacgtcgtggtccgtccatcgcgtgcttctgtagctccttattatgttgataagggtcttgagccggttgtat

SEQ ID NO: 40387 - DNA, 480 bp, Zea mays
  unsure (1)..(480): unsure at all n locations
agctcggaagcatacacaggatcaggcgctgtcttttgatttatactaagcacggacaacaatatgttgtcattaaaataaagcatcacagaagtaccagataaacatcagtcttctctgagaactgagagtcgcttggtgcagttctagatgtccatagtaccttagcccttaaactgccactctctacggcacatggggcatacgggtgtggatgtttgagaattgacccacttcagtatgcagtgaagatgataagcatggttgcagacaccccaaatgagtgggcaatcatcaccagggaacttacagtcaggacagcagccatcaaaagccatcctgcatatgccacatgtctcatcctgtgcatccnacgtccaagaagccactgcatgccactgaagaatcttgaccttcatagtgctacctggaatgcacaatatattacaagagacgtttattcactgcatctgcatatgc

SEQ ID NO: 40388 - DNA, 484 bp, Zea mays
tactcagctttatttgagctcagcttgaaatagggtttactgtcttcttatatgtctgaagataagaaggctgctgctgatatgaagctgagcctcatcgaagagaaaaacttggggtttcttatagcgatgtcgaagaccaatacagaagaaatcaccaaggagattctggaaggtttgtctgaagatactggtgacagtgacaagtattatgtggacagtggtggtgaagacttcgaatatcgtccctggcgaccaagccattcagtttatggtaaatcaactatcaaagagaatcatctggccaacatgacaggaatgtatttccgggatttgtccattgtgagggccgacgaatgggaaaaaacttgtccacaccctgaagagaatgaagtcgtagcgtaccgaagctttttgaaagctggactgcgatttcccttgagcagcttcgtcgtggatgtgctgaacatcttcgaggtctatc

SEQ ID NO: 40389 - DNA, 305 bp, Zea mays
cctgacgatcactcttattgcttacaatatacctatgattttctttggcactaggttgatcgtctccctggtaagaatgcgcaacgcctgttttaacgctgaagttttgaacaaatctgtgacacagctccgaacaacctcttctttcaaatctatttagtattacacaccccccggccttttgatcgtgaaactatccaactcatacaccaactttgttttttcctacgggagggaaatttctagtttattataatcatccaacccacttaagctgctgaggattctagaatcgcttcccacgc

SEQ ID NO: 40390 - DNA, 486 bp, Zea mays
  unsure (1)..(486): unsure at all n locations
taatttctctggacaccgattcgaccacagacggttcttgtttttgttttcattcattcatttgcttgtttattgttacttgaatgttgaactcacctangactaggagaatcctttaaagcaggacttagattaaaaaatcgagtacagtcaagtcatgaacaatccatcatgaccacgatctggactggacgccgtacgaagcgagctcaaaaatntgatattcagcgcaggaacattcgaagaatctggcaaaagtttactcctatctctctctgttctttagtttaggggaaaaaaaagagaagacggnggctaactcacttcagacaatttctaatattctactatatgctagcagtctggtactgggctcccagatccatgacagcacgtgggccacggtagcgcctctggacggctaactgagaaaaaccggccccattgttacaacgcggccgaacgagccacaaagatcactgtcac

SEQ ID NO: 40391 - DNA, 340 bp, Zea mays
  unsure (1)..(340): unsure at all n locations
ccacaaccagcccatgctagtcttagcaatttaacatgcatctagaccggcctcttcttattgaaaatcaactaaagaaagtttgccgtctaatacacccttaaacgctaatgaaccatcacttcttttaaagacagacacatctacattggtaaatagacagctatatcccatatggcataattgactaactgatagcaaattatatccaagagactctactaagaacacattagagatagagtgttcattagaaattgcaatntacctaaccctattaccttggctttgattccatcaccgaatatgattgaatcttgggaactcttattcttgacgt

SEQ ID NO: 40392 - DNA, 335 bp, Zea mays
  unsure (1)..(335): unsure at all n locations
ccgagctgaactgttcacgagggacttggtatcactgaaagcacttcgccgaccacgtntgactgatcgcacccgccttccagatggtgaattctctgcccggatacgccaacatccgcgacattaaatttttaaaacttagctctcgttattactcatacccctcaggtcgctctatgaacatcttcgttgatagccccacatgggaactagcttcatttttcaccacccaaattttaaaacatttcttggagcgcgaagctttaatgctttttaatagttttcatatcgtggctctggtagctctggaagccatttcttgccttgcagtgttc

SEQ ID NO: 40393 - DNA, 445 bp, Zea mays
  unsure (1)..(445): unsure at all n locations
tcatgagattcttttattccgactattccttgtagtttactagggagttttggtgctggtaggattttggtaatagtccatggcggaaaaagctatagcagaanaagctctattttcagttgtccatcgaacatcattttgataggttgaagagccaagactgacatatttgtctaaaaatgagaattatatatgtcaaaataaatattgctttactagcctgaaatagtcgaaatatcacactacaccgtaacaaagaacagagcttaacaaagcaagaacatattaaatcaagtagttattatctgcagctcctttaggctacagaggagggaacaaagtcatgttatatttcaagcaaacgaaacgaaacaaaacacaggacgtgtgtgttcacacaaagaactacatgcatttacctcgtctttatttcatttcatctata

SEQ ID NO: 40394 - DNA, 484 bp, Zea mays
  unsure (1)..(484): unsure at all n locations
cgagaagatatatccacctagcttcttcaatctgatgcttcttttgattcttcatctctcgtatgacgcaagaatggcggcgtgcagggacatatgtgctatctaatcgagagatgtctatagactattccacagaaatgttgaactaaatgcaaaatcgaggcttccattgctgaggcatacattctagaggaggtgtcacacttcacaacaacttaatgtggtgacaaactgttgagcgtgcataatccaccccctcattacaatgatggcgacaatgaattgaacctcagcatatttcgagggcagctcataagcgcaagaggtttgaccaccaacaacctgatacatgaagagtggcgccatatcatgctatatgtattgaccaaccttgaagaggtgatgccatacatggaacaatgtcttcatgaattctggcgacgatcaanggaccgaactccatatgaatatgatactcttctta

SEQ ID NO: 40395 - DNA, 173 bp, Zea mays
ccactccggaacacgaccaccgaaccccgccgtcaaaaaaccaagctgcagaacaagcgggtgcgtaaaaagatcacccaggagccctgctgggaagagagggaacacggcaacacagcagtccactgccctgaaacggacatggggaaccgatcccccacagaacaaaaaaa

SEQ ID NO: 40396 - DNA, 379 bp, Zea mays
  unsure (1)..(379): unsure at all n locations
tgtcatatcggaccaaacagcangagcatatatcatcacaacggccttctggtatgcttgangccttccttgtccgcgcaagctttgagggcactggaaacaataatgggttgttaggtttatagtgtcgcccnncnncgcncggcgatcatctgcgcctttgctgcctcctcttctctataactctgttctcactgtctactatctcgtctatattccgtctctcttccctctctcctacatttctctttttctctactctcttctttcccgtccgtctatcttcaaccttctgcgtctttctctctcatgtccccttcctcttctattcctccctccctacttcacctcctcttctctccatcgttcatttcccctt

SEQ ID NO: 40397 - DNA, 222 bp, Zea mays
  unsure (1)..(222): unsure at all n locations
tgcggccctcgtgtcgaggaggacttccncttcttcttttcacccctggcaggccctcccactgctcccgaatgagatgtagctctccgccgatagtgataagccctgagagagcctgtggttcgtcgccgtcgaccaccttgaggcgaccaatcgcctcttcgatcgtcatcgtggagaggtctagcagagactcgatcgagcgagccaatctgctatact

SEQ ID NO: 40398 - DNA, 510 bp, Zea mays
  unsure (1)..(510): unsure at all n locations
tgtgagcagtataagtacagaagggagaaggctgcttcggccgatctttctaagcccatgcttctatgtgaagatatagcataacagaaggtattgttgggatctcaattatctgaggagcaggagataactctaataaggtttttgttcaacaacaaagatgtcttcgcatggtcagctaacgatctctgtggtgtcaacagggacgtcattgaacattcgctcaatgtcgatccatccttcagacccagaaagcagaggcttctgaaaatgtctgatgacaaagctgaaggtgctcggaatgaagtgaaaagacttcttagtgctggagtcatcagagaagtaaaatacccagaatggctagccaacactgttatggtgaagaangccaatggtaaatggagagtgtgcattgattttactgatcttaacaaggcctgtccaaaggatgagttcccattaccaagaatagattctctagtagatgcagcagcttcgtcagagctcatg

SEQ ID NO: 40399 - DNA, 427 bp, Zea mays
gcttttctgcgcatagcttcgcgatcatcttattctttgttataatcgcttccgtctcactcaagcttcatcctgaccgtactcttgtatactcataacccgattctgaagatacctgttcacatatttcacttggaaaacattgtcaaatcatgtttttgaggaccttcggaagccgaaggccctcaacaaacacgaaacaaaagtattttcacgtgctaatgtgaaggagcctcttcgggagatctgcatagctgaattccgtgtggctgtttgacttctacgcagccttcagtatttcgataataactcctcctaggaatctccaaatgacgtggcgctggatgtgttggaaaactaacttgataagctctctcaccatgtatagcatacttaatgaaacttcgtagattgatgcagtttaata

SEQ ID NO: 40400 - DNA, 454 bp, Zea mays
  unsure (1)..(454): unsure at all n locations
tcggcacagctaattgaggatatctccttgtatttctccagtccatgggttttggccctcgctggcatgagtggatttccatcctttntgggtctgccttgtctccagccctcctcaatggccgacaaggagcaaccatccagcacaagagaggtgttaggcagggagaccccctttcccctatgttgttcatccttgccatagatccgctgcagcgtatcctgtaccttgcagccagaaatgggatcctttcccccattccgctaactacaacaaaaccgaggacttctctctatgccgatgctgctgctatctttatcaacccctcagagaagaccacctgatggtcaaagacatcctgcacgctnttggctgtgcctcgggcttggtcactaaccttgagaagagctctatccacccgataagtgtgaagacattgacctataccacgtgc

SEQ ID NO: 40401 - DNA, 232 bp, Zea mays
aagataacacgtcccgcgcagggacctgcctacgaaaaccaaccgacggatgaagcagatccgctcagaggtcgaggagcctctcaagggcatcatcgcccaaagagagaacaccctgagaagcggcaacgcggcgggcgacgacaacctcctccggctgctcctggagaccaacaaggagcactgcaagggagacggcagagacgccgccaaggccggcatcaccaccgac

SEQ ID NO: 40402 - DNA, 473 bp, Zea mays
  unsure (1)..(473): unsure at all n locations
caatgacgccttgtcttctatgcactgcctttatttctagtcaccttgaaaccataatgtgaaccctacactangccgaccaaacattttttccatggatggctgcatgtcattntgttaagtacacttatataaactcgatatgcactgttgtaatattgtttcgtattctatgtttttgcttataaggaagtacatatttaatggtcaatgacccttagaatgttgacaaatgatctaatttactgtttcaattcttatgaatatgatgtcagagaattggcaatttctgttgctggtcgattgtctgaaaagaatcctgcatatgtactgcctgcccttcgtcgctatcttatacaattgctcacatatcttgaccagaggttcgaaccacacatgttttttgatatcgttagatagaatagaaaccctaatcctcattanggtangcatttgtgtgtttgtgtatgtca

SEQ ID NO: 40403 - DNA, 457 bp, Zea mays
  unsure (1)..(457): unsure at all n locations
ctaagctgagaagaatttcacccggcgtcttcaatccaatggcatcattgattcttcatctcccctatgaggcacgaatgggggggggggccgtgcanggacgttggtgctatccaatcgagagatgtctaaagactatccgaaagaaatgtagaaataaatgcaaaatcgaggcttccattgcagaggcatacattctagaggaggtgtcaaacttcacaacaacttattatggtgacaaactgccgagcgtgcataatccaccccctcgttacaagaatggcgacaatgaatcgaaccttagcatatttcgaggccaactcagaagcgcaagtggctcgaccaccaagaccctgacacatgaagagtggcggcatatcatgctatatgtattgaccaaccttgaagaagtgacgccatacatggaacaatttcttcatgaattctagcgtcgatc

SEQ ID NO: 40404 - DNA, 504 bp, Zea mays
  unsure (1)..(504): unsure at all n locations
actaagcttatcnatggacgtgaagaggccttcctcatggccaatttttaggaggtctatgttgagcaacctcccggctttgaagatagtgagtaccctaaccatgtgtataaactctcaaaggcgctttatgggctaaagcaagccccaagagcatggtatgaatgcctaagagattttcttatcgctaatggctctaaagtcggaaaagccaaccctactctttttacaaaaacacttgcgaatgatttgtttgtatgccaaatttatgttgatgatatcatatttgggtctactaacgaatctacatgtgaagagtttagtaggatcatgactcacaaattcgagatgtctatgatgggggagttgaagtattctctangatttcaagtgaagcaactccaagaggacaccttcattggccaaacaaagtacattcaagacatactcaccaagtttgggatgaaggataccaagcccatcaagacacccatgggaaccaat

SEQ ID NO: 40405 - DNA, 449 bp, Zea mays
  unsure (1)..(449): unsure at all n locations
agcttnccccagtgcttacaggctcacaacgcttatatgtgangacctagagcactcctggaacgtcgacaaccttcgcaaattttttgtttgacccatttagggccgatttcgcccttgtaattcgccgcaaacaatcttgtaccggcccgcactcttttcctcccggngggtgaggtttttaacgaggcggagccatgtaatatatgtgagaaaaaatcctccacaaaagcatgtcgaaaaaagaccgcaacaacggtcttcggcattcgaccaattcgaagtcaccgcgaggctaagcgctagccactctcgcgtgcgaccaatccgcgcagaagtcgcctaagggtgcagccggactcagcacaacaagtgcgcaaaatacgaagtctatcgcaaagactactcgcgcagaagtcggctaatggtgcagcccgacttatcacaac

SEQ ID NO: 40406 - DNA, 494 bp, Zea mays
  unsure (1)..(494): unsure at all n locations
tcatgagtggtagcttcggcattacgtataagcagctnttgtcttagctgtttcttcctacaggaccttcggcgacgaagcatggtcccaacagtagccccttcgcggtgctagatcgtttttcgtaacgagcttgatccgtgaaaaaagtctcttaggcttcgggaagccgaaggtccgaanaacaccttccctgagcttgttgccgagaaacgatacagtttccgagcgcagagcggtcccaccatgcaggttcactttctcggtttttgcggcccaccgttcagtgggtgcgagcgactgtttgtccggtgtaaaaatcttaacgattcaccttcttacctgcagcactatataaacagacaggtaggtgtgaagttaccacaacattcattgctattgcactggtttgctgccaaaaatttaaccatagccgaagcttgacttttgcattcaaacgaagctccagtttggattctgcttcgtcacgagaa

SEQ ID NO: 40407 - DNA, 296 bp, Zea mays
  unsure (1)..(296): unsure at all n locations
tcactactgagcagcggcgccggtatatgtgcggcaaccctttcttctttctanggtcaacgaacgacagcgccgacagtggtcaacgagagggtacaccgaccgatgagagaatcgctacctgccactacgaccacggggggagatgtttcttcgccactgcgaggacgctgcctcctttgagctccgaccctactgaagacgacaatgatacgcggcggatgatataccacaccgtcgcggatgatgttgcccgtacgtaccacgatgccgagaggacaccgaccgcctgctgc

SEQ ID NO: 40408 - DNA, 472 bp, Zea mays
  unsure (1)..(472): unsure at all n locations
tcggattcccaactntagaagacggactntcggtgctattcaataacgatctggctgacagcctagcttacaacagtttaaaggtgcgacaaatggaattctcgtactttntgttgagtccaaaatttttcgtttgtttaaaactattgacacagacatattcctacttgcagggcctgatactcagcaatgccctcagggcacacaaagatgctgaggacgaaggatgtactatagctctgagcaaccttcgttccgaagtaattgaactgaggaacgaaggtctcgaaaaagacaaaatattatactcattgatagataaaataaaggaggacgaagctgcttttaaaagtcaagctgaagctcagaaacgcgaaattgaagaccttcngaaacaactggccagagccaaagaagaacatatacttgaagaaacaaagcgtgaactcagcgatcaatgggcagatcacct

SEQ ID NO: 40409 - DNA, 348 bp, Zea mays
agatgatattttttttaaacagcaacctctcggaagattgataagctgaccttatgccctttcacgctaagaatgattcaattatgaaagcacatcccaccgtgaaacactattgcaaacctcttgtggcattatcaccatgactggcagaaatatcgtgaatgctatgataactaggaatacaccactaccaagaaacacaccgaaaacatgagacatctgccagatggaacactgcttgttgtggacttaaaactgcctggaaatcccttaacaccttttgagaccctggaccaatagaatagcaaacacattcctcagaacacaatcaatttcacagcatgccgt

SEQ ID NO: 40410 - DNA, 476 bp, Zea mays
  unsure (1)..(476): unsure at all n locations
tctaaagggagaacacgtgataggtctaactaatgtaactttctaataagatagaccttgtgcagcttgtcaagcaggtaaacaggtgggaagctctcatcatgccaaaaatgtgatgacaacatcaagacccctggagttacttcatatggacctcttcggacccgtcgcctatctaagtataggaggaagtaagtatggtcttgttatagtngatgaattttcccgcttcacttgggtattctttttgcaggataaatctgaaacccaagggaccctcaagcgcttcctaaggagagcccaaacgagtttgagctcaaagtgaagaagataaggagcgacaatgggtccgagttcaagaaccttcaagtggaggagtatcttgaggaggaagggatcaagcacaagttctccgctccctacacaccacagcaaaatggcgtggtagagaggaagaacaagacgctactagacat

SEQ ID NO: 40411 - DNA, 399 bp, Zea mays
  unsure (1)..(399): unsure at all n locations
ntacagcctcaccaggggccatgaagcaatggtgggacgacttctattgactactcggcatgacacattctacctcgaccaggtcgaggccacggtcatcccgacgccaacatgaggcgtcagcgtctatgcgctcaccctcagtgaggggcgcacagaccaacgaccatcgggcagaactcgaccgtatgcgtgtgggagaggatgcccgggtctctttggagagggcgcgcgagcgccgccaaaacatcgaggaccgcaacctcgatcaagacttcgctgcggcagcaccgcagacaccaatgggcacccggtcccaagcgggtgtccccttggccggcgtgggctacaccgccctcacggatcatctccacgcggcgtcgtggccgcgcaagttct

SEQ ID NO: 40412 - DNA, 203 bp, Zea mays
cccacacacgccagtaactgccgcgcgacgcaacacggcccccaggacgccctcgaaccacggacggaacccgcaaaactccccccacccacaggcaccaacaccataacgcaagcggcacccggaagcacggagtacggccgcccagagccacacagaacaaccccggcgccaaagggggaacagcaacgacgccacaacac

SEQ ID NO: 40413 - DNA, 502 bp, Zea mays
  unsure (1)..(502): unsure at all n locations
tgaagccatggtaagtagcatatgcaagtaatatacgaatggattctagcctagctacgggtgcataggtttcaccgaaatccaaaccttcgacttgtgaatatcccttggccacaagttgggctttgttccttgtcaccacaccatgctcatcttgcttgttgtggaagacccacttggttcctacaacattntggttaggacgtggaacaagatgccatacctcattcctcgtgaagttgttgagttcctcttgcattgccaacacccaatccgaatctcttaatgcgtcttccaccatgtatggctcaatagaagacacaaaagagtaatgttcacaaaaatgagcgacacgagattgagtggttacccncttatgattatcgccgaggatggagttcacggggtgatctcgttgtatcgtttggtggactcttgggtgaggcggccttggaccctcnattatcttcttgtctngatcatttggcatctccncttgatc

SEQ ID NO: 40414 - DNA, 355 bp, Zea mays
  unsure (1)..(355): unsure at all n locations
ctagtcttaggtattaagcatgcatctagaccgggctctttttttgaaaataactaaataagtttgccgtctaatacacccttaaaagctagtgaaccatcacttctttaaagacagacacatctacatttgtaaatagacagttatatcccatattgcataattgactaacagatagtaaattatatcccagagactcaactaaaaacacattagaaactgagtgctcatttgagattgcaattctacctaacccttttaccttgccttgattcccatcaccgaatatgatttgaatctgggagttcttaattctgacgtangaggtgaacatcttcttctcccccgtcatatg

SEQ ID NO: 40415 - DNA, 493 bp, Zea mays
  unsure (1)..(493): unsure at all n locations
ctaagcttgggtcaccagntggtaatttctgatggaatttgtcacgaattgttttctctctactgtaattngngcagncatctagggcagcaacgacttgtagttcttgagcgagcaacgacacttgacacctgacaaataaagactcactaatttatccaaccaacatttcatccatcactactgctgtatcggacagcaggaaatgcgtcaacactgcataaatccaccaattaataatagtggcaattgtgattatactcttctctaaccttgcatgtgattttatccttttttcaactntatgacttcaccgtctgtttgttttaaaaatgaagccatcgtttgccagaatatgtgattccattgtcatatagatgtcttgtgtatgatatataataacaggtacccgaatcgtacccaaacccaaacccgaaattgcgggtacccaacaggtcgggtacgagttctactggtggagacccgaaatata

SEQ ID NO: 40416 - DNA, 424 bp, Zea mays
  unsure (1)..(424): unsure at all n locations
agctgcactttaacgactaaccatgccggaaatatgttaccggaaacctactacctgagtgaagccgggcgcggactatatctcttatgccacctgagactgggtctcccatgctagctatggtgggtacaaatgcggtcactgcacggtggcagtcggtgttagtggagcattgtatgacaaggcggtgaggcctgcacgccaacggtgaatccatggngaccgttgtcatgtgtggtgtcggagtaccctgacatgccgtgtgtttacgttacctcgcaaggataaaactcgattcgaatcgtctacttctcgcagctaatgagactgcttgaccccttgactgcatcgagtaagacgtgaaatgaagttacatgagacaatttgttgattgaactaaatggttgtcaccatgtattgctac

SEQ ID NO: 40417 - DNA, 480 bp, Zea mays
ctaagcttcggatagctcattctacatagttggaaatatattgaaagccagttttttctgcactaaatctctagtgccaatgtgctctgcgataatcctgaattcagccaacgcagtttgggttggaccttctggtgtcatattgcattgtggtctggtttctccgaagatcagttcaagcggactctgtaccaacttcttcttgtcatcgtcaactttgacgtagaaccattccgatttccagcctgccggccacttgctatagtagctgatcacaggaaattttgtagttttccgataggcaaaattgtaacaaccaaaattttcatgtaacccatcctttctggccttggtttggtaatgtagctcgtgcacccggcagaaaccttcggcaaacggttccaccctctggcttcggagagcccagatataaacactaagcctaacaatagcgttaggagttagttgatgaaagtggat

SEQ ID NO: 40418 - DNA, 429 bp, Zea mays
  unsure (1)..(429): unsure at all n locations
gactactacatgaaatagacttgaaaacaggtattaagtctcaaagacttagattatagagtaatctccccctgaaagtgtgcataccagtttttgaatacttggtggagacatgcactttgatttgatatcaagaggggcagattatccataatccgagctttggcacatataagttaaatgataccaatcgtaggatataagcttttgatgcattagtgtcatttacttagggatgttaaataagctatgtgtcgcgcttaattaacaattctaaaccatgtaggtttgctcaagaatatgaattgagaacgagttaccctaccatgtgatctacctagtatgcatgcattggtaatctacagtaagtaccacatgaaatactacgcatganaggtaaaactagatacaagacaatagatacgcata

SEQ ID NO: 40419 - DNA, 517 bp, Zea mays
  unsure (1)..(517): unsure at all n locations
acctataaaactcaagctggcatttatggctaactgtcccgacaatgatagtgatctgatcttgtgtcaagagggagaagaagaagaactatcagaaggcaaagggcgaggcacatcttggcaaggagtgggattcggattgctcctcgtctgacttcgacaatgaaggactcgccgctaccgccttcaacaagtcatccctcttccccaacgagcgtcacacatgccttatgtncagggagaagaaggtatgtactcgagactctacttatgcttcttcaagtgaggacgaatctagtgatgaggatgaaatagattattcatgtttatttaagggcctagatggaaccaaggtagataaaattaatgaattgattgatgccttgaatgataagaataggcttttagaanaacaagaggactcgctgtatgaagaacatgatantattgtagaagcaccacaatctcatgccttanaagntaagagaaatgaaatgctttcttngcgaatatcttc

SEQ ID NO: 40420 - DNA, 359 bp, Zea mays
  unsure (1)..(359): unsure at all n locations
ggctgtccaactggctggcattgtcgactgtcagatccgaccgcactcccaagcggcaacaatgtttgcccaagaattctgggcaccttgacgtatgggagacgcccccgcctccatccatttggtgaaatattccgaccgcgacgaacgcgaacttaatgttccccctgagccgtgggcaggggcccgacgatgtccacgccccagcgctggagaagccaagtgtgggcgaccagctttcgaaattgcgaagggcctgctgatcgaggagaaaacttctggcacgcttcccatgaccttgtgacccgattngcngtgtatatcattgctggccagtagaaaccttggcggatcacctt

SEQ ID NO: 40421 - DNA, 482 bp, Zea mays
  unsure (1)..(482): unsure at all n locations
tgggcattgccctacataacttntataatcaccaagaagtgattctgtgcttaactgaatcaaacaacacagttntcaaaatctgttctgacggtggacagaacacagcaaccaagttgtaaaattcataactcttaaaccgtcagacctttagttatgaaattntaatacaggcaagataagaaaagcacctacaactttattataatgaccatgaacatagtgtaaaattaaattgaacaaacaatacagtttctgaaatctgtacagaatttggacagattcagttactgaatttgtgaacaacataactcctaaactgtcagacctatgactggtcaaatttaacaccagcaagataataaggttatctaccacttttctacagcacatatctacagagaacacaatntagttcatcaaacatacagcacacagaatacagtacgtgcagtccanaacaagcaatactatatttcagc

SEQ ID NO: 40422 - DNA, 490 bp, Zea mays
  unsure (1)..(490): unsure at all n locations
tcggccttgtcgaggggtagctctcctcggtggagatattgcttgttcngtgtctgccagnttcgggtcagcgtgaccccattctgctctccctcgatgcgcaaagcctcaccctcggcggccgaggatacctcgggctgggccgaggcctcctcgggctcgggcgtgtcgtcgatcttgacggagggttgatgtatgtctctggagaagacgtcanggggaaccgttgtcagccccgaggctattnttgccagctcatccgcagtctcgttgtaccgtcgagcgatgtggttgagctccagcccgtagaacttgtcttccaggcgtcgaacttcgtcgcagtaggcctccatcttccggtcgcggcagtgggaagtcttcatgacttggtcaatgacaagctgcgagtcgtcgcgagcgttgaggcgccgaacccctagctcgacggcgatgcgcaacccattaaccagagcctcgtactcgggcatgt

SEQ ID NO: 40423 - DNA, 479 bp, Zea mays
  unsure (1)..(479): unsure at all n locations
cctgcagcatgcaagcttaggtggatgatgtggctatcaatatagtttattctgaaacattcattgtagatttaaagctggttttcaacagtctacggcgatatcgatggaagcttaatcccgagaaatgtgtctttggggtaccagcaggaaagttactcgggtttattcgcagtcatcggggaattgaagtcaatccataatagatcgaagctatcatgaaaatggaggcaccgcgatcactaaagaaagttcatagacttacgggatgtatggcagccctgagcagatcatatctacgctgggagaaaaaggcttaccattttataagttactcaagaacgggacaagtttcagtggacttcagaagcacaggaagccctatacgcatngaataagttcttgacaacaccaccagtgctgaaacagtcacgacgggccacgtccactcaaacagctgaagatttgctgtatatatc

SEQ ID NO: 40424 - DNA, 468 bp, Zea mays
  unsure (1)..(468): unsure at all n locations
tgtgaaggttcttcatccncacatgtgctaagcggcgatgctttattcagcccatgctagtcttagctattaagcatgcatctagaccggcttcttcttttgcaaaatcaactaaataaagtttgttgtctaatacacccttaaacgctagtgaaccatcacttcttctaaagacagacacatctacatttgtaaatagacagttatatcccatattgcataattgactaaccgatagcaaattatatccaagagactctactaaaaacacattagagatagagtgctcattagaaattgcaattttacctaacccttttaccttgccttgattcccatcaccgaatataattgaatcttgggaatccttattcttgacgtaggaggtgaacatcttcttctcccccgtcatatggtttgtgcatccgctgtcgataatccagctggaacccccggatgcataaacct

SEQ ID NO: 40425 - DNA, 397 bp, Zea mays
gcttataacacgagaatagaagcgagagctctttcatttgtcataatagaaggcgagttatacaagcgtggggtttgttccacattgctcaagtgtttatccagatccgaaggtatagaattaatgaacgaaatacatgcacgcctgtgtggatctcacattggatctaagcccttgcttgggaaagtttctcctcaaggattttattggccaaaggcagcttcggatgcaccggatttggttcaaaagtgcgaatgttgtcagaaatgtgcaaaagatcaaaaacaaccttcgtctttaacccaattaatactacccacttggcctgctgcaaggtaggcgcctcatttactaggaccactaccaccagcccaggggaacctaatatatgtactat

SEQ ID NO: 40426 - DNA, 499 bp, Zea mays
  unsure (1)..(499): unsure at all n locations
ngaagccatggtaagtagcataggctaataatatacgaattttctctgcctagctacgggtgcataggtttcaccgaaatccaaaccttcgacttgggagtatcccttggccacaagtcgggctttgttccttgtcaccacaccatgctcgtcttgcttgtagcggaagacccacttggttcctacaacattntggttaggacgtggaactaaatgacatacctcgttcctcgtgaaattgttgagctcctcttgcatcgccatcatccaatccgaatcttggagtgcttcctctaccctgtgtggctcaatagaggaaacaaaagagtaatgttcacaaaaatgtgcaacacgagatctagtggttacccccttgtgaatgtcgccgaggatggtgtcgacggggtgatctcgttggattgcttgatggactctcgggtgtggcggcctcggttcttcatcctccttgtcttgatcgtttgcatctccnccttgatca

SEQ ID NO: 40427 - DNA, 435 bp, Zea mays
  unsure (1)..(435): unsure at all n locations
agctngctaaaagtcttctcctttatgttcttggttaatatatcggctaattggttgtgggtgttaacataagcaatttcgatatctcccctttgctggtgatctctcaganagtgataccggatgtctatgtgcttagtgcggctatgttcaataggattatctgccaagcagattgcactctcattgtcacataagagagggactntgctcaacttgtagccatagtacctaagggtttgcctcatccagagtagttgtgcacgacaatgtcctgcagtaacatactcggcttcggcggtggatagagctactgaatntgtttctttgaagcctaagacaccagggtctccctagaaactgacaagtccctcatgaactatntctatcaatattacatctggcataatcgacatcataatacctgattagatc

SEQ ID NO: 40428 - DNA, 419 bp, Zea mays
  unsure (1)..(419): unsure at all n locations
tagcggngggatttgtactaaggatatttgtgaaagcctcattatggatccctagccattcacctcggtagtgtttatgggtccgatcaacccacgctagatgggatacatggcttgttggtaaagttgtaccacctctgcagagtgtaaaactgatgtcagtcgtgcacacggttaagagcaacctggaccctcacatgataattgaacttaaagatggagaataaatcgtgatctgatgatctactagtggtttgcttaagtgatttcacttaagtgtttgtgatataatcttatgcctttgattaattgggatatttgggatacacacttattagtaagacaggtgttgctaataaaatattgaccaactaanatgcttaccgcttatccatagcctaccttggtaacttgcatta

SEQ ID NO: 40429 - DNA, 452 bp, Zea mays
  unsure (1)..(452): unsure at all n locations
ggccccaagaagtggagtctactacctggtcgatgcgtgggatatgaaaaggatctttggaacatgccttgttaaggcttgtgtagtcgtctcacatcgtccacctcccgttccactttttaacaagtacatgattcacaacccacgccgggtggtgtatttcccttacgaaccctactaccaagagcttggtgacctctttctcgagggccttgcgcttttctttgttgaagcggcgaagctgctgggcgaatggcctagccatcgattagatgttctaggagtgcttagcgacttttgttgggatccccagcatgtcaacgagtttccaggcaaagacatcacagttggcctagaggaagttgacgaccgcactttcctgtttgtcaaagagcactaccccaatgtgtcacacccggntctggnggcaaagccgaatgcatagcatatgt

SEQ ID NO: 40430 - DNA, 437 bp, Zea mays
  unsure (1)..(437): unsure at all n locations
gcttatgagagtatgagatgaataagtttgctataacatatgttatacctctttggaaatcatatgatagagctgattcttaggccctttcagcgcaaagaatgatccaattatgaaagcacatcccaccgtgaaacatattgcaaacttttgtggcattatcaccatgactggcagaaatatcgtgaatgcgatgaanactaggaatacaccactaccaagaaacagaccgaaatacatgagagatctgccagatggaacactgcttgttgtggacttaaagctgcctggaaaccctttaacaccttttgagaccctggacaaataagaatagcagaacacattagttagaaacaaaaatcaaatttcaaagcaatgtccgtatgaaggttaaatagaaaggtgctagcccaaggccactttntatacatattcat

SEQ ID NO: 40431 - DNA, 432 bp, Zea mays
  unsure (1)..(432): unsure at all n locations
tctcagggagaacacgtgataggtctaactaatgtaactttcgaaaaagatagaccttgtgcagcttgtcaagcaggtaaacaggtgggaagctctcatcatgccaaaaatgtgatgacaacatcaagacccctggagttacttcatatggacctcttcggacccgtcgcctatctaagtataggaggaagtaagtatggtctggttatagttgatgatttttcccgcttcacttgggtattctttttgcaggataaatctgaaacccaagggaccctcaagcgcttcctaaggagagcccaaacgagtttgagctcaaagtgaagaagataaggagcgacaatgggtccgagttcaagaaccttcaagtggaggagtatcttgaggaggaannggatcagcacaagntctccgctctctacacaccacagc

SEQ ID NO: 40432 - DNA, 395 bp, Zea mays
  unsure (1)..(395): unsure at all n locations
cactacccaaagttgtttagcaacatggcttctaagttgtttcttcaatgaaaacgtgtctagttaatttttatatatccaataacattaccaccaatctcaaatatactatattttttcaaacatactaaaaaaagcaatgctcaagaagtacgtttaatctcgattaaaatagaaaaataatattgtcagtgacgatntgtgcgaaataatgtccacatatatcgtanacgataaaatattcataaaagcttttttatttcatctgcaatgacagatttgaacaacagggacgtccatgggcctgtgcangctgggcgaccgcacanggcccccanagttgaagggcctccaagttaatctanaacatatatatatatatatatttatagata

SEQ ID NO: 40433 - DNA, 453 bp, Zea mays
  unsure (1)..(453): unsure at all n locations
ggaatggatggaggagagcaactgtagcttacattgccttcagtgtttaatgattctccagaanaagcaactggtccatgaatataagtctattgaacccaacattntattnttgtcagagacacaatgccttcggatactgatattgagaaattgtaaatttatgatttatagagaatctgagtatttgtgatgtgagtgaagtataagctggctttgcagccattgcttggccaccctcctccaataacattgtctggtcttctgctttgactgaactgtcatccatcaccgctagattgacatctgaatgtctactgacaaagatgatttgtggttgaagatgatgtcctgttacaaatattcgacaaccaggaaacaatctctcttggaaaacatagtttaccatttgccatttctagccatcttccttataatgtgcataactacatg

SEQ ID NO: 40434 - DNA, 330 bp, Zea mays
atggccgatgtgtgtaaactacacctggctaaacaaagcatgttcgaaggttccctaccctctggctcgcatcgatccaatcgtggattccactgctaggtgcgaaaccctgtcttttcctcaatgctacctcgggtatcaccaaactaagatgaaagagtccgaccagctcgcgacttctttcatcacacccttcggcatgtactgctatgtcaccatgccgttccgcttggggaatgcgggtgccacgtaccagcggtgcatgaaccatgtgttctgcgaacacattggcccgacggtcgatgcctacgtccatgacatcgtagtcaa

SEQ ID NO: 40435 - DNA, 471 bp, Zea mays
  unsure (1)..(471): unsure at all n locations
tatgtccgacggttatgtccgacggctaatctgacagccgtcgtctgttntctgttattttcgacggccgctgttggccgtcggacatactcttatgtccgacggttgcctatggggccgtcggacataatacgaccgtcggaattttgtagttntactgtagtgacgtgactgttctctctcagctgtgcctgtgtctgagtccgatacgatcctcaattcttcatcagacgagaanttgtgtgtcggttctcgatcgagcaggtgagtgtgaaacgtaccgtagccatcgtcgttatcgccaccccaccacccatatgcatgtacgcacgtctctattaaatcgaagagaatggtgtcacacacgtacgcgctcaccgataaatnttttagatgatggngagttttatcacacgctctgcagacttcngtatctttttagttgtacgtagagaagagatatgtatatat

SEQ ID NO: 40436 - DNA, 445 bp, Zea mays
cttgtcgcgatagcagagatgggaaccgactatttatgtatagactacctggaccttgtcagatttccataagtcattgactaatgtcatggacataaatgtacttttacgcgggctgccgtccgcgtctataaatagatgaacagtactcccgtactgttcacgctgacttggcatttgcttttgcgtcacgcttgtactttttatcttctctcacgaccgaaggtacactttgtatttgaaatcatttttatttttccatgttaataaaatagaaatgattctatgatgatgcttatattatatttcatgctttatatgaatccttcgtcattactcgttatgtttacgaaggtatgtctcttatgaccttcgtacgaacttattattttctgaaaggcatattgcttcaacgacgaaggactataacactaacacttttatg

SEQ ID NO: 40437 - DNA, 464 bp, Zea mays
  unsure (1)..(464): unsure at all n locations
tatgaagattcttcatcccaacatgggctagtcggcggtgccagagtctacccatgttagtcttagcaattaagcaagtgtcgagttcagctctatcaaaatctaccaggtatagctgaccctccaacactcccttaaatgctattgaatcatcacttcttctaaagacagtgacacctacatcagtaaaaagacagttgtagcccatttgacataatggagaaacagaaagcaagttgtaatctaatgaatcaacaagaaaaacattggaaatggaatggtcaggtgaaatagcaattntacccaaacctttgaccaacccttgatttccatccccgaatgtgatagctcgttggggatctttggttntctcatatgaggagaacatccttttctccccggtcatgtggttagtgcacccgctgtcgagtatccaacttgagccccccgatgcataaacctac

SEQ ID NO: 40438 - DNA, 409 bp, Zea mays
tgcccgaggggcttaagaatgctggaggaagcttcagcagaatgatagcccacgttcttcactctcaaataggcaggaatgtgctcacttatgtcgatgacattatacgaaaaagcacgaaacaagaaaatcatattgtcgatttgcaagagacgtttgctaatttcaggcaagctggtctcaaattacaaccataaaagtgtgttcttggagtaaagaagggcaagctccttggttgtctggtatcaacaaagggaatcgaagctaacccaagtaagatcgaagctatccttctgatggaaccgccaaattcacagaagggggctcaacgattggcaggaaggctggcgtcacttaatagatctatatcaagatcagccagaaagaatctgccattctctgaaatatt

SEQ ID NO: 40439 - DNA, 477 bp, Zea mays
  unsure (1)..(477): unsure at all n locations
ngatgctnntcttgcttanncaattggggataatgtctttggtcagtgtctatagcactagntctgtagnctggtagtacttaactacttaatgcctaaagttacactatatacatcctgngtagcagtgcaagtaggcaggacaattatattcttcgactagctgacgagtcaccgaccaattgaacctgaccgctacacatacgactaggctcaactaggtaaattaaaaccattgcagcatacaagacatccgttagtcacaacatgatatattggaggcaaaaaaaaaaggaaaaccacgttcataatgaaagcagtacaacgttgtgcctacctcctgtatgcgatcaagagaacgaatgttatccaatgtgtccaatgacggagagaggcctncatgaagacagaagacctgtgaaatggatgtttctcanatggtaaggcatatatattcaacaagcctataatagcatc

SEQ ID NO: 40440 - DNA, 476 bp, Zea mays
  unsure (1)..(476): unsure at all n locations
agcttgataatgaggagatggcgctcgtcatcaagagcttncgncaaatcctcaaacaaaggagggggaaagactacaagtcccgctccaagaaggtttgctacaagtgtggtaagcccggtcactctattgctaaatgtccattatcaagtgatagtgacaggggcgacgacaagaaggggagaagaaaggagaagaagagatactacaagaagaagggcggcgatgcccatgtttgtcgggagtgggactccgacgaaagctcaagcgattcctccgacgacgaggacgccgccaacatcgccgtcaccaagggactcctcttccccaacgtcggccacaagtgcctcatggccaaggacggcananagaaggtaaaatcaagatcctccactaaatatganacctctagtgatgaggatgatgctannaatgacgangataacttgcgcactctttttgctaacctaaacatg

SEQ ID NO: 40441 - DNA, 381 bp, Zea mays
  unsure (1)..(381): unsure at all n locations
atgcagcttgtcaagcaggtaaacaggtgggaagctctcatcatgccaaaaatgtgatgacaacatcaagacccctggagttacttcatatggacctcttcggacccgtcgcctatctaagcatatgaggaagtaagtatgggcttgttataagtgatgaattttcccgcttcacttgggtattctttttgcaggataaatctgaaacccaagggaccctcaagcgcttcctaaggagagcccaaaacgagtttgagctcaaagtgaagaagataaggagcgacaatgggtccgagttcaagaaccttcaagtggaggagtatcttgtggaggaaggaatcaagcacgagttctncgctccctacacaccacaacaaaatg

SEQ ID NO: 40442 - DNA, 298 bp, Zea mays
tcttgggtttgagatttttcctacacaaagaatatctcaggtgaagcgagaataatcattcacaattactagacagtacttacttccaccggtgcttatgtaagctatcgggtccaatagatccatgtggagtagttccagtggcctgtccgttgtcattatgttcttatgtggatgatgggcgccaccttgcttttctgcttgacatgcgctacaaacccctgtctctctcaaaatgaacatttgttagtcctacaatgtgctctccctttagaagcttgtgaatattctttattcc

SEQ ID NO: 40443 - DNA, 336 bp, Zea mays
aaacaactctgctggctgtagcacaagcatgaaactatccacaatggatctgcctttaataaacgcactttgattctgcgaaaccatattatccacgtggtgggccagccctattgccaaaagatttgtaataagcttagcaaaagagtggaccaagcttataggccgaaaatctttgacatgacatacatcatcttttttgggtagaagaataatgtatgctgaattgagaagttccagatttccccgatttcccgtccaaacagccatagcagctcgcataatatctcctttaataatatgccagcacgacttataaaacttcccagaaaacca

SEQ ID NO: 40444 - DNA, 390 bp, Zea mays
gcttgagtgattcttctgcaaaaattattgtgctcacagaagcgataacggtatgatacatattcatgagaaaattaagccgaccaagccaattattctctaaaggataatcaaggcacttgcatggtcttaatacaccgcttaacttgtgcctaacgatgaagaatatccgccagcaaatattggacgaagatcatcttagtcgatattccattcatcccaccaaaaacttactaagatgtatcaagaattaaagcaacattattggtggacaaaaatgaatatcgaaattgcacgctatgtggcgagatgtgacacctgtagacgtgtcacagccatacatatgaagactgctggtgcactgcaatctttgcccattccacttggaat

SEQ ID NO: 40445 - DNA, 490 bp, Zea mays
  unsure (1)..(490): unsure at all n locations
tgaggataacaacgtgaagctcgaagacatgggtgtaactgtttcgtaactaattctcgcgtatgcagagaagataaaaccaaccgagccacatgcgtatgtgttagtcggagtcgattgcacgaatataggcacaataatagtaatatgttcgacctcatgtaaccctaaccttgtcaggtatataaagcgggttaaggacccctacanaatagttggatccttcaataggctagctagagcatagtttccttgcactctatgatctcgaactcaagagcaattccatcatagcaacaaataagacataggatattacgcatctctgtggcccaaacctatatagatcttggagtcttgtcgtgctttgcatgaaccatcgagctaatcattgatattgccaaccacaaatgcacaacacgggataccccgtagtgtgttcctggtaataaacagtggtgtcctggtaataaacattgatagctagcac

SEQ ID NO: 40446 - DNA, 320 bp, Zea mays
  unsure (1)..(320): unsure at all n locations
catgcactantataagcaagtggcttctttgttctctaactttgatgactaaccctaagcgaatttctttatttttatatctacaaagctacacagttagccacattactgtatttcagacttagccacatgagaggaattaaccggcttattgcaaataagcccattttacatcttttgacttggaaatcctcacatgggtgaaccatatgctttagggtaccctaattccttgtgttttgcacttaggtccaaaagtgtgcaaaatttacatataaccccctacggtgtcagtccacggttatctaggggcccattta

SEQ ID NO: 40447 - DNA, 506 bp, Zea mays
  unsure (1)..(506): unsure at all n locations
taatatgataattagagcccttgtgtgaagcttgacatgtnttgttcattgnttgattcccaaacacaaaaccctagctttcttaggtattatttgccttatcctaacacaatactgcctcagaaaaccctagttacccaggtgtaccgtgaaggaaagttatattcaagatatgatataacttactatgttctatcataactgcataatcatagcattacatggacatttatgtatgtatattgttatgtttagaaaacaaagaagaaatagttgaagaagaagaaactgcaccatcaatagagactccacctgccaggaatagtttttattttgatatctgtggaacagatcccgaatcctctacaacacaaggcaatccccggtgcatttgcccttccttgttggtntaaattctttatcacttgaaatgatgcattaggtgataggagtngagtgctacacaattgatgcattcccttccttggaaatgattaccattcctt

SEQ ID NO: 40448 - DNA, 456 bp, Zea mays
  unsure (1)..(456): unsure at all n locations
agcttatgaagattcttactcgcaacgtgggctagtcggcgatgccagagccaacccatgttagacttagcaattaagcaagtgtcgagttcagctctattaaaatcaactaagtatagctgaccctctaacactcccttaaatgctactgaatcatcacgtcttctaaagacagtaacacctacatctgtaaaagacaattgtagcccattttgcataattgagaaactgaaagcaagttgtaatctaaagaatttacaagaaaaaacattggaaatagaatggtcaggtgatatagcaattttaccaagtcctttgaccaaaccttgatttccatccccgaatgtgatagctcttcagggatcatggttnttctcataggaggagaacatccttttcttcccagtcatgtggtgtgtgccccgctatcaatgatccaacttgagcccccggatg

SEQ ID NO: 40449 - DNA, 411 bp, Zea mays
  unsure (1)..(411): unsure at all n locations
ntngagccggntgtacatgtcttgaggctcctcctcttggcgttgtctaaagcgaccgagctccccctcgatcgtttcccgcttggtgattttggtcacctcgtctccttcgtgcgcggtctttagcgtgtcccaaatctccttggcacctttcaacccttgcaccttattatactcctctcgacctagagaggcgaggagtatcgttgaggcatgggagttgaagtgttggatttgggccacttcgtcctcatcataatcttcatcccctacgaatggtacctgtacaccaaactcaacaacatcccatatacttttgtggagtgaggttaggtgaaattgcatcaaatcactccacctagcataatcttcaccatcaaatgttggtgggttgcctaatggggcggaaaa

SEQ ID NO: 40450 - DNA, 438 bp, Zea mays
  unsure (1)..(438): unsure at all n locations
agcttatttacaagatactggcattactacttttccccatatgaacgcgatcgtctccaacttgcaaagcgccatcatcaagagcaggagcatacatgataacttcttggcagcgcgtactgcggcacgtcgttttcatacaaacaagaccccaacactcttgttcaaattggacatagcaaaagcctttgattcgatatgttgggagtatatcctcaccctccttgagcacctaggcttccctataagatggcgggaatggatngcggcaattctctccacctcaacctcaagagtcatccttaacggcgtaccaaaccccccctatctggcacgggcaatgcctaaggcaacgcgaccccctatcttctcttctttttgtcatcgcaatagatcccctgcaaagactccttgaagtagcaactgaattcanaatgc

SEQ ID NO: 40451 - DNA, 342 bp, Zea mays
atgttcattctgagaaagacacgatttgtagcgcatgctacgcatggaaacaagatggtgctcaccatccacataagaaccatatgacgactgacaggccactggaactcctacacatggacctattcgggccgatagcttacataagcattagcgggagtaagtactgtctagttattgtggatgattattctcgcttcacttgggtattctttttgcacgaaaaatctcatactcaagaaaccttaaagggattcttgagaccggctcaaaatgagttccgcttgacgatcaagaaaattacaagcgacaacgggacagagttcaagaactcacaaatcg

SEQ ID NO: 40452 - DNA, 393 bp, Zea mays
  unsure (1)..(393): unsure at all n locations
tttctcatccccccattgtctcatggcaaagggagatgcttaagtnaaaatcatcaccgatttaaatgatataaaagatgatgatgatatcgatgatgttgatgatgatggctattcatatgatgatcttgttagaatgttaggtgaggccgatgactacatgcacaaagaanaagaaaaatttaagaccttgaaggaattgtataaaaaccttcaagtgtcttttgaggagctcaagacctctcacaatgacctaaaagaaaattgtgagaagcttgcggatgctcaaaagtcatctattgtgcatgaagtaanggnggcactaaagatattggagtcacttgtgacttacttgatagtattacaagtgaatcactatctactaactctatt

SEQ ID NO: 40453 - DNA, 414 bp, Zea mays
tgtggaggttcttcatcctcacatgtgctaagcggcgatgctcacaaccagcccatgcaagtcttagccattaagcatgcatctagactggcctcttcttttgcaaaatcaaccaaataaagtttgccgtctagtacacccttaaaagctagtgaaccatcacatcttctaaagacagacacatctacatttgtaaataaacagttatatcccatattacataattgactaacagatagtaaattatatccaagactctccactaaaaacacattagagatagaatgctcatttgatattgcaatcttgcctaaacctttcaccttgccttggttcccatcaccgaatatgatggaatcttgggaatccttattcttgacgtaggaggtgaacatcttcttctcttccgcatat

SEQ ID NO: 40454 - DNA, 391 bp, Zea mays
  unsure (1)..(391): unsure at all n locations
agcttctanaaggagaacacgtgataggcttatctattgttctattcgaaaaagatagaccttgtgcagcttgtcaagcaggcaaacaggtgggaagctctcatcacaccaaaaatgtgatgaccacatcaagacctttggagatgcttcacatggacctcttcggacccgtcgcctatctaagtataagaggaagtaagtatgggcttggtatagttgatgacttttcccgcttcacttgggtattctttctgcaggataaatctgaaacccaagggaccctcaagcgcttcctaaagagagctcataacgagtttgagctcatagtgaaaaagataatgaagcgacatgggtccgagttcaagaaccttcaagtggagaagtaccttga

SEQ ID NO: 40455 - DNA, 453 bp, Zea mays
ttgtcctcttgcggcaccggacactgttcggtgcacctctgactctgcggctctgactctgcgtgcactgttcctctatcagcggcttttgcagtcgaccgttgcgtgaggtactcgttgctccgctagcacaccggacagtccggtaaattatagtggagtgcgcctaccgaaacccgagagtggttggttcaaccctgtacaggcctggtgcaccagacactgtccggtggcacaccgagtagtccggtgcgcgagaccagagcacacttggtttcttttgctccttcaagttggatccctaacttgaatatttattggtttgtattgaacctctttgcacctgtagaacatgtattctagagcaaactagttagtccatatatttgtgttggacattcaaccaccaaaattaattgtgggaagagggtaactctatttccctttcatctc

SEQ ID NO: 40456 - DNA, 322 bp, Zea mays
  unsure (1)..(322): unsure at all n locations
gctttctacatatatatgattgcagctacattattttaattgtaangcaaattatctttacctattggcacttgggttgtggcaaatacattggaaacaatagtaacaaattatctttacctttttctattcttttccgtacagtacaaatgcttcataaggaatcagatagatcttaaattcttactgccaacacatgcacacactggtggtgccttatctaactatttagatcaaggaacatgagctgaaggagaaagatccggtggtcttgggcaaagatcagctcaaagagctcatgtaggaagggatgcatgtagtc

SEQ ID NO: 40457 - DNA, 486 bp, Zea mays
  unsure (1)..(486): unsure at all n locations
actaagccttcatctctggactaactcggctgcatcactatttgccatctgacagtagaaaccagacctgaagactgtcccaaccaaagtcctagatgctgcgtgtatcccgcactgtccagcgtgaatttcatctagcaattgcctcccgaaaactgagggaatgcacttcatgaggactcttgttgcaccccttctgtatagcgcatcccctatgagggtgtagtgggctgactgtcttgcaaggcgttctgctgcggctctatcatccagttcttcttcgttctttatatacctgatgataggctgtctccagtcattagagtttgaatctggctggctcaaaacattgcactcttctgtctgatctgaggaaatgcttgggcatgacacctcctggacgaaaaccncaggtgggacctgagttcgactggatcctagtttccacaatgcgtccgctgctgcatcgcgatctctcttcacatg

SEQ ID NO: 40458 - DNA, 480 bp, Zea mays
  unsure (1)..(480): unsure at all n locations
gcttctttcanagcatacagctntctagatgttattattatctctagacagatggatcttatatgaatcgtatgatgaagtaccacatgagtggatatatagaaaaggaatccaaatccaccgaatcgctcatgttatgatcttctacatcctangtctccgcgttctgtcatctggcttatgttcttcatgtagcattcagatcgaatgactctatgaaattacgtcgatacttccacatattatgggtaacgtaggagacatccctattttcacccggnggtcttaattaccactgcttaactttcaattcgcctctgaccatcaaattaaatgtgaatatacccgtcctctctctttgatacagagggcgctctcggttctgtgcgtgcttcaaacaantntgtcttctncatattaccatatctctagagtcaataattttatgaggactactgactcatcactgctgcgtactca

SEQ ID NO: 40459 - DNA, 444 bp, Zea mays
  unsure (1)..(444): unsure at all n locations
tcgaaaggtgccatccttaggctggattgataactggtgttataagctaactctgccaaggagaggtgcttatcccagntcttaccacaatcgattgcacaagctctcagcatatcctccagaatttggtttaccctttccgtctgaccatcagtctgtgggtggtaagctgaacttttgattagcttggttcccaaagactcctgcagttgttcctaaaatctagcaacaaattgggctcctcggtcagaaacaatggttcgaggtaatccgtccaaacacacaatccggtcaatgtacaactctgcatacttttgagccttatcagtggtgtgcacagggagaaaatgtgctactntcgtcagtcggtccacaataacccaaatcgaatcatgatgacgagaggtgttgggcagacccacgatgaaatccatgctgatgtca

SEQ ID NO: 40460 - DNA, 394 bp, Zea mays
gatccttaagtcacctgcggcatgcaagcttataccgagtacaacaatggcactaaatttccttccatatggcaagcaaaagtacaatcgaggcactatgaatgaccaaacccattgcatatgcctgttttgttcaactcttttgaacagcttttctgagaatctgacagttttttctaaacatcttttctggtacgaagagaatctgttgtgaagagaatctgaatatagtgaagattacgtgcggaagaagataaaatagtccacagactttagtatgtagaaagtgacggttttctgctatcacagtgaagttagaggcatcttaccgaaatatccaacgactattgtccaatctgttctttttatattgattccatccaacaatttctca

SEQ ID NO: 40461 - DNA, 501 bp, Zea mays
  unsure (1)..(501): unsure at all n locations
tctaaagggagagcacattntatgactaaccaatgttcattttgagaaatacagggtttggagcgcatgccaagcacgaaagcaagttggtgcccatcatccacacaagaacgtcatgacgaccgacaagccgcttgagctactccacatggatctattcggcccgattgcttacgtaagcatcggcgggagtaagtattgtcttgtaatagtggatgattattctcgcttcacttgggtattctttttacaggaaaaatctcaaacccaagagactttaaagagattcttgagaagagctcaaaatgagttcggcttaaggatcaagaaaataagaagcgacaacgggacggagttcaagaactctcacattgaaggcttccttgatgaggagggcatcaagcatgagttctcttcttcctacaccccacaacanaatggtgtagtggagaggaagaatcgaactctattggacatggcaagaaccatgcttgatgagta

SEQ ID NO: 40462 - DNA, 352 bp, Zea mays
  unsure (1)..(352): unsure at all n locations
gaaagcccgatgctgtttctaactcgaggagctgtcgtctgctcccagcacaccgaatgtccagagcgggcaaatcatatgattgtctcccggccgggcggacccgcgctagctttctgcttattcccgggcatcatgaagtgaacaaacaagtgttgctttccctgtctccgngttctgaaaggcgatctctacctacaagcattacgggctgttccgttcgcacggaacggagacgcggaataaatatgacttggattctctcaataattactataagctttggagaattggaattaatcctggtctgtccagcacaacgaacagacccttagacgaggctaaaaaacta

SEQ ID NO: 40463 - DNA, 231 bp, Zea mays
cacccatgtttgtcttagcaataagccagcgtcgagtccagctctatcaaaatctaccaagtatagctgaccctccaacactcccttaaatgctattgaatcatcactctttcgtaagacagagatacctacattagtgaaaagacagttgtaacccattttgcattattgagatacagaaagcaaactgttatcttatgaatctacaagataaacattggaaattgaatg

SEQ ID NO: 40464 - DNA, 405 bp, Zea mays
gacacaagaaactcagcttaacttgttttgaggatcactccttcaacggatccagttgggtgctcgataacgaatgtatgaatcatatttggagatagtagcaagggcggtaacaactaaatctcaagtgcatattattttcaaatcttatctctcttgtgacttgtgtagccactaaggaaaaagaagcacttaacgatatacatcacttgttgattatgaaatagaggtccaattggaagatgaatgaatattatcatatggtcaacaatccaaaattatgtgacatattctctatctagctaatgtggattcgattcttctctattacacacttaccataatatggattaagtcacgcctttagacttcatttgacaaccatgcgtattattcatgtcattc

SEQ ID NO: 40465 - DNA, 374 bp, Zea mays
ctgcagcttaaaacctctgcgacagtgtttctctttcgatcctaacaagacggtctttaggtctttccctactggaccacataggggtctgcacttcttcatcatgcttaaatgggacatttgaactggctggggctgtgtgatgaaattcgtgacgcaactggactccaatctacaacgtaaccacggctcttataatcttcagacctgtgactttccttgacattgacgggggatagcgggctaattactggccggcttcaaatttgaggactggtcctcattactatttcgagaacctggaccgctattttaaaatatcgcaaggcgtctcaaatggtttcggataatggccctgtaacacattaccaaaa

SEQ ID NO: 40466 - DNA, 388 bp, Zea mays
gacacaaaaaactcagcttggcgtctcaagtacctcgcctatgcctcatggaggatctctctgtacgtacacaccgacttctggatggttcggacccctgtggttggtcctgcgtcctcaacctcctggcctttcatcaacatcgtggcgggcggaccaccaccttctcctaggggaacttcctgactcccttgcgggtgttgtgacggcctttcgatgaccagcaccatgctcactgcctctaaagccgctgcaatgtataagtacaacggctcccccggctccggagctaccactattggcacggacacaaagtgctgttttaactcttgaaaggctcgttctgcctcttcagtccaagggaatggaccggacttacacaacttgc

SEQ ID NO: 40467 - DNA, 366 bp, Zea mays
  unsure (1)..(366): unsure at all n locations
cttaagtcacctgangctgcagctcggcttatctatattgggttgtttttatatagnccaattccccttggcctttgtggcagcttcctgactcccatgaatagcaataagtccctgatccgaatgtatcttcatgcaaagatatgctggatgaagaattgcttcgaaagcattgagtgttccgcgaccaatgatagcattgtaaagatacttcatgtcgacaatgtcaaacacaacttgctcagtccttgtattattgacgaatccgaaggtcactagcatgataatcttaccaagtgctacaatgtgtcttcctccgataccacaaagagggtgcgtagcatcatgaatcttgtctttggactc

SEQ ID NO: 40468 - DNA, 483 bp, Zea mays
  unsure (1)..(483): unsure at all n locations
actcagcttatactcggctgcgttgttagaggccgggaatatcatctttagagcatacttgaggtgctcgcctccaggtgcagtgaagagaattcctgctcctgctccttgcagtttcagcgagccatcaaaatacattcgccatacttctgcggtttctgggttatccggtacttgctgttctgtccactctgatacgaaatcaaccactgcttgagttntgatggctgtgcgaggtcggaactcgatatcatgggatcccaactcgcaagcccacttggctattcggccaatggcttccttgttgtgaagaatgtcccctattggaaaaccagtaactactatgactntgtggtcgtcaaagtagtggcgtagcttgcgggcagttagaagtactgcatataatagcttctgaacttgaggatactttntcttcgatggacccagaacctcactgatgaagagacaggatgttgtccggat

SEQ ID NO: 40469 - DNA, 365 bp, Zea mays
cttgcatacatagctcctttatatatctttgatcatgtctctttcattcggcacattggatatttattattcttcttgtgcccaagctaagactaatgtgtttccaagagtatttctatgcttaatcttagattgataaggaaatggaaaaatccgccaaggcaagacttccactacgactctgtcgggatcatatttcctttgccctactcatgtatttacattcatatcttgacaaggcctctagttctctttgtcttgacgcttaatgctaaagggggagaaattattgggccaacagcaaacgacagtaccaccatcctgtatttaaaaactttttaacaaagagggagaaataataaagg

SEQ ID NO: 40470 - DNA, 321 bp, Zea mays
  unsure (1)..(321): unsure at all n locations
acttagtagatcacagtgctcttgagcttaaanatgagtgagcaggagtggttggccagaaagcgtgcaaaataagtttgcggtatggccgtatttatacgcttgatgcgttgaaagttgaaagaccccacttgtcattgaatgttgctattctatcaaagggaaggtgttttctcggaccttcggcataaagccttcggtcatatcgcaatctgaatttattatttcaaacaaattaatattgcgaggggctacttgtgggggccttcggcttccgaaggtcctcaaaaacatgaattatacaatgttctggagtataat

SEQ ID NO: 40471 - DNA, 244 bp, Zea mays
tttaagcttttagcacttaaattcttactttctatgcaattattggttcttgaaatgtgcatgaggtactacacttacggggagtattcaaaactcatatcactcatgaaaaccccgagtgcaaaccaaaatgcaaatttcaccatttgcctattttctctaaaaattatctagcctatggcgaaatattttgaaaaatatatgagggtgccaatacctgtccccacaaatgttattttgtgtg

SEQ ID NO: 40472 - DNA, 452 bp, Zea mays
  unsure (1)..(452): unsure at all n locations
ggacattgcctccctgttggaaaacaatgtcatccttaatgctatggtgtcttccattataaagcatgctgctagcagatataaaattttcattttctaagtcatgctcattaattntagcattaagttgagctatgtgatcattctgttgtttaattaaagctaggtgatcatggatagcatcaacattaatgtctatacatctagtacaaatagaaacatgatcaacagtagatgtagagggtttgcaaacatttaattcatcaatcttatcatgtaacacggcattctcatttctaagattggaaataacattattgcaaacatttaattctttagccttagcaattaaattttcattctcaatcttaaggctagcaattgattcattcaacttttcaatcttagcaattaaactagcattatcatctttaaggttgacttaagagaat

SEQ ID NO: 40473 - DNA, 349 bp, Zea mays
tgcagactccttcttcttttcttccgtcgccttgaatgccacggggtgagcttcggatgtagatggatcatccacctcgttgatcttcctcgagccttcgatcatgccctcacaacttacaaaatgcccgagtactctctcgggggtcagtttagtatatctacgatcaccacgaattaattgaacttgagcggggtaaggaaaacgagagatcttagaataaccttaaccatttccgggtcgtcccactcgacgctcccgaggttgcgcacttggttcaccatagtcttgagccagctgtacatgtgttgtggctcctcctctttgcgaagccggaaccgaccgagct

SEQ ID NO: 40474 - DNA, 254 bp, Zea mays
ataccatcaaaaggaacattgctatatgcatctatctccacccttcctccatggtatagtgttactatgctggtcatctatatgcaacaatacattaccaactcaataatggctatatacttaagcctactaacttactaacaataaacatatattaactaataactatactagaaatattaaatgaacacatgaaacgaaattacataatctataaataatgcatgaaaacaatgtatacctgagatcgcgta

SEQ ID NO: 40475 - DNA, 466 bp, Zea mays
  unsure (1)..(466): unsure at all n locations
ntttgaacgtactaagcacatgccgcgacaaatggtaaccggtacacctagtacctgagtgaagccgggcgcggactttatccctcatgcgacctgagacaaggtctcccatgctagctatggtgggtacaagtgcggtcactgcacggcggcagccgaggtcagtggagcattgtatgccaaggcggtgaggcctggacgccaacggcgaatcgatggngaccgttgtcatgtgtgaggtcggagtaccctgacatgccgcgtgtttaggtttaccttgcaaggtttaaaactcgattcgaattgtctgcttctcgcagctaatgagactgcttgattccttgtactacatcgagtaagaagtgaaatgtggattacatgagataacttgttgattgagctaattgcttgttaccatgtatgcttagaaggagcacatctagctaagttaatgatggtagaactt

SEQ ID NO: 40476 - DNA, 281 bp, Zea mays
  unsure (1)..(281): unsure at all n locations
cataatagaaggggaactatgctagcgaagagtctgttccncgctgctcaagtgtttatccaaatcctaacgcatagaattgatgaatgaaatacacgcacgcctgtgtggatctcacattggatctaagcctttgcttgggaaagtgtttcgtcaaagattttattggccaaatgtagcttctgatgcagcggatttagtccaaaagtgcgaacgttgtcatacatgtgcaagagatcaaaaacaaccttcgtntttaactcaattaatacaacccactt

SEQ ID NO: 40477 - DNA, 455 bp, Zea mays
  unsure (1)..(455): unsure at all n locations
tgaccatggtggtgactacgtcaagttgcggggtggtgatgtataccacaagaaatttggtggggacacaccttatangtagcctatggatatattcttgtactctctctccctatcatatctgatcttggagtagtagttgacttcattcttctgtatgcagcattatatctgtgggtacatcaccaaaaagggtcacactatcctgacaaaagatggcaagaaccacttgatcaagaacgatgtgccctgcgagactgatcagttgactcatggttacactctgatcatttggcctgatgcaacatacttttcatttataatgaagagatgcaaaatgacaacatctatgagcactgggatattcttccccctcctaagccaataatgaccagaggctaagacggaaatacttaaatttattattgtgaattcttgttccacttgtcgaaata

SEQ ID NO: 40478 - DNA, 353 bp, Zea mays
  unsure (1)..(353): unsure at all n locations
ccatgttaatcttagcaattaaacaagtgtcgagttcagctctatcaaaatctactaaatatagctgaccctctaacactcccttaaatgctattgaatcatcacttcttctaaagacagtgacacctacatcagtgaaaagacagttgtagcccatcttgcataattgagatacagaaagcaaattgtaatctaatgaatctacaagaaaaacattggaaatagaatggtcaggagatatagctattttaccaagacctttgaccaaaccttgatntccatccccgaatagtgatagctcgtggggatgttgggtttctcgaagacgagaaaatttcttctccctgcatatg

SEQ ID NO: 40479 - DNA, 413 bp, Zea mays
  unsure (1)..(413): unsure at all n locations
tgaacacacccagcgctcctgtagaccgcggaagattctgtgtaaccacctacgactcaccagccgagcaccacccggccagaattcctcggacccagctatataaataccgaccctctaacagcgcatcccagcctgttgcgccgtccacgcggcaaggccgtggccttactgccagcttgcctcgccaaaccgctagggtcctataggcagcgggacttttcggtgtgtcccagcgccggagcgaacagtgggatcgtcgtgcgatggaggtagtcagatggattgttcaccagagctcacctctcgttgggggcttcactatgccagcgaccagccttgttctcgcctctgctaatggtgagacctcccatggntcttctttggtttttttactttgcttagcctcttat

SEQ ID NO: 40480 - DNA, 370 bp, Zea mays
agcttgtgaagattcttcatcccaacatgggttttttggcgatgccagagccaacccatattagtcttagcaattaagcaagtgtcgagttcagctctatagaaatcaactaagtatagccgaccctctaacactcccttaaatgctactgaatcatcacttcttctatagacagtgacacctacatcagtgaatagacagttgtagcccatattgcataattgagaaacataaagcaaattgtaatataaagaatctacaagaaaaacattggaaatggaatggtcaggtgatatagcaattttaccaagtcctttgaccaaaccttgatttccatccccgaatgtgataactctttggagatcactcg

SEQ ID NO: 40481 - DNA, 455 bp, Zea mays
tatgaacgttcttcatcccaacacttgctatacacgaatgctatagccagctgacgttagtcttagcaagtaaacatgcatctagatcgacattctctctactaaaatcaaccaagtaaagcttgtcgtcagatacacatttaaatgctaatgaaccatcacgccttataaagatagttacaacaacacttgctaataagcaattacaacccatatgacataactgacttacagaaagctagttgtaaccaagcgattctatcaaaaacacattcaaaatggaatgctcggtagtgaatgctattttacctatcccctttaccttgccttggtttccatctccaaagatgatcgcgtcatgggaatccttattcttgacataggaagtcaacatcttcttcttcctcatcatatggttcgcgcatccgctatcaataatccaacttgagcacccg

SEQ ID NO: 40482 - DNA, 419 bp, Zea mays
  unsure (1)..(419): unsure at all n locations
agcttggntcaagatgctgagtcctttgctctttctgttgatgaagtgcccgcgccagtttttgctgaatctgaccccaatgggtgtgacccgactgatgctgaacccaatgggtgtgacctatatgatgctgaccccaatgggtgtgatctggccatatctgaacccaatgggtgtaccgttcctcatttgtgatgaagatgaggaagaggaggatgaaatccctctagttcggaagaatagccgatgctacatagtcagtggggaaagtagtggtgttccttctctagctttgtctgccctcattggtctgcaagaattgtctctgtgcaaacttgatcagactcttgaagacatgatcccagatgatctcgtgtcagagccggcagatggtggaatgatggatatttgtgctaatg

SEQ ID NO: 40483 - DNA, 474 bp, Zea mays
  unsure (1)..(474): unsure at all n locations
tctgccatgatgtgattgtccctggccagagagaatagtgtctagtttgtgcgacactnttgactgccatgacgaaggatttctccatgactgcagtgttgcctccataacaagatatagttgcctcatagctcatgagaaactgcttcgggtctgagtgcccatcatacatanggagctggggtggcttgtgtgatgacggccatggggtagcctgcaattctgctgctagaggagaagaatcatccaaagcaaaattgccatgatggaaatcatcataccattcgtcatcgttgtaggagttgtcttgacgaagctctttgtgttgaggtcgtcagtcttggtcatcttgggtgagatgacgcatttcttcagcggcctcatcaattcttttctgaagatctgcgagacgaagcatctttttcttcttcctctggacctgttgatgactagcttccacgtctctgatctctt

SEQ ID NO: 40484 - DNA, 439 bp, Zea mays
  unsure (1)..(439): unsure at all n locations
agctgtgaagagtattgaggcctntgttgtttctccctcnatcatcactgtgagtggagttatgaattgacctgccatgcctcggatgaaatcttcctccgaagcccctggccatctcagagaacctgaatgcctcctcccttctctggcggaaatcattgtcagctcggatgtactcgtccattntttggagtaacttcttcaaagtttgtggtggcttcctggcaaagtattgtgctgaaggtcatggccgaagtcccttaatcatggcctcaatgacaatttcattgggcactgttggcgcttgtgccctcaagcgcagaaacctttggacatacgtctgaagatattcttcatgggcctcggtacactggaagaagcctgagcggtgactggcttgctgaaatcttggaactagtataacatatcttcacttctg

SEQ ID NO: 40485 - DNA, 417 bp, Zea mays
  unsure (1)..(417): unsure at all n locations
tattgcgtcatgtacatctgatgtacatgtacccttaattctttataacctttggattataacaatgaactaaatatgcgatcattgcaccctccttaagcatttcgttgcaatggaaaactattcttacacataactgtcatccatttcgacccatctggaatttncctttccctttacgtgtgctcccatatatgatttacccagatattatgtacgcggcaatgaccaccctggcgatgaggatgcgaaaggccactcaaaaagcaaggctcagaacaaaaggcgacgcccacggtatgccattaacctatcccggcagctgcatgccagttcttaatctattctagaggctaaactatcatgaagcgaagctgatgtgtcgcgcaacttcagcacaaatgtagatgggatgaa

SEQ ID NO: 40486 - DNA, 241 bp, Zea mays
  unsure (1)..(241): unsure at all n locations
cgtcatttaatacacctttaaaacctattgaactttaacattgtctaaagacagtaacatctacatccgtgaataaacaattataacccatagagcataactggataacagaaagcaaggtataatcaagcgaatcaaccaaaacacattataaatagtatgattagtggtgagtggctatttacctaaaccatntacatcttcttgattctcatcaccaaatacaatcatgtcttggaat

SEQ ID NO: 40487 - DNA, 337 bp, Zea mays
  unsure (1)..(337): unsure at all n locations
tgtcataacactcatcgtgattaccgagtgaagtttaatattctcttaagagcctagcatctagatccgtgtgataaagacacaaaatcccactctgcttagntggttatcactaatgatgacttggtctaactattgaacctggacacatttggagtacttgattgaaggagatgcgcttgtattctaagaccatgaaagatacgctgggatgatctcaatagacgaggatggggtgggaattattgtctttgacctatgaataaagaatgcgcttattcctccgactgcagacggtgcatgctctatgtatggaccgacttgatccctgcatgca

SEQ ID NO: 40488 - DNA, 401 bp, Zea mays
  unsure (1)..(401): unsure at all n locations
ttaacgccaggacatctcccactatagagcatgcctttagccaatttaaaaatttcattctctatctcatgctcattaagtaattgagccatatgatcattttggtgcttaattaaagcaaggcgatcatgaatagcatcaatattaatatctctacatctagtacaaatagcaatatgctctacagtagatgtagagagcgtgcgagactttaattcatcaatcttatcatgttaaatagcattctcatttctaggactggaaatagattcattgccgacattccagtctttagccttagaaattaaattatcattctcaggtcttagcctagcaaatgattcattcagttatcaatctaacattnaactagcatttctttcttagagtgaattgatcat

SEQ ID NO: 40489 - DNA, 205 bp, Zea mays
gaacatgctactccgtgaaacttgattttatttgtacaaataatattacttaataccaagctttgcttttgggtcttccgaagttgaaagccatggggataagaagggccggccctcaaactgaatctcaagttatttctatccccgttgactaaagtttgcaagcaaccgatcccaagcttggaaaatatttggatacagttcg

SEQ ID NO: 40490 - DNA, 398 bp, Zea mays
  unsure (1)..(398): unsure at all n locations
agcttctttgccgagtgctatggtcacgacacttctgtatatattcaacctttgctgaaagcctcctatagcactcaacaaagggcctggaaaaagggtccactggtgctccctttgtctagaactagtccagcacacttgacaaagagggagcctttgtcgagtgtctcttggagcactatgcaaagggactggcaaaggggcccacatgaagcttcttgtcgagcactattctagcagacacttggcaaagacgaagcctttgccgagtgttatggaggatacttatcaaaggctctatcatcgtcacttggtgctgcgacagcgactnttctttgccaagtaccaggtgacactcggcaaaaactttgtcaagtgaccgacaaaaagtactcgac

SEQ ID NO: 40491 - DNA, 465 bp, Zea mays
gggaccgaaactccttagacattggcgtgggaagtcccttggtgaggacgtctgtgaactgagagaccgaaactccttatacactggcgtgggaagacctttggtgaggacgtctgcgaactaagaggtagccgggacataaagaacacacacatcttcaatggcgacacactcgtgcacgaagtggaggttgagctcaacatgcttcgtgcgctagtgctatacagggttggtggagagatatacgatgtcgacgttgttacagtagaccagcgtgctccgtgtcagtggaccgcgacaccatgaagaagctaacggaaccatgccgcctcggtcacgttgttagccacggtgcagttctcggccttggcgctggagcgggagacgatcggctaccgcttctaggactatgagacaagaccgtcacccatgaacacgacataattagaagtggaacgacgcatg

SEQ ID NO: 40492 - DNA, 373 bp, Zea mays
actttcaagcttggcgttttgcctaaccaaagctgaatggcgaagataaaggagtgggaccccgcctggctgggtttatgaactatggagaggacaaatgttgaaaaatactgagagatttagctgggtgttgagattctgggacagagaaatttgatattgaagtggaatgatgatgccaaatcggccgtggggccgatcatgtggattgggaataaccggaaaaaggacatgtgagcttaaagcaaactttcggatggtttaggaaatgaggaaaatctgttacttctgaaaatgagatggttttaactataagcgactacgttctaaaatttatgactaacagttagcaatttaaagttaattctctact

SEQ ID NO: 40493 - DNA, 480 bp, Zea mays
  unsure (1)..(480): unsure at all n locations
ggatgggcgggagatttacaatgatatctaggtgaatggtggccgatagatggcccatgaaattataaagaaaagtgaanaagacacccatgacgcccgagtagaagcaagactagctgaagaagctacagagcgcgaaaagcgtataggtattgtttcttggcttttagcttcgacatttgtttttatgtcttcagactgattaactttttcctacttcagctaaattatctncgccgctggaaccattctatcccctagcggatctagagatgaaggaagcgctggacattataaacatggctgaatccgttgttgatgaagttgttaacaaattactgcacgaagttgcagagaaagtccttaaagaggaatagcacttattgtaaaaacattttgagatggcaatatatgagacactataatggtcattgtacctttattggtacaagactataatatttgatgtgtatagctttg

SEQ ID NO: 40494 - DNA, 259 bp, Zea mays
gatccttatgcaaaaaatttacttcacatattaagtacttttcctgaatctagatttgcctaatctagagcattcacttgtcctacactagctttattttagcagcatttagtttcacttgttatctacgatgagggtcgaagatccagtcttcatattcgaaaaagttggcgatccgaatcgattaatacccagctggggatctccaaccacacgacatatgtagcacttaacccttgcatatgtcaactcgccaccg

SEQ ID NO: 40495 - DNA, 464 bp, Zea mays
tcaactacagatacaatgccatcatcggcaggccaggattggcgaaattcatggtcattccgcactattcgtacatgatattgaagatgccagggccacaagggatcatcaccgtgcgcgctgacttccaaggcaccgcggaatgtttttgagtagccatctaggcggccctcgctaccaaaccactgacggcctccactgcgcaggcaaactcatagcctgagggagacctcgcaatacctgcaaacgaagctcaagccgtgacctctatgcggccgactgaggagacgaaaagaatcaatcttgggttcgctgatgaatgcaagactgccatcatcagctccagcctgaacgacaaataggaaagcacgctcatccagttcctacaagataacagagacgtattcacatggcagcctgcggatatgccgggagtcccaagagaactggtcgagcacaaactg

SEQ ID NO: 40496 - DNA, 315 bp, Zea mays
  unsure (1)..(315): unsure at all n locations
accagatactacatgntttactttataaagaccctcccagcttggcgaccattttccaaactttcggtctttattccttatgggcaagatggtcttccacaccaggtctcctacttgaaatgactttggtttgaccttcttattataggccctggctaccataatcttgtccttttctattgctcccaaagctataatcctcttgtcggtcacctcatcaatattatccatcattgcatcgtaataatcagtgagagttagatcatnttgtctggcgaacctgatagcattcaaacttatttccataggcaacac

SEQ ID NO: 40497 - DNA, 477 bp, Zea mays
tttggcttaagttcgattggttggtactgggagcaatatggggctaatatcatgcaagaacatgaaacaattgggtaagtactcactcgaggaaggctggccacggagatgttcttcgcggcggagttaagaacaagggagcgagggatttggaggctacgtgggtcttccggtgatcttgagtcgggcgcttattggctgagaggtgggatacggtgaagaagcaacgctcgccctcaatttatagccaaccggccgcaatcggatgagcttcaccggctgtaatcgtgctggcgagctcacccgcacggcagagccacgacacaagtccggtggccgccgtttaaccgggtagcgccacctcaacgctttatagccacgtcgcaccagatctttaccgcagccgccgacgaccattcgctgcggtggcgttcttatcgccggcgaggggctgacccatatccatggcgcgatatt

SEQ ID NO: 40498 - DNA, 329 bp, Zea mays
  unsure (1)..(329): unsure at all n locations
tttctggcagcttactgacttccatgaatggcaatacgccctcgatccgaatgtatcttcatgcaaagatatgctggatggagaaatgcttcataagcattgagagtaccacgaccaatgattgcattgtaagggtactccatatcaacaatatcaaacacaacttgttcagtccttgtgttgttgataaatccgaacgttactggcatcatgatctttccaagtgctacaatctgtcttccttcgaagccacaaaggagatgtctggtgtcatggatcttatcttcnggctcttgcatctatctgaaggccttagcaaatataatatc

SEQ ID NO: 40499 - DNA, 449 bp, Zea mays
tatgagatctaataaactaagcaagtatcggtaagcaagatctaataagttgagcaagcaaagcaagcaacaagtagcgtaccaaatgtggtcagggcggattcttatttatacgatcgacgcgctccaaactggagggtcccgcctgtcattgactgttactattctagcaaagggaaggtgttttttcggaccttcggcttaaagccttcatccatgtcgcagtctgaattcgttatcttaaacaaattaatactgcgaggggctactgttggggggccttcgtcctccgaaggtcctcaaaaacataatttaacaatgtcttccaagcatggtttatggacatgtatctttggatttatgataaaagcatacatgatgaggagcttgatcgtgacgaaagttgtcgtcgctccgaagctgtgcggaagggagcttctgctaaatcg

SEQ ID NO: 40500 - DNA, 470 bp, Zea mays
  unsure (1)..(470): unsure at all n locations
aaaaactaagcttcttcaagatttctgtcnaaatatccctcgaggacataatgagcatgctganttgctagctaaggcagcagcacaggggctgcccttaccttcggatgtgttcttcgaaacaataaaggcaccttcagtggaacttcttgaaagagcagtcctcaatatatctcctgtttttagtgaagactggagaactgagatcatctcttaccttcacggtaaattcctttcagatgacgaaacttataacaggaggatagaggcaagagctcgtccatatgtcatgatagaaggggagttgtacaaacatggagtttgtgctccattactcaagtgtttatctagagccgaacgcatagaattgatgaaagaaatacatgcaggcctatgtggatctcacattgtgtctacgccgctacttggaaaagtttccgtcacggtttattggccaaagagcttcgatg

SEQ ID NO: 40501 - DNA, 367 bp, Zea mays
  unsure (1)..(367): unsure at all n locations
ggtggtgcctacatattctgggatgtaaggcgaatgatacgaagcagtgtgcatgacctgcttcagctgagtctgttgtgctgcagcttcggctatttcctcttgcttctggatggtaacatggcacatcctggtggtatggcccttgttctcaccacagaataagcaaaaaattcttcttggttgatctccaaatcttccgccgaagcccctggcgcctctgcctcttggagctggtggtcggaaggagccttgctgttgccccgaagcctgtgaggagcactgtggcctctgctgttggcttnccctatcatcantttgagtagaagtatggattgacctaacatgcctcggatagaatcttcct

SEQ ID NO: 40502 - DNA, 226 bp, Zea mays
gccgagatgaagctgatcttgatgaagaaagaaattgtgtttatatccgacgctacatccttttctaaaaaatgacgagcaagcctgcatgtctgttgaaatctggtgcctagatattatatgtggacaacggggcgaaacttcaagatcgccctgcgagcagaccttatatttggtgatagctatcaaataaatcatttgttcgttgacgaaggatttcggggct

SEQ ID NO: 40503 - DNA, 305 bp, Zea mays
  unsure (1)..(305): unsure at all n locations
ttttttgcaataacaatgaatgctggggtaacttcacacctacccgtctgtttatatagtgctgcaagtaagaaggtgaatcgtcaggatttttacaccaggcaaacagtcgctcgcacccgctgaacggtgggccgcaataaccagaatagtgaacctgcatggtgggaccgctacgcgctcgaaagttgtatcgtttctcgacaacgagctcagggaaggtgtttntcggaccttcggcttcctgaagcctaagagactnttttcacggatcaagctcgttacgataaacgatctatcaccac

SEQ ID NO: 40504 - DNA, 480 bp, Zea mays
  unsure (1)..(480): unsure at all n locations
ctaagctctacttaatagcatactctgtacagaggcaaccttcgntttataacaccttcgttgttaaaaacaatgaagagtcgaagagaagtctatatcttgacattacaatataacaaactaccgaccatatgatgtcgtcggtagcggctgatatcggtctcaagcttctggaaaccaatactcttcgatagagtactgataacatatgttccagttcagtctcggagacaacctaagctttcatcgtcaataccgccgaagagtagcgcccctagctgatacccgcaggatatggcatagtctctcaactcttctttctcagcctttgacaattcttgcccaattaaattttgaaagctgaaattttcttcctctgaagtatcttcggctatactcttctcttttcaggcactatggccatagtctcttcggcggctgaagcaattctttgcggcatatcagaagcatttataatat

SEQ ID NO: 40505 - DNA, 330 bp, Zea mays
  unsure (1)..(330): unsure at all n locations
cgttgattgagtgtctacttgtttgttacacctccttcttttcttctgtcgccttgaatgcgacaggttgagcttcggatgtagatggatcatcaagctcngtgatcttcctcgagccttcgatcatgcactcaaaacttacaaaatgcccgattacttcctcgggggtcattttagtatatcttggattaccacgaattaattgaacttgagtagggttaaggaaaataagagatcttagaataaccttaaccatttcgtggtcgtcccactttacgctcccgaggttgcgcacttggttcaccaatgtcttgagccggttgtacatgt

SEQ ID NO: 40506 - DNA, 283 bp, Zea mays
  unsure (1)..(283): unsure at all n locations
actcagcttggccctacgccagggactgctgacagccaccatgcggtcatgccaatgtcgcataagcggaggcggaggaggaagctctgctcctatcacaggcaagcattgagctatctccagtgcaccagttgcggcgccactcctccaccttgatgagtcgaaagcacgtgctntcctcggcgacggctccagcaaagacatgatcgaacgatggtgcctcgacaccggcgtcactcatcacatgaccagccgacgggagttcttcaccgagctcgactct

SEQ ID NO: 40507 - DNA, 323 bp, Zea mays
  unsure (1)..(323): unsure at all n locations
atattggctattgaggcatgcagtgcacctggcgtttaaacaactgcaactggagtatcatgcatatgttggcagtggaatatatttgatttgctttggtgctntgacagctacctatgcttaatgggtgcttgtttatctaatagattactggttgcaagttgaaagcaatgttatttgttgccgctttctaccacttcgcatctgctaggctgacgtcttgaccaacaatgattgataagctgacgtcttgactaacgacgatgattgaagactcgtgttatctcactctatagtgttngctgcatcacggcacccacaca

SEQ ID NO: 40508 - DNA, 359 bp, Zea mays
  unsure (1)..(359): unsure at all n locations
ctatcaagccagcccttgttggtctgatgtttctaatantagaacggactccctgagtcctatgatataagagtaatacccacaatataaagtgtgccccctctagatatacgcatatgaatgaatagtatacatgagaaaatcaaatacacgttttgatcttataaaaatttataaggctttgtaccgacattcgcactaaaaaagcgcgctctacttttatacagatgtacataaacaatactctctctatcatatttatatttctcgcagcctaaagtcaaataaactatccgacaacaaataattgagaataaatgtagcatcgtatttaccactcacactacccacagccacat

SEQ ID NO: 40509 - DNA, 263 bp, Zea mays
acccatgttagtcttagcaatcaagcaagtgtccaggtcagctctatcaaaatctaccaagtatagctgaccctctaacactcccttaaacgctattgaatcatcacttcttctaaagacagtgacacctacatcagtaaatagacaatggtaacccatttgacataattgggaaacggaaagcaagttgtaatctaatgaatcaacaagaaaaacattggaaatggaatggtcaggagatatatctattttacccaaacctt

SEQ ID NO: 40510 - DNA, 414 bp, Zea mays
tgtgaaggttcttcatccccacatgtgctaagcggcgatgccacaaccagcccatgctagtcttagcaattaagcatgcatctagaccggcctcttcttttgcaaaatcaactaagtaaagcttgccgtctaatacacccttaaaggctagtgaaccatcacttcttctaaagacagacacatctacatttgtaaaaagacaattatatcccatattgcatagttgactaacagatagcaaattgtaaccaagagactcaactaaaaacacattggagatagagtgctcattagaaattgcaattttacctaacccttttaccttgccttgattcccatcaccgaatataattgaatcttgggaatccttattcttgacgtaggaggtgaacatcttcttcttccccgtcatat

SEQ ID NO: 40511 - DNA, 399 bp, Zea mays
tgatggcttgaggacatctctctctgcaaatctgttatgtgcacattgctcgctagaagagatgtaacttactcaatcacattgcgacttgatccacagatcaaaatgtgataaacataaagacacacgataacacactctcccccaccataccgatagtgtacacacatgtcatattcattaagaacacacccatctgccgtaagagtattatcacacttttcatgccaatgcttacgtgactcggttatgccatacactgactttatcaagctgtacaccctgatatgttgaccatctcgaacaaacccttctggctgatccatatagagctactcatccaactctccatttacgaaagatgcttaacatccatctgatgaatgataagaccataag

SEQ ID NO: 40512 - DNA, 362 bp, Zea mays
  unsure (1)..(362): unsure at all n locations
tttctcttctaacatgcccaatccactactttaagtccaaaactcatgttaggagtgagttcgcgcaatttcggtgccgcacgttacccattcagaaaacgggtgtcggggtgcatacaagcacgagttgttttcaccggaaccatttcttcgtttttcgcaacgaacatgcccaatccactactctatgtccaaaactcatagttggggtggtttcgcgcaatttcgttgccgcacgtcacccattccgaaaacgggtgtcggggtgcatacaaagcatgagttttcgccaccggaaccatnttttcgtgtttcgcaacgaacatgcccaatccactactttaaggtcaaaactcattgtt

SEQ ID NO: 40513 - DNA, 379 bp, Zea mays
tctgcagccgaatcacatgttaaatccttttccctttcagtcttctgcctgatttctaagcaaaacaagagtgcacgggtctccatggtctaaatatgatggacatgaactctaaagcgtaatcacctgatggttgagttgacgagcacgagcgcgagttatgggaccagaaattggtacttgtattggtatagatgcatcaatagtgtggatgtcttcatcaattcattgagtgctttccttacatctataaacacaagaacgggagggacaatgctattgctgatgctttgtctcggcgctataccatgctgtgatcagtagattttaacattcttgggttggacactgcgaaggagccatatgttgacgacgctga

SEQ ID NO: 40514 - DNA, 323 bp, Zea mays
  unsure (1)..(323): unsure at all n locations
ccgcagacagacggtcagactgaaagaactaatcatatcctagaagatatgctgagagcctgcgcgttgcaagacatgtcaggatgggacaaaaggttaccttatgcagaattctcctacaacaatagttaccatgccagcttgaagatgtcaccgtttcatgcactctatgggcggagttgcaagactccgctgcattgtgaccagcctggagagagacaggtngttggccccgacatcttgctcgaagccgaagagaatatcaagatggttcgggagaacctgaagatagcccagtcaagacagcgaagctatgcggacag

SEQ ID NO: 40515 - DNA, 374 bp, Zea mays
  unsure (1)..(374): unsure at all n locations
ttgtacactacatgtgtatatntgtttgtacggtacgattggctgtctattgtgctcccgttaaattggttgagctcgttgatttcctggctcatttggaccatctttttagttttttggttaatattgctagccggccttgttgcttatttttgttaatattgcggcgagcaacgtatgaaatctagaacaaggaaaacacaggaaaaaaacatcacatcttatagcaactcccacagactatataaaatacattaaatcggtaaaaaagaaaaagcctgttgaagccgcatcaagcatcccacgccgctaggaaccaaccacgataggaacaatccagcgccgccaggaacaatcccacgccaccactccca

SEQ ID NO: 40516 - DNA, 412 bp, Zea mays
  unsure (1)..(412): unsure at all n locations
gacatttcacatatttattctgagatctagaatatttaggtcattcctcaacatgcaaaagcgggtcttatcaagtggcttagtgaaaatatccgctaattgatcttccgacctcactccttctaaaatgatatctcctttagcaacatgatctctaaagaagtgatgacggatatcaatgtgcttggtgcgagagtgttgacaggattattagcaattttaacagcactctcattatcacacagcaaaggtactttttctagaactacgccatagtctagaagagtttgtttcatatataaaatctgtgtgcacaagcacctgcngcaatgtattccgcttcggcagttgacaaggcaacactatnntgccttttggatgtccatgaaactagtgatctacccagcagatg

SEQ ID NO: 40517 - DNA, 309 bp, Zea mays
  unsure (1)..(309): unsure at all n locations
atcttcactgtacacaggagaaatagtaagaactgctctttcaagtaactccactgaaggtgcctttattggttcgaagaatacatccgaaggtagcggcagcccctgtgctgcagacctggcaacaaatagcatgttcatttccctcgaggaatattcttaacagaaaatccttcgaaagaagcttcgatccttcggactgtgtctagatatttttcaagcttcgggtctttagccttgcaactcttgtcaatatgacccgaaacaatctgagaatcagttntaaggatcgccctcctgatccccatc

SEQ ID NO: 40518 - DNA, 341 bp, Zea mays
taaagtttttttaaaaaacagcggtgttatatatttatgaatggagggaggaaaattcggactaataaggttccacaaaagagaacatggccacagatggtcttcacgcccacattctataaacattctgtgaacaagttcgaatgtgaaattgaaatccgacgaagctatacaacatttttttttgcaaggaaactatgtacaacatgtgaataaacacgtgtatggaatgtacggcaaagcaatgtttcttgaacttaacatttaatacttcttatatttacagaaagaaatgctagtctcgactcggaccgaaattcgcacatctggttcgtattaca

SEQ ID NO: 40519 - DNA, 434 bp, Zea mays
  unsure (1)..(434): unsure at all n locations
aaagggagagcacatgttaagactatccaatgttcattntgagaaagacaagatttgtagcgcatgccaggcgggaaagcaagttggagcccatcatccacacaagaacatcatgacgaccgacaggccgcttgagctactccacatggatntattcggcccgattgcttacataagcatcggcgggagtaagtattgtcttggaatagtggatgattattctcgcttcacttgggtattctttctgcaggaaaaatctcaaacccaagagaccttaaagggattcttgagacgggctcaaaatgagttcagcttaaggatcaagaaaattagaagcgacaacgggacggagttcaagaactctcatnatcgaaggtttcttgatgaggaaggcatcaagcatgagttctcttctcctacacccacaacaaaat

SEQ ID NO: 40520 - DNA, 475 bp, Zea mays
  unsure (1)..(475): unsure at all n locations
tatgaagattcttcatcccaacatgggctagtcggcggtgtcagagccaacccatgttagtcttagcaattaagcatgtgtcgagttcagctctatcaaaatctactaagtatagctgaccctctaacacacccttaaaagctattgaatcatcacttcttccaatcctttgaccaaaccttgttttccatccccgaatgtgattgctcgttgggaatcttggtttttctcataggagaacatccttttctcccctgtcatatggtttgtgcacccgctgtcgagtatccaacttgagcccccggatgcataaacctacaaaacaagtttagttcttgactntacgtacccaaatggttntgggtcctttggcattagacacaagaactttgggtacccaaacacaagtcttagaccccttgtgcttgccccaacatatatggcaactactttgccggattggtagtcacacata

SEQ ID NO: 40521 - DNA, 398 bp, Zea mays
  unsure (1)..(398): unsure at all n locations
tgcaagcttcggatcccttgccttgctacttttgtctacatgtccagaaataacttgataatctgttgtaagtattgcccttcttattcccattgcctttagcttctgaagccctaacagaagagcttcgtattcggcaatattatttgtacaactaanatccagctttactgcatagcaagtcctgactttagagggctcaactagaatcgtcgccgctcctacgtcgaaggttccccaagaactgtcacataatactgtccaggcttcggtatcttttgttgcttcttctccttgagcccctgacgtccaatcagcaatgaaatctgctaacactntagattgaattgaggatctatgtacataatcaatggtgaattcattaagctctgaaccta

SEQ ID NO: 40522 - DNA, 342 bp, Zea mays
tggaggcgtctattgtgtgtcgactcggcgcatactccttcttcttttcttccgctgccttgaatgcaacgggttgagcttctgatgtgtcgccaagctcgttgattttcctcgagccttctatcatgcactcaaaacttacaaaatgcccgataacttcctcgggggtcattttagtgtatctaggattaccacgaatcaattgaacttgagtgggatttataaaaatgagagatcttaaaataacatttaccacttcgtggtcgtcccacttcttgctcccgaggttgcgcacttggttcaccacagtcttgagccggttgtacatgtgttgtggctcct

SEQ ID NO: 40523 - DNA, 367 bp, Zea mays
  unsure (1)..(367): unsure at all n locations
ctgcagcttataagattanagactctagttgtattttagcttactatgagnggatccttaaaatccattgttattattaagttaagtagttacctgtatctagagttctttctattctagtcaaacacttggcctatgctagccgtcttttatcaacccttcagttcatttgattgctacgtgtaagtcagtgaccaagtcttcatatccgagaagtaacagtgatccgaatcgattaatacccagctggggatctctaaccacacgacatatgtagcacttaacccttgcatatgtcaactcgccactgggtttctcaagaccagaatgggtacacgccaaccgagagcacagatanctcaccatc

SEQ ID NO: 40524 - DNA, 385 bp, Zea mays
  unsure (1)..(385): unsure at all n locations
tcagaaaacgaagcctttatgttccagaattatttggatataactatcataagctgaaatagaagagcttagagagtatgctcaatcctgcggatacaaacctggagcacttctcttctgaggcgttgatgatgaaaaattatattgtattcgagatcaaactggagccaaagctatcggtactctgtcaaagagtatcggttnttcgaagctggagacagacatcagccgctaccgacgacaacatatcgttggtagcttattttattccaatttcaaggtgaactacttttcccttaacttttattgtttctaataatgaaaacatgtctgacgaaggttgttctcgtgcacagtatgctgttgagcaaagcccttgaaatgc

SEQ ID NO: 40525 - DNA, 397 bp, Zea mays
cttttggcctcagctcccaccgtctctattcttgttacctacctattctcgaagccagcagccagaaaggcatcaacattcctaacaacaacgagacttcaaggagtagtccgaagctcatacagtcaatagtactgtaccagaatcaaaacacatatactgagtgatatcctgattctgaaatacttttaccttctaagctattttactttttgaataaggaacaagcaatgaaaacttagttttaatttcttggaatgattgtgattctatcagaatgaaatatatcttcttcacagatttacgaagctcaaaagtcattcctaatggaatgcagagccaacataaacgaagctcaaaagtcgtcctaaaggacgcacgtaaattcgtgctaaaa

SEQ ID NO: 40526 - DNA, 439 bp, Zea mays
  unsure (1)..(439): unsure at all n locations
tattctagtttgctgactatgctagcgaggagaaacgctatgatagtctcgcttaagaagcctagctcagtaacggcatatgtacctacttaatgtgtatggtgagaggatttgttgtccgagcttgagcccacaaatacaacaagatttgcaccaaggaagaaaacacataccttctgtcagtcttgagttaagtgtggtagtgagccctacttgggcatgacgatggtcagccagtttatgagggggttagtggaacacaaaaacttgtgtgttctattggctaggtggatgtaaaagtgtgtttgtagccaacaaccttggttgaaacccctcaattatgcaaaactaagtcagatgcctgtgcattgctactatatatcacacacaggtcatagacttttgtttaataaaacacaaaaaatatgtgtnngttttg

SEQ ID NO: 40527 - DNA, 286 bp, Zea mays
gtgagtaccctaaccatgtgtataaactctctaaggcgctttatgggctcaagcaagccccaagagcatggtatgaatgccctagagatttccttattgcaaatggattcaaagtcggaaaagtcgatcctacactctttaccaaaacacttgaaaatgatttgttgtatggccaaattatgttgatgatatcatatctgggtctactaacgaatctacatgtgaagagtttagtaggatcatgacacagaaattcgagatgtctatgatggcggagttgaagtac

SEQ ID NO: 40528 - DNA, 360 bp, Zea mays
  unsure (1)..(360): unsure at all n locations
catgcaagcttctaaagggagagcacattctatgattaacaaatgggtcatttgagaaagacaggatgtgtagcgcatgccangcggagaagcaagttggagtccatcatccacacaagaacatcatgacgaccgacaggccgcttgagctactccacatggatctattcggcgccgatgcttacataagcatcggcgagagtaagcattgtcttgtaatagtggatgattattctcgcttcacttgggtgttctttttgcaggaaaaatctcaaacccaagagaccttaaagggattcttgagatgggctcaaaatgagttcggcttaaggatcaagaaaaatagaagcgacaacggga

SEQ ID NO: 40529 - DNA, 467 bp, Zea mays
actcagcttcataaaataaattgaagccaaattttaattctattattatagaatgctcccgctaaataagtgcttacttcaaaaacataattttggcctcagacgccaatttgcacatacttaggcaaatcgaaacatttctacaccttagcactttttagtatgcattgtgctacaccttatcactttttagtatgcattgtggcaagaatcaaaccatgatgctataacacacaaatgcacataatcagagttaaacaccattcagaatagtggatatatcacacgaatatatcacaggaatatcaacctaccactattcatcattaagataccacattcaactaataccaatgtatactaagacactaatttagacaatcttatagcccattaaccacatgactatctattacactatagaagcccaataattcatcgcagcggaaacactagtccatatgagc

SEQ ID NO: 40530 - DNA, 458 bp, Zea mays
  unsure (1)..(458): unsure at all n locations
tgttgtattatctttacacttgtcatctctggatcttacctggatacttatcttatgacttctctttaaaatctcccctctcctatcttagttagagagaggtgttttactcatcccccttcgatatattatcttctttaccgtgtgcaagtcttgttttaactccattctttgttgtactcatacccatgattcgtatgcacctttacctcttctctcacacccttgtttattatcacctttaaccattgtaacattgtttatctttacactaatgcttattttgaacctaccctttgaagcctncacttttccatcccagttcaagaacggtactntacctctctcgccattgattggttccccttcttttgtgcctcgcaactcttatcttaactcccatcctttgtgtgtgttggtctgtatcacctttaacccctngcatctctcaatcttta

SEQ ID NO: 40531 - DNA, 422 bp, Zea mays
  unsure (1)..(422): unsure at all n locations
tccatcaggatagccaataaggacttacgcacccaaatagccttggtcctacaatgtggtgaactcatcacctttctagcacaagagtcaaatttgggtctcctaagcatatttgaatgtattgacaaggtacgcttatgaatgttaccctttggacaaaccttgaatagatgacctttttcacggcaattatagcaaatgcggtgcttgtgcttgcaatgcatntgccatttgctttcatctctctttatggatatctttcttgatcgtgcgaggtcttgattcttcatgtgagggcatgaatcaatttcatgactcttctccttgcatgcataacaccttatatcgcttctctttgatctttctatgttgaagcacatacgtacattggtagcgcacatagcatgagcattaatcttctt

SEQ ID NO: 40532 - DNA, 396 bp, Zea mays
  unsure (1)..(396): unsure at all n locations
ctgcatcaagcatgtcaaaccctgaaacgacctataatggttgtgttccaaatcgacctgaaatgatggaagggtcaaaatagtttaattaataaacagtgctcagtgcatcaaaataatttaattaagaaacagtgttcagtgcatatatgcatatcacacaaagaaataactcttagcacagcccaacatagagaatataagaatgcatgttatttccaagcattatgtttaacatatagggtaaaaatctcttgtagaanatgtgatgcatcaataaatggagaaaagtcatccaatacatcttgaatgaatagacggtagaactaaaaaactgcagaggaatctagacaagcaaagaagattattgacaactggtattngtactccgaatta

SEQ ID NO: 40533 - DNA, 468 bp, Zea mays
  unsure (1)..(468): unsure at all n locations
ctatgaaactcaagcttgggagaattataggaatatggcaagaagactatcctatagataaggaaggttatccgagatacaaggaaggttatatcgggattacaatcaatactaaaccaaccatagcaggagttgtctaatatactctaagatgcctaatctctactactcttgaagagcaaagtgtaggcgtccacaattcacctggtgcacggttctgcctgtgccgcggatggaaggttctgcatgccccactcgaccacgcccccgccccaccctgcgcatgcccactagaatcgccgccatgacaggcgctctctctaccccgtgttaccccctctgaattcggccctagatccttggctcacgcgtgcgaattntgtctcttactctgagtcttactggcgcacgatgagggcggcgcgtcngcgcaaaagaggtccccaagcggcaagtttggtggcgtcg

SEQ ID NO: 40534 - DNA, 368 bp, Zea mays
ctttagtacttaaattcttatctactatgccattgttggttcttgagatatgcatgtggtactacacttatggggagtattcaaaactcaaattattcatgaaaacccctagtgaaaagccaaaatgcaaatattaccatttgactattttctctaaaaattaactagcctatgggcaaaatatttgaaaaattatgggaaaatatatgagggggccaatgcctgtcccaacaggtgttcttttgtgtgattataagttgggatctggtttggttaaaaattaaatagaaaaattgaaaaatttcaaaatcccctctgtctgggctgactggacagtccggtatgcaccggacactgcactgtgcact

SEQ ID NO: 40535 - DNA, 434 bp, Zea mays
ggtgaagattcttcatcccaacatgggcaagtcagcgatgctctagcctacccatattagtcttagcaactaagcaagtgtcaagttcagcttggttatcattaaaatcaactaaatatagctgaccctctaacactcctttaaatgctattgaatcatcacttctaaagacagtaacacctatatctgtaaatagacagttgtagcccattttgcataattgagaaacagaaagcaaattgtaatccaaagaatctacaagaaaaacattggaatggaatggtcaggagatatagcaattttacccaaacctttgaccacaccttgatttccatccccgaatgtgatagctcgttggggatcttcgtttttctcataagaggagaacatccttctctccccaatcatgtggtttgtgcaccttctatcgatta

SEQ ID NO: 40536 - DNA, 434 bp, Zea mays
aatcttggtcacctttatattcattttactatcacactcaaagaagatgtagggtattatacatcttgtgaccccaacctctataaaatgtctgtgtgctggtaactaaggtgcacttatatatcaacgtccctctaacatgtgctccttccataattcataaactttttctttctcggtacttagggttccttaatgtcataccatgatgacacatagaaagagataaaaaacataaataaataaacataataaaagatataataaagcgtaatggaaataaaaaacatgaaatagaggaatactaagaagaacatcacataaatactatttgactaatctaactataatacattataatacatctcatgagtactatatgaatataaaacatactattaaatatcctattttactatatgagagcacatatt

SEQ ID NO: 40537 - DNA, 464 bp, Zea mays
  unsure (1)..(464): unsure at all n locations
tcgtcgtctgaaagaaattaccctgaagaanagagacgatctcagttctccaatcttcactataaacaggggatatgttaaggattgctctttcaagaagctcgaccgaaggtgattttattgtttcaaaaaatacttccgaaggtacaggcagcccctgtgctgctgacttagccaataaatcagcgtattcattttctccacgaggaatatttttgatagagaaaccttcgaaggaagcctcaacccttcggactgtatctagatacttttcaagcttcgggtctcttgctttgtaacttttgtcaatatgatcagaaataacttgggaatcagttttaaggatggcccttctgattcccattgcctttaatttccgaagacccaaaagcagagcttcatactcggcgatgttatttgtgcaactaacatcacagtttgccgcataacaacgtttaactttg

SEQ ID NO: 40538 - DNA, 381 bp, Zea mays
  unsure (1)..(381): unsure at all n locations
tgcaagcttgaaagactgcttctgcaggagagctttctatttgatgactcgntcgagccacggagtcgctttatccgagcgcaagttacttatcacagaaagggacgagtgaggtatccgtatcccggaagcgtaggagtccctcggctcggtcagccttggctgcttacgtgtacctcgtcatttccaggatccgctttccgaagtggccaagaagcacgatagaaatgctgctaaaaagagatcctttgtcgaggaaaaattcgacgcagagggggtgctccccctcttatcccccgaaggagggtcgggccttgccgaggctatgccgaccccttcttgacaactaaactttgcgtacgtgcgaagtatatgaacaac

SEQ ID NO: 40539 - DNA, 322 bp, Zea mays
ctcaagctgctctggtcatctcttcttatccaattgggatatccttggacagtccacaaagctcatgagctctgcagaagctgctacatctacaaaggagtctattcttggtaaaggaaactcatccttctgacatgcctcgttgagggctgtgaaatcaatgcacattcttcacttcccattagcattctttaccataacagagttagccagcccctctggatatgttacttctgcgataacaacgacactgagaagactctctactttatttcatgcaccctcggctgtattatcagacaatttctgagcctctgctttt

SEQ ID NO: 40540 - DNA, 212 bp, Zea mays
cgatattcgttttggctgccttgtagactatgaagcatgccatctcattacataccttcttactgacgtatggttacatcggttttactcttgtacccacctgagagctttacttgtcgacacctggttatataacatttcgagcttgctttggctgagatgtccatgatgatgcatgacttttgccccaagtatggtgcacaaactttgtg

SEQ ID NO: 40541 - DNA, 385 bp, Zea mays
  unsure (1)..(385): unsure at all n locations
tataccttcaatgcataatgcagcctcgatctgcgccaaggatttcacatgttcgcagcctctcctctccaagatagcggctatccccctagcactcgaaaaggcgcatatgtccccacgaccactcaaaatttcttcaaaagctttggcctcgccgctgatccagtcaattggaccttcgggatctcccagtacgaagatgctttcattcaaatatgcgccgacgctggcgaaactagtcttaattgtttccacacatttcatggatttttcataacatctttcttttgaagaccgaagttctgcagntggtttctcctaatgattattncaataatcgctggcgtctcggtcagcttcggcagtcgcgccatttaatttcgct

SEQ ID NO: 40542 - DNA, 356 bp, Zea mays
  unsure (1)..(356): unsure at all n locations
cttattgcttggattgctttctccttcttattcttattcttctaagagttttgtaaagctagcaagagatacctaaatgtgtggtgatccttgtggggtcttagtgatccaagtgattaaagagaagcctcgaccggtctgtatgaccggttgagagagagaaanggttggaataaacccagcctttgtggccttctcaacgaggactagtttcttcggaaccaaacctcggtaaacaaaatccgtgttcatttgtgttgatctccacttgaatttgttccctttctttcctctctctaaaagttcctctgcacatattgatttgagttggctcccacagttatacgcactgattg

SEQ ID NO: 40543 - DNA, 421 bp, Zea mays
  unsure (1)..(421): unsure at all n locations
tgctacatgccttcttctttttctccatcgcatgaaccttactggtttactaccncacttaaaaagaatgagggtagaactcttgaatcttgtggatttgaactccttggagtacctcataacaagggtgttacggngccttcttctgctgttgctgcttgaccaggctgcggagagatgactaacacggtgttgattctgggaaaaccttcttcttatcttatctttactattttcttttctcttctcactgcctctttctttctctttgctcttcccactggaggattctatcaaagagtattaccatcacacattggaggaaaccaaagattatgaaccatgtacaacagtcttcaacccaagaatcaccaagcattgtgatctcangggccagggagtggataatggatttgctcgt

SEQ ID NO: 40544 - DNA, 406 bp, Zea mays
  unsure (1)..(406): unsure at all n locations
nctnnctgctcatcctgttcttcatgagcactcttcttatctatccattcttcttgaggcgctggggcctcatcttgagttgggggatgcaccaatgcacacgaacaaagttgatcttgctcttgtggctcctgtgggcgcacatcacctatcgccattgttcgcattgcggccgtcggaacctctacctcatctatatcatcaagatcaacttgctctcttggagagccattagttctatcatatacaacgccgctagagacttcaactaatcctgatgacttattgaagaccctatacacctttgtatttgagtcataacctactacaatgcctcctatatcttcgggagcaaatttcgaatgcctacctttgtttacaagatgaacattcgctccctatacac

SEQ ID NO: 40545 - DNA, 334 bp, Zea mays
ggaacgcgcaaatggcaaaatgtttacagtcgtcaagaagatgctcctccacgactataatggcatgtgggccgacctgttacctgaagcggtctatgctctgaacacgattgtatgcagggcgactgggttcacccctttccgccttctatatggatcagaggccatgaacccgcaagatataaaacatgggtcaccactgacagtcccgtcagccgtccccgacgtggacgagcccacttcgaatgacctcatcgacggataccgcgtctttgcactacatgctctaaaaaataccatactcatacaaagcatggcgcgatcacacagtcat

SEQ ID NO: 40546 - DNA, 347 bp, Zea mays
gccattggcccgtgaagctttccaagcccttcgacctggctaaacttcaccggaagcccgagatcaccctcgtcggtcttttgtcgcccgcccccgtgcttggactgggcacttccgtgagccattctttaatttctcgcgcacaccccttccttgatccctggtgaagctctctaacctgggtgattggacaattgtggcctatataagccggacttcttcctgctgatgagcttccccgcctgcgcacgccgaccaaccgacttcgaccattcccgacggcgacccgcacatcgtcgtgaccctcatgacctgccctatactctctggcacctcaccggagcaat

SEQ ID NO: 40547 - DNA, 299 bp, Zea mays
  unsure (1)..(299): unsure at all n locations
gagataaccgccaacaaagcgagtgaaaaagcttaacctcggtcaaacttgacaagtcttagttttaaacttttaacacttaaattcctacttgttatgcaattgttggttcttgaaatatgcatgaagtactgcactaaaggggagtattcaacactcaaatcactcatgaaaacccctagtgcaagccaaaatgcanatttcaccatttgcctattttctctaaaaattatctagcctatggcaaaatattttgaaaagtatatgatggtgccaatacctgtcccaacaagtggtat

SEQ ID NO: 40548 - DNA, 450 bp, Zea mays
  unsure (1)..(450): unsure at all n locations
tgacacactatttgaatttacataaaatttctgagatttataatatttagntcattcctcaacatgcagaagcgggtcttatcaagtggcttactgaaaatatccgctaattgatcttccgacctcactccttctaaaatgatatctcctttagcaacatgatctctaaggaagtgatgacggatatcaatgtgtttggtgcgagagtgttgtacagggttattagcaattntaacagcactctcattatcacacaacaaaggtaccttttctagaactacgccatagtctacaagagtttgtttcatatataaaatatgtgtgcaacaagcacctgcgacaatgtattccgcttccgcagttgacaacgcaacactattttgctntctggatgtccatgaaactagtgatctaccaagcagatggcatcctccagaagtacttcttcta

SEQ ID NO: 40549 - DNA, 305 bp, Zea mays
  unsure (1)..(305): unsure at all n locations
gtcgcggggatgtcgccggaactatgggcgagctcggggaagtatgcgcggtcggataatgaacggggaagacaaccgggctctgggacaggctttatagccgtggcgcgggcgtggtcatgggcggccgcgggcgcgcggtggttcatgcacgggcgtgctctgagcgcgcccccgagtgtcagcccgcgtcgaacacgtgggagcttgcttctgccatggttcaacggcggatntgaataccttagcgtgcatatcttggcanaaccactgtgtacggtctcttccctgctccatatnctacc

SEQ ID NO: 40550 - DNA, 287 bp, Zea mays
  unsure (1)..(287): unsure at all n locations
ctggaagtctntggaccagacccttcgggcgtggtagcgtcgcacagactgctgataccatgccgagtgtagtaaggccacgtcccgagcctcttccaactggtccaatgaatcttctcggctggtctggatgtttcggtcgtcgtatgactatgtcctccgggaaccgtattctaagtctgtgggtaagatagcctcggccccataaactataaagaacggcgagaaacccgtggctcggctcgtcgtcattctcagactccagaccaccgagggtagctctttca

SEQ ID NO: 40551 - DNA, 383 bp, Zea mays
  unsure (1)..(383): unsure at all n locations
gctgacaaaatgaatcatatggaattatactaatttatatacgaaggatacgaagaagttgaacatgttaattaatcttagatgtctatatcctctattttctccttcatacataacaaatttacaatcatacctttggctccttgatgtaagctagagcgaaggtggaggagaaattacatagggcaattaacgacctccaaaaaggtactntatgtagggcactgttcatctatttataggggaacgtacaacttcgtatgaaattacaaatatgtctgtaagaccagtacatatgatttacaaatgatgtgagggcaatattttcttctgcctttatcattctagatgacaccttctcctgccttcggtgatcttttata

SEQ ID NO: 40552 - DNA, 442 bp, Zea mays
  unsure (1)..(442): unsure at all n locations
actcaagctgcttctcgttatcgatgagcgaccacaacgcgaatttctttttcttactggagctgggcgggggttgaaggtggaaacatggattcatgcctggcgttggcttatgaaaatgactcacaagtctgatccatggaaaaaaatattactaagaaaaaatttcacacatgccaaatagggaatttaagtataatgccttattcaaacaaaagaaatagcctgccaagctcttctttaaataatattacctccattcaaaaatataattcaagaatattggggatacttatctactactacgcattgtgcaacggtagtaagtgagcttggagagagatgtactatatgtggtttctgtcatacatgtagacataaacacatatangtgggtgcccgtgcggtgcgacggagacaattaatatcattgatacttatg

SEQ ID NO: 40553 - DNA, 250 bp, Zea mays
  unsure (1)..(250): unsure at all n locations
attataagnnnaagaaatattctaaagcaccctaccaagaatggctcgatacaatccaagtaatgagtaatgaaattctcggaaattactccaaaaaagaggaccaactgatgacagcagcctttggcactcggtcgaaacgaaagctgaacagggtgcttgatgctataggatctgaatatgctgattatggtccactgggcggagatgctggatgcccgaagcgaataataattggcagcgctactga

SEQ ID NO: 40554 - DNA, 484 bp, Zea mays
  unsure (1)..(484): unsure at all n locations
gcttctcctggacgagtgctgcacaaaccgctgagtgcgaagctgccacatataactttatatgagcccctggcgttggtggagatagtgttgttaggtctatcaaatattgcttcagctcttcgaacgctctctgctgaattggtccccattgaaaaacttccgctgacttcagtacttcaaaaaatggtaaatttctctctgctgatctacatataaatctgttgagagatgccactcttcctctcaatctttgagcccccttctttgtacttggcggttccattcgaaggatagcttcaattttatttggattagcttcaatcccttctgttgaaactagacaaccaagaaatctcccattcttcactccgaagacacattnttctggattctactttaaaccagcctatctataaatagcgaagggtctctgcagatcagcaatgtgagtatcttgcttcgtgctctttacaatgatatc

SEQ ID NO: 40555 - DNA, 363 bp, Zea mays
  unsure (1)..(363): unsure at all n locations
gtgtatcctatgcttttctatacatctncaagctgtcttggtggtctatatgaagctggaggatattttatatacatttctcattctgttttcgctctgtgcttatggttattttcagctagaaatatggatgctagccattggtagatgtgtttgattcttttttgtcctaatcagtgccaatccttctttgactgcttactgactctctgtgattntctatctaatcgtggagagccaattgcttcatgcaagtggcacggatcattttgttcgtctactcgttttaccacatntaccttcactatgatcaagtatgtnttcctcgcttgtctataagatgaatgtgagcttatctgttga

SEQ ID NO: 40556 - DNA, 435 bp, Zea mays
  unsure (1)..(435): unsure at all n locations
tctaaagggagaacacgtgatacgtttgactaacgcgcaattctaaaaagatagaccttgtgcagcttgtcaagcaggtaaacaagtgggaggagcgcatcacagcaagaatgtgatgaccacatcaagatccctggagctgctacatatggacctcttcggacccgtcgcctatctaagcataggaggaagtaagtatggtctagttattgttgatgacttttcccgcttcacttgggtattctttttgcaggataagtctgaaacccaagggaccctcaagcgcttcctaaggagagctcanaatgagtttgagctcaaagtgaagaagataaaaagcgacaacgggtccgagttcaagaaccttcaagtggaggagtttctcgaggaggaagggatcaagcacgagttctccgctctctacacaccacaaca

SEQ ID NO: 40557 - DNA, 289 bp, Zea mays
cattttgaagatttgactccccaaccatgtgataaactctcttagcctttatgggctcttcaagccccaagagcttggatgaatgccttatagatgtccttgtcattaatggattctaagtcggtgaaaccgatcctacactctgaactaaaactcttgaatatgacttgtttgtatgccaaattatgttgatgatattatatgtgcgtctactaacgaatctacatgtgaagagtttattatgatcatgacacataaattccagatgctatgatgggggagttgagta

SEQ ID NO: 40558 - DNA, 397 bp, Zea mays
ggctagaaatttgtctttttcatgttatagcacctaaaagccagcggagataagttttagagaattacccactgttaaataatagttgtagttcaaagcaccccttctgccctaaaatttgataattatgtccagagaaaactattcactttctgatccccaccatttgagatagagaaatatacaccagtaccaagccactgtaatttttacagaattttgggaattttatctaaagcaacttgtagttcaaacccactcccaaacattaaagagaataaaagacaaggaaagaagaaataaacctcaccccaataagtctaacttgagtacttatcaattctcactaacgcttaataagaattcagtggaaccccaaaaataaacctaccactta

SEQ ID NO: 40559 - DNA, 350 bp, Zea mays
ttaattactgagcctgcacttgtacttcaagtcaaaggaatgctttttgcccacagccgaatcccatgcttttatgtgaagatatagcagagcagaacgtattgctgggatctcaattatctgaagaacagaagataactctcacaagtgtgtttgttcaacaacaaataatgtcttcgcatggttagccaacaatctctgtggtgtcaatagggacgtcattgaacattcgctcaatgttgatccattcttcatacccagaaagcagaggcctcggaaaatgtctgaagacgaagccgaaggtgctcggaatgaagtgaaaagacttcctagtgttgaagacatcagag

SEQ ID NO: 40560 - DNA, 429 bp, Zea mays
  unsure (1)..(429): unsure at all n locations
tcactacgacattattcgattctgacatattaacatatttatctcttaactttggcaagcgagatgacttttacttatagaaaacctgaatgacttactatttggaactaacagagtaatgagtatctaccttatgcattctcgggtactgtgacaatgtacacgctattgtatgtctttgcttacaatattttgtccgccattaatttcatcaatgatcaatctgtgaaaccgtaactngccagcctaacctatattaatatcatttcctatcatattctcgctctgattattcgactcgcgcggagggatcatccttcgtccaatgtcaacccagaatgccgattaatactagagatgggtggtgttctattgtaacgttaagactcttgtcattgtgtatgaatatagatcacatgtcttgatgtc

SEQ ID NO: 40561 - DNA, 374 bp, Zea mays
  unsure (1)..(374): unsure at all n locations
atcaaatggacgtgaagagtgcctttctctatggtccaatcaaagaagaagtctatgttgagcaacctcccggctntgaagacagtgagtatcctaaccatgtctataagctctctaaggcgctttatgggctcaagcaagccccaagagcatggtatgaatgccttagagattttcttatagctaatggcttcaaagtcggaaaggctgatcctacactctttaccaaaacactagagaatgaattgtttgtatgccaaatctatgttgatgatattatatttgggtctactaacgaatctacatgtgaagagtttagtaggattatgacacagaaattcgagatgtctatgatgggggagtngaagtatttc

SEQ ID NO: 40562 - DNA, 403 bp, Zea mays
tgctcagaccatcgaccatggtgttgatggtcactgcgcgactgccatctccgtaccggacttcgccacagaggagcagtccacgcgcgtccgccgggctcggtgagagaagaggtgagagaaacacagttgaactatgagatagagacgaacgattgaaagtagaaacccacggcaggggcaattttgactcttatatgataaatacatggaaacaaattataaaaaggaataatacacatcaaatggtagtataatcaattagaatatatttatagtccctttttacgaagaaaatctttcgaatggcatttgtgcaaagcgtaatgtttagagtcctaaatatgcaattatctctacatgttggtgacgctgcccgatcccccattggcccttaaatgga

SEQ ID NO: 40563 - DNA, 484 bp, Zea mays
aagcttcacatctctggactaactcagcggcaacactctttgctatagggcaatagaaaccagacttgagaactttgccaaccagagatctggatgctgcatgtattccacattgtccggcgtggatttcatccaatagctgcttcccagtagttgaggaaatacacttcatgaggactcctgtcgcaccccttctgtacagtgcaccctctatgaaggtgtagtgggccgactgtctcgcgatgcattctgctgcagacttatcatccggttcttcttcattctttatgtacctgatgataagctctcttcagtcattatggtccgactctggttggctcaacgtgatgcattcttttccctgatctgagagaatacttgcgcgtgatactttctgtagactccgggtgggacctgtgcccgactggatcctaactatgacaacgcgtatgctgctatgctgcagtctcttttcttgtgatgg

SEQ ID NO: 40564 - DNA, 180 bp, Zea mays
atcggggtcggtctcggaaaagcgggagagattgtggacgaggatgtcgagcgcgttggcgtctacgagcgcgtcggcgaaggcctggacagcggcgatgtctgaggggtcctcggagtccgtgaggtccgcgaggagtgatgcggcggcagctgcgagatcgacattgtcgtgggtgag

SEQ ID NO: 40565 - DNA, 405 bp, Zea mays
  unsure (1)..(405): unsure at all n locations
tcggctaacggcagaaaaggaaccgacttataggggagaaggctttgttggattacctttaaatcaatagtaaacataaaaggcatgaatgtaattntacacaggttgcgccctgtgcctataaatagatgaacagtacccccgtactgttcacgctgacttgtacttgttcgtgcgtcacgtttggacttttaccttctatcaagacgaaggtacaaatgtaattcaatattgttcttgtttatccatgatgatataataaatatatattgatgatgttatatgatcattcatcttatctttcatatttcatatgcttcttctttcattaacatatactgtgaagatgaaggtacttccttcatgaccttcatctgaagatcattatatcctaacggagataat

SEQ ID NO: 40566 - DNA, 462 bp, Zea mays
  unsure (1)..(462): unsure at all n locations
cttagctcaagtgggaaggcccctctttggtggcatcttcttcaatacctagatcttacaaatagaaagacatggatgacaacgacgtaccacggtcttggaatgtggatgagctttgacgatattatgtgtaaacaatgtaattttcttattnttttccctatggcacccttttcctttcaagaggggagaaaggtttttaatggggccataggttcgaattttaattttctgtttagccctatgggccaaattcccccacatgtaaaatgtaacatcaaagactgcaccatcgagtgcaagaggccatggagaagctcataagtcgtccctaatgggatgcagagctaaaatatcacctaagaggtgaagaagctacaaagtcgttcctaaagggacacagagtaagttacgaagctccatagtcgttactaagggaatgcagagctaagatgccaccta

SEQ ID NO: 40567 - DNA, 317 bp, Zea mays
ttgtatgcggtaacaagtgggaggagcacattacagcaagaatgtgatgaccacatcaagacccctggagctgctacatatggacctctttggacccgtcgcctatctaagcatatggggaagtaagtatggtttagttattgtggatgacctttcccgcttcacttgggtattattttgcacgataagtctgaaacccaagggaccctcaagcgcttcctcatgagagcttataacgagtttgagctcacagtgaaaaagataaggagcgacaatgggtccgagttcaagaaccttcaagtggaggagtaccttga

SEQ ID NO: 40568 - DNA, 310 bp, Zea mays
  unsure (1)..(310): unsure at all n locations
aagatcgacctcaccggacttcggtcttccgccgacgcgcgtggacccagctatacagtgagtctccgcccaattcctttcgctcatgtcttgtctggcatcccgtgagacctcctgacctatttgagtgaactatctcgccgtgaccaggccggtctcctcaccgtcgacgagtatccncagctgcgcgcgtggaccgaccgacttcggccatctccgacggcgttccgcacaccgttgtgatccccgcgaccttcccttcattctcgaccactttaccggaacagtctcgccgccggaagcccctccg

SEQ ID NO: 40569 - DNA, 447 bp, Zea mays
tatcaagattcacagactctctttgcagaaaagcttactatgagtggatcctctaaaattcattttacttatcaggtcaagtagttacctgtatctagatttcttttatcctatatcaagcacttggcctatactagccatcttttatcatcccttcagtttgctggattgctacgtgtaagttagtgaccaagtcttcatgttcgagaagtaacggcgatccgaatcgattaatacctacctggtgatctccaaccacacgacatatgtagcacttaacccttgcatatgtcaactcgccaccgcgtttctcaagactagaatgggttcacgccaaccgagtgcacaaatactccaccgtccaacctcttgccacggagggtgcacgatactctcgccatctctccactctcattgcgtggtgggccttctggtaatggtccgatc

SEQ ID NO: 40570 - DNA, 456 bp, Zea mays
  unsure (1)..(456): unsure at all n locations
gctgtcatgctatcgctacactgtgtatctatattagcccacaataatgattcttgaataaggcatgcacccaatccttacgtattccatacatcttgttgagagtaatggtatcgtgcaaatggaaatcttcaagtagcattgaccatgcagtctcaaactctaactcagtcaaaggatgatgtattatagattggaaccttgtcttaaagtccatttcctcaaaccttgcatacaactcgtttagaaaaggcttttacctatttngcacatgccatagacacaaccgatgtattgtgtgtgggaaaaccctctcgagtgctactggcattgcaggatcttgatctgcattcatagatgtcacaactatatgaatcttattccatgttagatagataataatatcatatttaaaacatattttatgtatacacacttcctgcattattatcagtc

SEQ ID NO: 40571 - DNA, 430 bp, Zea mays
tacttctagccatcttccggcagacagtattattcttgttgtgtgggaggcagtataagaagtcatcttcatctttgccattgaatactaaggcccctttcggatacttcagttctcgggcatagtgattagcttcaaaaatctcttcttcaaataatctcttccccgaagcatgtcgtataatataatcatgtattttggaagatgcttctggggcaacagtgccagtttcttcactcaaaatttgatctgccatttctgttttttcagcttccaaggatttcaccttggcgggctctgaaagcccggcttcagtttcagactgtggctttgaagcttccgcgtccaaggtttcaatgtgcatatccgaaatttaacaactatctttggagttgtgcttgaagattgattgtctctaaacatctaacac

SEQ ID NO: 40572 - DNA, 348 bp, Zea mays
gctcgctctctctcttgcggcacttatgtggatttgtttggtctaaatcctgtgtataggagggattaatgaatagaggtggttgggagggcttgaatatgtcaactataagacttggagtgttgcttgggctcccacccttgaagtggtcggctggggtggtatttatagccaccaaccaaattgtatccgttggagaaggctgctggcgatggacgcacccgacagttcggtgcgccgccacgtcatcttgtcgttatggcttggagctggtcgaccgctggaggctttgtcctcatgcggcactgaacaatccggtgccacaccggacagtccggggcccctctg

SEQ ID NO: 40573 - DNA, 402 bp, Zea mays
  unsure (1)..(402): unsure at all n locations
agcttcttcacgcgtcagaagataaagtgcatgtcgacacctctgtgacagngttgcaagtggtntcacgtcttatggcaatgaatgcaaagtataacttctctaataattgctatatcgatataatcaatctgattattgatctcatcccatcgaaccataagatggcaaaagacttatacccagctaaaaagattgtgtccggtcttggcatgaatgataagaagattgatgcgtgcgaagagaatgcatgttgttctggaaagaatatgaagtggccacccattgtcagaaatgcggtaaatcaagatatgcggaggtactaatagaggatggagctacttttgctacaaacgttggcagttaacagcttctatacattcncatcactccaaggcttaa

SEQ ID NO: 40574 - DNA, 502 bp, Zea mays
  unsure (1)..(502): unsure at all n locations
gttagagggagaacacgtgataggcttaactaatgtgcaattcganaaagatatatcttgtgcagcttgtggagcaggcgaacaggtgggaagctctcatcacaccaaaaatgtgatgaccacatcaagacctttggagatgcttcacatggacctctttggacccgtcgcctatctaagtataagaggaagtaagtatgatcttgttatagttgatgacttttcccgcttcacttgggtattctttttgcaggataaatctgatacccaagggaccctcaagcgctttctaaggagagctctaaacgagtttgagctcaaggtgaaaaagataaggagcgacaatgggtccgagttcaagaaccttcaagtggaggagtaccttgaggaggaagggatcaagcacgaagtcttcgctctctacacaccacagcaaaatggtgtggtagagaggaagaacatgacgcctatatacatggcgaggacgatgcttggagagttc

SEQ ID NO: 40575 - DNA, 451 bp, Zea mays
  unsure (1)..(451): unsure at all n locations
gcttgngaagattcttcataccaacatgggctattttttatgccagagccaacccatgttagtcttagcaattaagcatgtgttgagttcagctctattaanatccactaagtatagctgaccctctaacagacccttaaatgctattgaatcatcacttcttctaaagacagcgacacatatatcagtaaaaagacagttgtagcccattcgacataaatgggaaacagaaagcaagttgtaatctaatgaatcaacaagaaacacatcggaaatggaatggtcangtgatatatcaattttacccaaacctttgaccaacccttgatntacatctccgaatgtgatagctcgttggggatctttgttttctcatatgaagagaacattcctgtctccacggcatgtggttgtgccgccgtgctatattcaactgagccccggatgctaa

SEQ ID NO: 40576 - DNA, 497 bp, Zea mays
  unsure (1)..(497): unsure at all n locations
tggtgccaatggagaagcagacatccttgaagtcttggctatcanactgcttgtcgttgtcaactgttagttcggacggtactccgaagcggcaaacaatgttttgccaaaagaacctttgggcagttgttgatgttattgtggaaacaacccttgcctcgatccatttggtgaagtactcgacagcgacgaaggcgaacttaaggttcccctgagcggtgggcaggggcccgacaatgtccaggccctatcgctggagaggccatgtgtgggcaatcagctttgtatactgcgaggggctgcctgaccgaggagaanacttctggcaggcttcgcaggaccttatgacccgatttgcggcgcagatcattgcgggccagtaaataccttggcgaatcaccttatcagctacggcccttggccctgcttgtgagccgcacgtgccactgtggacttcgcgtaggatctgaatgccttccttttccgtgacgcactta

SEQ ID NO: 40577 - DNA, 410 bp, Zea mays
  unsure (1)..(410): unsure at all n locations
agcttgtgaaaattcttcatcgcaacatgggctattctgcgatgccagagccatcccatattagtcttagcaattaagcaagtatcgagttcatctctattaaaatcaactaagtatagctgaccctctaatactcccttaaatgctaccgaatcatcacttcttctaaagacagtaacacctatatccgtaaaaagacagttgtgacccattttgcataattgagaaactgaaagcaaactgtaatctaaagaatctacaagataaatattggaaatggaatggttaggtgatatagaaatcttaccaagtcttttgaccaaaccttgatttccatccccgaatgtgatagctctttggggatcatcatttntctcgtaagaggagaacatccatcttctccctgcatg

SEQ ID NO: 40578 - DNA, 478 bp, Zea mays
aactaagcttttctttatcatcatcaaccttaacatagaaccattccgatttccaccctgctgtccatttgcttcgggagctgatcacaggatacttcgtagttttccgataagcaaaattatagcaaccaaaattgtcatgtaatccatcctttctagcctttgtctgatagtgcagttcatgaactcggcaaaagctgtccgcaaacggttccaccgcctggcttcggagtgcccagatataaacactaagcctcacaataacgttaggggttagctggtgaaaatagattccgaaattcttcagtatctctgcaataatcccatgaagggggaatcttaatccagcctttatgaagcttctaaaaataacaatttcatctttctccggctttggggtagtctcttctctcccgaagcgtaatagcttcttttgatcttcagtaaaatagcctgactttaccatcttggacagatc

SEQ ID NO: 40579 - DNA, 306 bp, Zea mays
  unsure (1)..(306): unsure at all n locations
aaagaccgctntggtagaagagcttccgatcttgaagacttgttcggtccacggagtcgctttatccgaacgcgagttacttatcgcagaaggcgatgagtgaggtatccttatcccggaggcgtaagagtcccttggctcggtcagccttggctgcttacgtgtactccgtcgtttccaggatccgctttccgaagtagtcaagaagcacgatagaaattctgctaaaaagagatccttttttcgaggaaaaattcgacgcagatggggtctccccccttttagccctcgagggaaggtcgggct

SEQ ID NO: 40580 - DNA, 411 bp, Zea mays
  unsure (1)..(411): unsure at all n locations
ntaggcttggccgcttgggttatccgttagaataagctctttttggtgggctgggaggatgagaataagctgttggtcatatctccattaactgtagtctccactttccatctgtgcctacagtagccggccaccatggaccaatggggtagcgaaacgcgtcctgacgtaagcaatcgtcatctcgacgggggagtggtcactgacagccggcccgggagggatattatagcctttacctgttggtcgagcagtgaggcggngagccaagccatggtatacccaccctctcaagcgcaccagtaggtgctgtgccatcagatcctncacgggccacaacttccaatcgctctctctatctctctctatctctcttctcaccgagaatttgttccgatcctcttatgggta

SEQ ID NO: 40581 - DNA, 249 bp, Zea mays
ctaccacacttgaagcatgagcgcttcccctggctctggtcctgctctgatgtcccttgcgacctttaagcaccggcttgaagcttttgatgatgagagccatctctttattattaaatacggccgcctcaatctgtgccaccctgctaagtagagcctccttgcttcgcgtggccatgagagcaaagggtcgcggctcgttgatccgaccatataaggcgtgcgccacgcaactcgccttcttgatca

SEQ ID NO: 40582 - DNA, 475 bp, Zea mays
  unsure (1)..(475): unsure at all n locations
ctcagcttcgcatggccactctctatagttggaaacactttgaaagccaaaaattcttgcactaagtccctagtgccaatgtgctctgtgataaccctaaattcaaccaacgcaatttgggttggaccctctggtgtcatattgcacggnggtctagtctcttcgaagatcaactctaacggactctgaaccagcttctccttatcatcgtcaactttgacgtagaaccattcagatttccagccagctggccacttgcttcggtaactgatcactacaaattttgtagtcttgcggtatgcaaaattgtagcagccgaagttttcatgtaacccatctcctctagccttggtctgataatgcagctcgtgcactcggcagaaaccttcgtcaaatggttccaccccttggcatcgaagagcccacatgtanacgctaagcctaacgatagcgttaggaagtagctaatgaaagt

SEQ ID NO: 40583 - DNA, 439 bp, Zea mays
taaaatatcatgtgcatggacaacaacactgtcatttgactgttcaaggggaaagtcatacgggttcttccgtgcatgcagtattgaaagagctgagccaggaattgctgcttcttcaaaatcatatggaaggtcacaagggttcctcctgggcactgcaataggaggtacctgtgcacggaagcgtgacatatcatctaaacttgtaccagaaccagaactatgaacatctatcaagttgttatcgatttcaaatgccatgttcttccatgatcttcgtctagccatcaaaattttcaacctgcggttgctttctatctcagaagtatcaagatccatcagattctttttatcatctgctgccaaagaaatgcagcttctaccatcatttcctctccgctcacatattttacatcatgcataccctatattatatcat

SEQ ID NO: 40584 - DNA, 468 bp, Zea mays
  unsure (1)..(468): unsure at all n locations
actaagctcgtgaggttcttcatacncacatgtgctaagcggcgatgccacagttctgtccatgncagtcttagccattaagcatgcatctagaccagcctcttcttttgcaaaatcaactaaataaagattgccgtctaatacacccttaaaagctagtgaaccatcactttttctaaaaacagacacatctacatttgtaaacagacagntatatcccatattgcacaattgactaacagatagtaaattatatcctagtgactctactaaaaacacattagagatagagtgctcattagaaattgcaattntacctaaccctcttaccttgccttgattcccatcaccgaatacaatagaatgctgggaatccttatttttgacgtatgaggtgaacatctttttctcctccgcatatggtttggcatncgctgcgataatccacttgaacccggagcataacct

SEQ ID NO: 40585 - DNA, 378 bp, Zea mays
  unsure (1)..(378): unsure at all n locations
tgcaagctgcattgcatgtataaattcttgtatttcatctaaggcttgtctaacctaggtgagataaccgccaacaaagcgagtgaaaaagcttaactcggatcaaacttgacaagtcttagttttaagcttttagcacttaaattcttactttttatgcaattgttggttcttgaaatatgcatgaggtactgcacttatggggagtattcaaaactcaaatcactcatgataacccctagtgcaagccaaaatgcaaatttcaccatttgcctantttctctaaaaaatatctagcctatggcaaaatatcttgaaaaatatgagaaaatatatgagggtgccaatacctgtcccaacaagtgttattttgtgtgt

SEQ ID NO: 40586 - DNA, 475 bp, Zea mays
  unsure (1)..(475): unsure at all n locations
tgtggtacaagaacgaaagtgngagcgctgntgtttttctgatcttgtatgtggatgacatattattgattgggaatgacattcctatgctggagtccgtcaaggcttcactgaaaaagagtttttctatgaaggacttatgggaagcagcatatattttgggcataaggatctatagagataggtcgaagaggcttataggattaagtcaagatacgtacattgacaaggttttgaaacggttcaacatggaacagtccaagaaaggtttcatacctatgtcacatggtaaacaccttagccagatgcaatgtcctgcgacggctaatgagcgagagcgcatgagtaaggtaccatacgcctcagcgattggatcaatcatgtatgccatgataagtacacgcccacgatgttcatacgctataagtgctacgagtagataccacgctgatccacgtgacgatcactggacagc

SEQ ID NO: 40587 - DNA, 153 bp, Zea mays
ccccatccttgaaaaatattttttttggggaacgatttgttaaaaagcctcacaacgaggatctaattcacgagagcacattaaaatactataaatagtgtgaagaaatgtcgggattttttttcaaaatctatgaggccctgcttcgagtat

SEQ ID NO: 40588 - DNA, 373 bp, Zea mays
ctgtaaactgcttgccagagacaactgttagctcggacggtactcccaagcggcaaacaatgttttgcacaaaaatatttgggccgtctttgatgttattgtagaaatagccctcgcttccatccatttggcgaagcattctaccgctaccaaggcgaacttgatgtttccctgagcggtgggcaggggcccgacaatgtccaggccccatcgctggagaggccatgtatgggcaatcagctttgtatactttgaggggctgcctgaccgatgagaaaacttctggcatgcttcgcgagaccttgtgacccgatttgcggcgcagatcattgcgggccagtaaaaacacttggcggatcaccttggcagctat

SEQ ID NO: 40589 - DNA, 245 bp, Zea mays
gctagtcacgaaccaaccttatgggatatcctggccagcgacttgttctgtacccactctatttgttgtggaaaccattgttctacaattgatagacggactaagctactattcaggaatgtactcttgcttgccaccatcaactgtagtcttactgggggtagaagaacaaaatagctcaatggcacaatatgtcccttaagtccaatggcaagggatctgaagtgtaactggtggctgtagaa

SEQ ID NO: 40590 - DNA, 312 bp, Zea mays
gacttgtgtcccggatgctgagtgtattccacaatgtccaccatggacctcatctagaaagtcgctttccaatagatgagagaatgcatctcatgaagacgcctgatcaccccttcggctgcatatttgtcgcctgggtcctcttcattttttatatatgcgatgatcgggcttctccagcattagagtctgactctgtgtgttcacgatttacactcttctgcctgtccattgagatgcttggctgtggcatttctttacaaagactccaggtgggacctgagttatactggatcctactttgactataca

SEQ ID NO: 40591 - DNA, 332 bp, Zea mays
  unsure (1)..(332): unsure at all n locations
ttagcaatgaaacatgtgtcgagctcaactctatcaaaatctactaagtatagctgaccctctaacacacccttaaatgctattgaatcatcacttcttctaaagacagtgacacctatatcagttaaaagacaggtgtagcccatttgacataattgggaaacagaaagcaagttgtaatctaatgaatcaacaagaaaaacattggaaatggaatggtcaggtgaaatagcaattttacccaaacctttgaccaacccttgatttccatccccanatgtgatagctcgttggggatctttgtttttctcatatgaggagaacatcctttt

SEQ ID NO: 40592 - DNA, 450 bp, Zea mays
  unsure (1)..(450): unsure at all n locations
gacactatgaatactaagcttctaagggagaacacgtgataggttcgactaacgtgcaattcgaanaaaatagaccttgtgcagcttgtcaagcaggtaaacaagtgggaggagcacatcacagcaagaatgtgatgaccacttcaagacccctggagctgctgcatatggacctcttcggacccgtcgcctatctgagtatatgaggaagtaagtatggtctagttattgttgatgacttttcccgcttcacttgggtgttctttttgcaggataagtctgaaacccaagggaccctcaagcgctctctcaggagagctcaaaatgagtntgagctcaaggtgaagaagataaggagcgacaacgggtccgagttcaagaaccttcaagtggaggaagttcttgaagaggaaggaatcaagcacgagttcttcgctctctacacaccac

SEQ ID NO: 40593 - DNA, 398 bp, Zea mays
  unsure (1)..(398): unsure at all n locations
cacaagccagcttgaagtcatgtttggttctattctaatccatatgaattgagagagattaaagaagtttcaatctctaataaattaaaatctatgtcaattcatatcaataccatgccatccatatgaatttaaaataatggaacaagccatgctatggcaagtgggcctgacggacacttacatcgagggccaggatgatgcccggtcacgaacttgtgataagatggaggcgtggcttcatggaatcatgatgggagaagaaaagaggaaaaccaagaagaaaagaaaattgaaaattaaaaatctgaanaatgctggaccctacgtgttaatggcttattctattttaatgtctcaaaaataaaatagaatatagtcattcgatgtcatccatt

SEQ ID NO: 40594 - DNA, 480 bp, Zea mays
  unsure (1)..(480): unsure at all n locations
actaagcttagttctacaaggatattcatcattgggctctctccatatatgacaaatgtgtgcgcatataatctagtaaagtgcatagcatcaggccaatgttgtcaagcagagatttttatatgcagagatgtataatcgagcccgttttatcatttcccatggtttacccaattacctcatactgctctaaaattgggtatcgatttatgcaacattnttagatataataattttgagatagaacttataacaacaatcaattatttatagtgttgtgacacccagatttaaggacaaaatctatatgtgtcatggtttcgaaaaccgggagacaataagatttgtgttcgatggggaatgcgtangtgtcatgatgtgatgtttggcgtgggtggcatgatgggacatgaaacaacctgttctccgtattctgcgcangtgacatgatgtggtggctagccgnctcatctgttactg

SEQ ID NO: 40595 - DNA, 377 bp, Zea mays
gcttatgaagattcttcatcccaacatgggctattcggcgatgccagagccaacccatgttagtcttagcaattaagcatgtgtcgagttcacctctatcaaaatctaccaagtatagttgaccctctaacacacccttaaatgctattgaatcatcacttcttctaaagacagtgacacctaaattagtgaatagtcagttgtaacccattttgcataattgagatacagaaagcaaattgtaatctaatgaatcaacaagaaaaacattggaaatggaatggtcaggggatatatgctatttacccaaacctttgaccaaaccttgattccatccccgaatgtgatatgcttgtggggatcctgtgttttctcgt

SEQ ID NO: 40596 - DNA, 497 bp, Zea mays
  unsure (1)..(497): unsure at all n locations
tcggactcctccctganatctcgctgctaatgggtatgctggctcccttctggctgctggcctcgtgaatatgcacgttgtagtggtggtggaggtggaggctgttgccaagatgtctatggctgactaaccgaagcaacagacgctgcagaatggttacccacataatctggtatgtagggtgagtgatacgaagcagtatgcatgacctgcttcggctggttctgctgggttgtagcttctgctatttccttttgtttctgaatggtgacatggcacatccttgtagtatggcccttgtcctcaccacagaataagcaataaattttcctaggttgatccccaaacctttctccgaagcccctggcgcctctgcctcttggagctagcggccgaagatagctttgttgctgccccgaagcttgcaaggagtattgtggtctctgttgttgacttcctctgtcgtcactctgggtggagtggattgacctgacatg

SEQ ID NO: 40597 - DNA, 369 bp, Zea mays
  unsure (1)..(369): unsure at all n locations
cttctcaagtggaggttcaatagggatntctgatattcanatttctggaatttagcccttgagccaaagaccgagcgtgttcaccatgatccctagctcatatcctaatgaccccattgacaaaaatgtgcctaaataacctttctacctcatatcaaaagatggcatcgggacgcgtgccttggacacatcaaacccgggatcttctctctgtgcgcggcagtgagacgaacccgatttctcccctctctatctcttgatccagttagcaaaacctgcaagcctccacacacaaacgacaaaggaatgttaggggaagagatctctcaatgggatcatgggcataatctcaaagatttggagccgatc

SEQ ID NO: 40598 - DNA, 462 bp, Zea mays
  unsure (1)..(462): unsure at all n locations
tctagattcttcctgattagcttgaccttcctttccgctttagtcactaagtcacgtccaaaaacttcactttctccaggctgagaccaaatgaggggtgttcgacaccttcttccatataaggcttcgaaaggtgccatctttacgctggattggtaactgttattataagcaaaatctgccaaagagaggtacttatcccagntcttgccagaatcaattgcacaaacccttatcatatcttcaagaatttgatttaccctttcggtctgaccatcagtctgtgggtggtaagctgaacttcttattagcttggttcccacagactctcgcagttgttcccaaaatctagcaacaaatagggctcctcggtcagagacaatggttcggggcaatccatgcaaacacatgattcgaacgatgtacaactctgcatacttatgaagcctatgagtggtgtgc

SEQ ID NO: 40599 - DNA, 407 bp, Zea mays
gcttcggcatgacagcagataaagggaaccttctttatatgaaaagccaagctagaccctgaagagttactatagagttacttataaatgtaaagggcatcaatgtaattttacacgggctgcgtctcgtgcctataaataggtgaacagtactcccgtactgttcacgctgacttggcatttgcttttcgcatcacgtctgtacctttacttttcatcaatccgaaggtacatttataattcgttattacgaatttgataataaaaataagttgatgataatatctgtattattattcgtatttcatatatgagttcttcttcgtcatctattgaacttacgaaggtcttttccttcgtaacctttgtccaaaaatcattacatccgaatggacataatgtcttta

SEQ ID NO: 40600 - DNA, 470 bp, Zea mays
  unsure (1)..(470): unsure at all n locations
tcagcagcacaacagtgcaatagtaataaatgttgtggtaacttcacacctacccgtttgtttatatagtgctgcacgtgggaaggtgaatcatcaagccgctagcacacgctgaatagtcgcttgcaaccactgaacgttggaccatagtgcgcgagaaggtgaatcaccagatcgcgcgtacccgtcgtatggtgggaccgcctcgcactcggaatatttaatcgtttctcgacaacgagctcagggaaggtgtttttcggaccttcggcattccgaagcctaagagaatttttcaccagtcgagctcattacaaaaaacaatctggcatcgtgaaggggctactgttggnggtctgcttcgtcgccgaatgtcctgtgagaagaaacacctttggaagatcaaaacagaagcggtgtcgaagctaccgatcanggagcttcgtagtgtaccttcagatgcaccgact

SEQ ID NO: 40601 - DNA, 475 bp, Zea mays
  unsure (1)..(475): unsure at all n locations
catgtcaaatagtcagtatccatacttctgatagaaatagtgatgtccacccattcatgttagtagctgctccatttgaatataatccttccgttgttagtggactaccatgttcaaggccactttgatttaaaatggacgtgttcttcaacagtgtggaaacacgtaaaattttaggtgtgcagtgattaatatgagttatgatagtaattctgttntttcttttcaatgtttaatacttaaaagtacttcacaagcagcttacacatttgcaagtaacaacagctaactcattctacacttatggattcagtctgtccactgctttttagtctggtcatagtcgacagtagcagctaacaatgtccacagttgtgctaccatttcgaatcagtgtcagccatcaaactttgttntattaanagtacacctactatatgcaggggtgatatatctcaaatatnagtatcatata

SEQ ID NO: 40602 - DNA, 444 bp, Zea mays
  unsure (1)..(444): unsure at all n locations
gacacttgaatactaactggatgtcatgaaagtggtgggtcattttatatccctcaaccatcacctggncgntggcacctttctgtcacacgcagatagtccatggacctagttcggatggtccacccctataagatcaatggctgaatcgcaacggtcagttacaacggctatatcaacgactataaccgcattaaatgtgtcctcagatgtcaaataaagcttaacgtggatggttcggtcgtgccttcggactatctgcgtggagattataattcattntactgaacccgacaccttcgggttggattgaccttcaatgggtggacggtccacacatgaggacagacgatccgcatttggtgccagacaatattcacttatctttcagacgcgccatagtaggaatgtgcatttggcatagttcctatccaaagtccattg

SEQ ID NO: 40603 - DNA, 382 bp, Zea mays
  unsure (1)..(382): unsure at all n locations
catgtgctatacagcgatgccacagccagcccatgctagtcttagcaattaagcatgcatctagaccggcctcttccttcaaaaaatcaactaaataaagtttgtcgtctagtacacccttaatagctaatgaaccatcactccttctaaagatagacacatctacatttgtaataagcaattataccccatattacataattgactaacggacaacaagttatacccgagcgattaaaccaagaacacattagatatggaatgctcggatgaaatagctatctttcctagtcctttaaccttgccttgattctcgtcaccaaatatgaatgaatcttgngaatctttgttcttgacataggaggtgaacatcttcttcttc

SEQ ID NO: 40604 - DNA, 412 bp, Zea mays
  unsure (1)..(412): unsure at all n locations
tctacaaattatcatgttcttcatacaacaaatcctcttgcttttctaacagtatattcctatcattcaaggcatcaatcaattcattaattntgtctaccttagttctatctaatcccttgaataagcatgagtaatctatctcatcatcatcactagactcatcctcacttgaagaagcataagtactagtattaggagtgcttactttcttctcccttgccatgaggcaagtatgacgctcgttggggaagagggatgacttgttgaaggcagtggcggcgagtccctcattgtcggagtcggacgaggagcagtccgaatcccactccttgccaagatgagcctcgccctttgccttcttatagntcttctttttctccctcttgttccttgatcctgatcactatca

SEQ ID NO: 40605 - DNA, 304 bp, Zea mays
actcctccttcttttcttctgtcgccttgaatgcgacaggttgagcttcggatgtggagggttcgtcaagctcgttgattttcctcgagccttcgatcatgcactcaaaacttacaaaatgcccgattacttcctcggaggtcattttagtatatctaggattaccacgaattaatcgaacttgagtagggttaaggaaaataagagatcttagaataaccttaaccacttcgtggtcatcccactctacgctcccgaggttgcgcacttggttcaccaaagtcttgagccggttgtacatgtg

SEQ ID NO: 40606 - DNA, 414 bp, Zea mays
  unsure (1)..(414): unsure at all n locations
cgtgaaggttcttcatccncacatgtgctaagcggcgatgccacagccagcccatgctagtcttagctattaagcatgcatctagaccggcctcttcttttgcaaaatcaactaaataaagtttgccgtctaatacacccttaaaagctaatgaaccatcgcttcttctaaagacagacacatctatatttgtaaatagacaattatatcccatatgacataattgactcacagatagcagattgtatccaagactctctactaaaaatacattagagatagaatgctcattagaaatcgcaatnttacctaaaccttttaccttgccttgattcccatcaccgaatacaattgaatcttgtgaatctttattcttgacgtaggaggtgaacatcttcttctccnccgtcatat

SEQ ID NO: 40607 - DNA, 394 bp, Zea mays
ctcttcttggttataactcaacctgacgattctgagttcagaggtgaggattgccttatattgggttagccaatgcattcccaaaattacatctatattctggcccttcacaacaatcattgtatcaagaaagttccgtccggccattgatactggcactccataagccacttctttagtataaatgtgtcccccacgtgaatgaattttaaatccctcttttgactcatgacatgcaatatgatgttgctccacaaatgtcttgctaatgaaggcatgcgaagcaccagaatcatatagaattattgcatggtgactggccactggatacgtacccatcataaccggatatctctccggtgtggaggcactcgcgtatatatactcgcccgtt

SEQ ID NO: 40608 - DNA, 419 bp, Zea mays
  unsure (1)..(419): unsure at all n locations
agctttgagcaacaggacttggattgttgtatccagagnaccctcacagtacaggtgcttgttgaatacctgaagctctgggagtcacttgatggtgttaccttgcaaccttcagtttcagatcagcatgcgatgaaagacgattattgaagaggtggactggcaaggctaatgtaaaagaagaaggcagtactggttcagaagatagagagcggattgaaaatgtgggttgaaaatgtggtaaactgtgtcataagatgtgcatctactgggatatcatctattgtctatagacatgagctgcaactgcaaccatattaattatcagctgctagagggcanactggcaagatagaacatattaacttaacacaatcatacttacagaaacatatagagctctctaagatctgtgacta

SEQ ID NO: 40609 - DNA, 472 bp, Zea mays
atctatctgtttctgagagagaatattgttccactacaacaatgataaaacttgatcgagaacaggggcaccacacgccctcaattgagtcgacactgagctcacgacattctgcaaatataagaattagcaagggaatcatctatcgacgaagataaagcatggtaaggatcaactcacctgacaggtagaaaggaacaaaggaaatcccaaggccacaggtgttgagttaccatcaaacggcggtacactggtagaggcaatatcgatagcaggtttgagcaccagagaaggattgaaacttatgctcagggtgacgcctattggaatctctgcttcaacaacacgcaacagatccttaacacccggattactgacctctgaagtagccgagccagcaagagcagtacgaagatcatgactcatcaccacaacttcctcagactgaaccagtgatgacacaacatgaaca

SEQ ID NO: 40610 - DNA, 407 bp, Zea mays
  unsure (1)..(407): unsure at all n locations
agctggctggacgtactgcgactgcttntatggcgctgcgcggcacacctgcggcggtcgcatgcttcgcggactgcatagtgattcgacgatgaccggtgaatctcccttgcagncttgcagttgcaggtcgacacaatcggaaaattaataggtagaaagtgtccgtacgtgccgggtatctatgtntgctcagagctgactggctgaagaggtcgagccattttcttttcaccttcagttttcagacgatcggcgacgcatgtcatcgacaggaccaccagatgccggcggacgcccgatcgagatgtagcgcgggtctgccggagatcctggcccaatctggattgtaactgtttcccttcattatgcatcgatcttcagacgaaccatgttattatatgcgt

SEQ ID NO: 40611 - DNA, 184 bp, Zea mays
taatggaagggaggcttcttacggaagaaagaagtaacttgttgaacccactattgcggtgatcataacccactataaacgacttgactctctattaatgctcacgcacgaggaactacaactttgactacagggtgggccctctacgatcgacatgggaaaatgtaccccttgtatgggtcac

SEQ ID NO: 40612 - DNA, 183 bp, Zea mays
  unsure (1)..(183): unsure at all n locations
tctaaagggagaacacgtgataggtctaactaatgttcaattcgaanaagatagaccttgtgcagcttgtcaagcagggaaacaggtgggaggctctcatcacaccaaaaatgtgatgacgacatcaagacccttggagatgctgcatatggacctttttggacccgtcgcctatctgagcat

SEQ ID NO: 40613 - DNA, 219 bp, Zea mays
tcttcacgcgaagcacgtgaatagtctgacgaatgttcacatggcgaaatatacaccatgggcatcgtgtcttgctcggaaacaagtgggatgctctccctacaccttgaatgtgaagacgacactgagaccttttgagaggctggatagtggacccttgttgatactttaactaattgagcatttgtgaagaatgatggtccatgattgttgactact

SEQ ID NO: 40614 - DNA, 372 bp, Zea mays
  unsure (1)..(372): unsure at all n locations
atcctcagagtcacctggggcgtgcaagcttaatgtcatgtggttgacaaaccatatgatctgtggtactgactactgcgtaattgtgtgtgatatcggataacagaaaactatagggaaattctggactcacatgctntgccattccgaagtcagccaatttcactacaccgttaatatcaactaacaaatttgcccctttgatatccctgcaagagcagaactatttacatacatctgaacattctcagcataatgcaagaactcgggctggaggtggggggagtcggcccgcatgtcacagtgccatcgtagcccatgtgagaatgaccgcgaccaacgcgaagccttatacctgtgctttatcatggg

SEQ ID NO: 40615 - DNA, 447 bp, Zea mays
gacctatgaaactaagcttcgctcatgcaaagagaaccacttaggaggtttagttatctattcctccacagactgggattaagtcaatagtgaatatgaacggcatgaatgttattttacgcacgctgcgtcctatgcctataaatagatgaacagtacccctgtactgttcacgctgactgggattcactcgtgcgtcacgcttgaactttgtcttctgtcaagccgaagggataaatgtgatttaatatcgttcctatccattcatgactatcgaaaaaggatataaaaatgatgttataagattattcactgtatatctcatgtttcatatacttcttctttctaccgatgtaaactgcgatgatgaatgtatgtccttcataacctttgtccgaagatcgttatatcctaagggaaataacgcttccaacgatgaaagttatt

SEQ ID NO: 40616 - DNA, 503 bp, Zea mays
  unsure (1)..(503): unsure at all n locations
cctatgagtcacctgacgcatgcaagcttatagattctctaatatgaccaagggcttctaatgaagagtccatccgaggcacatcaggtcaatccacaactccactcaaagtgatgacaaaggaagtcagttttagaggtcacaatatacctcacaatcttcggggcaacaacaaagctccttcaggccaccagctccaaggggcataggcgccatgggcttcggaggaaggtttggngatcagcctagaaagatttactgcttattctgtggtgaggataagggccatactacaagaatgtgccatgccaccattcagaaacaaaaggaaatagcacaagtcgaagcccggcagaaccagccgaagcaagtcttacacactgcttcgtgtcactcttcttacatactagagtatgtgaacaatcatcctgcagcttctgtccttcngctagtcattcacaggcctttctggcacaacttcttgccttccgcaccactataac

SEQ ID NO: 40617 - DNA, 472 bp, Zea mays
  unsure (1)..(472): unsure at all n locations
ngggggtgtttgattcctttgttggaaaccaataccatccttaatgccattgtgtctcccattataaagcatgcttctagcaaatttaaacttttcattttcaagttcatgctcggcaattatagcatttaatgtagctatgtgatcattttgttgtttaatcatagcaatgtgatcatcaatagcttcaacattaacatctttacatctagtgcaaatggaaacatgtccaacagtagatgcagatgatttgctaatattcaattcatcaatcttagcatttagactagcattctcatctctaagacatgaaattgaatcattgcaaatgctaagttccctagttaagttttcacatttttctacttctatatcataagcatttttcaacttaacaatttttttgttctccttaacgagcaagtcctcttggcattccaagagatcatncttctcgttaatggtctctatt

SEQ ID NO: 40618 - DNA, 441 bp, Zea mays
  unsure (1)..(441): unsure at all n locations
aagcgtgctgaggactactttaccatgtattcggcggatcctattgtgtggatcaaggtgtccacaatgcattttacgggcgctgctgcaaggtggctccaatctgttgagggacagttgagccatctttcttggatggacttttgccatatgattcgagatcgctttggcaaggatcaacatgctgtcctccatagacacgtgttccatattacgcaaaccagtagtgtggctgattatgcggaccgcttttcacagcttggtgataagttgcgtgcgtattgtccgaattctgatcctctttataatatcatgccgtttgttgatggtcttacagacgatattaaatctcgggttatggttcaacgtcctcgggatttggatactggtctttgtctcgctcanntgcttgaggacgcgagcgacaaaaggagggatact

SEQ ID NO: 40619 - DNA, 426 bp, Zea mays
ttgatattgtgatgattcaaatgttagtcttagaaatgattatgctaatttaattgctaagattgacaaattgaatgcttctctttctagccttaaaattgaaaatgaaaaattgattgctaaggctaaggatttagatgtttgcaatgcttccatttccaatcttagagatgagaatgatattttgcatgctaagattgttgaattaaatacttgcaaaccctctacatcttccgttgagcatgttactatttgtactaaatgtagagatattaatgttgatgctattcatgatcacctagccttaattaaacaacaaaatgatcacatagctcaacttaatgccaaaattcatgagcatgacttataaaatgaaaattttaaatttgctataagcatgctctatagtgggagacgccttggcat

SEQ ID NO: 40620 - DNA, 446 bp, Zea mays
agcttggtgccaatggaaaaacagaaatccttgatatcttgattgtcaaactgcttgccgttgtcaactgttagctcggacggtactccgaagcggcaaacaatgttctgccaaaagaatttttgggcagtctttgatgtgattgtggacacagccctcgcttcaatccacttggtgaagtattcgacggctacgaaggcgaacttgaggttcccctgagcggtgggcaagggcccgacgatgtccaggccccagcgctgaagaggccatgtatgggcgaccagctttgtgtattgcgaggggttgcctgaccgaggagagaacttctggcaggcttcgcaggaccttgcgactcgatttgcggcgcagatcattgcaggccagtaaaacccttgtcggatcaccttatcagccaggggcccttggccccgcgtgcgagccgcaag

SEQ ID NO: 40621 - DNA, 471 bp, Zea mays
  unsure (1)..(471): unsure at all n locations
tctaaagggagaacacattntaggattaacaaatgttcattntgagaaagacaggatttgtagtgcatgccaggcaggaaagcaggttggcactcatcatccacacaagaacatcatgacgaccgacaggccgcttgagctactccacatggatctattcggcccgattgcttacataagcatcagcgggagtaagtactgtctagttattgtggatgattattctcgcttcacttgggtattctttttacaggaaaaatctcaaacccaagagactttaaagggattcttgagacgggctcaaaatgagttcggcttaaggatcaagaaaataagaagcgacaacgggacggagttcaagaactctcaaatcgaaggcttccttgaggaggagggcatcaagcatgagttctcttctccctacacgccacaacaaaatggtgtagtggagaggaagaatcgaactctatt

SEQ ID NO: 40622 - DNA, 460 bp, Zea mays
  unsure (1)..(460): unsure at all n locations
agcttggtgccaatggaaaaacagaaatccttgaaatcttgattgtcaaactgcttgccgttgtcaactgttagctcggacggtactccgaagcggcaaacaatgttctgccaaaagaatttttgggcagtctttgatgtgattgtggacacagccctcgcttcaatccacttggtgaagtattcgacggctacgaaggcgaacttgaggttcccctgagcggtgggcaagggcccgacgatgtctatgccccagcgctgaagaggccatgtatgggcgaccagctttgtgtattgcgaggggttgcctgaccgaggagagaacttctggcaggcttcgcaggaccttgcgactcgatttgcggcgcagatcattgcangccagtaaaacccttgtcggatcaccttagcagccagggcccttggccccgcgtgcgagccgcaagttccactgtggacct

SEQ ID NO: 40623 - DNA, 474 bp, Zea mays
  unsure (1)..(474): unsure at all n locations
ntgtgtgtccctagagaaaagggattagcttctagccttctaccaatagtgatatggtagcttggttacacgagaagcatatcgaggttaataactaataataatcatgcactgcactgcactgcatgcaattgttatcgcttgcttcattgtgtagatgtaggctggcagtgtgtcatagcaatagaagtaggctggcaaattggcaatgtgtcataaaatagctgtacatgctaccatgttcatggactgtattctcagtcatcaagttgtcccctattgccattatacacagattataaattgatatgttatagatgcaccactttattcaaaataaacatatgtactcgctattactcttgttagggaaaggtcgagaattgaggaaaaaagagatctttatgcgcactcactgctcagttcctatcanagtaaaaatggtaaagacttctaatttcattgttatatttg

SEQ ID NO: 40624 - DNA, 340 bp, Zea mays
  unsure (1)..(340): unsure at all n locations
agcgttatcacatggacgtgataagtgcctttctgacggaccaatcgatgaagaggtctatgttgatcacgctcccggctatgaagacagtgagtatcctaaccatgttcatatgctctctaaggcgcattatgggctcacagcaagccccacgagcgtggtatgaatgccttagagactttcttattgcaacgcgttatagtcggatggccgatgctacactctntactataactgttgatatgaccgcttgatgccaatctatgacatgatatttatctgcgctactaacagctcttggagagaattagtcgatcttgaccagaagtcagatgtctat

SEQ ID NO: 40625 - DNA, 413 bp, Zea mays
acctgcattacggacctatgaaactcagcttggatatccgaccgcttggacatagccctcacattaccggaatactcacacccagagatgtggtttctatctctttagtgacacaccaataatccttgatgcacctccaattaaaggcctcatttgtgtcgctggaactaaatctcattctaataatcctaatttatacacagactacataagttaatgccccgcttggatcctcggattgaatcccattctaattatagaaattgatgcacatatgaatgaagctgattccattttatacagagaatatctagctatgaatattagcctgatcgttcgagtatttatgtgctacaagacggaggagagagccgaagatcatcctataagttgccgagtataaacaaattcta

SEQ ID NO: 40626 - DNA, 283 bp, Zea mays
caccaaacgagtgaaaaaacctaactcggatcaaacctgacaaggcttaattttaaggttttaacacttaaaatcttacttactatgccattggtgggtcttgaaatatgcttgaagtactgcacttatggggagtattcaaaactcaaaacactcatgaaaacccctagtgcaaggcccaaatgcacatttcaccatttgcctattttctctaaaaattatctagcctatggcaaaatattttgaaaattatgagaaaatatatgagggtgccaatacctgt

SEQ ID NO: 40627 - DNA, 463 bp, Zea mays
tcaagtgatttacagttccatgttgaatcattcccaggttcaacttctccatttcttggcataatataatgtcagaagtcttcatcgtaagacaatgacagaaagccttgtgtaacaccctaaagttcaatcctgtgaaaatgagaaaaattctccaggttttttttaaaatcaaaatacctttccttaaagatattcataatttcgaagttactactctcaaaattaatatatatttttttactaaaataaaaagacacctagataaattaaataaccttggattgaaattatatagaagaattatgattaaaccatttttttatatataatctacactacaaattatatttccctaaaaattcatgagatgtaaactattctctatttcatcatgtataaaagaactaaaataaaacaaatataaatatacatatatatatatagctttgcattcatgctg

SEQ ID NO: 40628 - DNA, 461 bp, Zea mays
agcttgtgccatttatcttagacttgtaactgaataggtgcacactcttctttcattagacactactttggtgtggcattcacttcattgtaattttctaattcacatgtgtcatctatgcatcatatcctaagctccttatatttctattagcattgtaacaatctacactgctttgacgtccttgttttacttgtatacattgaatacattcattctaaagatatttttgatatttctttggccaccttcatgtccgatctattcgcctaaaatatgcgtctactaaatttttttaactattatccataaatggatgctagaagctaaaaaaactaacttgtactattgcatctctaaatatatgcctaaattatttcataagacatgaaacacacgaccattatacagatttcacaaatatttctcttataatgaggagtcatcactttgtactagtc

SEQ ID NO: 40629 - DNA, 396 bp, Zea mays
gtgtctccgctacgtgtatgctggtgagatcttttctttatgctcaggatcgggcgacggtggtttcctgtgatggctctccgccgcagatgggcgagcgccgccgtctcacgcaacgagtgggggaagaaagcggtgggccgtggatctcgggatggatgggtatgatggctctgcgcatatcccttctcgcactggttaaccggaaccatatgatcgggagcgatcgggtgcgattggatctagggtaaattgaatcccatccgctggcgtgatatcggtcggtgagggctgtgcctggactggattgccggcattcgtggatattacatctaaccgtcaaaatgaaatatacgttatatgctgcgacctaatctggaccgcccggttgtaatc

SEQ ID NO: 40630 - DNA, 87 bp, Zea mays
ctatcaatcctcaaagatttatcgtcgcggactgacccataggtggtttgaactggtctatcttaaactcatctgatctccgggacc

SEQ ID NO: 40631 - DNA, 437 bp, Zea mays
  unsure (1)..(437): unsure at all n locations
tcngccttcggaggccgaatgtcgaaatgaacgaatccgtctaatagtgccaaagagccttcggcgttgtctgctctcttataggaacaagggacttagtacaagagcatattgtcttcacggtgtggccgcttgcggagaaatgggaaatgccacacgaaatcgttaaaaaggccgacgaaggaggacttgtcaggtttaagtacacttttaaatatgaagataaatttattgagccacacgatgagtggttgaaaagcattgacaatttaagtgatgagctgcttgggacatactcgaatgccgaagatactgcgatgtcaacagccttcggaggccgcaaaaagaaaaggctgaatccggtatttgatgccatcggggatgtttatgctgactattgttaccccattcgaaggcagaacaggaagaacataacc

SEQ ID NO: 40632 - DNA, 417 bp, Zea mays
  unsure (1)..(417): unsure at all n locations
agcttatgaagattcttcatcccaacatggtctattcggcggtgccagagccaacccatgttagtcttatcaattaagcaagcgttgagtccagctctatcaaaatctaccaagtatagctgaccctctaacactcccttcaatgctattgaatcatcacttcttctaaagacagagacacctacatcagtgaataaacagttgtagcccatctgacataattgtgaaacacaaagcaaattgtaatctatagaatctacaagaaaaacattggaaatagaatggtcaggagatatagctantttaccaagacctttgaccaaaccttgatttacatccccaaatgtgataactcgttgggaatcttggcttttctcgtaagaggagaacatacttcttctccctgtcatgtgggtt

SEQ ID NO: 40633 - DNA, 463 bp, Zea mays
tctcctgtcttgaataatctatagtattccagacagtctatttagaatagttgtagatgaacttatgtacctgagaaatgatcaactaggcaaactagttagtccacatggtttgtgatagacgtcaaacaccaaaatcgattatagaaaatgaataagctcatttccctttcactaactagtttgcctagttgttatttatcttaggtgcataaagttcaacacaaaccaacaaagaaaataagttgggaactcaacaaggtttggagcaaagacaagcattggtgctgacagtggtgcaccggacgttgttcggtgttgtaagaccagtaaggcgaccagagggggtgaatgggagccaatcgaatttttgtctccaaacactgaaaaataacaccttactctaatagagatgaagtaagtgcacaaaacatatacacatcagcgaacgactgatctcatg

SEQ ID NO: 40634 - DNA, 309 bp, Zea mays
aacggaataacgaaaccgtgctcgccggagttcattcccccggcggcgcacgtggaccgggtaaatcattgagccattttccgattcaatgcatagatagcctctgcatcaccccatgaagctcaccgtgccgttggattggaataagtcgccgtggtttggccggtacacccgccgccgacaaggacacccgcctgcgcgcgtggactgagcgattccggccatccccgccggcgagccgtacgtcgttgtgaccgtcagaaccttcccgagctaaccctacccctcgccggacttctctcgtcgccg

SEQ ID NO: 40635 - DNA, 464 bp, Zea mays
  unsure (1)..(464): unsure at all n locations
ngagtcagtcatcctgcagagcataattgatgctcaaagaaatgatgagggaatgaaacacattcatgagaaaatagaggccggtaaagccaactgcttcagaaaagatgatcaaggtgttgtatggtttaacaacggcatagttgtgcctaaaaatgatgagatccgccaacaaattctagatgaagcacatcttagtcgctattctattcatcccagaagcactaagatgtatcatgatctaaaacagcattattggtggacaaagatgaagattgaaatcgcacgctatgtggcaagatgtgacacttgtagacgtgtcaaagccatacatatgaagactgctgtttcattacaatccttacctataccaacatggaaatgggaggatataagcatggactctattgtgggattgcccaggaccgtaagggggtatgaatctatttgggttatcattgatc

SEQ ID NO: 40636 - DNA, 474 bp, Zea mays
  unsure (1)..(474): unsure at all n locations
agcttgtgcggtagcactactattgtcgattaaatatcaacaaacgctacgacagtatcacgaccgccacgtacgagggagaactttggaagtagggtacctcatgcttaggttggtacagagcaacaaggatcgacacaattgtcaccatgcaccatgggaagagttgttcgtaatttgagaagttcttcgaccggacacctacaagctgaaagacgaatgaggcaagacgctcgccaatgcgtggaacatctagcaattacgatgattatatccttaacaaaaccctaacattaacattcgtacccgatatatattgtggtccgaccctactgtagcgaaaccaggggtgagccccagttgggactgatggaagacgatgatgtantaggccgaccccaatgacaagtagcgcatgtcctataaatctaataatgtgcctctgtaaacccacctgctgacatttcctttttt

SEQ ID NO: 40637 - DNA, 464 bp, Zea mays
tataaaactaagctgggaatagtgccgaagcttcctggaggccatcaagacagcatacagtaccttctccaactctgtatgatttttctttgacaaactaagaacctcggaaacaaaatatattggggcctgcctcttgacttgaccatcaagcttctcctggacaagcgctgcacttaccgctgagtgcgaagctgccacatataataataaaggagcccctggtattggtggagtcaatgttgttagatctatcaaatactgtttcaactcttcaaaagccttctgctggattggtccccattgaaagacttcggctgacttcagcacttcgaagaatggtaagtttctctctgctgatctggatatgaatctattgagagatgccaatcttcctgtcaatctttgagcccccttctttgtagttggtggctccatccgaaagatagcttcaattttacttg

SEQ ID NO: 40638 - DNA, 473 bp, Zea mays
  unsure (1)..(473): unsure at all n locations
agcttgtgaagattcttcatcccaacatggtcaagttgacgatgccagagccagcccatattagtcttagcaattaaacaagtgtctagctcagcttgattatcattaaaatccactaaatatagctgactatctaacactctcttaaatgctattgaatcatcacttcttctaaagacagtaacacctatatgagtgaatagacaattgtagcccattttacacaattgagaaacaaaaagcaaattgtaatacaaggaatctacaagaaaaacattggaaatagaatggtcagaagatatagctattttacccaatcctttgaccaaaccttgatttccatccccgaatgtgatagctctntggggatcttcattnttctcatangaggagaacattattttctncccagtcatgtggtttgtgcacccgctatcgattatccaacttgaaccaccggatgcataaaccta

SEQ ID NO: 40639 - DNA, 458 bp, Zea mays
  unsure (1)..(458): unsure at all n locations
ggctcagtccaccccttgctctacgccggaggttaggacttgtctttggttttttacctggcttgatgtgatgtggcttaccgaggtagcatagcggaaggtttggccatcatggtgtcgcttagcgtgggcgtctttgacaggacgtgatgtgtcccacctgccatgttgtgtgttggttgtgttgtcgggcgcttaatttgccctgctagcttcctgtgcttttcacgagacggttcgcatcttgcaaaatcgtagcgccttccgtctgactcccgaggctggcacgatggatctttctgtgtggtctgggggccacttcccgagggttgcctgngctccctgttcatacaaaatagagcggaaggcttctgggtctggtcacacttatcgtgctcaagccttcatcttattcttcattanggagcctcgcgttcctctgatttcttctctccatt

SEQ ID NO: 40640 - DNA, 523 bp, Zea mays
  unsure (1)..(523): unsure at all n locations
cttaagtcacctgcggctgcagcttanactggagcttcgtctgattctgagagtcaagcttcggctatggataaaaattgtggcagcaaaatagtgcaaatagcaatgaatgctgtggtaacttcacacctactcgtctgtttatatagtgatgcacgtaagaaggtgaatcgccaggatttttacactatgcggacagccgcttgcactcgctgcgcagtggaccgcagagatcaaacagtagctctgcaaggtgggaccgctacgcgctcggaaactgaatcgtttctcgacaacgagctcagggaaggtgttttttggaccttcggcttcccgaagtttaagagactnttttcacggatcaagctcgttacgaaaaacgatctagcgccgcgaaaggggctactgttgggactacgcttcgtcgctgaaggtcttgtaggaagaagcagcttctgctgaagctgtccgcatgagatgaccgaaggatcctattcatgaagcttcggaattatacaccgac

SEQ ID NO: 40641 - DNA, 452 bp, Zea mays
  unsure (1)..(452): unsure at all n locations
gacacataaaactcagctagccagatactcacataagccgcaatcaagcttctatgttttgacttaatgggaattctgaatttcagaattctgaaattcagaccttgagccaaagatcagggatgttcaccttgatccctaactcgaatcctaatggtcccattgacaaaattgtgtctaactaacccctctgtcgtgtgccagaagatggcattgggacgcgagccctanacacgacaaaaccttggatttgcctccggtttgggcagggagacagaccggatttcctggctccatatctctgcaaccagtaggcaaaatcctatgacccccacacaagattggtagcttgtatggaggagaagaggttttgtgcactgaccaatgcgagagcacgctcggatgagcgaccacacgcgccagaacttgtgcagaacgcacgggcacacgtg

SEQ ID NO: 40642 - DNA, 542 bp, Zea mays
agcttgagcagagcatatacaccatagaatgtatattacggcacagtccatacctttcctttcgcttctgcaagaaccgggcgagcgacgctctccgagcttgagggacagctagaacaaacaaccaaacaaacaaaacacgggtaaatcaaacgtgctgcacgaacgggttcagcacttgcaagcgagcgagaggtatgtatatagctagtacctcttggcgtaacagctgtagcagcacttgcagctgccaactgccgggacgacgagactgtctggctggtaggagcagcagcaggcttggaagcgcaagcctctgtagcgcaatgagacgtgctcctggaaagagccacggcttgcggcacgacgatgcggaagaagcatcagaggaggcacgactgctatggagcactgcaatatgcgcatgaagaagtgacgagaaaagaacaacggctgctatgagagacgtaacggatgtagaccacgtgagtatctgtggtttaatcaaagaaggtaccaagtatggagtgtcctgttcgttt

SEQ ID NO: 40643 - DNA, 457 bp, Zea mays
ctcaagcttgaaggactgcttcggcaggagagcttccgaacgtgatgactcgttcggtcctcggagtcgctttatctgagcgcaagtgacttatcgcagaaggtgatgagtgatgtatccgtatcccggaggcgtatgagtccctcggctcggtcagccttggcttcttacgtgtacctcgtcgtttccaggatccgctttccaaagtggtcaagaagcacgaaagatatcctgctaaaaagagatccttgttcgaggaaaaattcgatgcagagggggtctccccccttttagcccccgagggagggtcaggctttgtcgaagctatgccgacccttccttgacgactaaacttctcgtatgtgcgaggtatatgaaccactttgaaaacatcttataggcttaagccaccgtacctgtttatagttctaaccgttgccgatatctcgccttgatt

SEQ ID NO: 40644 - DNA, 432 bp, Zea mays
agctcacccatgaagaggcgtgtgaccagttatgtggttctcgtcagcaggcctacatcgacacggtccttagtcgacttaaacgaagacactacaccgagactctcttctcatgcaagtcacccgcccggtctcagctttatcatttaaaaacccaaagtctggccctggcagaggtacatcttatccgatgttgaacccatcacggccatgacggatccaccatcaagttttatttctgaaaacaccctacccactataaagcataccttttgttttaaaacaaaacatttgtcttttaaagcacgactaatcatcatacaaccttctaataaaacaggtaatcaaggaatgggtaacagttcctaggaacgaaatgctacaattggttatcacacaatgctaataactaatgcatcatattcagcgata

SEQ ID NO: 40645 - DNA, 470 bp, Zea mays
tggaccagtatttgtgatgggtcttaaggaaccttcatctcatggtagctgtcgttctagtcgcaccatccaaagtcagaacttgtgcagtaaaattagacttcagttgcacaaataatatttcagagtgcgaagcccttctcttggggcttcaaaacttaaggaaatgggtataagaagggcgatcctcaagactgattcacaagttatctcgggtcatgtggacaaaagcagtaaggcaagagacacgaagcttgaaaagtatctaaatgcagttcgaaggttggaagcctcttttgaaggtttctctgtaaagaatatcccaaggggagacaatgaacatgcagtcttattagccaaattagcggcacatgggctcccactaccttcggaagtattttttgagacaatataagcacctttcagtcgaactcatggaaagtgcggagctcaaaattcactggtacata

SEQ ID NO: 40646 - DNA, 452 bp, Zea mays
agcttacctgactcttcttctccactggctctatattggttacccactctgcgcatctgctaggtctaataaaattagcttctagccgccggcggatctcgtccttgattcgtgggagaagatccggaggaaatgttctatctttctgctcgaaaggtctgaaaccacacttaataggtagccgattgtcgatgatctctcggtttattccacgcatctcagtgtaattccacgcacaacaatctgaatatcccttccatagaccgatcatttcatttctaggatcaacctccacggtcttgtttacaaaagtcgaccttggagctttaccatcttctatgtcaatctcctccaaaggatcggtcgatgtaaacacctgttctacttatcaaggctccgaaccctctatcatgtccccccaaatgaacagatatctttggtgatgtgatttc

SEQ ID NO: 40647 - DNA, 407 bp, Zea mays
cttagaaactcagctcggattggtaatttggcgcaacaggcattcatgttgtgtgactcacccacgcggcgacgaaaaattagatggctgcggacgactgttggagaagcaaaactctatgtcgacgtgtcgcgctcgcgaacgaacctgttctgcggacggtgaagctcgaaagcacagcagctcggcggactgagggacagtgacaggcggacagcggctcggccggcgaacggatgcacaacacatcccaaggggctaccgctcggtggacggggagggacagggacagcggctctgtgcctctgctgacggcggaaggcacaccggcggcctggccgctgactgggtgtgtcctcagccaagttaaccgcttaccgtatgcaccaatggaacctgactggtgt

SEQ ID NO: 40648 - DNA, 259 bp, Zea mays
tggatcctcatattactaaccaactgagttatcaaaaggcaatgcttttgtaacattattacccagtttgctaataatctttaatttgaagcttacataagaggactcattactatataatcgaactcctctctactgttggcgtctacttgaattaataaccaatttttttgtcgaagcactcttgcactttatcatataggccaaacctaggaacttctggtccttgctatagacgaagttataacaacatcaagtt

SEQ ID NO: 40649 - DNA, 467 bp, Zea mays
  unsure (1)..(467): unsure at all n locations
cggaactataaaactcagctctagtttgngcttggcttgaaaaagtttttttttgtctcgaagatgtctgaagataagaaggctgctgctgagatgaaactgagcctccacgaagagaaaaacttggggtttcttatagcgatgtcaaagaccaatacagaaaaaatcaccaaggagattctggaaggtttgtctgaagatactggtgacagtgacagttatgatgtggacagtggtggtgaagactccgaagatcgtccctggcgaccacaccattcagtttatggtaaatcaactatcaaagagaatcatctggtcaacatgagaggaaggtatttccgggatttgtccattgtgagggccgaccaaggggaaaaaacttgtccacaccctgaatagaatgaagtcgtagtgtaccgaagctttttgaaagctggactgcgcattcccttgagcagcttcgtcgt

SEQ ID NO: 40650 - DNA, 424 bp, Zea mays
  unsure (1)..(424): unsure at all n locations
agcttgtgatttatccaatttagaacaagctccatctcttaacttagattntctatggataaactcaacacaagagatgacattagtagcacaagcactagtttcttatttagcaaccctttatatgtggaagacaagtgtgttgctaaaatagagaaacatcataatatggactaaatttccttgaaccctcatgcacaatattntgaatgacatggataatatgcatggttattcaatgaagtctaaagggatgacttaatccatattatgatgagtgtctaatatagaagaatcaaatccaaattaactagatagagaatacatcacatacatttggattgttcaccatatgataatattcatacaacttccaattagacctttatttcataatcaacatctaatgtatatcctcaagtgc

SEQ ID NO: 40651 - DNA, 401 bp, Zea mays
tgtgtacatctatgtactaatatacccctagcctcgagttaggagtgagagataacagacggtagtagctgaacatatggtgcccgcgccggagactcgcccgcgccgccgtctgcattccgcgcggccatctgccacatggtgcccacgcccccgtctgaacaaggatttggtgcccgtgtgcccccgtctgaacaaggagctcgatccacgcagctgcagtcgccgctttactcgaagccaacggacgtgccggagaatccaggtccctgatcgccgactccatctcgcagcacctccagcagtcgaccgacgaggtagccctcttctactgcgacctcctggcggcgttctcctcgcgcgggctcaaggaccgggcaacggagtttcacttggagcta

SEQ ID NO: 40652 - DNA, 344 bp, Zea mays
  unsure (1)..(344): unsure at all n locations
ggatcctctgagtcacctgangctgcagcttctaagggaaacacgtgattgtcttccaatgtacatttcaaaaaagatagaccttgtgcagcttgtcaagcatgtaaacatgtgggaggagctcatcacagcaagaatgtgatgaccacttcaagacctctggagctgatgcatatggacctcttcggacccgtcgcctatctaagcatatgaggaagtaagtatggtctagttattgttgatgacttttctcgcttcacgtgggtgttctttttgcaggataagtctgaaacccaagggaccctcaagcgctttctcaggagagctcaatatgagtttgagct

SEQ ID NO: 40653 - DNA, 446 bp, Zea mays
taacttgattagatctaaccctgtgtcttctgctactgttctttctcgcgcctccgctctctacgaggcaagttgcttgtattataacttgtactctttccttctttatctctattccttattcctttcttccttctctgtacaatttcctgccctcggacctctttttgaaaaaaaaactttactgtatgggttttctcctacattttcaggtcacaaaataaaataaaatgataaaatatattttgctgaaacaattgttaattgtggattctgttaaagcattatactttggtaacatggattgtaggaatctacaaaatctatggcagaacgagattctgaattaaactagaggaatatgtggtttcttgactaaacacaagatgttgttctgttgacaagaactactaattatttcgtcttggttacatctactttctatg

SEQ ID NO: 40654 - DNA, 231 bp, Zea mays
  unsure (1)..(231): unsure at all n locations
gctccctctgcaagactttctgcgtaaaatatttcttgcggagaacatgaacatgctgatttattacccaagncagccgcacaggggctgccctcaccatcggaagcatctttcgaaacaataaaagcaccttcggccgaactttttgaaacgaaactccttaatctatcttctgtctatagcgaagactcgggaactgagatcactttctttctttctgggcactttctt

SEQ ID NO: 40655 - DNA, 457 bp, Zea mays
tgaagccatggtaagtagataggccaataatatacgatttgactcaagcctaactacgggtgcataggtttcaccgaaatccaaacctttgactagggagtatcctttggccacaagttgagctttgttccttgtcaccgcaccatgctcgtcttgcttggtgcggaacacccacttggtccctacaacattttgattaggacgtggaaccaaatgccatacctcgctcctagcgaagatgttgagctcctcttgcattgccaccacccaatccgaatcttgaagtgcttcctctaccctgtgtggctcaataaaggaaacaaaatagtaatgctcacaaaaatgtgccacacgagatctaatagttacccccttatgaatgtcgccgatgatggtgttgacggcgcgatctcattggattgtctggaggacccttggtgtggcggccttgcttttt

SEQ ID NO: 40656 - DNA, 437 bp, Zea mays
  unsure (1)..(437): unsure at all n locations
ttaagtcacctgctgcatgcaagcttcagccagtacgttcccatatattaattgtccacaaagtatattctcatactatattntttttcacagatgttagtactttttattcaaattagttaaaataagaatttgacacatggtaattataaaacttaatttattcatggacgtaaggattattattaatcatgtatttttcgtggacaccatatattacttcctattttgaaaatcgatgttgacggtaagtggccagtaattatattacttccgtctattttgtaatataggatcattacaactaccactgcctgccgcgaccaatgggaagcgaaacaagaatgacgagaaggatgacaatctagtgagtctgtcctactttgagtcctatgagagagtgaatttcacgtgctaaaatcttgctgcttttgttt

SEQ ID NO: 40657 - DNA, 344 bp, Zea mays
tctgcttcttgggtcgcaccgaagggtcaatccctcttctgtgttcgattatggctcggctgactccgaccagatcgagggcagaccacgcgaagacatctttattcttggccaggcagcagagaagtttctcttcttcaagtgacgtgaggtcttcgctgatagttacagtctgcttgggcgtggcctgatcgagggggacagtcttggtcccgtcttggcactgcaactgtgccttgtcgtgctgcttgtcggttgggctagccggcgcaaggacttcgcgctgggtcgtgagacagtgtacatttctctgaccgggcacgaagtcccgctctatgttgcgc

SEQ ID NO: 40658 - DNA, 374 bp, Zea mays
  unsure (1)..(374): unsure at all n locations
agcttgctccatacctgactganactgcctattctgaagagatgaagnggacaccgtgcgtagcgctngaccagccggcttgaatccactcaaatcgccatcaagattgcgacgagaagccctcttcatagccttcanagtagaatcctcatctacatgagtagatccatctttagataaggcaataaagcgtgcacttctacgaacaaaagcaggtgagtctgaattgtttttgtataatggaaaaaaattcgaacctttccccggaggcatcagtttcttctccggtgggatgggcaattttacttgccgcgccacaatatgcgaacatgcgtcaatcttacttacatcatccatcgggcgggccttccttt

SEQ ID NO: 40659 - DNA, 369 bp, Zea mays
  unsure (1)..(369): unsure at all n locations
tctgaggtagcgtatgggagaacaagtcgatgtggcgctcgcgtgaacagntgatagcgagcggtcgccactccgccaaatgttcgcatgctatattttaccagaagttntagtgtttcttgttggagcaatattggacatgtaaaacctctatatttanggtacatggtgtttacagtctcttgttggagtgtccccaccacttatttatcggctacaggagcacgctacacgctgcagcggtgccccctatggtgcatgccaaatcatggtaagcttctctctccctccagatgatgttggactctaccgagcggtcgccaacttggtagtctccgcggttatggcgaggttggcaacaaatggtat

SEQ ID NO: 40660 - DNA, 403 bp, Zea mays
accggatcttaagtcaccgctgcatgcagctgaatggtaaagatgatctctattttactaaggctcggctaaagcttggctcctcaagctcggcgcctttcgctcaaactaaaccacatgtgataataggtcacagatgtaggtactgaggagaaacccctaactacacctggggttgtataatataaaacatgccttgtatccacacaacctcacccatattggaccatagagctgacggtctcccaccggctcctatttatataataagggaggagatagcccgcgggctccgtgataaactcggaataaaaatggtccctgcgggctgcatatctgtgaccttatgacagccaattgaccatacccatcccataggacccgatcccatctccaaaatttt

SEQ ID NO: 40661 - DNA, 466 bp, Zea mays
  unsure (1)..(466): unsure at all n locations
ntactggacatgacaccaccacaatcatcctgagatgtttaaaggctaacaagaagactcaccacattgaacagattcatctcgcgatcaactgagcggagtctccccttcctcataacgctgcatggagcaaaagacttcgcttggggcccaaatcaggctgcagccttcaaatcattaaagtagtatttattcgaactaacaatattgaccaacccagaccacgcttcacccctcctactatacattgcagcctcacacagcccatgcatgtaaggcccaaaatgtgtataagaaaaaaattaataataataaaataaatatatgaagaaatgaaatagtaaattcagatacctcacattatatttgagtattgaaaattgagggctgaattttgaaaaccacgaattattttataaaagatataatagagaaggtttctattccactaaatgattatgcatat

SEQ ID NO: 40662 - DNA, 455 bp, Zea mays
  unsure (1)..(455): unsure at all n locations
agctntgtcatgtgaaagacaattaccttgtaggaaagatataatttcagtcctccaatcttcactatgtactggagaaataacaagtactgctctctccatgagttcaaccgaaggtgcctttattgtttcaaaaaatacttccgaaggtagagggagcccctgagccgccgatttggctaggaaatctgcatgctaattttcacctcttggaatattcttgacagaaaaaccttcgaaagaggcctccaaccttcaaactgtatccagatatttttcaagcttcggatctcttgccttgctactcttgtctacatggccagaaatgacttgggaatcagttttcaggatggcccttcttattcccattgcccttaacttccgaagccccaacagaagtgcttcgtactcancaatattatttgtgcaactgaagtcaagctttgctgcataac

SEQ ID NO: 40663 - DNA, 470 bp, Zea mays
  unsure (1)..(470): unsure at all n locations
tgttagaaaagctgatggtggggtaactntgttacaattccattatgtggaaaaggtattgagtcgctttggttttagtgactgtgatcctgctccaacaccttatgaccctagcatgctattgagaaaggatcggagaatagcaagggatcaattgacatactcccagatcattggctcgctcatgtaccttgcaagcgcaacaaggccagacatctcttatgctgtgagtaagctgagtcgctttgtgtcgaaaccaggagatgatcactggcgtgctcttgagagagtattgcggtacttgaaaggtactatgacatacggtattcattatactggaaacccaaaagtgctggaaggctattgtgatgccaactggattnttgatgctgatgagctntatgccacaagcggatatgtgtttctgtttggagggtggcgctgttcctggaagtcttgcaagcagacta

SEQ ID NO: 40664 - DNA, 531 bp, Zea mays
  unsure (1)..(531): unsure at all n locations
agtcacctgangctgcaagcttggaatcaaccactcccatatctatattatagccttcggcactccgaagtgacaaacatatatttgccagaaaaacttttgaatagtgaccgaagttattgtggctaaaggctttgcctcaatccatttagaaaaatattccactgccactacaacatatcttaagttcccttgtgctggtggtaacggacctaacaaatcaaggccccacctttgcaacggccaagtgggttgtattaactgagttagagacgaaggttgtttttgatctcttgcacatttctgacaaccttcgcacttttggactaattccgctgcatccgaagttgcctttggccaataaaatccttgacgaanaacttttccaagcaaaggcctagatccaatgtgagatccacacaggcctgcgtgtattccttcatcaattccataccttcngctctagaataacacttgagtaacngagaacagaactcacgctttgtatagtccccttctattatacatatg

SEQ ID NO: 40665 - DNA, 468 bp, Zea mays
tggtgccaatggagaagcagaagtctttgaagtcctgtctgtcttattgtttgtcgttgtcaactgtgagctcggacgggactccgaatcggcaaacaatgttttgccagaagaatttctgggcagtcttcgatattattgtggatactgcccttgcctcgatccacttggtaaaatactcgacggcgacgaaggtgaacttgaggttcccttgggccgtgggtagtggcccgacaatgtccaggccccagcgctgaatgggccacgtgtgggcgatcaactttgtgaattgcgaaaggttgcccgaacggtgggaaaatttctggcaggcttcgcacgatctcgtgactcgattcgcggcgcagatcatggcgggccagtagaaaccttgactgatcaccttatcagcgagggccctggccccgcgtgaaagccgcaagtctcgctgtggacttcgcgcatgatttg

SEQ ID NO: 40666 - DNA, 436 bp, Zea mays
acctaaaaactaagcttaccacattgaagcatgagcgctaccccttagactaggtcttgcttggttgccccttgcgaccctataacgccgtcttgaatctcttgatgatgagggccatctcttcatcattaagtctggccgcctcaatttgtgccaccttgctatgtagcgcctccttgcttcttgttgccttgagagcaaggggatgaggctcgatgattggaccattcaatgcgtcgtccacgtaccttgcctccttgatcatcattcgcccgcttacgaatatttcaaggacttcttcgggcgacattttggtgtacctgcgattctcacgaatattattcaccaaatgaggatcaagaacggtaaaggaccttatcatcattctgacgacgtcgtggtccgtccatcgcgtgcctccgtagctccttatttt

SEQ ID NO: 40667 - DNA, 437 bp, Zea mays
atccttaagtcacctgcggcatgcaagcttctatagggagagcatattttgggactatctcttgttcatttgagaaagacaaggtttgtagcgcatgtcaagcagggaagcaagttggtgttcatcatccacacaagaacatcatgacgaccgacaggccgctcgagctactccacatggatctattcggcccgattgcttacataagcatcggctggagtaagtattgtcttgtaattgcggatgattattctcgcttcacttgtgtgttctttctacaggaaaaatcacaaacccaagagacattaagggattcttgagacgggctcaaaatgagttcgacttaaggatcaaaaagattagaagcgataacgggatggagttcaagaactcacaaatcgaaagcttttttgatgaggagggcatcaagcatgagt

SEQ ID NO: 40668 - DNA, 475 bp, Zea mays
  unsure (1)..(475): unsure at all n locations
tatagccatggtaagtagcataggctaataatatgcgaattgactcttgcctagctacgggtgcataggtttcaccgaaatccaaaccttcgacttgggagtatcctttggccacaagtcgagctttgttccttgtcaccacaccatgctcatcttgcttgttgcggaagacccatttggttcctacaacattctggttatgacgtggaactaagtgccatacctcgttccttgtgaaattgttgagctcctcttgcatcgccaccacccaatccgaatcttgtagtgcttcctctaccctgtgtggctcaatagaggaaacaaacaagtaatgctcacaaaaatgtgcaacacgagatctagtagttacccccttatgaatgtcgccgacgatagtgtcgaccgggtgatctcgttgtattgcttggtggactcttgngtgtggcggccctgggtcttcatcacttgcatctcc

SEQ ID NO: 40669 - DNA, 395 bp, Zea mays
agtcacctgacgcatcaagcttcacagctggggattgaactctacctcttttttacaccggatcgacgtcgccggacttcacccgaccgccggtgcacgtacaccgagctccacgacaagcgctccgtctattccttgcactggtagcgtccttagcaccccctgaagcttcctgtaacactggaatgagcaataccaccatgagcaggccaaagcgaccccactgagagcccgacgcttgacacgtggcctgatgattcgggcatacatctatagtccacctcgatgtgatcccagacctctggatcaacccgcctttgcggatctcctgccgtcgtaaccgaccaccttttattctcgggttctgttaaaagggaggactccgtgaaaaaaaa

SEQ ID NO: 40670 - DNA, 462 bp, Zea mays
agaacacgcaagcttcgaaaagcagcacgactgggaagataaaaaacacgatattataattggattattggagagcaacgaagaagagcattcagctgttattgagaagacagccttctagcttcagacaaccgaaggcttactggcggaagctgtcactaagattacagaatcaaatacgaaacttctctcacaatcacgaaactttgatcacgaaaagcagaagctttacgcaaaacttgaggctgaagtccaaaaaagttcacatttgaaaaaatcattgacaagccttcagaataaatgtctggagttcagcaatcgatgcgttcaacggctgaagcatgtgttctattttgttggagccagcagcgagaaattacttctttcggtgaagacctgccaggtgcccttgatcatattcgatgtgaaactgatgacctgatatggaattaggcttacacc

SEQ ID NO: 40671 - DNA, 374 bp, Zea mays
  unsure (1)..(374): unsure at all n locations
agctggtgaaggttcttcatccacatatgttcttatcggcgangccacagccagcccatgctagtcttagctattaagcatgcatctagaccggcctcttcttttgcaaaatcaactaaataaagtttgccgtctaatacacccttaaaagctagtgaaccatcacttcttctaaagacagacacatctacatttgtaaatagacagttataccccatattgcataattgactaacagatagtagattatatccaagagactctactaaaaacacattagatatggagtgctcactagaaattgcaattntacctaaaccttttaccttgccttgattcccatcaccgaatataattgaatcttgggaatcctt

SEQ ID NO: 40672 - DNA, 416 bp, Zea mays
cggacctatgaaactcagctctggggccgggggggaatctggccttttgtttctgtcgcgcgctgacgcgcgggtgcgccggcttacctgcggcccaaggcgggagactgtactggcgcgctagatggacgacgtctccacatggtccacacgccacagagagaggaaggggggaaacggcgccagcggttgatggtggggtgaaccggccgtccgtgggggagaacccgcccactagtgggctcggcggtgattccccaccggtgacccggttcttgggcaacgggtaggcgccttattacgaggaggggctggcgaacatatgggtgggctcaatttggctagaagggcccgggaggagggctgttcgcggagaggtggcggaactccgtagcgggagtcaccgccggtgagct

SEQ ID NO: 40673 - DNA, 499 bp, Zea mays
  unsure (1)..(499): unsure at all n locations
agctntaacccctgcgagaccttccttcgtctctttctaaccatggtgaatgcaatatcgtatgtcatattttatgcatgtttaatctatttgttctcttgtatggtgtactgtttgttccctaatttgaatggatggatgtatgtatgtttgcactcacatagagaatgatccagttgaagagcctgaagaactcgcaggagaagcccctgagcagcagtcggttggtggaggcaagtgtcccttgacctatctctgtcctattcattctttaattcacctcccgcattacacatttatacctaaggattgactagcttttattatccatgtccttgtttacctatttgggttggattattattgtttagctttatgctattgctcaactctaatcaatgaacatgatgagaatgatcaatgatacgctgntttgttcttcttattatgaatgtctacttgtgcgctttaagggggctcgagcggtttctcgagtgcc

SEQ ID NO: 40674 - DNA, 465 bp, Zea mays
  unsure (1)..(465): unsure at all n locations
nttcggacgagcgantcttatgcttacttcttcctgaatccgtagcgagggttctcgaactagtggaactctggaaagacctcgtagtgctaccctacctcgtttcctgngtagatgaaacaccctgatttggggggtataaaatttctttctaattatcaccgaaaatcatgtgttactcttccttttgtcactctaggctttctctctctctagattctttttctctttttccttttgattagaaatagcttaagctactggagatcaattatttatttttgtcaaaaccttatgagtcatgacatgttgcatcatgctgagcttaaaatattctttgaagtgtggcacaagtttgaatttatttgaatttgaaacctagtttgaatttggatttgaaaacgctcttaaaaagacacagaacaggaattagaatatcagagaataagacaaggagaaagccct

SEQ ID NO: 40675 - DNA, 381 bp, Zea mays
  unsure (1)..(381): unsure at all n locations
cggatccttgagtcacctgcggcatgcaagctcgtgaagattcttcatcccaacatggttttgtcggcggngccagagccaacccatgttagtcttagcaattaagcaagtgtcgagttcagctctatcaaaatctaccaagtatagctgaccctctaacactcccttaaatgctattgaatcatcacttcttctaaagacagagacacctacatcagcgaatagacagntgtagcccattttgcataattgagatacagaaagctaattgtaatctaaagaatctacaagaaaaacattggaaataaaattggcaggagatataacaattttacccaatcctttgaccaaaccttgatgtccatccccgaatgtgatagc

SEQ ID NO: 40676 - DNA, 470 bp, Zea mays
  unsure (1)..(470): unsure at all n locations
nggtcattntattgctaactgtcccgacaatgatattgtctcattagcaagggacaaatgggaagagagagaacaagataggttacaagaaggccaaaggcgaagcacaccttggaaaggagtgggattcggattgctcttcgtccgactccgacgacgagggactcgccgccactgccttcaacaaatcggctctctttcccaacgagcatcacacttgcctcatggcaagggaaaagaaggtaatcactcataatgctaatgcttatgattcttctagtgatgatgaatctagtgaggatgagattgattactctagtttattcaagggactggatagaactaagatagctaagattaatgagttgattgatgccttacatgaaaaggatagaatcttagagaaacaagaagaccttttatatgaagaacatgataaaacttgttagtgcacaacaattctcttgctc

SEQ ID NO: 40677 - DNA, 389 bp, Zea mays
agccttatgaacagcaatcttcggtcatatttgtctacagcttccaccgaagctgtttcttcctgcatgaccttcggtgacgaagcatggtcccaacagtaacccctttgcggtgctagatctgttttcgtaaccacttgatccgcgaaaaaagtcttttacgcttcaggaagacgtaggtccttaaaacacctttcctgagctcgctgtcgagaaaccgatcatcttctgagcgctgtatcggtcccaccctgcatgggtactatttggcctctgcggtccaccgttcagcgggtgtaagtaactgtgtgcctggtgtacaaatcctgactattcatcttcttacctacagatctatataaacagacagcgtcgtgtgaagttaccat

SEQ ID NO: 40678 - DNA, 386 bp, Zea mays
  unsure (1)..(386): unsure at all n locations
tgagtcagtcctctngccaggataattgatgctcaaattgtattttatggtatgaaacacattcatgagaagattatggctggaaaggccaaacgtttcaaagaagatgatcaaggcattgtatggtttaataaccgcatagtggtgccgaagaatgaagaggttcgccagccaattcttgatgaagcacatcttagtcgctattctattcatcccggaagcactaagatgtaccaagatatgaaacaatactattggtggacgaaaatgaaaatcgagaatgcacgctatgtggctagatgtgacacctgtagacgtgtcaaggccatacacttgaaagctatcggtccattacagtctttaccaataccgacatggaaatggga

SEQ ID NO: 40679 - DNA, 436 bp, Zea mays
gggatctctaagtcacctgaggcatgcaagcttataagttctccgaaatagccattggtctttgagggagaattcatcccagacatgtcagatcgattcattccactcagaatgatgataggggaagccagcagcagaggccacaatattcctcccaggcttcggggcagcaacagagctatcctcggcctccagctccaaggggcagaggtgtcaaggcttccgacgaagatttggggatcagcccaggaagatttattgcctattctgtggtgaggacaagggccataccaccacgatgtgccatgttaccatccagaaacaaaaggagatagcagaagctgcagcccaacagagccagccgaagcaagttatgcacactgcttcgtaccattctccttacattccagagtatgtaggcaaccatcctgcaact

SEQ ID NO: 40680 - DNA, 440 bp, Zea mays
  unsure (1)..(440): unsure at all n locations
tcttgagcttcngtttatagtcacgttatcaccatgtctgatataaaaatatccaaggaaaagaacgctgatgcgaagacgatactaactgaagagacaaagctgtttgatgagaagaatgttgtggatccttatattgctggatttattgaatcaatggcaaagactaacacaaggaagattactatagagatgctggaaagtttatctgaagatactggtgacagcgatagctatgatgcagaaagtggagacaaagattctaaagatcgcttgcggcgaccgagccataccatcttcggaaaatcgactatcaaacagagtcacgttgatgctatgagaggaagatgcttccgcgatatgactattctgagggttggaagggacagcactgctcctgttcctgaagcgaatgaggtgtgtatctaccgaagcttttt

SEQ ID NO: 40681 - DNA, 438 bp, Zea mays
  unsure (1)..(438): unsure at all n locations
atcctctgaggcacctgccgcatgcaagctngccgccacagagcagaatgtctttgtttaactccagataataatatacgttttgagaagagtgcgggcaaagaggccgaatcccttgctcctgaaacactctccgaagatcttgattatgccattcgacatgctttgggaaagaaattattcgaagaagaaatttttgaagctaaacactatgcccgagaactgaagtacccgacgggggccttggtgtttaatggtacggatgaagatgatctcttgtactacctcccggacaacaaagaattatccgtctgccgagagatggctagaagtatgggctatccgagactcgaagctggcctttgtgccatgacaaagggcgatctcacagatagtctcgcatacaacagtctgaaggtacaatagttgtgaactttg

SEQ ID NO: 40682 - DNA, 452 bp, Zea mays
  unsure (1)..(452): unsure at all n locations
tcagttccatctatattatggattgtctcggagtcngttcatcttccttcggcccttctagcagcttcctggcttccatggatagcaataggcccttggtccgaaggtatcttcatgcaaagataggccggatgaaggattgcttctaaggcattaagagtaccacgaccaataattgcattgtaaggatattccatgtcaacaatgtcaaacacaacttgctcagttctagtgttgctgatgaatccgaaggttactgacatggtgatcttgcccagtgctacaatctgtcttcctccgaagccacaaagaggatgtgtagcatcatgaatcttatcttctggctcttgcatctgtctgaaggctttagcaaatatgatgtcagctgcactgcctgtatcgaccaagacattatgaaccagatatccttcgataacacaagagataaccat

SEQ ID NO: 40683 - DNA, 493 bp, Zea mays
agcttcacgtgttcgacgcgagctggcttttggcggggcgctcatagcacgcccgtgcgcgaactcccgcgcgcccgcggccgcccgtgaccacgcccgcgccacggctataaagcccgccccagtgcttggctgccttcctcgttacctcctccgtacctcgccggacttgcccgagccagccattatttccggcgacctccccgcgacccgccaatgccgcccgagagcaaccaccgtggccagcccctctcccgtactcctccgttcgatccgggccctcagttagcttcctggtgaagccgcgagacttgttcaagcttgacacggtggccctcgtcatcggaatagcccaatcacgctcaccggagtttaagaacctcgcggcgcacgtggaccgggtaagccactgcaccgttctccaattctttgcgcgcatgacctctgtgcaccccgtgagcttctctgcacctaattaactatcccgcgtggt

SEQ ID NO: 40684 - DNA, 362 bp, Zea mays
tataaaactcaactgccagcctcgaccggcaacttaccttgagtttagatcgacctcaccggacttcggtcttccgccgccgtgcgtggaccgagctatccagtgagtctccgaccaattccttgcgctcatagcttctctggcatcccgtggacctccctgacccatttgattgaactatctcgccgtgaccaggccggtctccttgccgccgacgagcatccccgcctgcgcgcgtggaccgaccgactccggccatctccgacggcgtttcgcacaccgttgtgatccccgagacctccccttcgtcctcgaccgcttcaccggagcaatctcgccgccggtaagcccctccgcccttt

SEQ ID NO: 40685 - DNA, 487 bp, Zea mays
  unsure (1)..(487): unsure at all n locations
agcttatgaagattcttcatcccaacatgggctattcggcggtgccagagccaacccatgttagtcttagcaattaaacatgtgtcgagttcagctctatcaaaatctaccaagtatagctgaccctctaacacacctttaaatgctattgaatcatcacttcttctaaagacagtaacacctatatcagtaaaaagacagttgtagcccatttgacacaattgggatacggaaagcaaattgtaatctagagaatctacgagaaaaacattagaaatggaatggtcaggggatatagcaattttacccaaacctttgaccaaaccttggtttccatccccgaatgtaatcgctcgttggggatctttgtttttctcataggaggagaacatccttttctcccctgtcatatggttggtgcacncgctgtcgagtatccaacttgagcccccgggatgcataaacctacaaacaagtttagttcttt

SEQ ID NO: 40686 - DNA, 465 bp, Zea mays
  unsure (1)..(465): unsure at all n locations
ctggctttganataaatgtaaagtttatgtaattcgcttccgcatttctttatctccgatgttctgtaatgtctgcaagacgggtgagacgttcctggtaaggtaagaaaagataccgagcttgtcaagtagttcaggggcacctacagggttgtctgaagtccgttggacaaggacaactgtaggtgggcctaattacttgggaggttctgtcacaggatcggcttggaatcttgcacacatgcatacggaaagcataatatccagtcgtgaagcacataaatagagtaaagaacctatcatcgaccagtataccttttgatctacggatttacctcccgtgtagaggtcgagatgcccatttattcccatgggtgtcttgatgggcttcacatccttcatcccaaacttggtgagtatgtcttgaatgtacttcgtttggctaatgaaggtgccctcttggag

SEQ ID NO: 40687 - DNA, 510 bp, Zea mays
  unsure (1)..(510): unsure at all n locations
agcttcgagctttntgccggtgaccatctctctcttggcgtgttctcccggcatcacttcgagttgttaaactctaatgaaacaccgggctccgataccaattgaaagtcgtctagagggggggtgaataggcgaaacctgaaaattacaaacttcaaacacacactctacccggcgttagtgttagaaataattccgagtgcggaagatagttcctcttgctatgagttgctcaatcaatgcagataactttcgggagcaactcaaaacgatgtgagcaagagaactttagagagagtggagaggggagaaacaaatcgagtgaaggtcaacacacatgaacacggcgatttgtttcccaggttcggttccaaagaacctagtcctcattgaggaggccacanaggccgggtctattccaaccctttccctctatcaatcggtcacttagaccagtcgagagctcttcttaatacaccggtcactaagacccgcaagatcccacacaat

SEQ ID NO: 40688 - DNA, 485 bp, Zea mays
  unsure (1)..(485): unsure at all n locations
tattacggacctatgaaactaagcttgccagcccttggacccgaccggacttcaccggaggctcgagatcgacctcaccggacttcggtcttccgccgccgcgcgtggaccgagctatccagtgagtctccgcccaattcctttcgctcatgtcttctctggcatcccgtggacctccctgacctatttgattgaactatctcgccatgaccaggccggtctcctcgccgccgacgagcatccccgcctgcgcgcgtggaccgaccgactccggccatctncgacggcgttccgcacaccgttgtgatccccgcgacctccccttcaccctcgaccacttcaccggaacagtctcgccgccagtaagcccctccgcccttttcttcgccgcggctactggttaaggtagaagaaggacctcgggttaggttctgtagaacccgaggggttttctgtaatgtcagcgactcatgtgaatagtaacc

SEQ ID NO: 40689 - DNA, 407 bp, Zea mays
  unsure (1)..(407): unsure at all n locations
agctngagtcaatcattatgcacaggatcactgttgctcataaggataatttgggtatgaagcacattcgagagaagataaaggctggagtagccaaatgtttcaaggaagacgatcaaggtgtgatatggtttaaaaaccgcatagtagtgccaaagaacgaagagctccgccagcaaattcttgatgaagcacatcttattcgttattctattcatcccgaaagcactaagatgtatcaagacttatagcaacattactggtggacaaagatgaagattgaaattgcacgctatgtggctaaatgtgacacttgcagacgtgtcaaggccatacacctgaaaactgctggtccattacaatctttgccaatcccaacatggaaatgggaagacatcagtatggac

SEQ ID NO: 40690 - DNA, 477 bp, Zea mays
  unsure (1)..(477): unsure at all n locations
cnttcttcggcgccatagcgacaggtttatgaatcgcgcgaatgttgtcattatactcattagagtgcgaacttgacgttcacccggagggtgggcgcctaatgttgtgggactactgttctcacaatggctatgcaattacagaacataggcaatcacacagaaaatggttataagcgttacaagcgcctttttgtccctctcgacagcacttatatttacctttatgtgcactaaccgaaattttcgtgacgacacggttactgaaaggaacatacctctcattaaattcaaccatataatcaatggaagaagggaatcatactgagacacaataagatagcataacaccattatgtattattatcaactcatttctgtattattattatagaaaagtcgaaataatatcaaattacaaatgtaccttccgcttgaaagaaggcgaaagctccagcgtgacgccaaagcatatgc

SEQ ID NO: 40691 - DNA, 387 bp, Zea mays
  unsure (1)..(387): unsure at all n locations
agcttctcctttactccaaatctttgtatgctcatcattggtgatatcttaagatacaaaaaatctctgacctgaaacataagtggtctttatcattggttagcataaattttctggcgatattgcgccatttccatattttggcgaataacttgaaccttctattcggcttcagcaattaggccattcccatagtatttttgttctccggcttctacccaatttagatgtgtcttgcatcgtcttccatataatgcttcgaatggagccatcttgatgcttctttggtagctgttgttgtaggaaaactcggccaacagtagccatgattcccatgatccttntgatgatagcacacaagctcttaacatgtctgtgaggatctga

SEQ ID NO: 40692 - DNA, 442 bp, Zea mays
  unsure (1)..(442): unsure at all n locations
tcggccttcgcaggccgaaggttgaaatgaatgaagccgtctaatattgccaaagagccttcggcgttgtctgttcttttataggaacaagggacttattacaagagcatatcgccttcacggtgtggccgcttgcggagaaatgggaaatgccacaagaaaccattaaagaggccgacgaaggtggacttatcagatntaagtatacttttaaatttggagataaatttattgagtcagatgatgagtggttgaaaagcattgacaatttaagtgatgagctgcttgggacctattcgaaagccgaagacactgcaatgtcatgagccttctgaggccgaaaaagaaaggctgaatcgggtatttgatgcaatcgggtttgtctaccctgactattgctatcccatccgaagggagaagagaaagaacacaacctctgtga

SEQ ID NO: 40693 - DNA, 448 bp, Zea mays
  unsure (1)..(448): unsure at all n locations
gatcctctcagtcacccgctgcatgcaagcttggtcattntattgctcactgtccctttttgatcttgatcacgatcaagggaaccagagggagataaagaagaactatttcaacgccaatggcgacgctcatcttggcaaggagtgggattccgactgctcttcgtccgactccgacaatgaaggactcgctgtcaccgccttcaacaagtcattcctcttctccaaccagcgtcacacttgcctcatggccagggagaagaaagtaagccctcataataccagtacttatgcttcttccactgaggatgactctagcgatgatgatgagatacattactcatgcttactcaagggattagatacaaccacggtagacaaaactaatgaactaattgatgccctgaatgatctgaatatactttctgaaaagcaagcggattctgtg

SEQ ID NO: 40694 - DNA, 438 bp, Zea mays
  unsure (1)..(438): unsure at all n locations
tgcatgagaaaaatgatcggatcttntctcttcttgacattgtatgacatcaccttgtccaatgtcaacagtttgtactaaggacaacaatagagactgcaacttctcagcatcatatgtggacattatgatgaagtactaaaaataaggagtagagtgatcagcttgcctataattttaagttggcaacaataagatggtgtacaacgaacaaagcctagtgtcaggtacttatgttggcacgcaaatcatcactatgcctaccatttgaagatgacgtcaatcagtagcataccctagtagaagaacctatttgcctatgtgttggaagcaccaacttctgtcaatactacttttttatggtaacagttctagacatgagcttactccagctatattaaatgtgaccataacattatgtaagacatgacttccatt

SEQ ID NO: 40695 - DNA, 490 bp, Zea mays
  unsure (1)..(490): unsure at all n locations
agcttcggcataccccattcacttatcattgttaatactcggnaggccaagtattcttgaactaagtccctagttccgatgtgttcagatacaactctaaactcataaacaacatctgggcatggtgcccccggcgtcatgttgcactgaggcctatttagcccgaagattaactccagcgggctctgcactagcttctcctttttctcatcaattntaacataaaaccattcagatttccaaccggtcggccatttagtgcgatagctgaccaccggtgtcttcatgtctttgcgataagcaaagttgtagcagccgaagttctcatgttgtccgtcttccctagccttcgtctgatagtgaagttcatgtactcggtagaaagcttcggcgagtggctccaccccttgacttcggagggcccagatgtaaacgctgagcctaacaatggcgttacgggtcagctgataaaggtaatctcaaaattttc

SEQ ID NO: 40696 - DNA, 466 bp, Zea mays
  unsure (1)..(466): unsure at all n locations
ntagactgactaggcccttgtgccgcatgacatctgtgtcaccctgccaacaagctatagcagaattcagggttgtggctgaacagatcagcactagagatctagtgcacgaatacctagccaacggggtatttctgacgttgagtgaatggagtatgctgaagctgaagggaacaaagaaaaataatgaacttgttcggctgccctatcgcttcaagtttgagaaacaattcanagagccttgccaagagtggctggaaatgattgaggctatgtgcagccttgccaagagtggctggaaattttgggcaattatactaaaaaagaagatcaactgatgagtgcagccttctatcggcgtcttggacccgcgaggaccctcaaccgactagtgaatttgacgctgcatgtccctgcccacatgggttgatgcaagatgaaacacaagacgggggatgaggcttat

SEQ ID NO: 40697 - DNA, 544 bp, Zea mays
  unsure (1)..(544): unsure at all n locations
gagcttagacatcattcaaggatccaaagctatcctttaatattaactactccaaacaaggaagatattcatggccgtattttagaatattaaagcatgagaaaaataattgttgaaaaaagtctagggcatgtaacatatttcatttgatgccatctcgtgtcactgtacatactacaaaaaaactattgagccattatagtgggttagcacaagccatgcaatcaaactaaaaatattaatgtcaagggggtgcttatgactttgtatcatggtcacacaatagaaaaacaaatataccacacagtaatatcaaataacatttctaacagtaacgttatatttgggcggcactcgataaagcacggaacagtaagcaagagataaacctgtcaatcatgcaaataagtgcataaacatgtctgacaactctccaaaggaagaantgggtaattatgacaccaaaacaagtatatgagagcgattcatgtctcacgcttcatatacatacaaataanggataagtaaatgtatactcttcaat

SEQ ID NO: 40698 - DNA, 414 bp, Zea mays
  unsure (1)..(414): unsure at all n locations
gtttgattattcacctcaatcggtcaccgcgcatgacttaattcgaggctcaacagatgtgaactttgaaaagaacaaatagtgtgtctcttgtcaagccggtgagcatgcggcaaacactcatccaaagaaaagtctaatgtccactcatcggccgttggaattacttcacatggatctattaggacccacatctcttgcaagtattggtgtgaattcttaatgtcttgcgattgtggaggactattcaagacttacttgngttaattttctacgagacaaatccaatgtgtttgaaacattcgagccatttgctatattggctcaaaaacatttagatttcgaaatcacacacgttagaagcgatcatgcgtcggaattcacaaatgcaaaaactgatcaatattgtgatga

SEQ ID NO: 40699 - DNA, 183 bp, Zea mays
  unsure (1)..(183): unsure at all n locations
agctctctcgctcacatcttcggcgcgtgtataaccttcgtataggtntgggtttctcctactgtgatactgactcgagtccgaagatacctgttcacacattatactccagaaatactgttaaatcctgtttttgaggaccttcgtaagccgaaggtccccaacacatatgtagagcctatg

SEQ ID NO: 40700 - DNA, 366 bp, Zea mays
  unsure (1)..(366): unsure at all n locations
ngcttctgccatggttcaacggccgatcagagtttcatttctntcgtatcttggcaaactcactgtgtacggtcgcttccctgctccacatcctatcttttcgctgtgagttccaagcccagatatggtcggcgtatggagatacataggggagaagtttgctgtgtcacttgacgtctaaccgacacaaaatgggtgtcacgtcctgtctagcaccctacggtacgtgtcatctcttttcagggtgttctacggttaatttggcgccttcttgtcaatcgggcccaaaggttttgaaaaagggaccaaagtgaacacgtggagtctttgtgcaacggttcagtttcggacttatgcgaaaactga

SEQ ID NO: 40701 - DNA, 442 bp, Zea mays
  unsure (1)..(442): unsure at all n locations
gatccttaagcacctgangctgcagctcgaaaaaatctggacatgggtctattattcttagctcccttcgaaggagtttctgtcaaaaatatccaccgaggacaaaatgagcatgctgatttgctagctaagtcagcagcacaggggctgcccttaccttcggatgtcttctttgaaacaataaaagcaccatcggtggaacttcttgaaagagcatgcctcaatatatctcctgcttatagcgaagattggagaactgagatcatctcttacctttagggtagattcctttcagatgacgaaacttataacaggaggatagaggcaagagcctcgccatatgtcatgatataatgtgagttgtccanccatggaacttgcgctccgttactcaagtgtttatctagaaccgaacgcatagtattgatgaaagaaatacatg

SEQ ID NO: 40702 - DNA, 465 bp, Zea mays
ttacggacctatgaaactaagcttctaagggagaacacgtgataggttggactcacgtgcttttcttaaaagatagaccttgtgcagcttgtcaagcagggaaacaagtgggaggagcgcatcacagcaagaatgtgatgaccacatcaagacccctggagctgttacatatggacctcttcggacccgtcgcctatctaagcatatgaggaagtaagtatggtctaattatcgttgatgacttttcccgcttcacttgggtgttctttttacaggataagtctgaaacccaaggaaccctcaagcgcttcctaaggagagctcaaaatgagtttgagctcaaggtgaagaagataaggagcgacgacgggtccgaattcaagaaccttcaagtggaggagtttcttgaggaggaagggatcaagcacgagttcttcgctccctacacatcacaacaaaatggtg

SEQ ID NO: 40703 - DNA, 432 bp, Zea mays
  unsure (1)..(432): unsure at all n locations
agcttgagatgttttgagtccggatgaactgatccttgtttcaaagatgtagtctgcccgctccggcgccatggctgcggcctccgaccgtggtgaggtcgacactgcacggcccttccggtccgtcaaggaggccgtagccgtgttcggacaccgcatacttgtcggcaacaaccattccagtcacagcagcactgcggccgccgccattgccagcccaagcgctagtgccaatgccactggcgttgctgccaccccgagtgccaagcatgaagcaagcagtagcagcagcaccatgaccttctctcccacaccaatggccgagagcgaggcggagattatacctgccactgtgcccttgtactcngcgccatcctcgccgccatctctcgcgtcgtcaccttcgccggtcaagccgtgcagcggtcaccg

SEQ ID NO: 40704 - DNA, 472 bp, Zea mays
  unsure (1)..(472): unsure at all n locations
ttagtcgatttangggtcaaaccatggagtctataatctgtgcaggtgtgaattcaagtgtaaaacacacaagggctataaacaccaaaacaagcacatgataattttttaaaggttttacttgctaaccacaaggttgtttgcagggggggtctttttaagataaaaaaaagacaacattactttttttgtaaaaaggggtagaacaattacaataccacctagatagcaagacaggagaaacacaacacgcctaatcaagtttatcataacaacacaggataagacacatttttttgcagttcctaaaataacaatacatcacattattcacactttcttattatgggaataaaggtgagagaagcatgttggtgcacacggacaattataatgcgacaatcatgatgcatgctcattctagtcgtcttctcagacctaactactttnttcgggtgcttctacaacatcc

SEQ ID NO: 40705 - DNA, 371 bp, Zea mays
  unsure (1)..(371): unsure at all n locations
agctnttagcacttaaattattacttactatgcaattgttggttcttgaaatatgcatgaggtactgcacttagggggagtattcataactcaaaacactcatgaaaacccctagtgcaaggccaaaatgcaaatttcaccatttgcctattttctctaaaaattatctagcctatggcaaaatatttggaaaattatgagaaaatatatgagggtgccaatacctatcccaacaagtgttattttgtgtgattataagttgggatttggtttggttgaaaactagatagaaaatttgaaaacttcaaaatttccgtctgtctgggctcaccgtacagtccggtgtgcaccggacactacactgtgcactg

SEQ ID NO: 40706 - DNA, 434 bp, Zea mays
  unsure (1)..(434): unsure at all n locations
tctaaagggagaacacgtgataggtttgactaatgtgcatttcgaaaaagatagaccttgtgcagcttgtcaagcaggtaaacaagtgggaggagcgcatcacagcaagaatgtgatgaccacttcaagacccctggagttactacatatggacctcttcggacccgtcgcctatctaagcataggaggaagtaagtatggtctagttatcgttgatgacttttcccgcttcacttgggtgttctttttgcaggataagtctgaaacccaaggaaccctcaagcgcttcctaaggagagctcaaaatgagtttgagctcaaagtgaagaagatcaggagcgacaacgggtccgaattcaagaaccttcaagtggaggagtntcttgaggaggaggggatcaagcacgagttctncgctccctacacacctcagc

SEQ ID NO: 40707 - DNA, 380 bp, Zea mays
agctcgaaaagtatctagaatacagttcaatgatcgacgcttcctttgaaggattctctgttaaaaatattcctcgtggagaaaatgaacatgctgatttattggccaagtcagcagcacaggggctgcctttaccttcggaagtatttttcgaaacaataaaagcaccttcggtccagcttcttgaaagagcgatcctcaatatattccctgtctataaggaagatcggagaactgaaatcatctctttccttcacggtaattctctttcagacgaccaagcttacaacaaaagaatataagcaagagctccgacatatgtcataatagaaggggagctataccagcgtggggtgtggtccccactgctcacgtgttta

SEQ ID NO: 40708 - DNA, 453 bp, Zea mays
  unsure (1)..(453): unsure at all n locations
gtctgtacttntcccacacagaacacctaatagcgggcagtataatgtttaatactcaaattgataattgcatggagagatctatgactctgaggatcacaatctgccattaagaagtatgtccctttctcgtcctttttgcaaaatataaagtaatgcagcagcagaattgctaaatgtgaaatcaagcagaggtacaaagccctacactgcttacctgtggacctgaaagatgacctttttgctgttcattgtaatataccgactagctttcacaagcctttctctcttgtcattctacacgtaacagagagaaaatattacaaacactgataatttacacaataatagcgaacatactatgtgataatgatttctgattgtaaaagaaggaaaggcttcgacgaaaaaacgactgtgaccctgtcaatgtcagctaagttctatgggaac

SEQ ID NO: 40709 - DNA, 451 bp, Zea mays
  unsure (1)..(451): unsure at all n locations
agctnggtgccaatggagaagcacaaatccttgatgtcttggctgtcaaactgcttgccgttgtcaactgttagtttggacggtactccgaagcggcaaacgatgttttgccaaaagaatttctgggcagtttttgatgttattgtggaaacagcccttgcctcgatccatttggtgaagtactcgacagcgacgaaggcgaacttaaggttcccctgagcggtgggcaggggcccgacaatgtccaggccccagcgctggagaggccatgtgtgggcgatcagctttgtatactgcgaggggctgcttgaccgaggggaaaacttctggcaggcttcgcgggaccttgtgacccgatttgcggcgcagatcattgcgagccagtaaaagccttggcggatcaccttagcagctagggcccttggcctgcgtgcgagccgacgtgcactgt

SEQ ID NO: 40710 - DNA, 441 bp, Zea mays
  unsure (1)..(441): unsure at all n locations
tatcctaatgngtgatgtgttagtttgagctctgcgaattgtgatattcatatgtttcttgcaatgtcgctcatatggactagtgtttccgctgcgatgaattatttggcttctatagtgtaatagatagccatatggttaatggtgctttaagattgtcttaaattagtgtcttagtttaaattggtattagtttgaattggtatcttaatggtgaatagtggtaggttgatactcctatggtatatttatttaattggtgtttaactctgattctgtgcatttgtgtgttatacgcatcatggtttgattcttaacacaatgcatcccaaaaagtgctaaggtatagaaatgtttcgaactgcctaagtatatgcaaattggcgtctgaggccaaacataggttcttgaagtagcacatatttanggtgagcattctat

SEQ ID NO: 40711 - DNA, 429 bp, Zea mays
  unsure (1)..(429): unsure at all n locations
agctntcacacatcactattatcagttaatgtttgtttcattatttagcgaaattttactgtcacggcaaacacatagttagacacgtaaccttgctctgaaacatttgttctgcttcaaattatatttttaatcttgtcatattttgtacacacttcaaattcagttatagctctgtcatctttgttacacagtagacaaagcagcacagcattgtgcttccaagatttcataaattagaagcataccaaaccgtttcgaatttcgatccatggagcagatgtttagtagcatatctgtagtcgagtgtaacaggatcgatggtttagtgataacagagtgacttaatttctccttcatctgtacatgttcaaggattattcggagcaatctgtgcaacctctaatggagacgattactgcattatct

SEQ ID NO: 40712 - DNA, 467 bp, Zea mays
  unsure (1)..(467): unsure at all n locations
tctanagggagagcacaatttaggattaacaaatgtttattttgttattgacaggatttgtagcgcatgccaagcagggaagcaagtaggtgcccatcatccacacaagaacatcatgacgactgacaggccactggagctccttcacatggatctatttggcccgatagcttacataagcatcggcgggagtaagtactgtctagttattgtggatgattattctcgcttcacttgggtgttctttttgcaggaaaaatctcatacccaagagaccttaaagggattcttgagacgagctcaaaatgagttcggcttaaggatcaagaaaattagaagcgacaacgggacggagttcaagaactctcaaattgaaggcttccttgaggaggagggcatcaagcatgagttctcttctctctacacngccacaacaaatggtgtagtggagaggaagaatcgaactc

SEQ ID NO: 40713 - DNA, 440 bp, Zea mays
atgcttaattggctgccttcgctcccatcattgctagtgttgatcgctatctatcagggtggtgggcgagcctcctcaatcaccatggccgccttgtccttgtcaattctgttctggacagccttcctgtttatgccatgggagctctagtccttccccagggtgtggtggaagctcttgacactaggcgccgggctttcctctgggcaggagaggaaggcatctcaggagctaaatgcctagtgaattggaaacatgcctgccttccgaaaaaagatggcggccttggcattcgtgatctccgcttgcaaaacacatgcttgctactaaagcttctgcaccgtgctcacaactctccagattcagcatggtcctgttggctacaagtggagattggtgggcctttatctgcaccagacaatgccacagcgggttccatt

SEQ ID NO: 40714 - DNA, 118 bp, Zea mays
  unsure (1)..(118): unsure at all n locations
tgcaccctgattaccgattngatagaacagttcatgcagtatatgatctcttgaaggagatgcgtggcangggaattgaaccagatgtaaccagttattcaatcattctgcatgttta

SEQ ID NO: 40715 - DNA, 394 bp, Zea mays
ctgcagctatgaagattcttatccaacatgagctattctgtgatgccagagccaacccatgttagtcttagcaattaagcatgtgtcgagttcagctctatcaaaatctactaagtatagctgaccctctaacacacccttaaatgctattgaatcatcacttcttctaaagacagtgacacctacatcagtaaaaagacagttgtagcccatttgacataattgggaaacacaaagcaagttgtagtctaatgaatcaacaagaaaaacattggaaatagaatggtcatgagatatagcaattttaccaagacctttgaccaaaccttgatttccatccccgaatgtgatagctccgtggggatcttggttcttctcgaggaggagaacattc

SEQ ID NO: 40716 - DNA, 468 bp, Zea mays
tatgaagattcttcattccaacatgggctagtcggcggtgccatattcaacccaagttagtcttagcaattaagcaagtgtcgagttcagctctatcacaatctaccaagtatagctgaccctctaacattcccttaaatgctgttgaatcatcacttcttctaaagacagtgacacctatatcagtgaatagacagttgtagcccatttgacatagtttcgaaacggaaagcaaattgtaatctaaagaatctacaagaaaaacattggaaatagtatggtcaggtgatatagcaattttacccaatcctttaaccaaaccttgatttccatccccgaatgtgatagctcgttggggatcttggtttttctcataagaggagaacatcttcctctcctcctgcatgtgggttgagcccccgctgcgagtattcagcttgagccccctgatgcgtaaacctacacaac

SEQ ID NO: 40717 - DNA, 443 bp, Zea mays
  unsure (1)..(443): unsure at all n locations
nttccttgtcgtcatcaaccttaacatagaaccactctgatttccagcctgctgcccatttgcttcggtagctaattacaggaaactttgtagatttccgataggcaaagttatagcaaccaaaattgtcgtgcaatccatcatttctagcctatcgttgataatgcaactcgtgaacccggcaaaagctgtccgcaaatggttccactgcttggcttcngagtgcccagatataaacaataagtctgacgatagcgttaggggtcagctggtgaaaatagataccgaacctctttagtacctctgcaataatcccatgtagggggaatcttaatccagctcttagaaagctgttgaaaataacaatatcatccttctccggctctgggatagtctcttctcccccgaagcgcaatagcttcttctgatcttcagtaaaaaag

SEQ ID NO: 40718 - DNA, 407 bp, Zea mays
agcttatgttgagttaccacacactcttattgttaaccttgcaatctaagcaggcatgcctgtcctctcttctcaagaggacgaaatcaatctggctagtgtgttggccactactgaaggtcaccaggtgggattgcctcttcttaaagaaagtgtttgctataaacatgtcataggctagggcaaagttcaggattttctctccttcttgattcctagtcccaaagccgaagcctccatgtacaccctcgaaactggtgctagatgtacccacatggccattgagatctcctcctatgaagagcttctcgccaactggcacaaaccatgttctccaggccttcccagaactctctctttgagttctcattaaggcctacttgaggagcatacgcgcctgatacatt

SEQ ID NO: 40719 - DNA, 458 bp, Zea mays
  unsure (1)..(458): unsure at all n locations
nttccttacatatcanaacataaaagactgctattcttatctgtcgaagcttttccttacataacacaacataaaagactgctactcttatacacaacgattcataaaaaaccacctcttcgaaacttttcttttacataacaaatcataacaaaccatttatccgaaacttttctctgtgccgaagcaaccatttaggaacacaaatgctatgaatgaatgcttatgcatgcaaatgccatgatgtaatgtgcaaatgaatgtccgaagcgtaaatccgaagccacactcatccatcattttcttaggagcaaacacacgtcagctctgcattcccttaggaacgactatggagcatatttgccttttacttaggcagtatcagcgttgacttttcgctgtaagctctgcatccccctagggacgtctttggagcttcttcgtcttttacttagacg

SEQ ID NO: 40720 - DNA, 432 bp, Zea mays
  unsure (1)..(432): unsure at all n locations
agctnttgaacgtactaagcacatgccggtatatatggtaaccggtaaacctagtacctgagtgaagccgggcgcggactaagcacatgacgtgtgtttaggtttaccttgcaaggtttaaaactcgattcgaatcgtctgcttctcgcagctaatgagactgcttgatcccttgtactacatcgagtaagaagtgaaatgtggttatatgagataacttgttgattgaactaattgattgctaccatgaatgcttagaaggagcaaatctagctaagttaataatggtagaatttgaaaagctaaaaattgattttagaaacagctagtgctttcggcaaaccaaacccctcagccaaacaactgcatagtctagaggtagaggagtagactcctcacaccggttaagtctagctgagtattagtatactc

SEQ ID NO: 40721 - DNA, 458 bp, Zea mays
  unsure (1)..(458): unsure at all n locations
ttaccnctgcagctttgcagagacgctaagtatattcctttacctttggctcagttggaaggcttctcacttctgtgctaggcctgtccttcaaattgctaatatcgataaatttgttattttacacaggtctttctatgtgcttggacagaaccaattatatactagtagactaatcatccaactggaattagaattagctttttataaaccctattctgttatcctgaggattgcacctcagtttgtttaaaagtatttctgctgtttcttgtgctatttcatagtgttcaaagttatagactcgtagtaggcaagcactgaacattgtaaacagtcatactgctcaaattgtacttctttcacctgttattattgacagccaaacttaacatttctgcagatcactatctngtatttgattttcctgggcaagtggaattggtcttccttcactc

SEQ ID NO: 40722 - DNA, 506 bp, Zea mays
  unsure (1)..(506): unsure at all n locations
agcntgctcctcttgactgatgaaccatattccattacgcctgactccagtcccaatcctcttcccagttctcttctcctgaaaaacacatgattgttcatcaaatatagctagacacttgaactgatcaatgattgagctgacagaaaggagatcgactagaaatgatgggacatgcaaaactgatgatagattaatggatggcgtacactctgtagaccctacaccatgaatgagttgggaggtaccatcaacaatttggacagtttcagggtgaatagaatgagagtatgttttaaaagaatcaattagtcctgtgacatgtctagatgctcctgaatctattatccactctctatgacttctacatgaagatgcaagggcttgtgcctgagtttctgtgcccgaatgggcgtatttggcaaagttaccgaagtgctgggtggatgtagttgtcacagaaccaagaagagtgctgggttgacactcagattcttttccttatg

SEQ ID NO: 40723 - DNA, 465 bp, Zea mays
  unsure (1)..(465): unsure at all n locations
tcggcattattttcacgcatataatattattgttctttcttcgcagccggtgaaagatatcatgagaaataaagaagctactggccgaattggaaaatgggctgcggagcttaatgaattttacattgattatgtgcacagatcctcgatccagtctcaagcattggcagattttattgccgactggacgccacgggctcacggcgaagaagcgaataaagatgccgaagcatggacagtgttttgtgatggctcctggggaacctttggagcatgagcagctgctgttttggtttcaccgtccaaggttaaaacttgctatgcagcaagactggacttctgctgcacaaataatattgctgagtacgaagccctgctcctgngtcttctgaaactaaaagcgatggggatcatgagggcgatccttaaaactgattctcacattgtttcggggcatattgacaa

SEQ ID NO: 40724 - DNA, 423 bp, Zea mays
ggatcttaagtcacctgctgctgcaacttaataccaaactctctccctttatttctatcaccacaaaccatactcacgcaaggacatatgatgatgtcaagggacagcctggtgtttacgaggaaaaacgattatcaaaaactctcccttatttattgaacatatgcactaccaacatttattgtagatacatatatgcaaaaagatcaatacctctctttcgtacctttaccatgttgcagtgtacttcccatcttgaaagtatttgatctctcgagagcttctccacacttgtgcctgattctttctcctaactttttcttatcgctaagacaccaaacttataacaagttatagtattgggcacaagaagatactttattctaatgattatcaaaagatgtcaattgatgcaactatcac

SEQ ID NO: 40725 - DNA, 467 bp, Zea mays
  unsure (1)..(467): unsure at all n locations
tatctcanattcatggggtgagagatggaaattgattctatatatttacatgctatatttccgatgtacaacttatagcacactcttctactcgcttcgttataacataaatgtagtatataactatctctctcatatgatttaggataatatacaaatatattacatatacaaatatatgaacttaattagttgtgtctaaattataattattaaaatggaattcaattccaacgaaacaaacgtggccttagtgaagtaaagtagtctcaaacaccctctaaggggtgcgtttggttcacctttctgaatcagattcactgtaaacaatctgaaatctcaacccaatagatatacaacagaatggattctcgaaatctacatatttctntatatcaattcagagtcacctactatcctagaattttcaatatcttgtatccatgctttaaactttcatgccttta

SEQ ID NO: 40726 - DNA, 429 bp, Zea mays
  unsure (1)..(429): unsure at all n locations
agcttctaaggggagagcacattntatgactatatctatgttcatttgagaaagacaagatttgtagcgcatgccaagcaggaaagcaagttggtgctcgccatccacacaagaacatcatgacgaccgacaggccactggagctcctacacatggatctattcggcccgatagcttacataagcatcgacgggagtaagtactgtctagttattggggatgattattctcgcttcacttgggtgttatttttgcaggaaaaatctcatacccaagaaaccttaaagggattcttgagacgagctcaaaatgagttcggcttaaggatcaagaaaataagaagcgacaacgggacggagttcaagaactctcaaattgaaggcttccttgaggaggagggcatcaagcatgaagtctcttctccctaca

SEQ ID NO: 40727 - DNA, 398 bp, Zea mays
  unsure (1)..(398): unsure at all n locations
tctccttgtcgtcatcgactatgacgtagaaccattccgtattttagcctgccggccatttgcttcgatagctgatcacaggaaattttgtagttttccgatatgcaaaattataacaaccaaaattctcatgtagcccatcctttctggccttagtttggtagtgtagctcgtgtactcggcagaaaccttcggcaaatggctccaccccctggcttcggagagcccaaatataaacactaagcctaacaatagcgttaggggttagttgatgaaaatagattccaaacttttgtagcacatcagcaatcatcctattcaaaggaaatctcataccacctgtgaggaaactcttaanaatcactatatcatctctttctggcttcggggtaatctct

SEQ ID NO: 40728 - DNA, 425 bp, Zea mays
agcttgatgtgcgccgcgatgtcaattagaagctttaggattaagtatgagggtgcagaactgagtactggttaggttttgtcataatcttgcatagggaatctgattgtccctgagctaaattttgctgcacacatcctctccgttgttgtaataattgagtaaagtagaccatgttttctgtagacatgttatataagaaagttgtaaataacttctttatcttacttgtgtaaaaatttcatgaccataggtttactagtttatgagttatgatttttccaagtgcagtttcagaatctgtccagattctatactgatctcgaaaactggctttgttgactaaattaaacttagaatcagaccttagtgattataaaagaatcagaccttagattctatacttgattcaaaaattctacact

SEQ ID NO: 40729 - DNA, 457 bp, Zea mays
ttcacgaacaaaacctttatcaagaagttcttgtacttgcctttgtatttccttagattcttcgggattggttcgatatggtggacggttaggaagtgcagcccctggaataagatcgatttgatgctcaatccctcgaattggaggtagtccagccggtgtttcttgtggaaatacgtcttcatagtcctgcaaaagatcagccacaacactatgaagagatgttatgtcgttaggagaaatcaaaacatctttgttcacaagtacaaagagcacttgatatgggttgttcctcacttctctcagctcggattttgtggctagcataactagatgttctccctcttccttctttctatctttggagattggcttgtagcactcactcaccgacatgtggatggcactcaatttctttggctcttctcctcctctacttgtttactaatttcagctt

SEQ ID NO: 40730 - DNA, 364 bp, Zea mays
agcttgtggcacagagcagtatcacaacaattttggctgttatagtttcggagcccgctctgggtcaagatgtcccgtgccgacatttcgaaagagatggcccggggattggatgaaggaatggttctatgtgaaaaatgatttaaaggtacgagaggatattaaagatattatcatgcgccctatctggcaagcgttttgccttccaaagccgaatgtggaaattgatgaagcagccgaagaatgccgaaaggctttcggcatagtctgctcgtttatcgggacaagggacttagtgcaagagcacgtggcctacacgatatggccgctggtagccaactgggagatgccgaatgacactatc

SEQ ID NO: 40731 - DNA, 360 bp, Zea mays
  unsure (1)..(360): unsure at all n locations
tctaaagggagaacacgtgataagtttgactaacattctattcgaaaaagatagaccttgtgcagcttgtcaagcacgtaaacaagtgggcggagcacatcacagcaagaatgtgatgaccacttcaagacccctggagctgctgcatatggacctcttcagacccgtcgcctatctgagcataggagggagtaagtatggtctagttattgtagatgattnttcccgcttcacttgggtgttctttntgcaggataagtctgaaactcaagggaccctcaagcgcttcctcatgaaaactcaaaattgagttgaactccacgtgaagaaaataaaaagcgacaacgggtgcgagttcaa

SEQ ID NO: 40732 - DNA, 514 bp, Zea mays
  unsure (1)..(514): unsure at all n locations
agcttagcanatcacagtgcacaagagctattaattgagtaagcgggagtggttggccagaaagcgtgctaaatgagtttgcggtatggccgtatttatacgctcggtgcgttgaaaatgcaaagaccccgcttgtcagtgaatgttgctattctagcaaagggaaggtgttttttcggaccttcggcgtaaagccttcgtccaggtcgcaatctgaattcgttattataaacaaattaatattgcgaggggctactgttggggaccttcggcatccgaaggtcctcaaaaacaggatttaacagtatttctggagtacaatgtgtgagcaggtatcctcggacaagtcggcgttgctgtaaaccggaataatacgaaggttgatacagagccgaaggtgtgagcaggaaagcttcggcgtgacagcaaagagtggaaccgacttaaagatgaanaggctattcagacctccgtagactactatagaattatatcaaatgtaaagggcatgaat

SEQ ID NO: 40733 - DNA, 457 bp, Zea mays
  unsure (1)..(457): unsure at all n locations
tcacgcaagctaaggtactatttcgaggcacacaaagtaatggtcaccatagatcgaggtctgggagaccttttcagaaatcccgaagcatctaccagaatagccaaatgggcagccgagctctctggatacaacgttacattntgaagcgccctagatcctctgggactcaaatgtgatacaatcactagtcctaggaggctagtaaacacatttatacatcagatgattacagatctgcttaaacgagacaaacctataaaggtggcgatcaactttaagagttggtccacaactcgggacatatcatcagagtggggctgaagtagcccgatatacgcagcgaagcaaatcagcggtccaacagccacaggcaaggttgggaacagtcgtaactcttactcgatctcctttntcttgaaaaacaacaaataagcaagggtgagtacaaacatac

SEQ ID NO: 40734 - DNA, 321 bp, Zea mays
ctggatgtgttattcattatgacacccacatactggtgctcgatacttgcatgaatagctctaacttataatacatcatacgtaatacgcgtgcttgacttaagacatatgacgatagcgagcacgcatgtaggacgtattgttcaaaaggcagggtagatacacattcggctccaatataagagcgagggataccgattcatacatctatctccgagaagactctagcttacttgattacattatacaaagggtgctccgacgtaccgactagatgatcttaatcgttacttaattcacgtagatataattaacacacat

SEQ ID NO: 40735 - DNA, 437 bp, Zea mays
tcgacagtatagaccgacttaaagatagaaggactatcttgtctatgattgcccgagtcaatgttgtgagcttctataaggggcatacttgtaattcctcacaggctgtgtcctgtgcctataaatagtgaacagtattccgttgctgttcacggattctggtatattttgtaatcgcatttgtctgaattcaaccttcttgccaagcaaaggtatttctgtattcaatacattcatatattaagcaattataatgtgatttgtacacgttttatttgtccttctcataccttttattttatgttattttataattgccgctgaaattttattacgaaggcttaagctttcgaactatgctcttgtcaacctttgttcgaaaacattattctcaagagaataatggttcttgcacgaaagatgtcacatcattttat

SEQ ID NO: 40736 - DNA, 370 bp, Zea mays
tgaacagatgaacatcttcgctgactttcaacataggcaaacacagcttctcacataaagaggaaagtggaataaaaatgctctccaactatatagctaactctattaacatttaacacgttaaccaacgtgcaagggatgcccacactctggtgacagcctttacaaaaatccaaattcaacatagctcatcatgacaaacatgaaggcacacgataagcaaactaccctatctaactaagactaactaaaagtgagactgagactaagactaaaactctcatacttaagcatttattacaagacccaacactgacgatctatggttctaaatttactcttggccctgagtcttggttgccaataacct

SEQ ID NO: 40737 - DNA, 396 bp, Zea mays
cactcaagcttgggaagaacataggggctattgctgctgactcgctctatctattttttgtttttaattatgaattgacctgacgtgccttcgaggaaatcttactccgaagcccctggtcatttcagaaaacctgaatgcttcctcccttctttgacagaagtcattgtcagctccaatatactcgcccatcttttggagtaacttcttcaaaggctgtggcggcttactcgctaagtattgcgctgaaaggtccggccgaactcccttaattatggcctcaatgacaatttaattgggcactgttggcgtctgtgccctcatacgcagaaaccttctgacatatgcccgaaaaaatattttgcgggcctgggtacactggaatacaccctgagc

SEQ ID NO: 40738 - DNA, 449 bp, Zea mays
  unsure (1)..(449): unsure at all n locations
agctntatgatctctgatgctcgagtactagttattgcctgaaaaacacatgcatagtcatagaagatgaaagacgtttcaattaatccagaaaagcataagcgttcatacttgagacacaaaattttcgctcatagcttcttaacaatagaaatcacttgcaacagtgaatgatagtcggtcgttccagacttgcaactacaacgaggtagcattaaattaaccaaatgaactatatctgataaagtgataattaaataatatatgggataatatatgttgtacatgcacattgtaatcagaaccgacataaaacaatagtagtcagaaataaagatttaacaatccaaaataaaatttaaaatccatttanggtaccttggcatttgggtttgattgcatcacctgctatataagaatagtgtctctcgatttcttgtagttggact

SEQ ID NO: 40739 - DNA, 493 bp, Zea mays
  unsure (1)..(493): unsure at all n locations
ggaccttgaaactaagcttaaggatactattcaactaaagtaagaagaagttgatattatgtttatgtatgaaaacttcctctccttcagttattttagtattctatccttagtgggatgtaccatagtataggttaaattccttgcattataaaatgttcaatagtgcatataactttgacatcaactatatgtgtgcactaatttaaaggaatttagtctacccttttgggtttcaataatgatgattcattngccatccacatataaggatcatcatttgtgaaaccctctcttgtgtttttaatgctctcttttctaagtgttacaacgaggtccttccaagagctttcaagatggattcaaaatctacaaaaaatgaatgaagttcaagatcacttggttggatgaaatcacacagagaaaagagatcacagtgaaccaagaagggaggtatatttttttgtcaccaaataatgaagatgtatcgaca

SEQ ID NO: 40740 - DNA, 482 bp, Zea mays
  unsure (1)..(482): unsure at all n locations
ctgcggcatgcaagcttggctgatnggtgttatctgctcagatttgttttcttgcattnacactctcatttattttacaattcagttaagtttctgatacttcaaaaggcttcagggtatctagatcactgttgttctgaatttccaaagtgaaagcgcgcgcattaacttgggaatcaattctcatactataaacaactttctggcgcaagaataacatgttgatggataactatcctctaagggatgttgtaatttctctatgaagaatagactttataacgcttgattctatttatattgaaccaactatagcttccttctagatttcaggaaaacattatcttgtgccaaacaatacttgactttatataggatagaattgctgtttatgatgatacttcggtaactgtcgtactnggtattcagcgtgcactatactcgttgggtggattaatgtgttaagtgctctatgtctcatt

SEQ ID NO: 40741 - DNA, 420 bp, Zea mays
gcttgccattctatcaagcatttcttttttagcacagcaactgcagactatacgcgtaacatgggcatttgcgtgctggggactggacatgattggacccttcaagaaagctcagggaggatacactcacgtgttggtcgccattgacaaattcaccaaatggatagaatacaaacccattgcttctctaactttagccaaggcagtggaattcatacaagatataatattcaggtttgggatatcgaatagcatcataaccaacctaggatccaagttcactagctctgaattctttgatttctgcgaacaatggagcatccagatcaaatatgcatcattagcatatccaagagccaaccgtcaggtagaaagggctaatggaatgatactagcagcactcacgaagaaagttttgac

SEQ ID NO: 40742 - DNA, 510 bp, Zea mays
agcttctgcagaactagtctcagatgatcttcatgtgcttcttcattctgagagtatataagtatgtcgtcaataaatacaaccacaaactggtcaagatactccatgaatactttattcataaagttcataaattaagccagtgcattagttaatccaaatgacataaccaaaaacccatatagtccatatctcgtagtaaaggttgtcttaggtacgtcttcagttcgaatcttcaactgatggtaacctaatcttagatctatttttgagaatactttagctcctctcatcagatcaaacaaatcttcaatccgaggtaacgagtatttgttcttaattgttacttcattcatgtttctataatcaacacacattcttctcgaaccatctttcttggtcactcatagaactgtggctcccaaagagacgaactggggtgaataaaacctttttctagtaattcttctatttatttcttcaggtcaataaatctttgacatcattctg

SEQ ID NO: 40743 - DNA, 461 bp, Zea mays
  unsure (1)..(461): unsure at all n locations
ggcccttcaagcgaccggtaaaggcaactgaggtgtccttccttctaaggatcttcacatccacattcganaataaacaattataacccattccacaaagttgtgaaacggacaacaaattatagcttaaagaatctactaataaaacatttgaaagtgattgttggtcagagataggaattttaccaataccaatcaccttactcttgccactatctccaaacacaatttcttgtgcttcttgagttagttgcaatgtatgaaacatgtctttctccctggtcatgtgatttgtacatccactgtcaagcacccaacttgacccaccagaggagtagaccttatctccctttgccatgaggcaagttggagtgtacgagtcctcttgtaagttggtgagagatgcgtgcttgatgtatattggatggccacatttgccaccacttcctctttctcggaac

SEQ ID NO: 40744 - DNA, 359 bp, Zea mays
  unsure (1)..(359): unsure at all n locations
agcttacacaagatggctaagactaaatcttttaaagttggagatctggtatagaagatcgtcttgccactaagaagcagaaaccggaaattcggcaaatggtcaccaaactgggaaggcccttacataatcacacaggtgatagcaagtaatgcctacatgttgcaaactttgcaaggtgaagacctacccaaggcgttgaatggtcgtttcttgaagtaatatcatcctagtatgtggcaagatgcttagaaaactcgatgatgtcacatcgagttgtttttagcctgcagcagtgcttttggttcgctcagcttccccaaaagcatgggtatatngtgagcaccgtttatggcact

SEQ ID NO: 40745 - DNA, 455 bp, Zea mays
  unsure (1)..(455): unsure at all n locations
taaagccatggtaagtagcataggctaataatatgcgatttgtctcaagcctagctacgggtgcataggtttcaccaaaatccaaaccttcgacttgngagtatcccttggccacaagtctagctttgttccttgtcaccacaccatgctcatcttgcttgttgcggaagacccatttggttcctacaacattttggttaggacgtggaactaaatgccatacctcatttctagtgaagttgttgagctcctcttgcattgccaccacccaatccgaatcttgtagtgctttctctaccctgtgtggctcaacagaggaaacaaacgaataatgttcacaacaatgtgcaatacgagatctagtagttacccccttatgaatgtcgccgacgatggtgtcgaccgggtgatctcgctggattgctttgggactctggatgtggcggccttgctct

SEQ ID NO: 40746 - DNA, 87 bp, Zea mays
ctcttgtaaggaccggacttattgccactacgtggggagggatatggtacgcgggaatactgcataccaagggcgttacgaccaccc

SEQ ID NO: 40747 - DNA, 368 bp, Zea mays
  unsure (1)..(368): unsure at all n locations
acactatagaaactcagcttctggccgcaggaaatgccttgtaagacttatactaattnttttctccaatcttcactgtgcactggtgagatagtagcaccactcgctccatgagctcgactgaaggagctttcattgtctcaaaaaatacttccgaagctaatgggagcccctatgccgctgacttggctaatacgtctgcatgttcattttctcctcttgggatattctctacagaggaaccttcccaagaggcttccattctttcgactgcatcgacacatttctcatgcttcagatctcctgctctgctgcttttgtcgatgtgcctatgataacttgtgaatacgatctgaagattgcccttc

SEQ ID NO: 40748 - DNA, 394 bp, Zea mays
aacccacttggggttgttggactgatcactccttggtatgacatctgctttcattctagccttctaggtttgcagttcatcaacatatgctgattctgtagtataacaaaagggttctacattctatgaattcattttcttcttaaggacagttgttatgtggctaaaccagagtgattatttattcgctacctttatcacatcctttcatttatccatgtcaaacaagcgaaaattgagtcctatcatagcaaagactgttaatctgtatgcgagtacattctatattcgctctcttttgtatttacgttaacatactataagctagtagctgcttcataataactcaaaatggtgttttcgacctctcttgatcaagaaaacacaacatgat

SEQ ID NO: 40749 - DNA, 433 bp, Zea mays
ttcccaagcgcgctggctgagtccactagcttgggattgtgttgttctggggacacagcgctcgtcttcgtttcacgcgcgaagtctatacccggtgcacccctcgttggggcgccggcgctgttgactctctcgacagccgacgaggcgctgtctcctgcttggccttggttgccctgcctttccctgcatcggcggggaagaaggcgggacgagctcgaatgttgttcattcgccacgcggggaagacgtctaccatttcactcgcggcgggcgggctgtctgccaccattgtcgttgtcgcacagtggtggaaagagtatcatgtcgcagctgtcgtcgaaggacatgatctcaagactcccgatacggagcaccgctccgcgttggtaaggatgttggagactgaccatctggagcttgaccggaagct

SEQ ID NO: 40750 - DNA, 374 bp, Zea mays
agcttctaaagggagagcacattctacgatttacaaatgttcatcttgagatagacaggatctgtatcgcatgtcaagcacgaaagcaagttggtgcccatcatccacataagaacatcatgacgaccgacaggccactggagctcctacacatggacctattccgcccgatagcttatataagcatcggcaggagtaaggatcgtctaggtattgcggatgattattctcgcttcacttgggtattatttctgcaagaaaaatctcatacccaagaaaccttaaagggattcttgagacgggctccaaatgaattcggcttaatgatcaaaaaaattagaagcgaccacgggacggagtttcaaaactctcaa

SEQ ID NO: 40751 - DNA, 390 bp, Zea mays
tctacagggagaacacgtgataggactaacacatgtttatttcgaaaaagaaagaccctgtgcagcttgtcaagctaggaaacaggtgggaggctctcatcacaccaaaaatgtgatgacaacatcaagacccctggagctgctacatatggacctcttcggacccgtcgcctatctaagcatatgaggaagtaagtatggtttacttattgttgatgacttttcccgcttcacttgggtgttatttttgcaggataagtctgaaacccaagggaccctcaagcgcttcctcaggagagctcaaaatgagtttgagctcaaagtgaagaaaaaaagagcgacaacgggtccgagttcaagaaccttcacatggaggagtttcttgaggag

SEQ ID NO: 40752 - DNA, 353 bp, Zea mays
  unsure (1)..(353): unsure at all n locations
agcttctaaagggagaacatgtggtaggtttgtctaacgtgcaattcgaanaagatagaccttgtgcagcttgtcaagcaggtaaacaagtgggaggagcgcatcacagcaagaatgtgatgaccacgtcaagacctctggagctgctgcacatggacctcttcggacccgtcgcctatctgagcataggaggaagtaagtatggtctagttattgttgatgacttttcccgcttcacttgggtgttctttttgcaggataagtctgaaacccaagggaccctcaagcgcttcctcaggagagctcaaaatgagtttgagctcaaggtgaanaaaataaggagcgacaacggg

SEQ ID NO: 40753 - DNA, 434 bp, Zea mays
tctaaagggagaacacatgataggtctaactaatgtaactttcgaaaaagatagaccttgtgtagcttgtcaagcaggtaaacaggtgggaagctctcatcatgccaaaaatgtgatgacaacctcaagacccctggagttacttcatatggacctcttcggacccgtcgcctatctaagtatatgaggaagtaagtatggtcttggtatagttgatgatttttcccgcttcacttgggtattctttttgcaggataaatctgaaacccaagggaccctcaagcgtttcctaaggagagctcaaaatgagtttgagctcaaggtgaagaaagtaaggagcgacaacgggtccgagttcaagaaccttcaagtggaggagtaccttgaggaggaagggatcaagcacgagttctccggttcctacacaccacaac

SEQ ID NO: 40754 - DNA, 339 bp, Zea mays
  unsure (1)..(339): unsure at all n locations
agcttcggccaccgtggccagcccgctccatccattctctgggcaggccagtgcttcggctagctccgccagtagaccgtgaagctcgccaagccctcggacccgaccggacttcaccggaggcccgagatcgacctcaccggacttcggtcttccgccgccgcgcgtggaccgagctatccagtgagtctccgcccaattcctttcgctcataacttctctggcatcccgtggacctccctgacccatttgattgaactacctcgccatgaccaggccggtctccgcgccgncgacgagcatcctcgcctgcgcgcgtggaccgaccgacttcggcca

SEQ ID NO: 40755 - DNA, 459 bp, Zea mays
  unsure (1)..(459): unsure at all n locations
tggtaaccctactacaagcaccccggtgcaagataatataagcctcattctccctcttgngnnncatcttgcatcaatccatccgggcagggacacgcagtataaaattcactagtcggttgagggtccccgtgggtccaaaacactgatagaaatataaggcaaagaagttcaaaagtcgttcataaagggatgcagaacttataccaccgaaatagaaggtgaagaagctcaaaagtcgttcctaaggggatgcagagcttagactcaaaagacgttcccaaggggatgcagagtctttcgtgtaccagtgtgggcgtaagtttgggtgttaaagcatcatcacattgcatcatatcattgcatcattcagcatagcatcacatcatacatcatatcgcatcaacagaaagattgaatacgaagcaaatctttggaaatacttcgttgaatgaaaat

SEQ ID NO: 40756 - DNA, 482 bp, Zea mays
agcttatctgaagatactggtgaaagtgattgtttgacacagacagcggaggtgaggattctgaagatcgaccatggcgaccaagccattcagtcttcggaaaatcaactattggacaaagtcaccttgaaaacatgaagggaagatattttcgagatatatccatcgcgagggcagatgacggagagaagactgtgccgtctcccgaagataatgaagtcgtgatcttccgaagcttttttaaagctaggctacgattccctttaagcaggtttgtggtagaagttctgaaaatatatcaggtttatcttcatcaacttacccctgacgcaataataagaatgggagtcttcgtctgggccgtgaagagccataagcctgaaccaagtgcgaataagctttgcaatatacatgagttagtatatgagacgaagccctatggtaaggagcaatatcataacaactttggttgtacagctttg

SEQ ID NO: 40757 - DNA, 434 bp, Zea mays
  unsure (1)..(434): unsure at all n locations
tcgtcatctgaaagaagctaccctagaggaaagagatgatctcttttcttcagtcttcactataaacaggggatatgttgaggaccgctctttcaagaagctcaactgaaggtgcttntattatttcgaaaaatacttccgaaggtaagggcagtccctgtgctgctgacttagctaataaatcagcatattcattctctccaccagaaatatttttaacagaaaagccttcaaaggaagcctcaatccttcggaccgtgtctaaatatttttcaagcttcggatctcttgctttataacttttatcaatatgaccagaaataacttgggaatcagtttaagaaccgccacctgattccctcgcctttaacttccgaagaccccaaagtaagcttcgtactcagcaatattatttgtgcaactgaaatcaagtc

SEQ ID NO: 40758 - DNA, 280 bp, Zea mays
acctgctgcatgcagctggtaaaaacctgatgggggaactttgttctatccatcacgcggaacaagtatagagtcgctctggttttagtgactgtgatcctgctccaacaccttatgaccccagtgtgctattaagaaagaatcatagaatatcaagggatcaattgacatactcccagatcatcggctcgctcatgtaccttgcaagtgcaataagggcatacatctcttatgctgtgagtaagctaactcggtttgtgtctaaaccaggaaatgatct

SEQ ID NO: 40759 - DNA, 435 bp, Zea mays
tggggcgccctcgggcgtcctaccgcagccgaagtaccatattcttcaactggaagcctcggggccgaacccctctggcgtggtagcgtcacagagactgctgataccacgccgagcgtaataaggacacgtcccgagcctcttcgagctggtccagtgagtcttcttggctggtctggttgcttcaaacgtcatacacctttgtcctcggggaaccgaattctaagtctgtgggtaagatagcctcggccccatatactagaaagaacggcgagaaacctgtggctcggcttggcgtcgtcctcagactccagaccaccgaggggagctctttcatccatcgcttgccaaactagttgagggtgttgtagatcctctggttaagttcttgcaaataataccgcggggacgctccacctacccatttgtcattgg

SEQ ID NO: 40760 - DNA, 412 bp, Zea mays
  unsure (1)..(412): unsure at all n locations
agcttganatgtgntttcctccatcattttttgatatgcaagtacacctaatcatacatctcgtggatcagataaaaatattagggccactatatttacatcatatgtttcagttggagcgatacctgngagtattaaaaggttatgtgcgaaatcgcgctcacccagagggttcaatcatggagggatacactacagaagaagtgattgagagctgtatagattacatcagtgacggaacaatgataggtgtgcctgtacctaaacatgagggtaaactatgtgggagagggagaatgggcaagaaaacttttcgcgtagaggattacaagctagtacattgtgctcatggtagtgtactacaacatctcacgatagccgagccttacatagaggaacacctggatgagct

SEQ ID NO: 40761 - DNA, 437 bp, Zea mays
  unsure (1)..(437): unsure at all n locations
gcttaacaagccagcnggtccgctccgtcatgtttcagccattaggttcaaagttccctccatgccccatctgttgcaagagaccaacctccagccaatgcttgttggcactgcggagaccctantcactacaagaataattgtccttagttgaagacatccgtgcctacctactccaactcggtgaatggccccaagaatgctccaacacacgcctccaaggcaccatactccaacagccagctaagcaagacccaatntcatggcagggcacgagtaaaccacgtcgacgctcaagaagctcagcaagccccgggagtagtgctcggtgagttcctagttgaatttacccccgctgttgtactttntgattcacgagcatcccattcattcatagccactacttntgtggaaaagcatggcattcccactgcatc

SEQ ID NO: 40762 - DNA, 327 bp, Zea mays
  unsure (1)..(327): unsure at all n locations
acgggatctataagcacctgcggcatgcaagcttctcgtagcgccgcctggcttatctttcttgtgtccagncccgtcgcgcagtcaccgcccacgaccagggcgccgcggctgtacccggcgatagagtggccgatgacggaggaaataccaatttaccatacaccgctactaccagtaccagctggggctgcggcggtcacgctcgctagctcgcggtactaccctcctcaaccgtcgtcggcggtttcagtgcagatggagcccgttgcggtgtacccgccgccgtttgaagagacattgtcctgcaacgtgtacccatctgta

SEQ ID NO: 40763 - DNA, 407 bp, Zea mays
  unsure (1)..(407): unsure at all n locations
ggtattntctggttcatacatgttctatgtagttgtgattttctttgcgtagctaattagttgtgtaccaaagtatntgctcttttgtgctcataagcttgagtagtttattagccttgcttagcttggaactaagtctttcaactctttagtttggatcatgtagcttcgctagttgagtagtgctagtgtttgttgctctgtgcttgtgcttgtgctcactaatatgtttagagcctcgcttgtgcttgatgactagttgcatagttttatgtgacattgccaactagaattgtttagatgagctcccactatattgtcaccttaattgtgtaactaggatcttttataagatgcttgtgatagatagaagggtgtactcttggctagactgattatgttacgat

SEQ ID NO: 40764 - DNA, 405 bp, Zea mays
cagcttccatccaagcaactcaatatctattctgtctgcaacacaccatttaaaacatatttaagtgcgaattgaattaacacggaataaaatacagacctcatatcttgtcctacaaattgtgaggctggatgattcctatgttcatctccagcaagcaagggatggattcgcaagcgcttaatctgtttgccatgggcatgcggggaaagactgtgtggggaagaacgctatcatgagcaatacttgccaccattcgtcagatcgacctagaccgcttgtcaacggcctatgaaatacgaccccattgaccacaagcctgctcgcgtttcctagccgacgactcacgtgcccctcgtcctccccactcactcgcgcatcgtcgttctggatgggttggtcacc

SEQ ID NO: 40765 - DNA, 465 bp, Zea mays
tctagagggagagcatattataggactaacaaatgttcttttttagaaagataggatctgtagcgcaagtcaagcatgaaagcaagttggagttcatcatccacacaagaacatcatgacgaccgacagaccgcttgagctactccacatggatctattcggctcgatcacttatataagcatcggcgggagtaagtattgtcttgttattgtggatgactattctcgcttcacttgggtattctttttgcaggaaaaatctcatacccaagagaccttaaagagattcttaagacaggctcaaaatgagttcaaattgagaatcaagaagattataagcgacaatggaacggagttcaagaactcacaaatcaaaggatttcttgaggaagagggcctcaagcatgagttatgttctctctacacacctcaacaaaatggtgtagtggagagaaagatataact

SEQ ID NO: 40766 - DNA, 425 bp, Zea mays
ctgaggctgcagcttgaactgcggccggcgagccttctgttgtacgacgacagcacgggtgatcatgaacgttgcattgcatgtggcttccctgattacaaacggatcaaattctatcattgctcatgggtcacgattatgcagtagtatataaatacatgcacatgatgctggctgattattcatgaagacacacaatggatgagtatattcaaccgattaatttactcgatgtgacatgattcttcctccgcctgaactatggtcttgtgacgtgctcacggtgactcatgataagagagtttcatctcattgttttcaacgtcacgatctgtcactctacacttggtataactctgttcgtgatctatcattttccgtcgctatgcgagtcaggatatgctcagtacacctgttgacctcat

SEQ ID NO: 40767 - DNA, 379 bp, Zea mays
agcttcacacgctggccccagtgatcggcttatcatgtctgaatagctctctgataagtcgctccagtagttttgaggccgaacggtttggatgtataacagatagcactgaatggagtgatgaacactgttttctccttgtcttctttcgccaggctaatctgatgatacccatagtagcaatccatgaaggacagccaagaacatccagcggtggaatctaccacctgatctatcctatggagcccgaagggatcctttggacagtgtttgttgagatccgtatagtcaacgcacatgtgcccatccactttattctttttgagtacaagaacagggttggctaaccactctcgatgtaacacctctctaataaatc

SEQ ID NO: 40768 - DNA, 447 bp, Zea mays
  unsure (1)..(447): unsure at all n locations
ctatcggaaagctataattattttcttgncacctcctctgcataggtgggctgcgttagctcctggggcttctaatcgagtactatagaaagcatctctcttgataaatagttgtgtgcaaatatatggtgcttatataatccatcattagagtatgaggcgtgccttattatgtgtgcttcccacaaaaaagagtagcctattataaactttgtattagagcacatgacgctctaagttttgaccacatttctctactattataatgcagccatcaagattcaatttttatgttgggccccataaagatgtttggcaccattctttccaaacattcatctactattataatgcgtgctttattcaatttttacgattgtcacgcgagaagtcttattctcaacaatccatattgatgtttgcctatataattagcgtcgagtataa

SEQ ID NO: 40769 - DNA, 443 bp, Zea mays
  unsure (1)..(443): unsure at all n locations
ttaagtcatctgcggcatgcaagcttctaaagggagaacacttgatatgttttactaacgtacaactcgaacaagattgaccttgtgcagcttgtcaagcacgtcaacaggtgggacgagcgcatcacaataagaatgtgatgaccacttctagacccctggagctgctgcatatggacctcttctgacccgttccctatctgagcatatggggagagtaagatgcgctatctattgctgatgacttttccngcttcactcgggtgttctttttgcaggataagtctgaaacccaagggaacctccagcgctttctcatgagagctcaaaatgaggttgagctcaatgtgaataagataacgagtgacaacgggtccgagttcaataacccttcagtggaggagttccttgaggaggaagggatcaagcactatgttttcgct

SEQ ID NO: 40770 - DNA, 403 bp, Zea mays
  unsure (1)..(403): unsure at all n locations
acactatanaannactcaactcgatgctgggtatagattaccgcccttttaatgctgtatctatcaagaacaagtatcctttgcctcggattgatgttctctctgaccacttggtcggagccaaggtgttttccaagatagaccttcgctctggctaccatcagatcaaaatacgagcaagtgatattccgaagacgacattctcaaccagatatgggctatatgaattattggtgatgtcattcgggctgacaaatgcaccagcatattccatgtatctgatgaattctgtttttatgccacaattgtacaagttcgtggtggttctcatcgatgatattctggtgtactcaaagaacgaagaagaacatgacaggcatttgcatgtattgcttcaacgtct

SEQ ID NO: 40771 - DNA, 218 bp, Zea mays
aagcaagttaacaagtgggaagtgctcattacatcaagaacgggagactacattgagacccctgaagctgtgcacatggacctctctcgacccggtgcttatctaaccataagaggaagttagtatcggtcttgttatagttgatgatctctcccgcttcacttgggtattctttttgcatgataaatctgaaactccatggacccttaagcgcttcc

SEQ ID NO: 40772 - DNA, 456 bp, Zea mays
  unsure (1)..(456): unsure at all n locations
tgtgattatgggtagtgaccagccaacggtgcttcattgtggtgatacatatgatggcggcgatgatattcatttgaatgtaagaaatcgattacaatattcacaagcatgcatcactataaaaacagctatatataaagaggctattttctcattgtgaaactcaaaatcactaatatgcagncgctccattcatagcttcactaccagcgattctaccgaccaatatttgctagcatagctagagcacactactgctttctcaaaccccaatatgtgctagcattgaaagcaacccaatatgtttaggaagcgttctcacctatccagaggccggtagctttgtaatatatgcagagaagagccctctacatggcatacaaatcaccaaccaaaatcaaggagatgccggtgtatacccntctattttacaacaaccatatttggactctccta

SEQ ID NO: 40773 - DNA, 377 bp, Zea mays
atcctctaaggcacctgcggcatgcaagactttagccaaaggggtgctttctattatcactatacttgaaaaatgtcagacaacagatttccatgttttcctatcttcttctgtgtgcaagagcaatcattctaaaatttggtaactctttgcttaagagaaagggtggtaggaatttcttgaactaaatggcccttttcatgaagtacgggcaatgggcattactttgtagctttgaatgggatctgaaattttctctggtggtcattccattaataatctggtaaaaatttatttgcccactattgcacactctttggcttgcttatgatctaattgaaatatggctcactatcaagctctattgcctatcctac

SEQ ID NO: 40774 - DNA, 418 bp, Zea mays
  unsure (1)..(418): unsure at all n locations
gaacactacgcttacaagctaatggcgaagctaaccgagcggttggcgctgcttggaagcaactggggtgggctggccatggtggccgaagctctggtggcaatggcgggcggaaaaaagctcgccggagctaaggaggggcgtctggccggcgacggtgagcaccacgtgaggtgaggcgcgcccggcgaggctntataggcgtgtgcgggcacagtcgatggcgaaggcgcgcagcggacttgactgaacgctatggcgaacgcgcgcgcacgttgtgctaacaccggcgtgccgaccacgagcgaacacatgtgcacattcattctgcccacgttctggcacatgtgtgcattcatccgagcctgctcttgccttgtcagtgcacaaaccctctcttcttccttataagctacca

SEQ ID NO: 40775 - DNA, 285 bp, Zea mays
agcttgtgagtaatacaagtacagaagggagtatgctgcttcggctgatcagccgaagcccatgcttttatgtgaagatatagcacagcacaaggtgttgctggggtctcaattgtctaacgagcaggagaaaaccttgacaaggcttctattcaacaataaagatgtcttcccatggtcgaccaatgatctctgtggtgtgaacatggatgctactgagcactcgttcaatgttgatccattcttcacacccaggaagcacagacttccgaagatgtctgatga

SEQ ID NO: 40776 - DNA, 441 bp, Zea mays
tacctcgtgatgaagtaaagctctcaagtcaattgtttaagtatccactataagggcaagcaagatatgcttgtctgttgtagataattctacagctacccaattacttctgaaagtccaaattccggcccgtttgtttcgttggaattaaattccattttaataattataatttagacaaaactaattaagtttatatatttatatatgtaatatgtttgtatattatcttaaattatatgagagagatagttatatactacatttatgttatagaggcgcaagtagaagaatatgctataagttgtacatcggaaaaatagcatgtaaatctatagaatccatttccatctctcaccccatgaatctgaggtaggcttatatgataactttggaaagtggtggaatgtcacattctaaaaaaatagtctattcccttag

SEQ ID NO: 40777 - DNA, 481 bp, Zea mays
agtcacctgcggcatgcaagcttgtgaacagtacaagtacagaagagagtatgctgcttcggctgatcagccgaagcctatgtttctatgtgaagacatagcagagcagcaggtgttgctgggatctcagttatctgaagagcaggagaaaaccttgataaggtttttattcaacaacaaagatgtgtttgcttggtcagctaatgatatttgcggttttaacagagacgtcattgagcattcactcaatgtggatccatctttcaggccaagaaaacaaaggcttctgaaaatgtccgatgacaaagctgaaggtgctcagaacgaagtgaagaggcttcttagtgctggtgttatcagagaggtcaaatacccagagtggctagctaacactgttatggtgaagaaggcaaatggtaaatggagaatgtgcatcgatttcacagatcttaacaaggcctgtccaaaggatgtagttcca

SEQ ID NO: 40778 - DNA, 461 bp, Zea mays
  unsure (1)..(461): unsure at all n locations
tctcctggacaagcgctgcacttaccgctgagtgcgaagctgccacatataataacaaaggagcccctggcattggtggagtcaatgttgttagatctatcaaatactgtttcagctcttcaaaagccttctgctggattggtccccattgaaagacttcggctgacttcagcacttcgaagaatggtaagtttctctctgctgatctggatatgaatctattgagagatgccaatcttcctgtcaatctttgagcccccttctttgtagttggtggctccatccaaagtatagcttcaattctacttggattagcttcaattccctttgttgaaaccaagcatccaagaaatttccccttctttactccgaagacgcattnttctggatttaactttaaaccaccttgcctgaaactggcgaaagtctcctgcagatcagcaatatgattctcctatttc

SEQ ID NO: 40779 - DNA, 411 bp, Zea mays
  unsure (1)..(411): unsure at all n locations
agcttcgtcagcaatttcttttcctttctttgacgctacggtcacagnttctccggcagcagtagcagcttcttctgcagccatgtctagcagcatttggtcaatatgttcaattgtgctctctaaattcaaatcttcagctgaggtaacttcggcggctgcggcctccgaaggtgcaatttcaatatctgctccctctgcagccgctcgtgttttttgggccgaagctcttggcggcgttttgtcaattacctctgtcacnggaatgattctttgtttctttgccttgattgttttccttgatttctcgggctccttgtccttctgaaaaaactttgtcagttgaggacccagtggacttagcttcgcaggtaaggattcagtcattaccttcagaaattcctcaacaac

SEQ ID NO: 40780 - DNA, 444 bp, Zea mays
tctatagggagaacatgtgataggtctaactaatgtacatttcgaaaaagatagaccttgtgcagcttgtcaagcacggaaacaggtgggaggctctcatcacaccaaaaatgtgatgacaacatcaagacccttggagatgcttcatatggatctcttcggacccgtcgcctatctgagtataggaggaagtaagtatggtcttgttatagttgatgatttttcccgcttcacttgggtattctttttgcaggataaatctgaaacccaagtgaccctcaagcgcttcctcaggagggctcaaaatgagtttgagctcaaagtgaagaagataaggagcgacaacgggtccgaattcaagaatcttcaagtggaggagttccttgaggaggaggggatcaagcacgagttcttcgctccctacacaccttaccaaaatggtgt

SEQ ID NO: 40781 - DNA, 396 bp, Zea mays
  unsure (1)..(396): unsure at all n locations
agcttcaccatcaccaggaagacaacccctcttattctggcgggtttgatcaccggggcagctccgaattgctcgccgtcgtcgtcgccttgccactgtcccgccattcctccacaactagcgctctacgtgacgattactccggtatgatggctcatacaggttccttattgttcccgtaacacgtagaagcgagcgggttagacgctagagctctggcactccggatttgaatttcgccggcgaggttcgccgcgtactgtgggcggcgccgccgttcgctgcgtcggattgggttgggggagcctctgccgttgatccgctaacacacggntaggaatagatcttggcataccttttcgcctcgatcgatcgggaccgtcgatctggatcgta

SEQ ID NO: 40782 - DNA, 417 bp, Zea mays
  unsure (1)..(417): unsure at all n locations
tgacaacaccatttggacatttacataaaattcctgagatcaagattatttagntcattcctcaacatgcaaaagcgggtcttatcaagtggcttagtgaaaatatccgctaattgatcttccgacctcactccttctaaaatgatatctnctttatcaacatgatctctaaggaagtgatgacggatatcaatgtgcttggtgccagagtgttgtacagggttattaacaatnttaacagcactctcattatcacacaacaaaggtaccttttctagaactacgccatattctagaagagcttgtttcatatataaaatttgtgtgcaacaagcacctgtggcaatgtatttcgcttccgcagttgacaaagcaacactcatttgctttntggatggtcatgaaactagtgatcta

SEQ ID NO: 40783 - DNA, 400 bp, Zea mays
  unsure (1)..(400): unsure at all n locations
agcttaaagccatggtgagtatcatttgtctttaatatgcgaatngactcaagcctagctacgggtgcataggtttcaccgaaatccaaaccttctacttgggagtatcccttggccacaagtcgagctttgttccttgtcaccacaccatgctcatcttgctttgtgcggaagacccatttggtttctacaacatnttggttaggacgtggaaccaaatgtcatacctcatttctagtgaagttgttgagctcctcttgcatcgccaccacccaatccgaatcttgaagtgcttcctctaccttgtgtggctcaatagaggaaacaaaagagttatgttcacaaaaatgtgcaacacgagatctagtggttacccccttatgaatgtccccacgatggt

SEQ ID NO: 40784 - DNA, 456 bp, Zea mays
  unsure (1)..(456): unsure at all n locations
tcgcanaatgtcagacgacaagacagatgccgtcaaagctgatgtgcatcgcctcctggaggctaaattcatcgagccagtggcttaccccacgtggctctccaatgttgtgatggtgcagaaaaaaagcggaaaatggcgcatgtgcatagacttcaccagtctcaataaggcctgcccaaaggacaatttcccgttgccgcggatcgacaaaatagtcgatagcgcagccggatgcgaggtcatgtccctcctcgactgcttctccggctatcaccagatatacatgaaggaggaagacaaggctagcaccagctttataacacccttcggcacttattgctttgtcagaatgccggagggtctcaagaatgccggatccactttctccagactcaccaaaacagtgctcgaggggcaggtccgcagaaatatattcacatatgtggacgacat

SEQ ID NO: 40785 - DNA, 507 bp, Zea mays
  unsure (1)..(507): unsure at all n locations
agcttagcctcggtcggaccaatactattatttgctcgcacgcactgngagtggagagatggcgagagtagcttgtaccctccgcggcaagagactggaagatggggtgctgtactctcggaaacatggcgggcaccatggcgagagtaacgtgtaccaaccaagccaatggctggacggtggagtgctgtgctctcgggtcgcgtgaacccgttctggtcttgagaaccccggtggcgagttgacatatgcaagggttaagtgctacatatatcgtgtggttggagatccccagctgggtattaatcgattcggatcgccgaacttctcggatatgaagactggatcttcgaccttcagcgtagataacaagtgaaattaaaattgataaaatgaagttagtgtagtacaagtgaatactctagaccaggcaaatctagaatcatgaaaagtacttaattcgtgaagtacattttttgataaagatccatactagtaagcttttct

SEQ ID NO: 40786 - DNA, 479 bp, Zea mays
cggaactataaaactaagctttccttgtcgcatcaaccttgacatagaaccactcttatttccagcctgctgcccatttgcttcggtagctgatcacaggaaactctgtagttctccaataagcaaaattatagcaaccaaaattgtcatgtaagccatcctttctagcctttgtctgatagtgcagctcgtgaactcggcaaaagctgtccgcaaacggctccaccgcttggcttcggagtgcccagatataaacactaagcctaacgatagcgttaggggtcaggtggtgaaaatagataccgaacctcttcagtacctctgcaataatcccatgtagggggaatcttaatccagcctttataaagcttttgaaaataacaatttcatccttctccggctttggggtagtctcttcttccccgaagcgtaatagcttcttctgattctcattaaaaaagcccgactctaccatcttg

SEQ ID NO: 40787 - DNA, 533 bp, Zea mays
  unsure (1)..(533): unsure at all n locations
atcctctgagtcacctgcggctgcagcttgacacatagtatatatttgtgtgtctttaccatagtacacgtttaagtcccctgaggcctgtaaggctattttagcctcccgtgacacatgtttttgtcatcgaacagcgatttcgtgcctcccgtccgccatccatgatttggccactgagactggtaaggctgttttggcctcccgtgagctatttttatgtacgcgttccaccacccgtgttatggtccccaaagcaccttaaaggtgtttttggcctcccacgagctatagcacacgtttccgtgaccaaatagccaatttcatgtatccgacctaccacctacgtnttagatccgggaagccgttacgatatttttttgccacaagtgagctataacacatgtttttatggaaatctagaccccaaatcctatccctataccctaaccttaaancaccaaactaaaagggtttagtgtccaaaccatagtacacgttttaatcccncaggggcgtagaactattttggc

SEQ ID NO: 40788 - DNA, 453 bp, Zea mays
tcggctccatctatattatggattgcgttggagtcagtccagttaccttcggcccttcttgcggcttcctgacttccatggatagcaatgggtccctgttccgaaggtatcttcatgcaaagataagcaggatgaaggattgcttcgaaggcattaagagtaccacgaccaacaattgcattataaggatattccatgtcaacaatgtcaaacacaacttgctcagttctagtgttgttgatgaatccgaaggtcactgacatggtgatcttgcccaatgctacaatctgtcttcctccgaagccacagagagggtgtgtagcatcatgaatcttatcttctggctcttgcatttgtctgaaggctttagcaaatatgatgtcagctgcactgcctgtgtcaaccaagacattgtggaccagaaatcctttgataacacaagagataaccatg

SEQ ID NO: 40789 - DNA, 440 bp, Zea mays
agctcggaaattgaaactaggtgttctctatactcatcaatgtcaaagtctttacacctagtacaaattacaacatgttctacacaagaattagatttactagccacttctagtttagcatttaaatcattattaacaccttttaaagtagcaatggtttcatgacaagaagataattcaccaaaaagcacttcatttcttctaatttctagagcaagggagatttgtgcactaacaaatttatcatgctcctcatataaaagatcctcttgtttttctagtaatctattcttatcattcaaagcatcaatcaactcattaatcttattaattttagatctatctaatcccttgaataagcatgagtaatctatctcatcatcatcactagactcatcctcacttgaagaagcataagtactagtatcatgagtgcttac

SEQ ID NO: 40790 - DNA, 427 bp, Zea mays
ttgtgtggagttgggagaggatatgatctctatggtgtgtcttgtattgaatgctatagctcttgtaaggtgtagaagtgtagaaacttggatgccattgaatgtggggtggttggggtatttatagccccaaccaccaaactagccgtttggtggaggctgctgtcgacgggcgcaccggacagtccggtgcaccaccggacactgtccggtgtgccatccacgtcacccggccgttagggttcaaccgatggagctctgacttgtggggcctctgggctgtccggtggtgcaccggacaggttctgtagactgtccggtgcgcttgctgcgcgagctcttgtctctgcacgcgctgacgcacatttaatgcgttgtagtccacacgtgcgcttgaaaaatccgtgctctgctggacactgtatag

SEQ ID NO: 40791 - DNA, 462 bp, Zea mays
tgccttcacctcagtatatcacccacaatctaacagcgtcgtggagcgcgccaacgcgcaaaatttcatggccatcaagaaaatgcttctcgacgacaagaagggtaaatgggctgacctgctacctgaagcagtctgggcgctgaacacgaccgagtgtcgggcgactggattcactcctttccgcctgctatatggatcgcaggccatgacctcgcaggaaataaaacatgggtcaccacggacaagcgcttcagtcgtccctgacatagacgaaccaacctccaaggacctcatcgacggagaccgtgtcttcgccttgcagaccctcaacaaataccaagctcaaacaaaggcatggcgcgaccacacagtcgttccaagagaatttaacgaaggggacctcgtactcgtccggacaactcggacagagtcactgggcaagctggagccaaagtggga

SEQ ID NO: 40792 - DNA, 389 bp, Zea mays
tatacaagcaaccccatccacctgttcagggcatctccattacttccgaaaccgtcctatattatagtaatgttaatgtaaaactaatatacctaatacactatttaccgacactgactcactattctacgccaaacgatatatactaattgtgcaacttttaggccgcctcgctcttatgccctatctctcaaaatcttatctctactttatatttacctggcgacattacaccccatgcatgatccataaattccgtgcccacgttaggctctgtttgcttacaccacagcacgctctggattagcatggattgcgattacatcacgcctcattctcggccaaaaactcatactcactaattttttatccggtaaaccacccggata

SEQ ID NO: 40793 - DNA, 460 bp, Zea mays
  unsure (1)..(460): unsure at all n locations
cgaatgttcanaatcaagaacttcaagtgcaacttgaatattgcaagaacatcaatgcccccactttagtatttgaatctaagtctagctctaatgataattcttgcaagcattgtgccaaatatcatgcttcttgttgtctaactaaccatgcaaggaagcanagcccacacgtgaaggtcaaagaaattttgaacagatgctctaccaatgatgggttaaagaaagttgaacccaagtacaagtcccttaatcccaacaagggtagaagggggcttgggttcaactcatgcaaggaaaaccctagcacagtgcataaggagtggagatccctcaagttcatagaaggaaccactctatatgatgccttggggaggattcactcctcaaatgacaagtcatctcacgtaaaggttaacttgagtttcacaaagagtaacatgaacgaagtgagatcctc

SEQ ID NO: 40794 - DNA, 465 bp, Zea mays
  unsure (1)..(465): unsure at all n locations
agcttctcttcttatgtgaggaaggtcttttctgatagtgactgtctgcttgggcgtggcctgatcgagggggacagtcttggtcccgtcttggctctgcaactgtgccttgacgtgctgcttgtcggttgggctggcgggcgcagagacctcgcgctgggttgtgagacagtgtacgttcctctgaccaggcacgaagtcccgctctatgttgcgcgccgtctgctgtgtgtcgtagatcgtaatagcgcctagcggacctggtatcttcatacatacgtacagtccgtggatggcagcttcgaacttattgatggagccncggcccatgatggcgttgtatggatataccatgtcgacaatatccgagggtactcgctcacttctggcattgggtgctacactcgaagagaggggcaccttatcttgccactggaaatgtgcccttgccgccaagccatacaa

SEQ ID NO: 40795 - DNA, 487 bp, Zea mays
  unsure (1)..(487): unsure at all n locations
ctattacgtgacactatgaaactcagcttanagcaacaatctgaaactgaagctgggccttcagatcccaccaaggtaaaacccttggaagccgaaaaaataaaaatggcagagccaactttggttgaagaaactgacactgctgcccccgaagcatcctccttagcccttgattatattgtacgacatgcttcgggaaaaagattatctgaagaagagatttttgaagctaatcattatgcccgagaattgaagtatccaaagggggccttagtattcaatggcacagacgaagatgacttcttatactgccttccagacaacaaagaattatctgtctgccgggagatggccaggagtatggggttttcgaagcttgaagctggcctctgcgctatgacaaaagacgatcttgcagatagccttgcatataatagtctgaaggtatacaaattgtatatttggaagattataatttttgaattat

SEQ ID NO: 40796 - DNA, 144 bp, Zea mays
gatcttagcacgcgctgcactttaagggaaacagggagctgttacggcatcgaaaataagtggcgctagcagcagttcaagggagacgctacacagaagtgagaccctgagatcttggactgtgacatggaccttttgatccac

SEQ ID NO: 40797 - DNA, 196 bp, Zea mays
tctatagggagaacacatgatacgtctaactcatgtaactatcgaacaagatagaccttgtgtagcttgtcaagcacgttaacaagtgggaagctctcatcatgccaaatatgtgatgacaacctacagacccgcggagttacttcatatggacctcttcggacccgtcgcctatctaattgtaagaggatgttcg

SEQ ID NO: 40798 - DNA, 311 bp, Zea mays
  unsure (1)..(311): unsure at all n locations
gcttctaagggagaacacgtgatanggttgacttacgtacaattcgaaaaagatagaccttgtgcagcttgtcaagcaagtaaacacgtgggaggagcgcatcacagccagaatgtgatgaccacttcaagacccctggagctgctgcatatggacctcttccgacccgtcgcctatctgagcatagggggaaagaagtatggtctacntattggtgatgacttttcccgcttcacttgggtgttctttttgcaagataagtctgaaacccaagggaccctcaagcgctttctaaagagaagctcaaatga

SEQ ID NO: 40799 - DNA, 440 bp, Zea mays
  unsure (1)..(440): unsure at all n locations
ngccagtacttgtcaaagcaacaacatctaccagcacagtaattgcagaccataccagtaacttggcccttcgcatgctgnggactggatatgattggacctttcaagaaagctcaaggaggatgcactcatgtactggtagcaatcgacaaattcactaaatggatagagttcaaacccattgcttctttaacctcggctaaggccgtggaattcatacaagacataatattcagattcggaataccaaacaatatcataactgacttaggatccaacttcacaagttcagaattcttcgatttctgcgagcaaaagagcattcagatcaagtatgcttcggtagcacactcgagggccaacgggcaggttgagcgagctaacgggatgatactggtggcactcaggaaaagggtcttcaaaaagaatgaaaagttcac

SEQ ID NO: 40800 - DNA, 439 bp, Zea mays
  unsure (1)..(439): unsure at all n locations
gcttctttgaatgttggatgtaaaatatgattgtattttcgtaatgattcatagctctgagctccctttacaaccattagaagcattctgacataatatctttctcctgcagatggatgcacaaaatgtatgcggcctattataccatggcgttgcctgtgctcccataatcttttcttttcatcccatctccactcggatgggaagtcagggtaagttagggatctancgttctcatgtctttgattagcaacaaaccactcagtcaacatggttcgacgtaagaattcttgtgatacgatctgcgacatgttggcattagcatggtatgtaatgtaattttcattaggtaagtgaactggcaatctctccacgggaggaacatgccgatggatttcaaaaccaaaatcctccaacatgagtcatatggacatattaa

SEQ ID NO: 40801 - DNA, 462 bp, Zea mays
gaaacgcgatacacccttcattggtgacactttcatgtaaacatagtctccttccaggaaatataagggcatctgggttagaaacacagggtacgaaagaaaggaagaattatagacaagatgagtaattacgaggaatgatactacaggggatttattatctaagtagattagtgtgttatccactaaagctaatacattaccttatggtggtacatgctaagatgcccaactataatgtttcaatcaatcaaagaagcaaatcaagcatttatcatcagaacaatcaaccaacatttttaaatagagaaaataatttttaattccttttttttttggtctcctatctcttacaaaggttataaatgtatgattcaaggtgtgaaatccttcttgtcttatagtagagaaggtaagagtaatcagagtatgaaagcaaaaggtgagacaagatcaagatga

SEQ ID NO: 40802 - DNA, 397 bp, Zea mays
  unsure (1)..(397): unsure at all n locations
ctaagcttattgctccgcggtgaccggcgngagacccttgggagcgttatctatgtgctgttacaccggtgaccgccacggttacagccaccgtgctcttatttgtctaccgccgtcaatgcatccggttaggattgaccgtggccgccgccgctccctataagatgggtccgccaacatcttcgctatattatcactcactcaatcaccactgatcggtagccgctcctcgccatagcttgcaaactttggattcagcccaaaatctctttccgtcgccgcgaataacaccctgttgtggtcagcatttaccaaggccgctaatatcctccttgtacatgatctagcaaacttactagatggtgatgctccgcgatccctttaattgtaccgaacc

SEQ ID NO: 40803 - DNA, 340 bp, Zea mays
actgcagatgcagcttgggactagccggagcaaccgcttttcctaatatagacccgccgaacccccggtctgtgacccgacaaccccacataagacctcctagtatttacccaacacagcctgatagtctaggcaccctgattcccggtggcactcagcccaataatagcaaaatctggtaacccatgggtaacacaataaagaaagtaccatacgaaatcatatataatagaggactgctaagtaagataccataccaacacaaagtaagataatccacgcgacaaaataagtgaaggtattaaaggacccgccatatgataaatcaaaaaaacttata

SEQ ID NO: 40804 - DNA, 411 bp, Zea mays
acggacactataaaactcagcttctcagcaatttcctttcctttccccgacgctgcggccgctttctcttctgtggcggtggtagcttcttctgtggccatgtctagcagtattttgtcaatgtgttcgattgtgctctccaggttcaaatcttcagctgaggcagcttctgcagccgtgacctctgaaggtgtgatttcaatatctgtcctttcctcagctgctggtgtcttctgagctgaagctcttggcggtgtcttgtcaattacctctgtcacaccgatgattctctgtctctttactttagtcgttgtcttcattttttcgggctccttttccttctgaaaaaactttgtcagttgaggcctcaatggacttagctttgcaggcagggattcagtcattaccttc

SEQ ID NO: 40805 - DNA, 359 bp, Zea mays
  unsure (1)..(359): unsure at all n locations
agcttaagtntacaggatcacctattcacccctcctctatgtgctctcacctagctatactcttctctctcacatgtaaaaccctaaatccaaaatgtggctaaaattgagcaagaatgaacaaaaattgacaaagaaacataaaccaacctttcttatccaccttcttccaaaaaatgaagaccaaaacctcccccattgtattttgtgaaatctggacctccaaaatcgcctccaatggaagttggctgcgagcgtacagctcctgtcggggggaggaagaggggtatntataacacatanttcactaacggttgacttgaaaaaccgccagtggaaataggatatttccactggcg

SEQ ID NO: 40806 - DNA, 333 bp, Zea mays
  unsure (1)..(333): unsure at all n locations
tacgcgacactatnaaactaagcttcgatcctagcttgcaactcttgcaatatgacccgaaacaacctgggaatcagttttgagtatagcccttctgattcccattgcttttagcttccgaagacctagaagcaaggcttcgtactcggcaatgttatttgtgcaactaaaatcaagctttgccgcataacaagttttgaccttggaaggtgaaacaacacaagagtcggttctggttcgaaaggttccccagaatcattacaaaacactattcatgcttcggcgtctttatttgcttctttcttctgagcccctggcgttcagtcagcaatg

SEQ ID NO: 40807 - DNA, 337 bp, Zea mays
  unsure (1)..(337): unsure at all n locations
agcttangaccaacatctcctccgtgattgtctgttcttcgatggctacaaggccagctgactgccgttaccccgcctatcgatcccgatacaccatcactccacgcagaaaaaaccgacgaccgcataccctataactccaactggngggagggcacccgcgtcatcttcttcactcgacgttcgtccgcctacctctaactacaggcgatcacccggacctactgatgatgcggcagtcaccggctcgatggaaatggacaccaatcaatggcgaatggtcacccgatgccgcggacctgcgtctcgccatgggcaggacactgggctacataca

SEQ ID NO: 40808 - DNA, 326 bp, Zea mays
  unsure (1)..(326): unsure at all n locations
agcttgtgcaaagtacactcanctaatcttttttaatacccacctcgctgcaacatgacacccgaaggtgcaacacaacaagcaatgaatgaattcacaattattgcagagcatatcagcacaacggacctcgttcaagagtttttggctgtcaaagtctttcccagcttgaaaaaatgggaaatgccgaaactgacaggggagaagaaagaaagtgaacctgtacgtttaacttactatttcaagtttaagaaatactctaaaacgccttgccaagagtggctagacacaattgaagtaatgtgcaacgaaatacttcgcaatta

SEQ ID NO: 40809 - DNA, 443 bp, Zea mays
  unsure (1)..(443): unsure at all n locations
taatgtccccaaggaattatctaattatgttaagggttaggctcccatggctcangataacgagggctatattttatatcctactggttatcccgagcataaaattaggagaattcattctagaaagtctcattctggttctcatcatgcttttatgtataagaatgagacatctagttctaggcattctacccatgttaaaatgcctaanaagaaatctcctgttgcatcaaatgagcctaatgtttcatttaagacttttgatgcttcttatgttttaactaacaaatcaggcaaagtagttgccaaatatgttgggggcaaacacaagggctccaagacttgtgtttgtgtacccaaggtgcgttgttctaatgtgaaaggacccaagaccgtttgggtacctaagaacaaggcctagaattgttttgtanggttatgca

SEQ ID NO: 40810 - DNA, 356 bp, Zea mays
agcttctaaagggagagcacattttaggattatttaatgttcattttgagaaagacaggatttgtagcgcatgccaggcggggaagcaagttggagtccatcatccacacaagaacatcatgacgaccgacaggccgcttgagctactccacatggatctattcggaccgattgcttacataagcatcggcgggagtaagtattgtcttgtaatagtggatgaatattctcgcttcacttgggtattcttcttacaggagaaatctcacacccaagagaccttaaagggattcttgaaacgggctcaaaatgagttcggcttaaggatcacaaaaataagaaacgacaatgggacg

SEQ ID NO: 40811 - DNA, 442 bp, Zea mays
  unsure (1)..(442): unsure at all n locations
ntaccanatggacgtgaagagtgccttcctcaatggtccaattaaggaagaggtctatgttgagcaacctcccggctttgaagatagtgagtaccctaaccatgtttataaactctctaaggcgctttatgggctcaagcaagccccaagagcatggtatgaatgccttagagatttccttatcactaatgaattcaaagtcggaaaggccgatcctacactctttaccaaaacacttgaaaatgatttgtttgtatgccaaatttatgttgatgatatcatatttgggtctactaacgaatctacatgtgaagaatttagtaggatcatgacacaaaaattctagatgtcgatgatgggggagttgaagtatttcttaggaattcaagtgaagcaactccaagagggcaccttcattagccaaacaaagtatactcacgac

SEQ ID NO: 40812 - DNA, 410 bp, Zea mays
  unsure (1)..(410): unsure at all n locations
agcttcagctgaagtgggaaggaccttttcttgtagtatcttcatcaagacccggctcttacggattaaaggacatggaccgcaacgacatttctagatcttaaaatgcagatgagctttgacgatattatgtataaattaatataaccttntacattcttcctatggcaccctttttctttccaagggggagacaggtttttaatggggccatattttggaactttttcttttctattcaactctacgagaaacaaatcccccataatatgtaaatgtaaaatctgagcatgcaccatcgagtgagaaaaaagaaaaaatgggagaagctgaaagtttccctacgcgagcacagcatgacaaactcaaaagccgttctacggagcgcacgaagtttttgctcaaagtgt

SEQ ID NO: 40813 - DNA, 457 bp, Zea mays
  unsure (1)..(457): unsure at all n locations
tttcccctttcctctcttctttagacactgcgaggagcacttttatactatgtnagnacatacaacaatttatcaagtctagaaacatacctttttacttgatttgcactcctcactttatttggcacataagaacttaattaaacgtgttgagcacttaatcaccaaaacattataaaaattgcccaagggcacatttgcctttcaatgtgattaacatattaaactatattataaataggctaatataaatcatatgagaggttattctataaataaatatctcaactctaatctaagttatgaattgaccttagatcatattctagtagaatataatgataagttgaataactcttactaaccaacgatacgttaaataaagatctaattataaaagaatgaggctcggataaacaatgtgggtacttgcgatttaatacttatccaaacttac

SEQ ID NO: 40814 - DNA, 358 bp, Zea mays
cgtatgaaaacatcctctccttcagctgccttaataatctatccttagcgggaaggaccataatatatgttaaaattcttacaatataaaacgttcagtagtgcatataacctttgacatcaaccatatgtgtgcactaatttaaaggaatttaattattcttatgggtttaataatggtgattcatttgccatccagatataaagatcatcatttgtgaaaccctcccttgtgttattactcttttctaagagtgtcaactaggacgtaccaaatgctttcaagatgggttcaaaatctacaaatataagtcttgacctttaatcattgagtttaatttggctcatatcacgtatga

SEQ ID NO: 40815 - DNA, 431 bp, Zea mays
  unsure (1)..(431): unsure at all n locations
actaagcttgcagcatatttggtaccatcgcttgagggttattttgttattcacaagatcaggatcccaaggtcctttgtttagcatttggaaactcattacctttctagtacaagttgcaattttaggttgcctagttaaatgagaaataattgacaagctagaagtggggttgttaccaatgggacaatccttgcattgatgtcccttctttcggcatatgtagcaaaggcgatcttcaagtcttgaagatttcttctttccttgtttctcgcttgctacatggntagttaatattttcttttttagcactatgcctttttgtttcaaatatggacaagtcttaattaagtggtccttcttttgagatttaaaacaaagtttattatccttgttataattcagtcatttttaatataaggacatgaact

SEQ ID NO: 40816 - DNA, 299 bp, Zea mays
  unsure (1)..(299): unsure at all n locations
agctngngagctgatataacaaatttatggattctcatatccagttagaaatggctcatgagggtgcgttaactaattcgaaatactacccacctcacatatgcacatgtactcatatagaaactatattatcatgtgctaacaaacgttgctctcaacaaagcccaattctccattgagctagaaatttcaggaacaaattatggtttctatgctaaagatcacaatgagctctacgaataaaatgaaaggtctaaaaggagctttgctcaactgaagggaaaatgtcatgctccacc

SEQ ID NO: 40817 - DNA, 363 bp, Zea mays
tgcctaagcgggtatgagatgtacctctccctaatgctctatatagccatcgctatcgaggtcctagtagagacatcgtgggcctcgttccctctagtgcatgatggtgaccgaaccggacacacgattggagtgatctcgctagattatagacctatctaatacgactaatgcatgggtgcatgcaagcaccatgggggtgagaggtgtgcattgcttacttcttacaccagggaaatataatgtaagagttgatccaacgatctagctagactaatcactttagaaaccacctacgctaatcaccgagagatacttgagctgttgggtgactataactactacgaattgagtacaactcac

SEQ ID NO: 40818 - DNA, 395 bp, Zea mays
  unsure (1)..(395): unsure at all n locations
agcttttaattgtatggttcttcagaataacattttataatgaggaatcctatattaaaataccttttaaccccaaatcttatcaagaaatatttataaatattagaataggattttgggtgttacaacacagcgctggcagttgaatctaaatataccaattcccgaaagtccaacgggaatggaggcgacaggcctaatcaacgcccccagaaaaggcaacagttagttattcggccttttaatgagggtcattcttcatcacgcncacnctccttctcattcaaacaaccagtgtttatccatcctacccctgcccccattgctacaatcagccgggtgcctctggcactccgttttctgctcttccaactcatctaccggctgcttcaact

SEQ ID NO: 40819 - DNA, 420 bp, Zea mays
ttttcttgtcgtcatcaaccttgacatagaaccactctgatttccttcctgctgcccacttgcttcggtagctaattacagggaactatgtagatatccgatatgcaaagttatagcaaccaaaattatcgtgtaatccatcttttctagcctttgtttgataatgtagctcgtgaacccggcagaagctgtctgcaaaaggttccactgcttggcttctgagtgcccagatataaacaataagcctaacgatagcgttaggggtcagctgatgaaaatagataccgaacctcttcagtacctctccaataatcccatgtagcgggaaccttaatccagcctttagaaaacttttaaaaataacaatctcatccttctctggcttcggggtagtctcttcttcaacgaagcgccacaact

SEQ ID NO: 40820 - DNA, 392 bp, Zea mays
  unsure (1)..(392): unsure at all n locations
agcttctaaagggagaacacgtgataggtctaactaatgttcaattcgaaaaagatagaccttgtgcagcttgtcaagcagggaaacaggtaggaggctctcatcacaccaaaaatgtgatgacaacatcaagacccctggagctgctacatatggacctcttcggacccgtcgcctatctgagcataggaggaagtaagtatggtctagttattgttgatgacttttcccgcttcacttgggtattctttttgcaggataaaactgaaacccaagggaccctcaagcgcttcctaaggagagctcaaaatgagtttgagctcaaggtgaagaagataaggagcgacaacgggtccgagttcaagaaccttcaagtggaggagttncttgag

SEQ ID NO: 40821 - DNA, 423 bp, Zea mays
  unsure (1)..(423): unsure at all n locations
ttagagagagagaattgtgtgttcatttgagctcttgcgcttggatcgcttcttttctttctcattctttcttgtgatcatctcaattgtaaccgaggcaagagacaccaattgtgtggtggtccttgcggngacttgttgtcccgtttgattgagaagagaagctcactctgtccgagtgaccgtttgagagagggaaagggttgaaagagacccggtctttgtgaccacctcaatggggagtaggtttgcaagaaccgaacctcggtaaaacaaatcatcgtgtctcgctctttatttgctcacgatttgtgttgcgccctctctctcggactcgtttatacttataacgctaacccggcttgtatttctgcttaaatatgtcaaattcagattcgccctattcacccctctctaggcgac

SEQ ID NO: 40822 - DNA, 442 bp, Zea mays
agcttgtgaagccaatcacaagtttattgaagaactatactaaatttaactgatcctcaagatgcaatgaaaccttcgagcagctaaaggtcttatggaccactgctccggtattagctcaaccggacattgaaaatccttttgatgtgtattgtgacccatcaggcagtggtttacgttgtgtcttgatgcaagagggttgagttatagcgtatgcctcaagacagttgtgccggcatgaggaacattatccaactcatgacctagaattaactaatgtggttcacgccctcaaaatatggtgtcattatctactggggaatatctatcatatatataccgatcataaaagcttgaagttcatttttacccaatcagaactaaatatgacgcagaggagatggcttgagctgattaacgactatgaattggaaatcactat

SEQ ID NO: 40823 - DNA, 457 bp, Zea mays
  unsure (1)..(457): unsure at all n locations
gaatgtcggcaaccacggcgcggctatgcctatgtctcatangcggagacggaggaggaagctctgctcctagcacacgccaacatcgagctacctccagcggcaccggccgcagcagcactcctccaccttgatgagtcgaaagcacgcgcttttctcggcgacggctccaacaacgacatgatcgaaggatggtgcctcgatgtaacaccccagtgttacctagggttcttctcagtgctaactcaagatcattatcacatgtgaatccaattgagcaaaagacaccaaaaacttaggagcaaaaactcaactaagtctttttatcttaaggatcatgccttaattatatcatgcacctcacagtgagaaaaatgcccaaaccctagaataaccctaattaagccatttaagtaanaaagggggaaattggtaaaaagaccatgaaaaacatgga

SEQ ID NO: 40824 - DNA, 400 bp, Zea mays
  unsure (1)..(400): unsure at all n locations
agcttaacgtctctntataattaatgcaaagtgtctcgatgggagctctgtctctcgtctagtcgatgatttcctaattcgtcttagagagctatgtcgcgcgtctcgccacgcgacaatccttcttatttatcttcatctacttataatgattagacatgaaacatgactgtactttatgctaaacatagagtctacattaattgccttctattaagcgagtggttaatttataatgatgtaacgtgatcgtttctcggctggctttttctctgtctctcttaaccgtaattgcgagcccgcgtgaaacgtctgtttacttactgcattctattgtatggcgtactattctcttgtattaaatatgtgaatgtatgtatgtttcgctcgcatagagaac

SEQ ID NO: 40825 - DNA, 360 bp, Zea mays
gcttgcaatacaatagtcagaatagcagcatttctagaagaacataatctttcccatcatgataacaaaatgcatcctagcaagcctttgtttcttcatgtttaccggagtttacattaacatcgagtgcaaaaagaacggcatgcaacacaaaaatgcctttaacccagttgcaaagaattcatcaaccaaaaccaggttcacataacttcacagttagccattaatggtcatggaagatgttatcaacaaggacaacataattggctcaatggtggatagcaccactcccacttaataatttaaaagcaaggacacatcatgacaatggaaactgaaatttgagcttgatatatacca

SEQ ID NO: 40826 - DNA, 382 bp, Zea mays
  unsure (1)..(382): unsure at all n locations
tgaagccatggtaagtagcataggctaataatatacgaattgtctcattcctagctacgggtgcatatgtntcaccgaaatccaaaccttcgacttgtgaatatcctttggccacaagtcgggctttgttcctagtcaccacaccatgctcgtcttgcttgttgcgaaaaacccatttggttcctacaacattttgattatgacgtggaaccaaatgccatacctcattccttgtgaagttgttgagctcctcttgcatcgccaccacccaatctgaatcttgtagtgcttcctctaccctgtgtggctcaatagaggaaacaaaagagttatgctcacaaaaatgtgcaacacgagatctagtggttacccccttatgaat

SEQ ID NO: 40827 - DNA, 372 bp, Zea mays
agtggcgagttcagctttatcaaaatctaccaagtatagctgaccctttaacactcccttaaatgctattgaatcattatttcttctaaagacagggacacctacatcagtgaaaagacaagtgtagcccattttgcataattgagatacagaaagcaaattgtaatctaatgaatctacaagaaaaacattggaaataaaatggtcaggagatatagctattttaccaagacctttgactaaaccttgaatttcatccccgaatgtgatagctcgttggggatcttggtttttctcgtaggaggagaacatcttcttttcccctgtcatgtggtttgtgcacccgctgtcgagtatcaacttgagcccccg

SEQ ID NO: 40828 - DNA, 357 bp, Zea mays
actaagcttgcgagaaggaacggatccaggtctctgagaggtctattgttgtggataggacgttgatgttgagtgagccgtttgagtcattcttcaaagcgtgccgtgggaacgccctgtgcatcttcttttatagatacaaggaggtgacccatctgtacatatgggggtgtagctatgtgctaacatggccggtggagaaatgcttgagctctgtataagcgtaactggcggtgcggacccaggtcctgctgacgtttctttgcctttctagagatctgaggacagtcgacatcatgggcgcatgtctggaatcatcattacctgctactggagtaaattgatgtgacaccgggc

SEQ ID NO: 40829 - DNA, 263 bp, Zea mays
agctttactacttggacgtgacgagcgccttctttttttgaccgacgcagaggagagggcgctgatgagccccctctccgctattacgatcgagagttccttcaccacggttataaactctcgtaggccgctttatgggcttaatcgagacccaagaccatggcatgagtgccttagagatttcattatagctaatggcttcagagtctgccaggactatcctactgtgtacctaaacactcttgaaaacgacttgtatgttg

SEQ ID NO: 40830 - DNA, 317 bp, Zea mays
  unsure (1)..(317): unsure at all n locations
taaaaacccccagcaancggggggggattttttttttttacggagaaaggtgggatttgctcacgaccaacatgccgcaccatttcgggtgaaacataatatgtggggaaacctatgatccctagcccccactactaagagagagacgatagtccgctaaatgggggatgaagctcagtactttctcggaaggcccaccttgtgacgtttcactcatccaaaaccttgcttagagcatgagtaaaatgtgggaaccgtattcaaaataacccaattactgtgcacgtgtcaaccacatgttacatcccatcgtctac

SEQ ID NO: 40831 - DNA, 229 bp, Zea mays
  unsure (1)..(229): unsure at all n locations
agctcgnctctntaattcattcatgggatgttttctttgacttacattaacggtgccagtttcagtagctcgtccaatattctatcgcatttggcaatattacaggggaaattaatctcttcttggccaatcttttcaaccgcctgtaaaaagaaaaatcaaagatttgtctttgtggccaaacaaactcgcgggaaatacatctatggattcctcatttgaactatcg

SEQ ID NO: 40832 - DNA, 242 bp, Zea mays
  unsure (1)..(242): unsure at all n locations
ttaaccctcgcgagacctttccccgcctctgtctattcatgtttatttattatcgnatgtgatattctatgcatgtttaatctacttgatcttttgtatggtgtattgttggcttcctaatttcaatggatagatgtatgtatgtttgcactcgcattgagaacgatccggttgaagagcccaaggaactcgtacgagaagcccctgagcagtaatctgttggtggaggcaagtgtcccttg

SEQ ID NO: 40833 - DNA, 320 bp, Zea mays
agcttgcactatccatcagaattcagattctgtatgcgcgcccaccggccaaccgcccacaggacagcatgcacggtacggcgcacttgccccgcttcgcgctgacgcgggccgtgcgcgcgcgtgcgtgctttcccggattggccattaaagaagggggcggacggggggattcaataatggcgggacgcgccaaagtacagcaccgtcgacgaggcgaccggagaggaaaccatatgcacctccgcccgcattgcgttgtgttgtgttgcgactgccgtatgcgcgcgctttttactccacaccggtcgtcccaacct

SEQ ID NO: 40834 - DNA, 415 bp, Zea mays
tcggcttcaaaggcaccagctgttgagagcgcaacagctacttattctgcagctgccgaagctgccatggccgaagatgtacatttagaaagcacactttctaatattgataaaatacttctaaacatggccgcagaagaaactgctgcagccaccgaagaaaccatggccacagagcctgagaaggaaaaggaaatagccgaagacacttctgaagaggaaattctcaactttcaaaacttaattggacaagagttgacaaaggctgagaaagaagagttaaaagaatatgtcatatcctgcggatatcaaccaggggcactgctcttctgtggtgttgacgattgaaagttatgatgcgttcgagatcaaaccggagcgaaggttatcggtactcaatcaaagagtattggtt

SEQ ID NO: 40835 - DNA, 268 bp, Zea mays
agcttaaagccatggtaagtagcataggcttatttatgtgaatcgactccagcctagctacgggtgcatatgtttcaccgaaatccaaaccttcgacttgggagtattctttggccacaagtcgagctttgttccttgttaccacaccatgctcgtcttgcttgttgcggaagacccatttggttcctacaacattctggttatgacgtggaactaaatgccatacctcatttctagtgaagttgttgagactctcttgcattgccac

SEQ ID NO: 40836 - DNA, 385 bp, Zea mays
  unsure (1)..(385): unsure at all n locations
actcagctattatatacctgtagcattactcgtggtcattcagcttctatgcacgttttgaatgcattgaaaacccactcgaatgtgtctacagtttcgtcacccaacaatgtgaaaccaaatacggtgcactgcagatggtggttacaaccaacaaacattcccaggggtttgtcatatagatttgtcttatgagttgtatcaaaggtaactgcatctccaaagtcaatgtaatctgcttgttggctagcatgggaccaaaaatgctcaaaatctttccttcttggtctagatggaagtcagagaaaaactgtgggttatcttttttacacaatgcnaaaaaagataggagcttatacacatcattgacatttctttctctttg

SEQ ID NO: 40837 - DNA, 358 bp, Zea mays
  unsure (1)..(358): unsure at all n locations
agcttcttaaaagctggattacgatttttatttttcttatttgncgcggaagtactgaagacatttgaaatctaccttcaccaacttacccccgaagcaatcataaagatgaacatctttgtgtgggccgtgaggagccaaggtttggaacctaacgcacaaagcttctgtaacatacatgagctattgtatgagacaaaactctgtggcacagagcagtatcacaacaaccttggctgctacagcttcggcgctccgtctgggtcaagcctgcctgtgccaacctttctaaagaggtggcccgacgactggatgacagaatggtttatgtgaaatgactcgaaatacgtaagatatc

SEQ ID NO: 40838 - DNA, 121 bp, Zea mays
  unsure (1)..(121): unsure at all n locations
ntgtgtggagttcggagaggatttgatcttctttgtgtgtcttgtattgaaccgcacagctcttttaagtaacttgaacgtggaaaacttggatgccaatgaatgtggggtggatggtgta

SEQ ID NO: 40839 - DNA, 275 bp, Zea mays
aacaatcttgaactgtgaagcccggcgcgccgatcaaccggagggaaagagatgctatgcagtttctatacacagtataggcagttgagatgtcccgtcagcgctatgagagtgagactccgtgatggacagctgaagaacagtttgggccacatttgttgagccagaaactacgaggtcagaaattgatataccatcggggacaagtatgcgcacataaaaaagtggtttaagtcggcttgttatctgaggtacgtcaagagtcaaatctggga

SEQ ID NO: 40840 - DNA, 322 bp, Zea mays
gagaaagacgggtttggagcgcatgccaagcaagaaagcaaagtggcactcatcatccacataagaacataatgacgaccgacagagcactggagcttctacacatggatctattccgcccgatcgcttacataagcatcggcgggagtaagtactgtctagttattggggatgattattctcgcttcacttgggtattctttttgcacgaaaaatctcacacccaagagaccttaaagggattcttgagacgggcccaaaatgagttcggcttatggatcaagaaaaatagaagcgacaacgggacggagttcaagaactc

SEQ ID NO: 40841 - DNA, 438 bp, Zea mays
gacacttaaaactaagcttataactcctagtggtacttatggttacctatggaggccctatgggctcaataatgctggaggaagcttcagcagaatgacagctaaggttcttcactctcaaataggcaggaatgtgctgacttatgttgatgacatcatagtaaaaagcacgaaacaagagaatcatattaccgacttcaagagacgtttgccaatttcaggcaagctggtctcaagttaaatctagaaaagtgtgtttttggagtaaagaagggcaagtttcttgggtgtctggtatcaacgaagggaatcgaagctaacccaagtaagattgaagctatccttcggatggagccaccaaattcaaagaaggtggctcaacgattggcaggaaggctggcttcgctgaatagaattatatcaagatcagtggagagg

SEQ ID NO: 40842 - DNA, 310 bp, Zea mays
aatagtgaatcaaacacattttgtgaccggttttcaagttaagttacgagaatccaagatatttaattcactcctaagaaagcaaaacctagtctcatcaaggggttttgtgaagatatccgctagttgattttcggcgctcacatgaaacaattcgatatctcctttggctctctggtctctcaagaaatggtgtctgatgtcaatatgcttagttctagagtgttgcacacggttgcttgcaagttttatggcactctcattgtcacacaaaagtggaattttgctaaacttacaaccaaaatctcga

SEQ ID NO: 40843 - DNA, 388 bp, Zea mays
  unsure (1)..(388): unsure at all n locations
tgtcaagcatatttggtacccatcgcttgatgggtccattattgttattcaacaaagatctaggaacccaagagtcctttgtgttagtatttggtaaactcattacctttctagcacaagttgcaattttgggttgcctagttacatgagaaataattgacaagctagaggtgggatagttacccatgggacaatccttgcattgatgtcccttctttcggcatatgtagcaaaggcgatcttcaagtctcgaagatttcttctttccttgtttcttgcttgctacatggntagttaataatttcttttctaacactatgccttttttaaatagggacaagacttaattaagtgttccttctttgagcatttaaaacaaacgttatca

SEQ ID NO: 40844 - DNA, 155 bp, Zea mays
agggagagcacacaggacgaccatcttttgttattttgagaaagacaggatttggaacgcatgccaagccgggaagcaagatgggactcatcatccacacaagaacatcatgactagtgacagggcactggagctcctacacatggacctattcg

SEQ ID NO: 40845 - DNA, 362 bp, Zea mays
  unsure (1)..(362): unsure at all n locations
actaagcttgtggcgagcccgcacagtctgtaataattaccgtccgtgtttgtttgaaatacaaatgtgttgggccttttcagactagaaccatgtcngacgggtggtctgaatgtacaactataatgaggaggttggactatgatgcttgattgcttacggcaccaacaatgttaaaagacaaaatacaatccacaataagtgatagtagttatgtaaagtcatgtggaagtaatttgatgtcacttcttttccccaacaatgaggatggcagttgcataaatctagacaaattgattgattgatcgttctatcatacttattcacgagatagaggcaaaacttttgccactaggttgcct

SEQ ID NO: 40846 - DNA, 458 bp, Zea mays
  unsure (1)..(458): unsure at all n locations
ggcatcctggcacttatctatgttcttggtgagcatgaaagtgtctgttcccaccatcttacatggtctttatatgggctgatcttctggagtcttcatacggaaatttaccataaatagttggagtgctcccgctccaccaaaatggtcggatgcgagcgctctctcgagcgctctcctccctcttcttccctctacactcatatgactctccaaccaaacaaagaacggagtggctccgctctattctactcttcaaccaaacaaaagatagagtggctccgttctacttgtcaaacagagaatagaacggctccattctcaaaaactagaatggaaccgctccattctaattgactcttcaaccaaacacacacttagttttaattctgttctgttattgaccatgctatgcgctctactntctcactctttcatttgctattcgtgattaatct

SEQ ID NO: 40847 - DNA, 362 bp, Zea mays
taaagccatggtaagtaacatatgctagatagatgctaattttctcattcctaactacgggagcataggtttcaccgaaatccaaaccttcgacttgcgagtatccttcggccacaagtcgagcttcgttccttgtcaccacaccatgctcatcttgcttgttgcggaagacccatttggtttctacaacattttgattatgacgtggaaccaagtgccatacctccgtccttgtgaaattgttgagctcctcttgcatcaccaccacccactccgaatcttgtagtgcttcctctaccgtgtgtggctcaatagaggaaaccaacgagtaatgctcacacagatgtgcgacactagatcta

SEQ ID NO: 40848 - DNA, 327 bp, Zea mays
  unsure (1)..(327): unsure at all n locations
gtcatatttgatagagggtttaagagctttatgattttctcacaagtggaggaattggatccccacaattttgggctcttcctcctcccaaatcttaatcaatgggcaacacacaaatgcaatcaagcacatgcgtggtgttcgtcaaagagatcccctatcccccctcctgtttattttatctattgacccccttcaaaagatgaatgagatggcggcacatgttgggcttatggggcgggttatgccgacagcggctaaacttcnctgttctctttatgctgatgatgcacgagtgtttgttaagcacaaaaagaggatttgaaa

SEQ ID NO: 40849 - DNA, 411 bp, Zea mays
cgactgtaatggaagacgatcataacgaaggatgaatcgatttctattctatgtgcagaaaagcttcagcatgaagcaaaaaaggggaaccgacttaaagatgaaaagccaaattagacctcgaagaattactatagagttattgataaaagtaaagggcattaatgtaattttacgcgggctgcgttccgtgcctataaatagatgaacagtactcccgtattgttcacgctgacttggcattagcatcacgcttgtacccttacttttcttcaagccgaaggtacatttgtaatttgttggttgttatataagtcaaataaatagaaataaaatgataataatgttcaaagtaatcatgttattttccgtggtttgtgtacaaatcttttctatcttttattatgaata

SEQ ID NO: 40850 - DNA, 315 bp, Zea mays
  unsure (1)..(315): unsure at all n locations
tgaagaatagaagaaagagggcgaacatgtccggctttcttatcactntaagatcaaaaaacacttccaggaaccctgccaataacggttggacactantgaatttatgtgtaacgagatgctacgcacctatacaaaaaaaagaagatcacgtgatgactgcagccttccgctctcgaccgaagcgaatatagaatctagtaatggatgctctacattaagaaaatcctgattatgagcggaagaacaatggcgccgaacggcataaaaagtaaaaagttgtcatggttgtgggcagacacgccgctcgaatgg

SEQ ID NO: 40851 - DNA, 359 bp, Zea mays
  unsure (1)..(359): unsure at all n locations
agctntgtgtttgcctgcgtggaggaagtccttcgtctgtttactaacgagtgccgcctgtatagcttctcgaaagcattctacgacgccttggaagtcaccgcgcacggcgatgaacccttatgatcttggcatcttcaatatcatgtaccaatagtgcggaatggccatgaattctgcccatcntggcctgtcgatgatgggggttgattcgcaggcaaaacttgcccacttaaacctcacgaacctcggttctgtagtttctccggagtccaaacgtacccggcatgtatatgcgtccgagcgggtattttccttcgtccgcataatgccgaagaaaggggtggctgactcatgga

SEQ ID NO: 40852 - DNA, 439 bp, Zea mays
  unsure (1)..(439): unsure at all n locations
tctaaaggggagaacacatttggtactaacaaatgttcatttttataaagacagggtttgtagcgcatgtcaggcanggaagcaagttggtgttcaccatccacacaagaacatcatgacgactgacaggccactcgagctcctacacatggacctattcggcccgatagcttacataagcatcggcgggagtaagtactgtctagttattgtggatgattattctcgcttcacttggtgttctttntgcaggagaaatctcatacccaagaaaccttaaagggattcttgagacgggctcaaaatgagttcggcttgaggatcaagaagataaaaagcgacaacgggacggagttcaagaactcancaaattgaggctttcttgaggagganggcatcaagcatgagttctcttcttcctacacgccacaacaaaatg

SEQ ID NO: 40853 - DNA, 403 bp, Zea mays
  unsure (1)..(403): unsure at all n locations
tgcaagcttgattacaaaaaatagacatgatatgacatggattaataacttagatcacctaggcctaggtttagtacgagcaacaagtcatcctaatttggagttaaaaggctagacacagccactcgatcaggttgttcatgcagcaaagaangttgaaccgtgacaaataagaacctactgtataaatcaagcacaacactagacttggtattcatttgaaccaaattaatgccatagtatattacctcaacaagctaagtaaaacatataaaattatccttcatactagtattggttctttattctctttgcacaagcacgcaccattggccatggcgctacgacagcaacaacactgatgtggtctagtgggctactactagctagatagccatcaatg

SEQ ID NO: 40854 - DNA, 444 bp, Zea mays
agattgggccttgctgatgctcgctctatcgtcactttgagtataattgtgaaatgacctgacgtgcctcggatgaaatcttccaccgaagcccctggtcatttcaaagaacctgaatgcctcctcccttctttggcggaagacattgtcagctcggatgtactcgtccatcttctggagcagcttctccaaagattggggtggcttcctggcaaagtattgcgctgaaggtcctggtcaaagtcccttaatcatggcctcaatgacaatttcattgggcactgttggcgcctgtgccctcagacgcagaaaccttcggacatacgcctgaaggtattcttcgtgggcctgggtacactggaataaagcttgagcacaactaactttgttgaaaccttggagctgttatcaacatatcttcacttttgcatgagtgattgccct

SEQ ID NO: 40855 - DNA, 394 bp, Zea mays
atgcaactttggactacttcagcataaatatatattcctttattacacctctgaacgattcatgagaaacagagaagcttccgaaagaattggaaaatgggctgcggcgcttaatgaattcaccattgattatgtgcacagatcctcaattcaatctccagcgttagcagaatttattgttgattggacgctacgggcttcaggagaaaaaacaacaaaagatgccgaagctttgacagtattctgtgacggttcttagggaaccttcggcgcaggagcagcagctgtcctggtggcccatctatagttatgatatgttatgcagtaaaagtatacttcaattgcacaaataatattggcgagtacgaaactcttcttttacggctttgaaagc

SEQ ID NO: 40856 - DNA, 298 bp, Zea mays
aatcggacggagcatgagcctgaagcatgcacacacctttggagcaggggccgggacacgacgacctacgaggtggctcaaagcttgcggagtctctccatcatcgcctacatccactgtcaggaagcgaagtcttccgacttcagcacgaacgcgcgacaaagagagaaagcgataggtactatcgacccctacatctagacaatgggtgaggggagaacggggagccactgcactcaactgcaaaagacctgcgtgcgccgcagtcatagagtcgagacgtcgtgctaagaatgtg

SEQ ID NO: 40857 - DNA, 432 bp, Zea mays
  unsure (1)..(432): unsure at all n locations
agctttaccttganttccagaagccaggatatccttgagaagtcttctcctttgacgggtaagacttgtgaaagtacactccgtactcagggtttttgaacccatgttgttgtaggtgatgaaacaactgagttctgctatttctgctccaaaatggtgcccaagcaggaggaagaacactaaacttatttggggaggatgttttgcctcccggtgatgtaataataagttccgcactcaaacacccggttatgtaataattactctttgtatatttttatttgaatgcgaattatattattggaatcctttctgctcattctctactttgattatgtgtaatgtctgcatgatgggttgagcgctcttgggcgatatgatgaccatacagataaccgaacttaccgagtcattatgcacacctgcttgact

SEQ ID NO: 40858 - DNA, 418 bp, Zea mays
  unsure (1)..(418): unsure at all n locations
cttgtactcagcaatgttatatgtgcaactgaaatcaagtcttgttgcttaacaagatttaactctggaaggtgcgaccaacacagcagctgctcctactccgaaggttccccaagatccatcgcaaaatactgtccaaacttcagcatctttactcctttcttcttcctgagcccctggcgtccagtcagcaatgaagtctgccaacgcttgggactgaatcgaagatctatgcacataatcaatacaaaattcattgagctccgcagcccattttccaacccttccagtagcttctctatttctcataatatccttcaacggntgtgaagaaggaaccactatattgtatgcttgaaagtagtgccgaaacttactggaggccatcaaaacagcatatagcacccttctcaattct

SEQ ID NO: 40859 - DNA, 385 bp, Zea mays
acctctactgagaagaaagcttatctttattgtgaagagggtgaacaatattttttgtgtgctaaaggactcacacgggcttccttgacggcctatgatcttaacgaagaaatggtaattttgttgataatacttatcatatgcttattgttgtattatatggtgataatgcataattagtgcttccattgatatgaatcaattggtatctattgcgtttgtcctgtaatagatattcatatggttctggtgctctaaattggtatcttaatggtgaatagcggtaggctgatattcctatggtatatccatttaattggtggttaactcttattatgtgcatttgtgtgttatatgcatcacagcttaattcttgacacaatgc

SEQ ID NO: 40860 - DNA, 366 bp, Zea mays
  unsure (1)..(366): unsure at all n locations
cacactatgctttcgtttgcgcggtcctgtgttgatttaaatcatcgtgatatgtggacttcacctgtcattaaaggctccggggttaaatactatttggttattcttgatgagttttcccattattcttggactttnnnnnnncgcctcaaatctggtacttttnnnnnatttctcatcgtttccagattacagctgactcnaattgggcgcccgaaccagtcccatgtgataatggtcccgagatttgccacatctnnnnaccggaccttctttctcaccaatggtgtgaagattcacatgtcttgcccctatacatcggcacagaacgggtaaaccaaacgcatgctctgaccaccaacaata

SEQ ID NO: 40861 - DNA, 224 bp, Zea mays
tagcttcacgggctactggaggagctagccgatatcttggtttcgctggagggtggctggagtgggctggtcaccgcggccgtatttcttgcggcaatggcgggcggaaatgagctcgcctcagctaaagaacggcggctggccggtgagggtgagtgcggggctaacagacgtgcgcccggggaagctttataagcgccggcgggcacctgctatggcgtggg

SEQ ID NO: 40862 - DNA, 306 bp, Zea mays
  unsure (1)..(306): unsure at all n locations
ggtactngccgtcgcctactcatgcatataaatatggtggttttccgagaagcaatctacgagggacatgacttcacagcctgatgcgctgtcgacaactcctgtcacattcgtggcagacggaaaatgcccttggcgcaagccttattgacgcttgtgaagtctatgcacatatgccatatgccgctctatttctacaccatgaccacgttggcgaaccatgatggaaaaacgataggctccatgaaactggctttcaacaagcgatgcacttacgacttgagtgcctcacgtttctcgccggac

SEQ ID NO: 40863 - DNA, 383 bp, Zea mays
  unsure (1)..(383): unsure at all n locations
agcttcagcccagcaaccgttcggaatgcgcttcgttnttattgtaccttcggcgccgccatcctgcagacagacaacagtataagggtaatgcgatggtaataaagaaaaatcaaggcaaacaacaggtacaagtttcgtaccgaattaaacaattttcgagcttcgtctctagcttactctcgcccgcctttagcccagatntgagtaataaatctattttcaatacttcgagcctcaccaagaatattgaccaagtctgatggtgacaggctgaagcttggcttgttactgttntaacatgcgtgcacccgaccttcaaaaatgagcaatcgtgccacgagaagtaacagagcacagaaatcaccatgccccagtatact

SEQ ID NO: 40864 - DNA, 393 bp, Zea mays
  unsure (1)..(393): unsure at all n locations
ntttgaaagctggactgcgatttcccttgagcagcttcgatgtataggttctgaaaatattcgaagtctatctccatcaacttacccccgaggcaattataaggttgaatatcttcgtgtgggccgtgagaagccaaggtctgaagcctgatgcaaaaagcttctgcaatatacacgaattatcatacgagacaaaaccttggggtaaggaacagtatcacaataattntggctgctacagtttcgtttctcggtccgggtcaagctgccccgtgccaacttttcggaagagatggcccgacgactggatgacagaatggttttatgtgaagaatgatctgacagtacgagaagatatcanaggtataattatgtgtcctatntggcaaagct

SEQ ID NO: 40865 - DNA, 340 bp, Zea mays
taagcactgcagctgcaactgaaggaccgagagaaatattttgtgccatagcataaatcccggggtatcctcgggtcgatctaaacaccggtaaaggggggttgaatcacggcttcgactactaaaatacactagaaaatttatccactcacagagaataaaattactagccttgtgagtcaccaaatataacggcaattatgctccactcaaaagataaccattcacaatactaactacctgccagtatgataatagttgaagaggacaccaaattatctgtggatccggattgccgacccctatccagtgaggggatcagctctacttgtcttaccaa

SEQ ID NO: 40866 - DNA, 382 bp, Zea mays
tcggcattgtccactctttcatagttggaagaatcctgtttgtcagtaattcctacactaaatctctagtgccaatatgttctgcaataattatgaattcgcccagtgcagcccaagttggaccttctacttccattctgcatcggggtcttgtttctccgaaggttagttcaagagggctctgaaccagcttctctttgtcttcgtcaactttgacataaaaccactctgatttccagcctgccggccatttgcttccgtagctgatcacgggaaacttcgtggtttttcgataagcaaagttatagcaaccaaaagtttcatgtaatccatcttttctggcttttgtttggtaatgccgctcatgaactcgatagaagct

SEQ ID NO: 40867 - DNA, 386 bp, Zea mays
cagctgcaagcttataaaggacgagaaaggcctttcttatggtccatcaagaagaagttatgttggcaacccccggctttgaaaataaaagaacccaaccatgttataagctctataaggcgctttatgggctcaagcaagccccaagaacatggtatgaatgccctaaagatatccctatcgctaatggcttcaaagcccgctaggcgggtactactctattcactaaaactcttggcaatgatttgtctcgatgccaaacttatgttgatgatatcatattcgggtctactaacaaatctacttgtgaggaatttactacgatcatgacacaaaatatcgacatgtctatgatgcgggaagtggaagatctcttacgaattcaa

SEQ ID NO: 40868 - DNA, 427 bp, Zea mays
  unsure (1)..(427): unsure at all n locations
aaaactaagcttgccagccttttactgcatattgggagcaattatttattttatcatatgtaagaacaataagatgacgacttgaccaaatcatagttatcgaaaccgaaatggtcattaaactattangctatctagctcaaagttaattggcgtaaccgcttattcgtatttaacattaatagattcgtaattagaaagctcaatggtgagaagtctttctactgagccaaaaggttctaggttcgagcagtctctttcaaaatgatggattacgacctaccatcggtatttcattcttgccacttatatgggagccaccatactgaacgtgtcctaattctctaatttaagtatgcatgccaactatttagtctaaaagaacaatatgtcaactattggcttggatatctacgccatatttgca

SEQ ID NO: 40869 - DNA, 380 bp, Zea mays
  unsure (1)..(380): unsure at all n locations
agcttgaggaagagcacgagtacagacggctcttcgtctctgttttgcgcactcgcgtgcttttgagggactatctgtatgggacgaacgaccgctgtggccggcacacaaaaaagaagagggtcccgttctgtggttgtgttcgtccgaaatcaagaacagagccgtagcctttctttttgttcgacctgcacctcccagtggtagccgttgtccgaaatcaagaaattaaacaaaatcgacctgcacctcccagtggttggctaagtgttccctgtgcattggaacaagaggtggtgttcctatgatccctttgtatttgaagtaccatttcagtatctcttttcttctatttntgaaactagcattatagtatcctg

SEQ ID NO: 40870 - DNA, 400 bp, Zea mays
tgtacctgcaattgtaaaacgtataggtgaagagttctgtttattgtcttacagtaacatgcttctgtttcgaattatagagtagattggcttgtcctgagtcaaacctctctaactttgaccttgtttttcaaaaaatgtgtcaacatctcgaggttcaaataaatgttcttccaatattagtttcatggagagattaatgaaataaactttatgctgcagatattggtgcgaatttctataaaatcgctcaaaatttaagaagtttgacttgtgacaaaaccacagtgaactataattcggaactaatggaatacagctcaagaatatacaatttatccaatgattatatcatctatgacttgattacttatatcttgagcttgtagagaacaatgta

SEQ ID NO: 40871 - DNA, 339 bp, Zea mays
  unsure (1)..(339): unsure at all n locations
acgcacttctccttttagttgtgtcaagctcatttttagcctctcattttcttctttgagcttttgatatgtatcatcttttgttcctgcaaattctagctcaaagggagatttgcttgtcgacggacaacaagcattagcacatggtaatgtagcttcaatctgaatacatgtgcatgagtgaggttgtagggattttaaagtttctatcacaacctcatgagcaatatttaatatgatatgatcatccataagactttcctgagaacatagaagcatatcatatttttcttgaacagctagagtntcatcttttagcttttctacttggtccttaac

SEQ ID NO: 40872 - DNA, 408 bp, Zea mays
agcttcggcgctatagcgtatccgaagatgaatgtatcaaccccactaaagatggaatgaccttttactccataaagcgctaagtcattggtgtcaactcttataccgggtatgattgtaattccttacaggctgtgtcctgtgcctataaatagtaaacagtattcctttactgttcacgccattctgtaattgccaaaccattgctcaagaattattattttctgccaacgcgaacgtataaatgtacctaaacattatgtctcgatatttacgttcatataataaaatatgtgaataatggtatctatttttgggacatccttctctaatgtccatgttctatattctatttcatattatttcgcaatttcgatcccaaagtgtgaacctcccgatattctacta

SEQ ID NO: 40873 - DNA, 382 bp, Zea mays
  unsure (1)..(382): unsure at all n locations
atacaagttaatattatggatcttggttganaccaaacagcaaccaacagcaatgactaaagcttatgatgttagagagtgcattgcatcaagtaagctggatagcaacctttgcttaccctataacaaaataacatgaacataagtaatcttctcatgtcaaaacagacaaagatcaagcctcaagttagtgttgtgtgctcacttgcagtgaagtcaaaagttgcaatataagttagaaaaaatcacccctaatgatcacccaatttgtccaatcgacatgttgttttgaattctgcttgttgagggttaccagcaggacgtcggtgtattcagtgtagagggcacataactgtttgttgatttgtgtngactaaaaatg

SEQ ID NO: 40874 - DNA, 408 bp, Zea mays
  unsure (1)..(408): unsure at all n locations
gcttgtgaagattcttcatcccaacatgagcttttcggcggtgccagagccaacccatgttagtcttagcaattaagcaagtgtcgagttcagctctatcaaaatctaccaagtatagctgaccctctaacactcccttaaatgctattgaatcatcacttcttctaaagacagtgacacctacatcagtgaatagacagttgtaacccatttgacataattgagatacggaaagcaaattgtaatctaaagaatcaacaagaaaaacattggaaatggaatggtcaggagatataacaaattttcccanacctttgaccaaaccttgatttccatccccgaatgtgatcgctcgttggggatctttggttttctcgtaggaagagaccattttcttctccctgtcat

SEQ ID NO: 40875 - DNA, 479 bp, Zea mays
  unsure (1)..(479): unsure at all n locations
cggcaataacattaagcagttntttgaaatgaagatcactntggatggtccgcttctatatgtgtctcggataccaccataaattctttccaccctaaattttccaaaaaaacaaagcaacatgaaaatctgtcaaatttgtgaggtgaaatgaaacatcaatgtcaaattattgtgtctgctgttgtgatgggccttggcccagctcatgtatttccctctgtgaaatatatacaatagcacaccttgttttcgggttagggtttccaacatgttatctagccagcaatttctcttctcttagccatcatcggcctctctccgaccatggatggcgctccccccatcttttctgttgttgggaggtcatcgatgctagatattggcatgcaaagaacaatgtctgaataaaactttgctatttagcacgaaaaacattgcaatgattcgaacactatcnttttccttattacaacata

SEQ ID NO: 40876 - DNA, 390 bp, Zea mays
  unsure (1)..(390): unsure at all n locations
cagcttctggatgccatcaaaacagcatataacaccttctctaattcctgcgagnntttctttgatatactgagaacttcagatacaaaatatactgggacctggttcctggcttggccatcaaggcttctccttggaccaagtgcctgcaccttaaccgcctgaagtgtgaaagctgccacatataataataaaggagcccctggcacaggtggagttaatgttgttaaatctattaaatactgcttcaggtcttcgaaggccttctgctggattggtccccattgaaagacttcggctgacttcagcacttcgaagaattggtaagntcctctctgctgatctggatatgaatctattgagagatgccaaccttcctgtcaatctttg

SEQ ID NO: 40877 - DNA, 398 bp, Zea mays
  unsure (1)..(398): unsure at all n locations
tgccggcggtcaaggcgaggtctacngcaacgcttggaacatcttacatctacttcgcttctacccctaagatgttttcaagctgctcatatacctcgctcccacaaaagtctcagccgtcaaggaaaggtcagcctcgcctcggcagagcccgaacctacctctggggctaaaaaggggggaacccctcaagatcgggcgtacctctccgcatacaaaatattcggtcaaaaaggctatagcgttctcccggctatgtcagaagcagggccccaaggagcgaacgtgggtgcatgtaagtggcaaggccgactgagccgaggaatatctatgcatccgggttagggacacctcactcatcacccgtcacgagaaatgacctcttctcgggagccacc

SEQ ID NO: 40878 - DNA, 411 bp, Zea mays
  unsure (1)..(411): unsure at all n locations
aagtgacctgccgcatgcaagcttccaacattgattaaccctttccggctgactatcttattgtggatgataagcactactcatgcatagctatgttccaaccaatctgaacaattcttgccataacttgctagtgaatatgggagtccgatcagacacaatcgacgatggcagtccatgcaacttatatatggctgacacataaagcttaactataattagaactattaacggatgagctagtggcaggaaatgtgcatacttagaaaacttatccaccacaaccatgatacaattgtacttgtgggacacatgcagcctagaaataaagtccatcgccacgacttgccaagcatgaactgngatgggtaggggtaacataagtccaagatatttgcttctatccaactt

SEQ ID NO: 40879 - DNA, 375 bp, Zea mays
  unsure (1)..(375): unsure at all n locations
nttcttgaagttatttcttgactttatccatgttttccttttttttcttggacctgatgcgatgacgaggctgaaactgtgtgcaagtaatagtccatccatcaatgtaacactcatgtatttcttcttgtggctgggcatccttgtgatgtttcctttttggaatactttgcaattcatcaactgacaatgcattaggtatgagagactctgctattacttgttcttggggagacatttgtcttttaatgccagaaaacaaaatccgggtcttctgttttgtagtttcactttcgtttgtactgatctggcgacaaggaattccatagtactcgcaacaacaacatgttccaaggtcacttgtttgatggtttg

SEQ ID NO: 40880 - DNA, 354 bp, Zea mays
tgcttcggcgaaccggacaagagctgaggcgacgagtttgactatattttactacgagaaggttcgttgcattatctaaataatttggcacgagaaacaaagcatcagatgcacccggtcgtttataggaactctatatagatcggtgtggtggtgtagttcaattgacaattgcagcttttgatttcccctgcatcggattccaatgtttcgtgtttcatctgggtgcacctgtcgagagcgctcgataacgaccgacactgctcttgttgcctagctagggtggtcagataacgaattataattatgtgcatgtgctgatgtgcattgatcgtgcatcgagcgccaccacgc

SEQ ID NO: 40881 - DNA, 290 bp, Zea mays
  unsure (1)..(290): unsure at all n locations
gcataaatccgcctgaaaactcccacttatgtttggaagctggctggtttccgcactgccctggatggactctctccaaaaggtgctcctccgggacgggagaaccactctgtgagggagcctgacgcccccctcgaataatacctcccaatgagtgtgaatgagctgattgttggcaatgcgctctgctgagttcctgtatccggctcttttaatccttatatacttaataatcgttgctccaatcatcagagtctgctcgggtggcctatgatgntgacttcttcctt

SEQ ID NO: 40882 - DNA, 325 bp, Zea mays
ggcaagagacacctaaatgtgtgcgatcctcgtaggtcttattgacttatgtgattaaggagaagcctcgaccggtctgtgtgaccgaatgagagagggaaagggttggaatagacccgtcctttgtggcctcttaaagggactaagttctctggaaccgaacctcggtaaacaaataaccttgttcatttgtgttgatcgtcacttcattcgttatcctttctttcctctctctaaaagtttccttgctcacattgatttgagtttgctccaaaggttatccgcaataattgagaaactcatagcaaggggaactatctttcac

SEQ ID NO: 40883 - DNA, 363 bp, Zea mays
ctgagatgcagctgaaagcggtatctccacattttttttatttaagcacacctaatcatacatctcgtggatcaaataaaaatattagggccactatatatacatcatattgttcaaggtggagcgatacctgggagtattaaaaggttatgtgcgaaaacgcgctcacccagacggttcaatcatggagggatacacttcacgaagaagtgattgagagcctgctttattacatcagtgaccgaacaatgaaaagtgtgcctcgtcctcaacatgaaggttaactatgtgggagaaggagaatgggcataaaactttctgcgttgaggattaccagctactacattgtgctcatggtagtgt

SEQ ID NO: 40884 - DNA, 378 bp, Zea mays
aaaactcagcttatgccctaaaaatatctaatttgctagggtttgttctatggctatgataattacggatcatattatatcctgcaatatcccgacacaaaataagaagatcatgctggaaacctcaaatgtttccatcatgcttttatgatagaataggcttctattctcgcattcacccatgttaaatgcctaaaagaaattctaatgctaaatgacataatatttatttaaacttttgagcttttatgtttaactacaaatacgcaaaagttgcaaatatttgggggcaaacacaaacccaaaactgtgttgggacccaggtgcttgttttatgaaaacgaccaaaacatttggtcctaaacaatgctaattgtt

SEQ ID NO: 40885 - DNA, 424 bp, Zea mays
agcttcgcatctctgaactagctcggctgcattatttttcgctgttggccaatagaatcccgacctgaaaaccttcccaactaatgttctggatgctgcatgtattccgcactgccctgcatggacttcctccaaaagttgcttcccggtggacgggagaacgcactttgtgaggacccctgacgcgcccctccgatataatacctccccaatgagtgtgtaatgagctgattgtctggcaatgcgctctgctgagttcttgtcatccggctcttcttcattctttatatacttaataatcgcgtgcctccagtcatcagagtctggctcgggttggtctatgatgttgcactctttcctttgatccatcgagatgctcggctgaaggatttcttgcacgaagaccccgggcgggacttgagct

SEQ ID NO: 40886 - DNA, 357 bp, Zea mays
tgcattgcatatttaaattccttgtattgcatctaggacttgtctaacctagttgagataaccgccaacaaagcgagtgaaaaagcttaactcgggtcaaacttgacaagtcttagtttcaagcttttagcactaaaatttttactttttatgcaattattggttcttgaaatatgcatgaggtactgcacttagggggagtattcaaaactcaaatcactcatgaaaacccctagtgcaagccaaaaatgcaaatttcaccatttgcctattttctctaaaaattatctagcctatggcaaaatattttgaaaagtatatgagggtaccaatacctgtcccaacaagtgttatttt

SEQ ID NO: 40887 - DNA, 337 bp, Zea mays
  unsure (1)..(337): unsure at all n locations
agcttctntaaatcgaacatagaagaggacttttttgtatctatgcaagcaaaaccaaccagcgactcacttgaaacttcactgaaccgatgacacaactctgcattgattttatcaagaataacacaaaatatctttttgaatatgtggagatatcataatgcaatttcttggagcacgatcaaaagcattcatcacttctttaattttatccttcacccaataaatcaactcttgaaaattccctctttttaaaaaactatctgactcatcatgaccacgaaaagctaagccttgcctcaaaagaaatcttgacaatgtaatgaacaagtcaatc

SEQ ID NO: 40888 - DNA, 401 bp, Zea mays
tgaggttgtgtgtagattaccgccctcttaatgcggtgactatcattaacaagtatcctttgcctcgcattgatgttctatttgaccagatggtcggcgccaacgtgttttcccagatagaccttcgctctggctaccatcagatcaagatacgagccagcgatattctgaagacggcattctcaaccacatatgggctatatgaaatcttggtgatgtcattcgggctcacaaatgcaccaccatatttcatgtacctgatgaattctgttttcatgactgtaatggacaaaatcttagagggtgtcattgatgatatcttggtgtactctaagaaccaagaaaaacatgtcgggcatttgcatgtagtgcttcaacgtctatgagagcaccacctttat

SEQ ID NO: 40889 - DNA, 374 bp, Zea mays
  unsure (1)..(374): unsure at all n locations
agcttcatgaagaggaaccttcggccatctcattttatcagcttcagccgaaagccgcttcttcctagaagaccttcggcgacgaagcatagacccaacagttaccatcctttggcttccctccatgttgtaggccttgattttccgcacaggataattctttatttcctacaacattaatatcttccccgagatgatatgagttctagacataacaattcaaaataactttgggtcaatcttggatatatagatcattgcaagattgatagcttaagttaataagaattgaattgactctttcaagcaccccanagcttcatatcatctccttctncttcaaagcttgtcaagcatattntggtacccatcgc

SEQ ID NO: 40890 - DNA, 373 bp, Zea mays
  unsure (1)..(373): unsure at all n locations
ttgaaactcgcttattcatgtcccagaccacaaaaacctttggtttatgtccgaangtttctgcgtctgagggcacaggcgccaacagtgcccaatgaaattgtcattgaggccatgattaagggacttcggtcgggaccttcagcgcaatactttgtcaggaagccaccacaaactttggagaagctgcttcagaagatggacgagtatattcgagctgacaatgacttccgccaaagaagggagtagacactcatgttctctgaaatgaccaggggcttcggaggaagatatcatccgaggcacgtcaggtcaattcataactccactcagaatgatgattaagggagcccacagcaaaggccacaatact

SEQ ID NO: 40891 - DNA, 441 bp, Zea mays
cttaagcactgcgctgcacttcttcaagaattatggcaattattttctctccagaccaaatgagcatgctgatttgctatcttaatcaacagcacaagggctggctttaactttggatgtgttctttcaaacaaaaaaagcaccttcagtggaactccttgaaagagaagccctcagtatatctcctcgttatagcgaacactggagaactgagatcatctcttaacttcagggtaaatttctttcaaatgactaaacttataacaggacgatagaggccagagcctcgtcatatgttatgatagaacgggagttgtacaagcatggagtttgtgctcccctactcaagtgtttatctataaccgaacgcatacaattgatgaaagatatacatgcacgcctgtgtggatctcacattggatctaagccgctacttggtaa

SEQ ID NO: 40892 - DNA, 422 bp, Zea mays
  unsure (1)..(422): unsure at all n locations
tgagcacattnacctccacactactgaatgtaccaaatgtgtttactatgatgattgtttgtcttggtattcagaatgatatccataaaggatatgatgaatctatgatagattcgaaaatttcagatcattaatgaccatcagtaatgaattgtaaactccaactggttatggttggaatcacgaagttgtgcacgctcctgacttgtgattaactgcatgtactgtatgtacaagttcccctatggtgtttagtacgtgggaattcgtgaaagaattcccatgcgtacattgggtatgttcccaatctcaccaccgcagcgtacatatatgggcacacaaaaaaaaactggcgatctatgtgagaattcattcttcgtcgatcattaagatttagaatctctttatgagaatctatttat

SEQ ID NO: 40893 - DNA, 410 bp, Zea mays
agcttgagcaagtctcactgcctcaccaggaagctatctgatggcctggatccaacggaggaggaccggagaggggctggccactgtggttgctctcgggcggcactggcgggtcgcggggaggtcggcggagttaatggctggctcgggcaagtccggcgaggtacggaagaggtaacggggaaggcagccaagcactggggcgggctttataaccgtggcgcgggcgtggtcactggcggccgcggacgcgcggtggttcgcgcacgggcgtgctctgagcgcgcccccggatgccagctcgcgtcgaacacgtgaaagcttgcttctgccatggttcaacggccgaatagagcgccatagcgtgcgcatcttggcaaagtcactgtgtaccgtcgcttctctgctcc

SEQ ID NO: 40894 - DNA, 476 bp, Zea mays
tgaaccgagagcccgcgtcaccggagaagccgaatcgcgctcaccggagttcattcactcgccggcgcacgtggaccgggtaaaccccttcaccatttcccgattcgttgcgcgcacggcctctgtgtcaccccgtgaagcgcctcgtgcaccctaattgacctatgccgccgtggtttggccggagcaggcgtcgccgtcgatccccgccgcctgtgttcgtggccagtggagctccgaccaccgctgacgccgacccgcacatcgacgtgaccgtcgcgacctcctgaacatcaccgaccacctcgccggaccttcctcgccgtcggtaagccgcgccaccctttcctttcctgcggctactgtttcagttaagggaaggactgcgggtgtgagggagaaaaatacagggggttaagtgaaaggtcagagactcaagtgaatagtggcgtaagggtagatctgtgaagattgat

SEQ ID NO: 40895 - DNA, 345 bp, Zea mays
aagtcacggacccctcgtggaagaggctggccgtggtgaactgtgcatcttgttggcggaacccggtctggcttggaaacccggtggcgagtgacatatgcaacagattagtgcacatatgtcgtggggttggagatccccacctgtggattaatcgatatcgaccgccgttcttctcggcatgaaggcttggcactgacttaacctattgattcataaacttaaatgggtgacaaaagagggctagtgtcgcccagtgcttgaactaaggtgaaagaactctactacacgcatgaattaacttgaaatcaaactggatttttatgatccattgtagaagctttc

SEQ ID NO: 40896 - DNA, 431 bp, Zea mays
cgctgcaagctatggccccacctgcagactcgcatgcttccttgaggtgggccccgcggccactatccgtaccctaaaactacggtaccccttactactgtatgaagacccataacccacgcgactatctttagccgcgtggtaaaaaggctgtacgtgggaccaggccatgactcgctcaagcgtcgggcgactactctagggcagtaacagcaccgacctcaccacctgtgcatgttcgataccgtcgcgtgtccagagagctacacactctgggggatcaccagcggtcccaaacccccgtgcggaggtgccggacccctgtatatacagaccgggtctctgggtaaggtccaaaacctacacgagcgcaaaccggaccttacgatgggatccggacccctctgtgtgaggtccaagccggctacagc

SEQ ID NO: 40897 - DNA, 331 bp, Zea mays
ctaagcttgaacacaacttacccgggttaggactagaaatgaattataactaaatcagagtgcgggagagtgttcttcttgctatgcgttgctcaatcaatatggataactttgggagctaactcaacaagattgtgatcaagagaacttagagagaggggtgatgaggacatcacttctattcatacaatgtatggaccgataacacgattgcgtgcacgacatctaaatatccaggtacattctaccctagtaaattgtgttacagagcttactctcggggccatggatgttatgatgattaggaaacttggagaggaccaccaaggac

SEQ ID NO: 40898 - DNA, 213 bp, Zea mays
atacgaaaactccgcctagggcaaacattcatcccacttttgcggaaaatccagaacacacgcccataaaatatcattcacgatgcgatttaccctcccaaactgcccaccggtttgaagatggtaggccgaaccacggagcaacctagcacccacagacttgtgaagtgcttcccaaaacttggccacaaattgaggcccaccatccgacac

SEQ ID NO: 40899 - DNA, 397 bp, Zea mays
  unsure (1)..(397): unsure at all n locations
ctaagcttgtttggcaccattggcgcttgagccctgagacgcaagaacttttctgtcttactcctgcaagtattcctcatggacttgcgtgcactagaataaagcttgggcaattactggtgttgtctagaaaccctgaaagctagttaccagcatatccttcagcttctgccatgacgtgatcgttcccgatcgaatggaagaataccccgtcttagccacgctcctgactgccatgatgaacgattntgccatgacaatcgtgttgccaccatatgaagatatggcttgtttgtaacttcatagaaactacttcggatcagaatgcccatcatacatgggaagctacaacggcttgtacgatggtggccatggtgctaccctgcattctgctact

SEQ ID NO: 40900 - DNA, 408 bp, Zea mays
  unsure (1)..(408): unsure at all n locations
agcttgatccaatatgatgtatcccatgatatttattccatttttgccaagtttccaaattgccgttgtccttcggactcctcaccttcctttcggagtccaaaccttcttggcgatttttatggctgagattattttcattggcacccacatgcgtttgggccctttccctttgttggctttgattgctatcacctttccattctttttcttcttgatcaaatatggcgtagcagcaccttttatccacctttntgatgtacgtgttggagatattgtttgttggcttttccttgagcttttgcctttgctcatccccgatcatcgccctgcattggaaagacttggggcctctcttgtgacataccctacaaatcacagattcgccatccacaggctttttactcc

SEQ ID NO: 40901 - DNA, 457 bp, Zea mays
tctctcatgaataactcatcagctcttctctgctcatcatctctctggtatgccaactcccattcatcaaatgtatccttcaatacttgtttatttctatgaaaatttctccttttcaattctgtatccttccctcctgttttaataatttctggggcctcttgcatgatattcttttcttcaaaccttgtagaaactcccacaggtaacgctggtggtccaaggataccagttgaggtattctcatgtggcattactgtttgcgtttgagaatcatgataaggagttatagcacctgaacgatcatatatcgaatcagcatcatcttcactgcgaccagctttcattgcactgatggtcacagaagatgtgccagctaacattccttttccagtaataaactcaccagaaccctctgtgtgatcctggatgcagtttgcgttcaagtaatgtctat

SEQ ID NO: 40902 - DNA, 55 bp, Zea mays
tgtctgtccgataaccattcttatgtggacaactatcataaatttctccattcat

SEQ ID NO: 40903 - DNA, 307 bp, Zea mays
atttccgatttataatcccaatttccggagatcccacctctaatgactgctttaaaaagaaaggtcctctatcatcgtacctatcctcattcttttcatgttgctcctaatgatattaaaataccaccaccattagcggtatgttttctttggcacaagtttcgcccagttcaatcagaaaagaatccttgaattcatacttgtgcagctccatagaaccggcagcagaacccaactaaagccatattccttgttcgaaatggaacttccctaaaagtcacccacatcaatactaccgatgctaaaa

SEQ ID NO: 40904 - DNA, 429 bp, Zea mays
  unsure (1)..(429): unsure at all n locations
ctcccttgcgatcagaagtgaggaacagagacattctattcttgatgcttgtccacatcattatatcccttagcacttgcgcgacaattgaagttataacgagtggggaagacttgctagatcacaccaaatacattnatggtatggacaccaacatgtactatagggaacaaggaccacaacatttcaattgaaaactcgatagtggaaactatggacaacattccagagacacaatagtcggagtaccactctcccatgaagaatgcttatagctatccgcgaagatacatgctcaggagcttgacccgccatggacattctcttggactcaacaacgataggaagaaacttgtggcttcatgatatattggtaaataaccgcatgcatttcgaggactattttaattgaccttaactccacattat

SEQ ID NO: 40905 - DNA, 341 bp, Zea mays
  unsure (1)..(341): unsure at all n locations
atctatacaactaagggaagaggaagttgttatttgtcttnggatgaaaacttcctctccttaagatgaatcagtattcaatccataccgggatgtaccataacataagttaaactatctctgcatataaaatgatcatatgagcacataactgagacatcaactatatgagtgcacctaaatacaagaaattaaaccatcctctagggcttcaagaatgaatattacatgttccatccacacataacgattaatatttgcgagacccacccttgtgcttataatgcactattttctaagagcgacacaaagggatgtcaagtgcttccagaaggattcaa

SEQ ID NO: 40906 - DNA, 430 bp, Zea mays
  unsure (1)..(430): unsure at all n locations
agctntggataattgctcttcagcttcgtcatcctgtacataacaaaccgttataagctaaactcaagtttcaaggagaaggtaagcatcacgtatgaatttattaccggtttgaggtggcttcgagcttcgtcaccagctaagcttcgcccgccctttgttcagatttgtgttatgaatctatttaggctggggatatcaatcacatccactggtgataagctgaagtttggtctattaacgattttcccatgtgtgcagccacgtttcatgaaggcaacagctgtgtcccaagaagctagctgtagcatcccacaaattcaaatcttgaaatttttctcacactcgctctaaattcaaaatgaatttcaaattcattcaaaatgtttgttgtgagttgatataacaaaaaaatatagtggctatattc

SEQ ID NO: 40907 - DNA, 415 bp, Zea mays
  unsure (1)..(415): unsure at all n locations
ngagtgatgctcttaggtcattaacaatcttgattaacacatggtctttaaggttcttatgttctcctcaagtttctaccacatgtgatcacagtcatcagtgcatagatgtgctctagccatggtaacacctgaggtgttacagccttccccccttaaaggaatctcgtcccgagattttatgcagagtcctctataggggtgctatgaaggcacgttggtgggctactctttcttatactcaagtttctctagttaactgctcttcgaatgtcattctctttgcaactttagaaggaagccctttttaagttaaattcacaacttagactatccttgttatctaagttnttcttataattgtattcaaagggcangtgggggtgggggttttgggttacataccgacttcttt

SEQ ID NO: 40908 - DNA, 359 bp, Zea mays
agcttgccatctaatacacccttaaaggctacttaaccatcacttcttctaaagacagacacatctacatttgtaaaaagacaattatatcccatattgcatagttgactaacagatagcaaattgtaaccaagagactcaactaacaacacatcggagatagagtgctcattagaaattgcaattttacctaacccttttaccttgccttgattcccatcaccgaatataattgaatcttgggaatccttattcttgacgtatgaggtgaacatcttcttctcccccgtcatatggtttgtgcatccgctgtcgataatccagcttgaacccccggatcataaacctgcaagcaaatt

SEQ ID NO: 40909 - DNA, 160 bp, Zea mays
gcccaattgtctcatcaaaaaatttcaaccaattggacttcacttggctttagcataatttaatacgcctggtccaactaccatattctttttctcgacctcgctaactttcccacacaagtcttgctcactctgttgggcgctgcacgcacatgatcac

SEQ ID NO: 40910 - DNA, 370 bp, Zea mays
tgcacatagtctcgatgatgtatgcctttagatagtccaagttctttaaagctattactttttgtgaaaccgcattgaaatagtaacacaagcgtgtgatgacaactttgacatgctctgtttcgagggctcttaccgttattgggaggaacaccgtcattaacacatggcagtcatgagagttgttgcccaatagagacaagtccttcatcctgactagtctgctgatattggatgagaaacctgtgggtacaacaatcaatttatcgatccaaatctatcttatgtattacgagtaaaagtaatttggccttagttataagtttccaggtatacaactgacttgaacagacaacaatttatttatgga

SEQ ID NO: 40911 - DNA, 380 bp, Zea mays
  unsure (1)..(380): unsure at all n locations
gtgagctatattttgtgcttaccatttccattctaaaaaataagaaagcctcttaagtaagctttttaaaaggattaattgtatacacatcactcaacttttgcaaaattagatagctagttcatttggatgcctgacatctaaatttgctttataaaaatgagtggcatgttcctataatttaaaaaaaagctttgctgttttttgggtctttttgattcttaatatgccgagggcttttctttgccgagtgcgttttgatactcagcaaagtctttgccgagtgtccgaaaaaaagtattcggcaaagaaccctttgccgataaaatgtttgtcgagtattctntgcaaaggttttgccgagtgtataatgacctctg

SEQ ID NO: 40912 - DNA, 429 bp, Zea mays
ggactcctttcgccttgagacaccggaatgtcacttcaaggtctgagaggaggtcggaagccttccgtgtcttgactacgatgtcatcgacgtaggcctcgactgtgcgaccgatgtgttcgccgaacacatggttcatgcaccgctggtacgtcgcacccgcattcctcaaaccgaacggcatggtgacatagcagtacatgccgaacgcgcgtgatgaaagaagtcgcgagctggtcggactctttcatccggatctggtgataccctgagtaggcatcgaggaaggacagggtttcgcacccagcggtggaatccacgaattggtcgatgcgaggcagagggtagggaaccttctgacatgctttgttgagaccagtgtagtctacacacatccgccatttcccccctttctttctcacaagcaca

SEQ ID NO: 40913 - DNA, 329 bp, Zea mays
acatgaaaagaacggaaccgtgtcttttccgcccaacgactctaaaatggcaccgtgtttaaagctttcatgcatcgaaagaattgaatcataaaacaagtatattacatacaggattcccgaatattacacacatcatatatcacatgttttttgcaatagcacttagtcttccctaagtactatctctgcagcttcgttcaccagtcgatcgacaacctgatccatgatagcttcggccatctttttaatttacgcgtcatctttacgctgagggcccgaagatgcttagtacgatctgagtgacgacgcgatattattacatcact

SEQ ID NO: 40914 - DNA, 448 bp, Zea mays
tgtgaagattcttcatcccaacatgggctagtcggcggtgccttgacctacccatgtcagccatagcaattaagcaagtgttgagttcagctctatcaaaatctaccaagtatagctgaccctctaacactcccttaaatgctattgaaacatgacttattctaaagacagtgacacctatatcagtgaatatacagcttgagaccatttgacataattgggaaacagaaagcaagttgggatctagagaatctaccagaaaaacattggaaatagaatggtcgggagatatagcagtttacccaatctgtgaccgaccttgtattcatccccaatgtgatcgtctttgggaatttggttatccatataggagaaatctattttcccagcatgtggatgcgacccctggcgagatacacttgaccccggagctaacctcaaacaagtt

SEQ ID NO: 40915 - DNA, 255 bp, Zea mays
  unsure (1)..(255): unsure at all n locations
aaccaccaanacgagctcactcaaggacacgaagcttttgtcatcaaaaaaaccggcctgcacaggaaaggggagtcttccccgaaagtagaccataaacctgaagctaatgacttcgaccgcccttcatatagagaaaaaaggctgtaacgagatttcccctacttggatctttcagaaaacgaaccaagacctaaccttcaagaagtaaagattgaccaagaaaaaaagacacacgtcagtcaacctaaggag

SEQ ID NO: 40916 - DNA, 177 bp, Zea mays
ccttacatcagtgccccctacctaccatctcgggcgaacgcatggacgcctcggatttggcgagaatgcgcgcgacgcgcactgatccatggagcggcttatggcgtaatagcaccttttgttttgcatagccacaattgagggatgataaggtcgtcgacatcgatcacttaaagg

SEQ ID NO: 40917 - DNA, 382 bp, Zea mays
ttcctcgatctgactctatcttgttcggcacaccgagaaggcagactattcccgacatgtatgactcagctaacgatgcgtcggggtatgtcgtcttcaaaggaatgaaatgggccacctttgttaacggcctcacaacccccatatggaatcgtacaccggccgggcacgatggatgaccaatttgaaatccattcacatcttatgccacttccactaaggaatccggaatggctgcaacaaatcggcacgcctatgatgctctgcttttgttctatgacacctatcacaagatggcgacatattctgcgatctctgtattcatgccataccaccaaaacctcctttgtaaattctggacatcttctcgcttcccggtgta

SEQ ID NO: 40918 - DNA, 399 bp, Zea mays
tgagagagccagagatacaaagcgcagcagaagatgaagtatcccaagccactggcagaactaggtgcagacatagccccctcaatcaagcatagcagaagagaagtcttcagctgctgaaaaacataaataaatctaggtgaatacactaggtattccgcaagcccatcccgctcccgtaaagagaaagggacctatatcatacatgctttatatggcggagttgaagtcactcttctttttctcagagaaaggtagtacttttagggtttttcccatagaaatagaaataacacattactcaaccaccactgagcttaccgctcccgtggcatcggtttcattttcaaaaacaaactcacacacatttacctgctcacggaggttggtaaacactaa

SEQ ID NO: 40919 - DNA, 280 bp, Zea mays
cagctcttaagggagaacacatcgtacgactccctctttgttttctttgataaagacagggttcgtagcgcatgccaccccggaaagcaagctggagtctatcattccacaaaaaaataatgacgacagacagcgccctcgagctgctccacatggacctattcggcgctatcgcttacataagcattggggggagtaaaaactatcctgttattgtgaagaatattatcgcctcacttggggattctttttgcaggaagaactcaaaccccagagaccc

SEQ ID NO: 40920 - DNA, 437 bp, Zea mays
catactaagctacttggctggagagaccgtgaacaaaattaattctcatcttgttcctgagcagcatacggttagacaagccactagtaaatttagagattctgctatcatttggtggaacgaacttgttaacacacgtgctgcaccacaaacatggaatgcgttaaaagaggagatgcgagctcgctttgttcccccttcttatatacgtgatcttcgaagaaattgcaacgcttagatcagggagacatgtcggtacaggaatactaccaagagcttcagaaaggtatgctacgatgtggggtagttgacgatccacaggatcaaatggttacgttttatggcggattgacgcgggagattcaagatatttgtgattataaagaatatcattctatacaacgcttgttcatctttctatgttggcagaaaaagaa

SEQ ID NO: 40921 - DNA, 414 bp, Zea mays
  unsure (1)..(414): unsure at all n locations
agcttgtgaaggttcttcatgcccacatgtgcttattctcgatgccacagccaacccatgctagtcttagcaattaagcatgcatctagaccaactttctcttttgcgaaatcaactaagtaaaggttgccgtctaatacacccttaaaagctagtgaaccatcacttcttctaaagacaaacacatctacgtttgtgaatagacaattatatcccatattgcataattgactaacagataacanattatatccaagagattcaactaaaaacacattacatatagagtgctcggatgaaatagcaatcttacctaaccctcttaccttgccttgattcccataccgaatataatgaatcttggaatccttgttttgacgtacgaggtgaacatgtcttctctcgtatatggtt

SEQ ID NO: 40922 - DNA, 308 bp, Zea mays
  unsure (1)..(308): unsure at all n locations
agcttggacggngttctgagacggatcctggtttatcttcagagcaagagccgctgctgtcctaatggcaccttcaaaagctagaacatgttatgcacgccaacttgacttcagcggcccaaataatattgctgagtaccaagcacttctgttggggcttcggaagttgacagctatgggcctaaaaacggccatcctgaacactgattctcaagtcattcttgggcatgtagacaaaagtaccacgccatagacccaaagcttgaaaaatatctggatacagtctgaagatggaggctttcttttaa

SEQ ID NO: 40923 - DNA, 468 bp, Zea mays
tgcatcctggcacttatctatgttcttgttgatcatgaaagtgtctgttcccaccatcttacatggtctttatatgggctgatcttctggagtcttcatacggaaatttaccataaatagttggagtgctcccgctccaccaaaatggtcggatgcgagcgctctcttcagcgctcttcttcctcttcttccctctacactcatatgactctccaaccaaacaaagaacggagtggctccgctctattctactcttcaaccaaacaaaaaatagagtggctccgttctacttgtcaaacagagaatagaacggctccattcttcaaaactagaatggaaccgcttcattctaattgactcttcaaccaaacacacccttagtttttacttcttgtctgttattgaccatgctatgcgccttactttctcactctttcatttgtctattcgtgaattaatctcttcatt

SEQ ID NO: 40924 - DNA, 283 bp, Zea mays
cagcatgcaacctcgcctttcgtgggagcatcatttctttttctattctcaaccatcccccttactcaggagacgcttttcacttactcgactttcactagcgtgatgccgatctcttattcaaacgcttctaccactttacgaacggatagacgaaacaaactgggaatacgaattcaacgcaccaccctgcgataagagataggagtgcggaccaacacaaatactccaataaactgaccaactggccctggcaatacaaagtatttcacaagttccgaag

SEQ ID NO: 40925 - DNA, 390 bp, Zea mays
tgttattacagttagatgccaacagaaatgacccttatatataacccactcctagataagagttgtagtgcaaagtgacccctctacccaacttttattattttgtccaaggcatagcctctttattctgaaccttaaattcctagaacaggctatagtgaccaatggcaacccactgttatcttaacagaattcttggaaagagttaaatcattgttgtagttcaaacctacactacaatttataaatagaaaataaacaatgagaaaatgaatgatggaaattagtgtcatcctaaaacctttgtaaattgtccgctgaattatataggggaaataccaatccactatgcttatcctgacaaaacctaacctagaatgatagcataac

SEQ ID NO: 40926 - DNA, 327 bp, Zea mays
  unsure (1)..(327): unsure at all n locations
tcatcaactatattggcttcttcctcctgagcccctgtgcgtcaatcgacaatgaaggatgctaacgcctgtgactgaattgaggatctatgcacatagtcaatactgaaaacgatattattatcagnccaccttccaatccttctagaagcttctctggtcctcataatatacttcagaggctgtgatgaaggaacaattatgcggtatgcttgaaaataatgccgaaactttctggaggccattaacacagcatacaacaccctctccaaatctataataagtttctttgatgaacctagaacttcagagaccaagtatactggg

SEQ ID NO: 40927 - DNA, 262 bp, Zea mays
gctttaccgcggaaagacgcccactacatatattatctttttaagccgcacctgcctccttcctttttcttttgacccggaggtctcagcttcatgatgtgaacatcgggcttcgtacttttacaaaaaaaagtattatgtcaaatatatgcctgctacccgtataaaagggatggagttaccttagtatttcatagaacggctggattaatacaggaactatttttttaccgccattaattaataagataggtcaagagaa

SEQ ID NO: 40928 - DNA, 372 bp, Zea mays
  unsure (1)..(372): unsure at all n locations
atacggaccttgaaactcagcttctaagggagagcacattntaggactaacaaatgttcattttgagaaagacaggatttgtagcgcatgccaagcacgaaagcaagttgggtcccatcatccacacaagaacatcatgacgaccgacaggccacttgagctactccacatggatctattcggcccgattgcttacataagcatcggcgggagtaagtattgtcttgtaatagtggatgattattctcgcttcacttgggtgttctttttgcaggaaaaatcccatacccaagagaccttatagggattcttgagacgagctcaaaatgagttcggcttaaggatcaagaaaattagaagcgacaacgggac

SEQ ID NO: 40929 - DNA, 399 bp, Zea mays
agctttgccgagcgcggctgtcggtatattcgtctttgccgaacgcccgacaaacagcactcggcaaagcgctccgcactctcgcaaggctttgatttcggtattgaaaggggccaggcgcaccacgggagtggtcaatgtacggaggtccttgggtcgaatttgctgccatgggtgtcaggccagggatttctgccccggagcttcctaaaaactatatcggcgtttttgaagctagtggaactttgtcaaggcctcgtagaggtaccctaccctcgttccttggtaaaagtgtatggcgccgatcaacccatggcaaagggtaacaccacttgtgggtaaaatgtgtaacctctgcaagtggaaaacggatactagtcgtgcttcggcatgagcggt

SEQ ID NO: 40930 - DNA, 270 bp, Zea mays
tccaaaccgaacactatgtggtatttatccttacacaatgaagctacaagaacagatgttgcttgcgcattcttatgaaattgctcacttatgaacatgggactattctaactatcaaagagcattccactctctacaatctcccatatactatgatggagagagaacaagagactacgcattttgtgactcccaaatccgtagacctctccatcaaaaagacgaggtttacccagtggaatagataattaatgatcaattgcactttga

SEQ ID NO: 40931 - DNA, 435 bp, Zea mays
agcttcgtaaaaataatctccgaagctatacctctttaaatcaatattggttctccctgtaacttggcatgatttgccccttttcaaagcattttccgaagatcgataacatgcccccttcttgtgccacatgcagcatgatgtatgatgattatgctatgcaaaatgatgtgatgatgttatgttatgcaaaatgatattttgtgccgaagatacacacattcctgcaatggggcacaatcttttgtatcaatactgactttttcattataagccttccttaggagcttcttcgccttttacttcagcggaatcagcgtttatttttcgctgtaagttctgcatccccttacgaacgtctttggaacttcttcgccttttacttaggcggtataagctctgcattcccttaggaacgtctttggagcttcttcc

SEQ ID NO: 40932 - DNA, 426 bp, Zea mays
  unsure (1)..(426): unsure at all n locations
tcacgagagagggaacgggtcctaggtctcctgaggagtctattgttgctgagtggagctcgatgcttgagtgagtctgtctccgccgttcttgctgcccgtcccccccagaaggccctgtgcatccccttttatagacacaaggggatggtacagctgtacatatgggggtgtagctatgtgctaatgtggcctgcggagaagtgcttgagccctgtagaagcgtagctggcggtgtggtcctgggtcctgctgacgtttctttgccttcgtagagagcttgatgactattgacgttatgaacgcgtgcggcgaaccatcattacctgttgccggagtaatctagatgtgacttcngtcttgttccttcgtagcctgaggcggccagctataggtagggtaatgatgtattccctgtaccgtaat

SEQ ID NO: 40933 - DNA, 481 bp, Zea mays
  unsure (1)..(481): unsure at all n locations
tgtactntgccacagcttgaggggacatttctttcgctcattatatctcgtgacaggaggatactctttaacaaaatcgtctgttctgttccattatgtactgtcgtcattaaacatagtcagctttatcatttcccgcgcactacaaactcgcatgatatatcatcttttgacttgctgactatcgtttatctggtggatgtatgcagcttctcgaagtaaccgctcgagcagtccatcttattattgaatggcgagatccaggtttatcagttgctgatggcctttctaatctgctaaaggcatgccctcttcatctagtctcgttctcatttatttaaaatgccacccatgcatcttatatagctcagccagttaactgaatatgatttttcagtgccgtcttttaccaccatccgctgcctttctcacccaagcgcgcacgtgcgcgcgcttagcattgtccgttctccgtgacatc

SEQ ID NO: 40934 - DNA, 411 bp, Zea mays
atcatgatgttctcttatgttaccaacctatcttgccattcatatactataacgttctaaatatgaaaatattgtttgcactctaacgcaatctcttttataccatttcatggaaattcttaattaaagactgtgctctttcattctgtaaaatcacaagccttaaacgctaatcttcaataaagaaagattacgaatgctcaatgccaacgcctggaactacttgtttcattcggtatgtcacctataatacttccttctaagtggcattctttccattggtcataatctattctatggaaagacatgccaatctgaatgtcaaattccctttggcttagattcgtaaaccggcgcatattattaatccactcatccatgtgcattaactcaacacgaacttaatctatc

SEQ ID NO: 40935 - DNA, 372 bp, Zea mays
  unsure (1)..(372): unsure at all n locations
gcttgtgactntgagaaagctccttggatcacatatataagcccgtttaaaatgcgatcagatactgtacgagcacccacggaggaacggtacgtctgatccaaaacacgcaagttgctacatattatatgtcgttgcctgtaagcaacaagttgccaccgtacctagaaaaactgcagacttcatttactccctgtccaggacgacattcttcgtagatcacagaactcatatatatgtaaagattcccagggcaacgtgagaccagcatcgtcatatagtagtccaccgcgtagaacatttggtcatgtatatatagtcgtcttagagatgagctgttgaatggagagtacgctgctgagggtcctttga

SEQ ID NO: 40936 - DNA, 452 bp, Zea mays
  unsure (1)..(452): unsure at all n locations
tgcagctgcaagctgaaattgcaatagcaggaggatcttctgattattaaatttattccgagcaataaaaagtcgtttcaaaaggagcgcagtgtaagtnttttgctccaaagtcgttcctaagggaatgcagagcttacagcgaatagtcaacgctgattccgccgaaagtaaaaggcgaagaagctccaaagtcgttcctaagggaatgtagagcttacagcaaaaagtcaacgctgatttcgccgaaagtaaaaggcgaagaagctccaaagtcgttcctaagggaatgcagagcttacagcgaaaagtcaacgctgattccgctgaagtaaaaggcgaagaagctcctaacggaggcttacagcgaacaatcaacgctgactcacaacagattatgtgttttatcgcacggatgtgcgtgtaccttcggaatgagtaccacctcacat

SEQ ID NO: 40937 - DNA, 373 bp, Zea mays
  unsure (1)..(373): unsure at all n locations
ntatcacacccttcggcacgtactgcttcatcaggacgccagagggactcaaaaacgtcgggtgaaccttttctcgcgtcaccaaaatggtgctcgaaagccaagtaggccgcaacattttcacctacgtggacgacatcgtcgtctcgagcaaaaacaaagaggatcacctggccaacctcgcagagacattcgctaatatgcgggacgcacgactccggctcaaccccgagaagtgtgtcttcgaagttcgtcaggggaagatacttggctacctggtgtcgcaccgagggatcgaggccaacccaacgaagatccaggccatcatcaacatgacacccccgcagtcagccagggatgtccagcgactaac

SEQ ID NO: 40938 - DNA, 436 bp, Zea mays
  unsure (1)..(436): unsure at all n locations
ctcagcttatatatacgaaaaaacacgggtaacactcaacatgtattactacttgncatccgataggtatcagaatccactccaattggtaattttatatttacaacccattntgtcgtatccctcatcaacaacattagactgcaaatgatatgtattaaaaacactacagatacttgcaatgtgcgggaatctatcatnnnngcaactaatgtgaacttggggagctcaatttggagcaattatgtctaccagattacagctgacaaaaatgagacatcaaaaacaggaacaaaatagcatgaggagccctgtatgcacgttgaccttctaatgaaaaactcgctgtactgatcttgaagaatcccatataccatccaagatgtcagctggttgaacatgacctggtgtccatgccaaagtagcctatcctttt

SEQ ID NO: 40939 - DNA, 373 bp, Zea mays
agcttgccttcgcctcagtatatcacgcgcagtttaatggagttgtggaacgcgccaatggagaaaattttacagctgtcaaaaagatgctcctcgacaaaaaagggcaggtgggccgatttggtacctgaagcggtctgggcgctaaacaccactgagtgcagggcgactgggttcacccctttccgccttctatatggaacggaggccctgaccccacaagatataaaacatgggtccccgcgaacagtttcgtcagctgtccccgacgtggacgaacccacttcgaacgatcttatcgatggagaccgcgtcttcgctctacaggctctaaataaatatccaacccagacaaaagcatggtgcgaccatg

SEQ ID NO: 40940 - DNA, 359 bp, Zea mays
attgaaagctactctgagagaagctagtctctagaatacaaactttgcggttctatacaatggcaagactttactgaaaaatcaccagagatttttaatgtttgctgaaatctggtgacaggacagtatgatgtggacagggtgggaagactccaacatcgtctggcgacaaccatgcggcttcggcaatcaactataaaaaaatatcttggcacatgagggaaggtatttcggacttgtccttgtgaggccgataatagaaaaacttgtcaaccctgaaaatgagtcgtatgaccgaacttttgaagctgatacggtttcctgacaacttgtcgaaggactgaatatttagttatttc

SEQ ID NO: 40941 - DNA, 393 bp, Zea mays
  unsure (1)..(393): unsure at all n locations
agcttgccttncctattagtgtgggacacgcattttgtttaaattgccccccgtacgcagcgggggagtgatagtctcttcctttccatcctttctacagcattatcttaccattttcagcgggaactctatcgaaacatgacatgctggctaaacaacctcgccccaacatgccgttgtcataccctactttctctaagtggcattcctcacacccttaatcgctgattctctatttggcaccccattagttggggtgggtatggtgtggcccttcgtgacttatcttttctcgcaaagaaacatcaactcattggaaagacacccacccagtccccccaaatggttatttcctttcccatgattctccatccggtttatagtttaaacctc

SEQ ID NO: 40942 - DNA, 289 bp, Zea mays
gtaacaatgaagcatgcatgtagaccggacacctcatttgcagaagcaacctaatagattttgccgtccaatacacccttcaaagctaatgaaccatcacttctcttatagacagacacatatacatgtgcgaataaacagctatatcccatattataaagtggacggacagacaacaagtgatatccgagcgactaactaaaacacattggaaatggagagctcggatgaaacagctaatattactagccctctttacattggcttgagtacccgtcccgaatatgaa

SEQ ID NO: 40943 - DNA, 223 bp, Zea mays
  unsure (1)..(223): unsure at all n locations
cgccttaaacgcgaccgggcgtgcttccgacgtggaggggccgcccagctccctgatcatccttgagcccntgatcataaactcaaagctcacaaaatatcccgataacttcctcaggaggcatttatgtggatctaggaatgacacgaaacaatcggacctgagaacggctaaagaaaataagcgatcttaaaataaccgtgaacacctcttggtcattcca

SEQ ID NO: 40944 - DNA, 245 bp, Zea mays
catatatatgcccccaagaaccatataaggccctcaatggccatactatatttttaatggaccacactccttcctttgaaaacatctcaagaacttaacccattcagatcagatttttacatcacagggactcacatacctcattctcgatgaaactcatcaagaatccatcttatgggaaaaacatgaccaacataattgtccatacactttcatttcatccccataatcggattactaattca

SEQ ID NO: 40945 - DNA, 378 bp, Zea mays
agcttatagtacgctcatgtggattggaaacatttcggaacgatttgatttatttggcacctttgaaggctgtgcttccatgatttctaaaatctcctacctacaacaaaagtgtcattttcccttcttgagaaatcaaatgttttctaaattcttgttttccaagacattgatagttccctctagatacatatgcaacccaaaattcaacctaaacggaactaccaatggttaagttggaatttggttgcatattttcaagcatctaattcatcctagctatcgatactctcgcttattactatcttctcctctgctacaactatggtgtatttcgtgacacggccacatttcatgatctgccccaataccatttga

SEQ ID NO: 40946 - DNA, 339 bp, Zea mays
cgcttagcgtaagaatgcatcatttctatatattgtcatttttagttcgcatgagagatgatcggcacctcggccttctcgtataccaataaaactttcataagcatgcaaaggtcttctgaaccaaatacccatcattatcatggtgtgtatttccacactagttggctgggaagagaacaagtcaccatgctatcaatattgtgcttgataattctgcagcttattgcacttgagcctgaatcatgtcattacaagagtatatctaatagcttggtttaaactgatatggcgtaaaaccgttgatgcgttcataatcgaacggattaattatggcac

SEQ ID NO: 40947 - DNA, 374 bp, Zea mays
  unsure (1)..(374): unsure at all n locations
ttatgcgactgttgcacggcgagtcttaccgaagacttcgaatttttgcgcttgatgtgccagtccggctgcaccctaatgcgaattctgcacggaatagtcttcgcgcgaacaacttccgatctcttcgcaccttgatgtgctagtccggctgcacccttatgcgacttntgcgccgattagttttccggaaaactttcattattcccacttgttgtgctagtccggctgcacccttaagcgacttctgcaccgatagtcttcgcggaagacttctattttttgcacttgttgtgctagtcccgctgcacccttatgcgacttctgggcggataatctttcccgaagacttctatttttcacacttgttgtgc

SEQ ID NO: 40948 - DNA, 492 bp, Zea mays
  unsure (1)..(492): unsure at all n locations
tcaccgacatctgggaaaatggcggtcgggagatggctcaagaaattataaggaaaagtgaacaaggtattcacgatgctagagaagcagcagaggccgctgagaaaactgcggatctcgagaggcgaatgggtattgattaatagcttttgactttaagttctaattttattatgttctaattntatgacttcgaacttatttacgctttgcttcacagccgcactatctcctcttccagagcccatcgagccattggcggaccccaaaacaaaggaggatgatgaaattataaaaatggccaaagttattatggataaagttgttgatcaactggtaaacgaagctgcagaagtagtttataaagaagattatctgttattgtaaagacattcggaatgaacatttgctgacaatgtgtgtatatttataatttgaatgtatatataagctgttataatcaatttttacatgcatgaacttacgtcatcc

SEQ ID NO: 40949 - DNA, 478 bp, Zea mays
  unsure (1)..(478): unsure at all n locations
atgccagctcgngtaggctcttcatccccacatgtgctaagtggngatgtcacattctattccatgcaagtcttagccattaagcatgcatctacaccggcttcttctttagcaaaatcaactaaagtaagtgtgtcgtctagtacactcttaanagctagtgaaccatcacattttctagagacagacacattttcatttgtaaataaacaattataccccatattacataattgactaacagatagtagatgatatccaagactctccactaaaaacacattagagatagaatgctcacttgatattgccatctttcctaaacctttcaccttgccatgggtcccatcaccgaatatagattaatcttgggaattcttattcttgacgcaagaggtgaacatcgtctcttccccagccatatgggttgtgcatccgctgtcgataatccagcttgaacgctcggatgcataaacct

SEQ ID NO: 40950 - DNA, 384 bp, Zea mays
  unsure (1)..(384): unsure at all n locations
ctatgcccgtatccaatctgcctgagccggatctataagagctngccagatgcccccgttccggtcgaccacgaccagcacccaacataagactttcctagttatttagcccagaccagagccatgatagtcctcatggtagcactgttttcctgagtggtcactccatgttccaattaatatgcaatgatcttgtttaaccatcgggttaacaatataaagtaaacttaccattttggaacattaatatcacaaaccggagtgactgcataaagttaagttgtagcaatagcatagctactaaggtaaagtataattcccaggtttgatcaaagaataaaggtggaaaagtatctaaatacgtaacccgtcaaaatatgcata

SEQ ID NO: 40951 - DNA, 506 bp, Zea mays
tcttttgtagtaacaatatcttgtaatatctccttcattatcataatgaaacgcaccttcctcataaatcgacgaagttccaaaagttctgacgaagcaaccaaagtctttcttaaaggaacacagcgtaagttttctgcttgaaaagcccgttttaagggaacgcagtgtaagttttatgctcaaaagtcgctccacagggaatgcagagcttacagcgaaaaataaacgctgataccgccgaaataaaaggcgaagaagctcctactggatgcttacatgcgaaaataaacgctgataccgccgaaataaaacgcgaagaagctcctaatggaagcttacagcaaaaagtcaacgctgatacaccggaaaatgagcggtgaagccgataaatatacggcacagagactgtgtcctactgtgggaacgtatgtgtatcttcggcacacatatcattctgcatatcatagcatcatcacatcattcgcataacatgacatcataca

SEQ ID NO: 40952 - DNA, 316 bp, Zea mays
  unsure (1)..(316): unsure at all n locations
tcttcaggcacaacaaattagacgctgcttataagcaagcgccatgacaaaataattggcatgacatacgcttcacagncttgctaatatcgataaagacatgaaggccaatgcttatattgtcaaatcaagctgttaagtgagcaagtcccctatccatagctcctctatgtacttctgaataatggcatcaacgaaaagaaaagcctggtcttatatgggctagatgcaatccaatgcacaacagcaagatgtcacanaagtcactttagtttggccctcatgtgcactcaactttgcagattaaaagggtaca

SEQ ID NO: 40953 - DNA, 371 bp, Zea mays
ctgcagcttctaagggatagcacattctatgactaaccaatgtttattttgagaaagacagggtttgtagcacatgccaagcaggaaagcaagttggtgcccatcatccacacaagaacatcatgacgaccgacaggccgcttgagctactccacatggatctattcggcccgattgcttacataagcatcggtgggagtaagtattgtcttgtaatagtggatgattattctcgcttcacttgggtattctttttgcaggaaaaatctcacacccaagagaccttaaagggattcttgagacgggctcaaaatgagttcggcttaaggatcaagaaaattagaagcgacaatgggacggagttcaagaac

SEQ ID NO: 40954 - DNA, 471 bp, Zea mays
  unsure (1)..(471): unsure at all n locations
cttgagcggcttaactcaattcttatctcaagctatcaatcttacattgtatatcctttaagattgacccanagatgaattgagttgttatatcactaacttcatattcatctctagcaagaactcgtgttgtatggaataaggattaacctttgtgggaatcaagcaaaaggcctacaaccaagtgatatccaaaggatggtaacaattaattcttaagtgcacattgcttttaattggtatattcctttgtgtcttttgtagccacataggaaaaatgaagcacttgagaatgaacttaaaagatnttacctcgctttggacacgatctaattatatggtagattgcaacgtcatatctctatattatgacaatctacatgctntaaattggttgaatgtatcttgtggcatatntcaaaaatgatatcgtattattgcatgacctagacatanagatgattatccatg

SEQ ID NO: 40955 - DNA, 446 bp, Zea mays
  unsure (1)..(446): unsure at all n locations
gcttaatgatgaactggctagtcttaatgctcaatttattactagcaagaatgatntcgataagctaaaaattgcaagggatgcctacacaattggtagacacccctcaattaaagatggacttggcttcaagagagaagctaagaacttaacaagccataaggctcccattcccgccaaggagaaagggaaggcccctatggctactagtgctaaaaggaaccatgcatttttgtatcatgatagaagacaaactataaatgtaagtcatgatgcttatgattcatatgtttatgattctcatgccatggttgctcctagttcctcttatgtgtatgatagaaatggtactangagaaatgttgttcctaanagagatgctattcatcatgtgcctagaaagaatgttattcatgctcctangaaaatagcanatgaaccttcta

SEQ ID NO: 40956 - DNA, 408 bp, Zea mays
  unsure (1)..(408): unsure at all n locations
ttataatagaaggggagctgtacaagcatggagtctgttctcactactcaaatgcttatcccgagccgaacgcatagatatgatgaaggaaatacacgcacgcctgtgtggatcttatattggatctatgcctttgctgggaaaagatttcgtaaaggattttattggccaaacgcagctttngatgcaccggaattactccaaaagtgcgaaggctgtcagaaatgcgcaagagatcatatacagcattcctctctgactcatctaatacaacccactttggcattgtaaggtggggtcttgatatttaagccctgtaccaccagcacaacgaaatgtaaaatatgttgcggtagcagtaaaatattcttcccagtgattgaggcgatgcctttatccacaataact

SEQ ID NO: 40957 - DNA, 342 bp, Zea mays
  unsure (1)..(342): unsure at all n locations
aattaatatttaaaatatataagtactaactctgatattgatccttcttatattatctagcacattaatataaatatgaattaaatactatataattntcttatgtctgatgtcgtcgctacgatataaaaaatntcaaaaaatactgtaattattctcacatcctactgaagtttatatctattatttaagaaaatataggatacaatcgatggttactctttataaatcttataagctgaatgtaaaaacagaatatacattgattatagttctggacctattattcccactaaaaaacgatataaactgttccgataaaaccctttcaccatttcatcg

SEQ ID NO: 40958 - DNA, 408 bp, Zea mays
  unsure (1)..(408): unsure at all n locations
gccatggtcagtagcatacgccaatattatgcgaattgacttttgtctagctacgggtgcataggtntcaccgaaatccaaaccttcgacttgggagtatcccttggccacaagtcgagctttgttccttgtcaccacaccatgctcatcttgcttgttgcggaagacccatttggttcctacaacatcttgattaggacgtggaactaaatgccatacctcattcctagtgaagttgttgagctcctcttgcattgccatcacccaatcccgatcttggagtgcttcctctaccctgtgtggctcaatagaggaaacaaaagagttatgttcacacaaatgtgccacccgagatcgagtggctactccttatgaatgtcgccgaagatggtgtcgacggggtgatct

SEQ ID NO: 40959 - DNA, 510 bp, Zea mays
  unsure (1)..(510): unsure at all n locations
agctntatcaaatggacgtgaaaagtgccttccttattggacttatcaaagaagaggtctatgttgagcaaccttccggctttgaagatagtgagtaccctaatcacgtatataaactctctaaggcgctntatgggctcaagcaagccccaagagcatggtatgaatgcctaagagattttcttatcactaatggcttcaaagtcggaaaagtcgatcctactttatttactaaaactcttgacaatgaattgttcgtatgccaaatttatgttgatgatattatatttgggtctactaacgaatctacatgtgaggaatttagtaggatcatgacacagaaatttgagatgtctatgatgagggagttgaagtacttcttaggatttcaagtaaagcaactccaagagggaccttcattagccaaacgaagtatattcaagacattctaaacaagtttgggatgaaggatgccaagcccatcaagacacccatgggaaccaatgggca

SEQ ID NO: 40960 - DNA, 396 bp, Zea mays
cacatcttcagcgctgtatcaacttttttattatttgtgcttctccttactgtgacatcgattcgagtccgaagatacctgttcacacattgtactccagacacactggttaatcttgcttttgaggacctcttgaagccgaaggcccccaacatcctctaagaccttaatgtctcgacgagcaaactccaacttctgtgaaacaagtttcttcgaggcatgcaaatctttgatgacagaatcttttgaagacagtaaattattaagctgcgacactttagtctgtgaaacccttatctcatctctatgatggtcaagctccaacatagtaaagcaatgactcctctccagagtagtaatggagttgctagcatcacggtacatcttatccagact

SEQ ID NO: 40961 - DNA, 540 bp, Zea mays
  unsure (1)..(540): unsure at all n locations
agctagtcatgatgcattntatgtaactcgaaggtgtagccacgtatatgataaactaattatatatccaaaananatgccacatcattggatgaacagttcgcgttgttntggcaaagcttggtacgataattgcctgcttgaatctttattcatgatctaaggacctttatataggtcatatataagtcatatgtatccatctaggactctaactttacaaatcaatctgtatatccctctagaactctaacttaacaaaccagtctgcaatattntagaaaactaattgaacaagaaaacttgtagctacggggacanttgagaagtacatggttcatggttactagtcacactactgcatccggtaatcttgtcatttgttgaaagggatagagcagtttgtatatattacctctacatttgtatatctacatntaatattcggtgtggatagccaacctgtgctgtctggactgcatgtgaagcgcacgatctgaacatttcngcatctgcaaatatattggacgccatgtcatc

SEQ ID NO: 40962 - DNA, 303 bp, Zea mays
  unsure (1)..(303): unsure at all n locations
gcgagtgtctctgggtggtgtttacagactgcgtggctgagcggcggtagaaagccccggtgaagagctggacacgctgcgcctcttcaagccgaccggcgcgaggtanaagggcctggaatcngctggcgtactcttccacggntccggtgcgtccgcagtcggcgagttcgaacatcggggcagaccggagtgggggcccgaaccggaggttcaagagatctttgaaatgtccccacgatggtgtgccctcatcgtcctgaagcttgatataccatagttgcgcgacctcgtccatgtgat

SEQ ID NO: 40963 - DNA, 289 bp, Zea mays
  unsure (1)..(289): unsure at all n locations
gctgcccgagctgggctttgggcgtattcatggtgcgcccactgcctgaggaggccctcgagcgaagcgtgaatccgtccgggactactattcctgcccgaggccgggctcgggcgaagcgaggtcgcgtcccttggtagacgaggccttgacttgaaccgtgcttatcagtctttgtggtttgttctgaagatgttctccagccatgttaaagagtattgggggtacccctaattattggccccgacggtagcccccgagcctcgaagggagtgtangtactcgcttg

SEQ ID NO: 40964 - DNA, 422 bp, Zea mays
  unsure (1)..(422): unsure at all n locations
agcttcatactcggctgcgtagtagatgccgtatattcaactggagagcatacttgaggtgctcgcctccacgtgcagagaagagaatccctgctcctgctccctgcagcttcagcgagccatcaaaatacattcgccatacttctgccgtttctggattgtctggaacttgctgttctgtccactctgatacgaaatcaaccagtgcttgagttntgatggcagtgcgaggtcggaactcgatatcatgggatcccaactcgcaagctcacttggctattcngccaatggcttccttgttgtgaagaatgtcctctataggaaaaccagtaactactatgactntgtgatcgtcaaagtagtgacgcagcttgcgggcagttagaagtactgcatataatagcttctgaacctgaagatac

SEQ ID NO: 40965 - DNA, 276 bp, Zea mays
tgacacacagatgaacaatgagccgcttgcgaagaatgacggaagcatccagccagccgtgatggagctcattgtccgtgagaagaatgactcgtgaacatcgtgcgctatctcagtatatattccgaaataatgagacagctgtgccactgcggtgcacccctcgtgcgtctcaaagcttgcttatggcgaactctccgagttagggttcttccttatatcctggcgcgtctgccgaagccaagaaccatctactatgtggagcgtgtgcgtctc

SEQ ID NO: 40966 - DNA, 262 bp, Zea mays
agcttcggcttcttcactgatccattctatgattcctacgggatcgcctctaataaatttctgctcggatgagtaagcactcgcatttgcaaaactgtcttttagcttcttggcacaatccaaagatttttcgtaatatctctccttcgattcccgaagctcatctacattcttttgcaatcttgcgctagtccactcgcttattttctgttttgctttagccacttcaaaatcttcattcttctcggcaacgtttttcttc

SEQ ID NO: 40967 - DNA, 345 bp, Zea mays
  unsure (1)..(345): unsure at all n locations
tggcagcagcttccgcctccacctncattgcagcaaggtcaacagccagaagggagtcaatacgctccacagcagagggacttcagagaacagtccgaagctcgcacagtcaacagcactgtgccagagtcgaagcacatttattgacatatcctacctttgatagcagtcttttctattcagttntgttttctgtgaagcaaaaaacattgatagtttccatgtaataatttcgttgtttccacgagaaaaatttattcacaggcctaagttgccgaagcctaaaaattcttccgttaccgagaaagaccttcggactaaaaattcttctgagtaacaaaaagt

SEQ ID NO: 40968 - DNA, 489 bp, Zea mays
gcttctaaagggagaacacgtgatacgcttgactaacgtgcattttcataatatgacctcgtgcagcttgtcaagcaagtaaacaagtgggaggagcacatctcagcaagaacgtgatgaccacttcaagacctctggagctgctgcatatggacctcttcggacccgtcgcctatctgagcataagacgaagtaagtatggcctagttattggtgatgactttccccgctccacttgggtgttctttatgcaagataactctgaaaccctatggaccctcaagcgcttactaaagagagctcataatgagtttgagctcatagtgaacaagattagaagcgacaatgagtccgagttccataaccgtcaagtggatgagttccttgatgatgaggggatcaagcacgagttctccgctccctacacaccttatcataatggtgtggagagacgaataacatgacgctcattgatatggcgaggactat

SEQ ID NO: 40969 - DNA, 423 bp, Zea mays
  unsure (1)..(423): unsure at all n locations
cttcaagcattgatggtcttttttcagattctgaatgagtacatgctatcccaactaagaccattcttctcagttcagattcagagaacttgtcgctcagttctgagtctgcaatatcatcatatctaccctgccttgccagcgggagcacccagtttcgaattccatatgtcttaacagaacacgacttttctatcggccttttgccactagcaagctccaatagtattattccaaagctgtatacatcacaacctgcacgtgggttgccgaacataatgtactcacgagcaagatagcctcgttggcttcgctggtaatcntttatgatcattccatcacgaaaaaccttatcagaccgaatcgcaacatgtgcctgaagtctgatccagaacacattggtggtctgatgcttcatggata

SEQ ID NO: 40970 - DNA, 432 bp, Zea mays
  unsure (1)..(432): unsure at all n locations
gcttagttgctgaaggtcgcgcgaccggagcagtatatctgcgtgctccgtgttggagaggtcagtatatatatggcagccaccgaagggtttgagctgctgcggttttcatcatcatcaagaggttcacgcccgccggccgtgatggatctggatcgctgagactgttctttctcggccttgtgcagactgtgagctggtagatagctccatgcctccatcgtccatgggtatcgtatcgatggaggtcggtggagacgatctgtcagtgcctctctgtattctttgctgcgccctgtactgtatgtgcgttgtacatgtaccgagtcctcttgctcagcgtcaaatgttcccatggcaaatcttgccaggtntgcacctgtgtgtgccacgtgcggagattctctatctgtaatcgtacttgatcatcat

SEQ ID NO: 40971 - DNA, 438 bp, Zea mays
  unsure (1)..(438): unsure at all n locations
agcttgacaacgaagaaatggcgctcatcaccaagtatcttcgccanatcctcaagccaaggagagggaganaactacaagtcccactccaagaaggtgtgctacgagtgtggtaagtccaatcatttcatagctaaatgtccaatttctagtgaaagtgatacggacgacgactagaatgggaagaagaatgagaagaagagatactacaagaagaaaggcggcgatgcccacatatgtcgggaatgggactccgatgtgagctccaacgacttctccttcgacaaggactccgccaacatcgctgtcaataaaggcctcctcttcccaacgtcggccataagtgtctcatggctaatgacgatcaaagaaagaaggttcaatctagagccacccccatatatacaacatctagtgatgacggtagctctagtgata

SEQ ID NO: 40972 - DNA, 385 bp, Zea mays
  unsure (1)..(385): unsure at all n locations
gaacttcacatagctctatcatccatgttccctttaaatgactcagtacaggctccataaatatccaatagcaatcccgttgaactacctacattggtttctaacattctatactggagaataagttttcggaagtactttcattaatgatgtcagcaggatcttttcttcccctcttcctatcccttatggatttgccaagtaagcctggtgatatttgccttcacgacttattcattnttatataacccaaacaattttgattgtaaatactctatgagttgggtgtgctatgacattattaaattattgtttctagtttcatgtgatgctcattccttacactatgcgagaatgctgtatgtaaacatacatacatgactta

SEQ ID NO: 40973 - DNA, 396 bp, Zea mays
  unsure (1)..(396): unsure at all n locations
agcttcgtattattccagtctactgctatgccgattttattccgagggtacctgttcacacattgcactacagaaatactgttaaatccttgtttttgaggaccttctgactccgaaggtccccaacatcaaccaagagcacatttgatatggaatgatcatttgaaatagcaattttactcaaacctttaacctatcctttgcgattatctccaaatgtgatactatcataatttgagcaatcttcctcacttcattgggtgaacatctntcatatccctgtcatgtgttgatgcatccactatctaacacccaatgattcccttccgccttgtagttcacctacaaaaggaaatcaatctcttttaggtacccaaacttgcttgggtccttgga

SEQ ID NO: 40974 - DNA, 426 bp, Zea mays
  unsure (1)..(426): unsure at all n locations
ctcgaccggatctctgagtcacctgcagctgcagcttgtcatacctgtcatatcacagtacatgccatcacagcagctacagaccataccaataacttggcctttcgcatgctggggattggatatgattggacctttcaagaaagctcaaagaggctatacccacgtattggtggcaattgacaaattcactaaatggatagagttcaagcccattgcttctttaacctctgctaaggccgtggaattcatacaggatataatattcagattctggataccaaacagcatcatcactgacttangatccaacttcaccagctcagaattctttgacttctgcgagcaaaagagcattcagatcacatacgcatctgtggcgcatccaagagccaacgggcaggttgagcgagccaacggaatgat

SEQ ID NO: 40975 - DNA, 376 bp, Zea mays
  unsure (1)..(376): unsure at all n locations
agctngccttcgcctcanactatcatccttagtccttctgggttgnggaacgcgccaatgggaaaatcttcacatctgtcaaataagatgctcctcgatgaanaaagggcagatggaccgtattgttacccgaggtagtctgggcactaaacaccactgagtgcaaggcgactgggtttactcctttccgccttctatacngatcggaggctatgaccccgcaagaaataaagcatgggtccccgcgaacagttccgtcagccgtccccgacgtggacgagccaacttcanaggatctcattgacggagatcgactcttctccctataggccctaaacaaataccaagcccagaccanagcatggcgcgaccacac

SEQ ID NO: 40976 - DNA, 483 bp, Zea mays
  unsure (1)..(483): unsure at all n locations
agcttgcttacttggtaagatgaccaaggcgcccttcactgtttaccggagaggacattacatttattggaactcatacatactgatgtgtgcggaccaatgagtacgacagctaggggaggattccaatacttcataaccttcactgatgattntagtagatatgggtatgtctacttaatgaaacacaagtctgaatccttagaaaagttcaaagagtttcagaatgaagtagaaaatcagcgtggcaagaaaattaaagcactgcgatcggatcgtggaggtgaatattcgagtcatgagtttagcaatcatctaatgagtcgtggaattgttccacagcttacgcctgctatgacgcctcagaggaatggcgtatctgagcgacgatatcgcactttattagatatggtccgacaatgatgagcagcctgactacctctgtctttcgggatccctctagaataccagcttcacactaat

SEQ ID NO: 40977 - DNA, 435 bp, Zea mays
  unsure (1)..(435): unsure at all n locations
tagtctgcgatgctagagctattccatgttagtcttagcaattaaagaagtgtcgagttcagctctatcaaaatctaccaagtatagctgaccctctaacactcccttaaatgctactgaatcatcacttcttctaaagacagtaacacctatatccgaaaaaagacagttgtaacccatcttacacaattgtgaaactgaaagcaagttataatctaaagaatctacaaagaaaacatgggaaatggagtggttaggagatatagcaattttacccaatcctttgaccaaaccttgatttctatccccgaatgtgatagctcgttggggatcttggnttttctcataagaagagaacatcttttctcccctgtcatgtgagttgagcacccgctgtctatgatccaactttgagccccggatgcataaacctac

SEQ ID NO: 40978 - DNA, 390 bp, Zea mays
  unsure (1)..(390): unsure at all n locations
agcttatagatactctgagatgggcagaggcttctgacgaagattccaccccacgcatgtcaagtcaatccataatggtagcccaagtgatgataggggaagccaaccccaaagataacagcacatctcccaatcatcagggcctcaacaagttccttcatgccaccagctccaagaggtagagggggcaaaagctctagaggaagatacagagatcaacccacgagactgttttgtttgttctgcggcgaatacaaaggccacaccacaagaacgtgccaagtcacgaatcagaagcagaaagagattgtcanagctgaagcacgacagaatcagccaaagcaagtcctacatactgcttcatgctattctccctacgtcctagagtat

SEQ ID NO: 40979 - DNA, 396 bp, Zea mays
gcttcagcttcatctatattatggatagtcttttaatctgttcagttcccctcagcctttctggcagcttcctgacttccataaatagcaataggttcttgatccgaaagtatcttcatacaaagatactggatgaagagctgcttcgaaagcattgagtgttccacgaccaatgattgcattgtaagggtacttcatgtcaacaatgtcaaacacaacttgctcagtccttgtattgttgacaaatctgaaagtcactggcatggtaatcttgccgagtgctacaaatctgccttcttcgaagccacaaaagggatgtgtagcatcatggatcttatcttccggctcttgcatctgtctgaaaccttagcaaatataatatccgctgcactgcat

SEQ ID NO: 40980 - DNA, 362 bp, Zea mays
  unsure (1)..(362): unsure at all n locations
cttcatccgcacatgttgtaattggtgatgccatagccagcccatgctagtcttagctattaagcatgcatctagaccggcctcttcttttgcaaaatcaactaagtaaagtttgccgtctaatacacccttaaaagctagtgaaccatcacttcttctaaagacagacacatctacatttgtaaatagacagttataccccatgttgcataattgactaaccgatagcaaattatatcctagagactctactaacaacacattagagatagagtgctcattagaaattgcaattctacctaaccccttntaccttgccttgattcccatcaccgaatatgagtgaatcttgggaatcctta

SEQ ID NO: 40981 - DNA, 340 bp, Zea mays
  unsure (1)..(340): unsure at all n locations
gggagtggatagatggcgagagtagcgtgtaccctccgtggtaagaagatggacggtggcgtatctatgctcttcggtggcgtgaacccattctggtcttgagaaacccagtggcgagttaacatatgcatggngtaagtgctacatatgtcctgtgagtggagaatcccanctgggtattaatcgattcggatcgtctgtacttcttcgacatgaacacctggtcactgacttacacatancaatctcgggaactgaagggttgataaagacacctatcataggtcaagtgtctgatcaaagatagaaagaactctacactccggttactacttaacct

SEQ ID NO: 40982 - DNA, 401 bp, Zea mays
agcttcggcgtggcagcaaaaagtgaaaccgacttatttatgaaaaggctatctagacctcgacagattactatagaattattatcaagtgtaaagggcatgaatgtaattctgtatgggttatgtcccgcgcctataaataggtgaacaagtaccccgtactggacacgctgacttggcattcgctttttgcgtcacgcttgtactatcatctccttccagttgaaggtatacctgtaattcaacgatattccctgttatgcttaatagtaatacataaattgttcatgttggcatttatattccttacatttcatccttcggcattatataatgaaagtatgaaggtatgcccttcataaccttcgtccgaaaaccattatatcctaaaggaaataatg

SEQ ID NO: 40983 - DNA, 403 bp, Zea mays
  unsure (1)..(403): unsure at all n locations
agcttatgcacaacttatcttagctntattaatttatcaatttagcagctttactgatgagcatgctgaannattgttccaacttggttggtgcattaaaaccattactaactntatcataactagtgacatgcattccccagcaatgatttcattttatgtactgaaagttcatggtgtagccatagcgtactgataactatgttttgatcagttnttggtaaaatcgtctgttaatgtttatttctattcaatgaagaaacatagtttgaggttttcagcttctgtgcgtattctcgaattangataggcttagtngttgaacctgtaagacaatacctcttcatattggtatatgcatatgaagatgaatcgtagagtataaactgttaaaaaatacata

SEQ ID NO: 40984 - DNA, 261 bp, Zea mays
gtccacacgcggaggcggaagaggaggccctgctcctggcacatgcaagcatcgagccatctccagcggcaccggccgcagaggcactcctccaccttgatgagtcgaaagcacgcgctttcctctgcgacggcttcaacaaggacatgatcgaaagatggtgcctcgacaccgacgccactcatcacatgatcggccgacgggagttcttcaccgagcttgactctagcggtcgaagctccggcaagtttgaggatgcct

SEQ ID NO: 40985 - DNA, 338 bp, Zea mays
  unsure (1)..(338): unsure at all n locations
ccttcttatattaagaggaaactggaatgaaaaagggctcctcaactagataactaatttgataacatttaacacgtaaaccaaggtgcaggggatacccacacccaggcaacagtcattacaaagatccaaatccatcatagttcatcctgactaacataacagcacaggataagcanactaccctggctaactaagactaactataagtaagactatgactatgactaagactaagacttctcattttaactttcattacaggacccaacactgacgatctatggtgtctaaattatcctggtcctgcagtcgcggttgccatacacctggtgtca

SEQ ID NO: 40986 - DNA, 398 bp, Zea mays
cccattatagagcatacttctagcagattaagactttcattgtccatgtcatgctcattaatttcgctagttagttgtgctatgtgatcattttgttgtttaattaaagctaggtgatcatgaatagcatcaacattaatatctctacatctcatgccaatagaaacatgatcaacagtggatgtagagggttcgcaaacatttaaatcatcaatcttagtgtgtaacatgacattttcatttataagattggaaacaatatcactgcatagatgtaaattcttagccttagtgattaatttatcattttcaatcttaacgctagcaattgattcattcaacttgtcaatcctagcacatcaattagcattatctattttaagattaaccagagaatc

SEQ ID NO: 40987 - DNA, 337 bp, Zea mays
  unsure (1)..(337): unsure at all n locations
acccgaccacctcgaacgtgagggtctcccttcggaagttggagggtgttcacaagcacacaggaaggtcgagtngtccgaggggctggacgcgcttcccggcgatgatcccgtggaaaggcgaagcgcctgcctataccgaggatagatcaacacgcacgagcccgagggtctcggcgtatatgatgttgaggctgctgtctccgtccatgaagacctaggtgagcctgacgtctccgatgactgagtcgacaacgagcggtgattttcccggctcggacttgccgggtggtcggttggtcaaagtgatggcttgcggaccctctatgagactatc

SEQ ID NO: 40988 - DNA, 442 bp, Zea mays
  unsure (1)..(442): unsure at all n locations
agcttcttctccttctcttccctgcattcagcaacatgcctcatttcctgctcgtctacccggtggtgctcggcagcaagctcctctcgtattctctctatcctttctttgccctctacatcccactttntaagattctccaaccacttcttatctttctgtgagatttctgtatcaatccactgctcanaatcacaaagcggtggaggagtctacaaaatatgtaatgattagtatggaaagaaaacatgcaccacttcgagtctttaaattgttaacatattaaaagaatattctcaccattatatttatccggtgctaatcaatcgttggctcaaatgcataggtagcacacatctaatacctctatcgataggtgtcatgatcatcagacttatcaaccttgcaaggatcaccaacacaacacatatgcactggaaca

SEQ ID NO: 40989 - DNA, 270 bp, Zea mays
acccacaattgtctaggtctactcttgcttggcggacctacgaatgtaactctgacctttccatttgatacttttcttagaacataatgagcattgaaagcaaatggtctcgagtgcttaagcaaaggagttggtggcttggctctgcagttgtgggcaaagtgaccttcttttccacactcaaagcatttgataagcttgtgagtctgctctggcttgtattgagtagtaactttcttttgcacacaagcactgtatccaataccactc

SEQ ID NO: 40990 - DNA, 454 bp, Zea mays
  unsure (1)..(454): unsure at all n locations
agctntacgaacacctactacagtaagataatgcttgttcttggcattatataaagactctgtaagtatgtctgtaagattttcatctttatgtaccttgtccactttaatctcgcctttagcaacaatatcatgaatgaagtggtacttgatatcaatatgcttggtcttgaattgatacatgtcattcctggtcaaataaatagcactatgactatcacaataaaccttaatgacatcttgaggaacactaagttcagaaataagacctcacatccaaattgcttctttaaccccttcagtagctgagacatattctggttcaatagtggaaagagcagttacagactaaagctgaaccctccaactcactgcagatccgcatgatgaatatacatagccagatatggagcgtctcttatcaagaacaacacgtaagtcagaaataacaaat

SEQ ID NO: 40991 - DNA, 282 bp, Zea mays
agcttggacagtacatcagccgccgtgttccgatctctttctatatgatgaaactccagaccttcgaatttatcttctagctttcggacggaggcgcagtatcttcccattgaatcacttgaacaatcccattccttgtttatctgactgatgactaccagagaatcttcgtacaccatcagtctcttgacacccagtgatatagcgatgtttaatccgtgtatcaaagcttcatactcggcttgcgttgtagacgccgggaataccaattggagagcatac

SEQ ID NO: 40992 - DNA, 337 bp, Zea mays
  unsure (1)..(337): unsure at all n locations
ctcaacagcgcaccctctggcctcttctgtctangagtaggaggacgagagctaccaactagaagaatgaattcagaagcgaagctgaagatgtaaagaaagtgaaagcgaagaacttggcacgcaccgccgttgcattttccgagcgctctagacacgatcttggccaggggaggatagcaacccatggcgccgctgcctccctacctcgccggacggtggtggtggtggaggagcctgttgcgtgtgtgtatcggtgcgggatacatgctcgctcctccagttcgaggcggcggcggaacggtgagggcgggcctgcccttatagtctgtctgat

SEQ ID NO: 40993 - DNA, 354 bp, Zea mays
  unsure (1)..(354): unsure at all n locations
agcttgtgaaaggtctttatctccacatgtgctaagtgtgcangccacagccagcccatgcaagtcttagccattaagcatgcatctagacccgcctctctttttgcagaatcaactaaataaagcttgccgcctaatacacccttaaaagctagtgaaccatcacttcttctaaagacagacacactctatattggtaacagacagttatatcccatattgcacaattgactaacagatagtaaattatatcctagggactctactagaaacacactagagatagagcgctcattatgaaattgcaattttacctaaccctcttacctcgccttganttccatcaccgaatat

SEQ ID NO: 40994 - DNA, 476 bp, Zea mays
  unsure (1)..(476): unsure at all n locations
gcttctacagggagagcacattgtaagactaacacatgtccattttgagtattacagagnttgtagcgcatgtcaagtaagaaagcaagtcgatgcccaccatccacacaagaacattatgacgaccgataggccgcttgagctactccacatggatctattcggcccgatagcttacataagcatcggaagaagtattgtcttgtaattagggatgattattctcgcttcactaggaagttctttctgcaggaaaaatcacacacgccagggaccttaaagggattcttgatacgggcctcaaatgagttcggatgaacgatcatgaaaataacaaacgacaccgggatggagttcaagaactctcaaatcgaaagctttcttgaagaagaggacatcaagcatgagttcttttcttcctacacacctcaacgaaatggtgtagtggagaggaagaatagaactctacttgacat

SEQ ID NO: 40995 - DNA, 232 bp, Zea mays
gataacaaatggctattttgagcaaacagggtccgcacgcatgcctgccggaaagcaagttggagctcattattcacacaagaacatcatgacgactgacaggccgcttgagctactccacatggatctatacgacccgattgcttacataagcatccggcggagtaagtattgtcttgtaatagtggatgatcattctcgcttcacttgggtattctttgtacaagaaaat

SEQ ID NO: 40996 - DNA, 195 bp, Zea mays
cgcgtgctgtggattggatatgactggaccttgcaacaatagctcaggcggatatactcatgtactggtggcgattgacacattcactacatggatagaagataagcccattgcttctctaacctctgctcacgcccgcgaatatataccagatataatattcataatctggataccaaacagcatcatcactga

SEQ ID NO: 40997 - DNA, 381 bp, Zea mays
  unsure (1)..(381): unsure at all n locations
agcttctgcgcgtcgatccgtcctccgtccgagcatgtgctgctctcttccacgggatcatccctgngaagcgcgtccaacccctcgggcgactcgacctcccagtctgcttcgggacaccctccaacttccgaaaggagaccctgacgttcgaagtggtcgggttccgaggaacctaccacgccgtgctagggaggccatgctacgcgaagttcatggccgttcccaactacacctacctgaagctcaagatgccgggccccaacggggtcatcaccgtcngccccacgtacaaacacgcgttcgaatgcgacgtggagtgcgtggagtacgccgaggccctcgncgagtccgaggccctcatcgtcgacctggagaacc

SEQ ID NO: 40998 - DNA, 449 bp, Zea mays
  unsure (1)..(449): unsure at all n locations
agctnntgaacgtactaagcacatgtcggtgaatatggtaatctggtaacctagtacctgagtgaagccgggcgtggacattatccctcacgcgacctgagactgcgtctcccatgctagctatggtgggtacaagtgtggtcactgcaccgctgcagccggagttagtggagcattgtatgccaaggcgatgatgcctgcacgcgaactgtgaatctatggggaccgttgacatgtgtggtgtcggagtaccctgacatgtcgagtgttatgttaccttgcaagataaaactcgatcgcatcgtctgctctcgcactaatagactgctgacccttgactaatcagtagagtgaatgagttcatgagacaattgtgatgaactaagcttgtacatgttgttagaagaaacactactaaatatatctaaattgaaactagaatgtttaaa

SEQ ID NO: 40999 - DNA, 463 bp, Zea mays
ctgcagcatgcagctcggcgctcaagtacctggcctttgcatcttggaagacttcgctgacgtagtagactggcttctagatgtttcagacccctgcggctggtcccgagtcctcaaacttctggccttccgttcacatcgtggtggtcggaccaccaccttcttctaggggaactttctgactcccctggagtagttgtgccgtcctttcggctaccagcaccatgctcaccgcctctgtagccgctgcaatgtataagtacaatggctcccctggctctagagctaccactttcggtagggacacaaagcgctgcttcaactcttgacaggctcgttctgtctctcgcgccaagagaatggctcgacttctgcatagctcgaaaagggcgcgcctctcagccgtcttaaaagaagcggctataacagctagtgattccgaagcttctggatctcttgatgt

SEQ ID NO: 41000 - DNA, 345 bp, Zea mays
  unsure (1)..(345): unsure at all n locations
agcttaagcatgagctcaatattcttgattctaagatcttcttttgttaaattacacacatagctcttctatatacctttgatcatgtctctctcatatgctatgactaatgtngttttccaagagaatttcatacaagtcataggaatattgaaagggaattggagtcttcggcgaagacaaaggcttccactccgtaactcatccttcgccatcgctccaagagactctccattcttgggggagaaagcatgagcacaaagcanaggacttcgtgtgtggataatcttaactcatttattatgaccaaagggctctaatgnattcgttcttggcgattcatgc

SEQ ID NO: 41001 - DNA, 307 bp, Zea mays
tagcttctcgactaagacagagacaggtgtctcttgacaggtgaaagtacgcgttagcggcgaggccgaccgagccgagggattcccacgcctctgggatacagatacctcactcgtcgcttccgcgaaaagcaactctcgctcacacaaacatccctgttaccgacagagtccagatgctcgaaacaagaggaagaaaggcgcagcttctcaagcgtggcgagggtgtgttttttctggcctcggcggccgcagaaagcacacgctacaagatgatctgatcctgcaggctcgggtcttcacgctg

SEQ ID NO: 41002 - DNA, 251 bp, Zea mays
agcttctaaagggagaacacgtgatatgtcttactttgtaactctcgaaaaagatagaccttgtgcagcttgtcaagcacggtaacaggcgggaaactctcatcatgcctaatatgtgatgacaacatcgagacccccggagttacttcatatggacctctttggaccccgcgcctatctaagcatatgaggaaagaacgctggccctgttatacctgatgatctttcccgctccacttgggtattctttt

SEQ ID NO: 41003 - DNA, 423 bp, Zea mays
  unsure (1)..(423): unsure at all n locations
ctagaatcaataatatttatctcatgcctaagtctgagaaaagaatgttcatcaagtggctcggtaaagatatcggctaattgatctttagtattaatgtaagaaatctcgatatcccccttctgttggtgatccctaagaaaatgataccgaatggctatgtgcttagtgcggctatgctcgacgggattgtcggccatcttaattgcactctcattatcacatagcaaagggactttgtgtatattgtaaccgtagtcccgcaaggtttgcctcatccaaagcaattgcgcgcaacaatgtcctgcggaatgtactcggcttcggcggtggaaagagcgaccgaattnttgcttcttgaagcccaagacaccaatgatcnttccaagaactgagcaagtcccgatgtgctcttcctattga

SEQ ID NO: 41004 - DNA, 452 bp, Zea mays
  unsure (1)..(452): unsure at all n locations
ataataacttatgcactcataacacccgatattgtaataaatactctttctatattttacgaatataaaagaagntattgtaatctgctttcgcttattcttttccccgactatgtgtgtaatgtctgcgtgatgggtgaagcgctcttgggcgatatgatgatgatacaaaataccaaacttgtcaagtgattatgtgcatctacatggttgtccgacagccttaagacaacgacatcggtaggtgggcctaataccttgggaggctccgtgacagctagtatctgagcgaagcccgtcttttagacattacgtagtacttcaaaagaaattttacacacttaccttctataagtccggtacagagtgagtatatatgaagtatggtcaacgaaagatcgacccatantagtatgtatgctgcatcatgttaaatatactaataatttccc

SEQ ID NO: 41005 - DNA, 348 bp, Zea mays
  unsure (1)..(348): unsure at all n locations
gcgttagaacgaagattangctccgataccaattganagttgcctagagggggggtgaataggcaagttaaaactttttcaacaaaaactagaagcaaactgtgtaaaactgaattgatctcgaaattcacccagttaactttggaaatgagatgttctaaatgatccacanggttcacagtagtagatctgagaaaggcacttctcaaaatccacacaccacaaagatataaacaaatcttccacgcaatgtgagagaacgaagaacacataatatacacaatgagcaagaacacaagagacacaagaattattccgaagttcggtcacaccaccaaggtgccctac

SEQ ID NO: 41006 - DNA, 399 bp, Zea mays
  unsure (1)..(399): unsure at all n locations
gtgtctaaaggtctagctaaccctggcgacatgggatncncaacttgtgggtacagggtacaacctctgcagagtgtaaaactggtatactagccgtgctcgcggtcatgagcagctcatgactctctaatgattaaattatggaacctacacttcaattgtcatatgcattcgcatgcggttattactaattatgttctattatttattatggcttgctatttacttacatctaataactgctaatnanntttgtccgcctcttaaaagcaatgctcagcttaactcctattgtgatcagccttaccatcacatgaactccacctttagtgattcatctacattattctcacaacttgtgagcgataacatgcggagctaccctcgctgctcacaccc

SEQ ID NO: 41007 - DNA, 386 bp, Zea mays
aagtcacctgccgcatgcaagcttcggctatgggtcaaatttctagcagcacaatattacgatagtaatgaatgctggggtaacttcacacctacccttatatgtatattagtgttgcacgcgggaagggtgaatgttaagccacctgcacccaccgaacagtcgctcgcattcactgaacggtggaccgcaaggcgcgaggagaatcaccagatcgtgtgtacccgtcctatggtgggaccaccttgcactcggaatatttaaatcgtttctcgacaacgagctcacggaaggtattttccgaccctctgcattccgaagcctaaaagaatatttcacgggtcgagcttcgtacgaaaaacgatctgtcaccggaaaggctactg

SEQ ID NO: 41008 - DNA, 409 bp, Zea mays
  unsure (1)..(409): unsure at all n locations
agcttccatgtatatatttatttcgcattaattactatatcctttctaacgatctatggntctaagtagatcttggtcttgcaagcgggattgccataagactggtgtccacgctgaagtgagcggtacgggtgctgactcccaacgggagcggtggatccaccgtccagaaaacgacgttccgcgcgctcagcccgcagcagggcgatctcagcacgagccctactcagctcgtctaatgcatggtccagcttcgcgttagcacggaagctaggttgactgtgctgttaacctaagattgccttcccgacaggtgagacaatcacgcctcctgtgctgccatatgaacggcaggggtaatactttatgtcaagaccgtcatctgcccacctgataccgagcattagtg

SEQ ID NO: 41009 - DNA, 402 bp, Zea mays
agctacgtaactcgcgtacttaagtagtggttactctctagctgcgcttgttcggtatagctagtgagtaatgctagtatagtgctaatagcgcttatgtcttgtgcattttaatcacatcactactatgtgtagaagactctggtatgtctaaagtattagtctcattagcttgacactttagttacttgaattaagcgtattagaatatttcggaaagtgcttgtgatagatacaagagtataaccttgactgaaccgtaatgttagttctacatgtatttatgtcagtcgatacaattatgggcctattggaagcaccatagtttctaagagaccgaattctatatctagtttttagaacttgtttatacaaaacttggatcacgtatttgaaaaccaa

SEQ ID NO: 41010 - DNA, 479 bp, Zea mays
  unsure (1)..(479): unsure at all n locations
ctgaaggctgccagcttatcttacttatgtaccaacctgatgtgggatgttttattctcttggagtccacttatttccaaagcttcattcttttgttcatattggatgaaactcgattgcaaagctttcaagtgtgacgtttacagctcaaagttgttatgtgttggccaacttaatggatttatgtatttcatttcagaatggctgacaacaactcaaacaattcttttcgaccacctgctggcagtctcaatacaggtaaccacaatttccccccactcatgtgggattcctcagatgtggcagccccaaagggtgtgacccacacaagctttaacatttacaaactcttcacattcccatatgaccaatcctacctggtcctatggacctaatgacccatctggatatacctcttcgtactcatgggacccatantttgggtatgacactcctgggggtgctcctacacaaacatg

SEQ ID NO: 41011 - DNA, 442 bp, Zea mays
  unsure (1)..(442): unsure at all n locations
agctngagttattttattacagaccagactaacagtgagtgccgtgttataatattatacaaaccaggggaggcacaaactcctcctgataagctataagcaaaagatcctaagtggaggaccgactcctcccgcacttcagtcttgttcttctctctttggaaccaccttggcatagaagcagcaaaagtctgctacttcctcacctaaaaacaacgaacggataaaccctgagtatggaattactcagcaagtcttacccgactaaagaaaagactctcaatggtatgctggttatatgggaatcaacgtaaagctttcaatattcaaagactctgctttgcagaaatgcttactaaagtggatccttaacacatcaattctatctgtcaagtaagtaaaattacctgcactagagtctcttctaccctagttcaatcac

SEQ ID NO: 41012 - DNA, 347 bp, Zea mays
  unsure (1)..(347): unsure at all n locations
gagaacacattgtgtgactaacatatgctctttttgagagagacaggagttgtatcgcatgtcaagcaaggaagcaagatggtgcttatcatccacacaagaacatcatgacgaccgacaggccacttgagctactctccatggatctatttggcccgatagcttacataaacatccgcgggagtcagcactgtctagttattgcggatgattattctcgcttcacttcacttcttgcaggagaaatctcacacccaagagaccttagagggattcttgagactggctctaaatgagttccgtntaaggatcaaaaagattataagccacaacgggacggaggtcaa

SEQ ID NO: 41013 - DNA, 392 bp, Zea mays
  unsure (1)..(392): unsure at all n locations
cctgcggcctgcagctgagaaggggctcattccacatgtgctaagcggcgaagccacagccagcccatgcaagtcttaaccattaagcatgcatctagaccggcctcttcttttgcaaaaacaactaaataaagtttgccgtctaatacaccctctataagctagtgaaccattacttcttgtaaagacagacacatctatatgtgtaacagacagttatatcccatattgcacaatcgactaacagatagtaaattatatcctactgactctactaaaaacacattagagatagagtgccattacaaattgcaattgtacctaaccctgttaccttgccttgatgccatcancgaatatgattgaatctttgggaatcctattcttgacgt

SEQ ID NO: 41014 - DNA, 471 bp, Zea mays
  unsure (1)..(471): unsure at all n locations
agctttagatgatatacagttcctttgtggatgattcccangtttagcttctccatttcttgacacaaagcgttctcggaggtctttgccataagacaatggcaggaagtcttacgactcaatgcatctgccaccacattggccttgcctgagtgataatggatctccagttcataatctttaataagctcaagccatcgtctttgcctcatatttaactctgactgggtgtagatgtacttcaaacttttatgatctgtatatatgtgacagatattacctagcagatagtgacgccaaatctttatggcatgaaccacagcagctagctccagatcatgagttggatagtgctcctcatgtcggcgcaactgccttgaagcatacgcaatcactcggctctcttgatcagtacacagcgacccactgcagatcatacaattacatcaaagttagtatgtcggtgactat

SEQ ID NO: 41015 - DNA, 225 bp, Zea mays
tgaaaacctgtccgactagagtactggatgctgcaagtattccacattgccctgcatggacctcctccacaagttgctttccagtggacgggagaacacacttcatgaggatcgccaatgcgccccttctgtacaatatcttcccaatgagtgtatagagagctgaccgcctggcaatgccctctgccgagatcttgtcatctgatgcttctccatctctttata

SEQ ID NO: 41016 - DNA, 303 bp, Zea mays
  unsure (1)..(303): unsure at all n locations
ccttgactcttccaatctcatcaagcgttttctcaagcaaatcagcaagcatgtatgcatcatgtacttcactagatgccatcacggactctaaaaagtcagtgccctctgngctgttcactacaaagctaatgagatggcgtctccttctatcagaccatccatcacacatgagtgcgccaccatagtgttttcatgcacgctcatgttcctccctcattgctagtgtcgacttcacagcttcttgtagcaatggcctcgctagttggtaccgtgtcggaggcttataccctgaaccaaact

SEQ ID NO: 41017 - DNA, 327 bp, Zea mays
atgaatatttatccatcctagcggttggtgatcattagaggaattactcgcagttaaaagagttccatattcttaccgaccatccgtagttagtctaattggatgaacaaccgatgcataatccatgctagaagaagatgtctactcacctcttgggcttacaatatcatatcaactacaagaaagacattgagaacagtgctactaatgccttatctcgacatctagatgtatcattttcttgttcaacactgtcttcttacacaccacaatggattctacaggtggttaatttttatgatcatgatccaccgaccacactgctta

SEQ ID NO: 41018 - DNA, 487 bp, Zea mays
  unsure (1)..(487): unsure at all n locations
agctggccacaattatggcaagtgtcgactcgtggctggcttttgttgttggcgactccgccctaggcgcctttgcatgcaccgccctcggcacgtcatcgtgtcctgccctgagtgcctccgcgccccttctgcgacttgccacgtttgcggccacctcttgagaaagaggactaccccttcttcctgtcaccctagcaggcctctcactgcttctgagtgagatgtagctctccgccgatggtgataggccccaagagactgttgtttgtcatcgccaataacttataggtgattatcgcctcttcagtcaacatcggggagaggtctagcagagactcgatcgagcgagcgatgtgctcgtacttctcggtgatgcagcataagagcttctcgacagctctctcctcattgtaagtgtctntggccagttgcacaccttcttgagtagagtggtgtggagagataaaatcataatgtctcccta

SEQ ID NO: 41019 - DNA, 487 bp, Zea mays
  unsure (1)..(487): unsure at all n locations
gcttataataaaagaatagaggcgagagctcgttcgtatatcattatagaaagggagttatacaagcatggagtntgtgccccgctgctcaagtgcttgtctatagccgaatgtatataagtgatgaaagagatacatgcaggcctttgtggatcccacatcggatccaggccgntacttggaaaagtgttccgtctaagatcttattggccgaatgcagcttcagatgcagctgagttaattcanaagtgcgaaagttgtcagaaatgtgcaagagatcaaaaacaaccttcgtctttgacacagctaatacaacccatctggacattgcaaacgtggagcctccatttgctgggcccattaccaccggctcaaggcaatctgaaatatgttgtagttgctgtggaatatctttcaagtggattgaagcgaaccattagctacataacttccgcactgtcaaaaattttctggcaaatattgctgt

SEQ ID NO: 41020 - DNA, 372 bp, Zea mays
  unsure (1)..(372): unsure at all n locations
agcttgaagccatgagaagtagcatatgctaattatatactaatngactcaagcctagctactggtgcataaggttcaccgaaatccacatcttcaacttgggagtattctctggccacaagtcgagctttgttccttgtcaccacaccatgctcatcttgctatgtgcggaagacccatctggtttctacaacattttgattaggacgcggaactaaatgccatacctcattcctagcgaaagttgtgagcttctcttgcatcgccaccacccaatccgaatctggtagtgctccctctaccctgtgtggctcaatagacgagacaaaagagtaatgctcacaacaatgtgcaacacgagatctagtggta

SEQ ID NO: 41021 - DNA, 354 bp, Zea mays
  unsure (1)..(354): unsure at all n locations
tgcagcatgcagctacaaagtgaagatgtttgcgaatattattatntgaccgttgaacgtcttttcggcgcataaagctctaaaatataagttggtctgccatcattgcaattgcttcatgaacagtaacccatggtgaggagctgtccttaaggggttctacttttcactccatacacatagagatggagcgctcgtgttggtgaacacatagactctattgccctaatatgtcaaccttcgatcttgtgatgattctgagtatgaccaacgcttgtaaatggtccttaaccattgccccgatattaccaactgaatttacacaattatatttgcatgactttgagtttgttg

SEQ ID NO: 41022 - DNA, 322 bp, Zea mays
aagaaggaagagttctcccttcgctaaaaaaaaatttctcacacaagccatataccggacaagggtaagatatatacaggtaccacaattactaaattcttacatatatacaaaattcttatatctttgagaaagtctttttgtaagcttcactatattttacttatatctgactataacaaagaaaaatcaagtcaagaaagtaaatacaattaatttcatgataagggttgactttacagcatttcccgcgtatcaattgatataactgttctatctcactagtgggagcataattgtggaaaatgaatggctatacatt

SEQ ID NO: 41023 - DNA, 402 bp, Zea mays
  unsure (1)..(402): unsure at all n locations
cttcatccccacatgtgctatactgcgatgccacagccagcccatgctagtcttagcaattaagcatgcatctagatcggcctnctcttttgcaaaattaactaaatagagtntgtcgtctagtacacccttaaagctaatgaaccatcactccttcttaagacagacacatctacatttgtgaataagcaattatatcccatattacaaagttgactaacagacaacaagttatatccgagcgattctactaaaaacacattagaaatggaatgctcggatgaaattggctattttcctagtcctttaaccttgccttggttcccatcaccgaatatgattgaatcttgnngaatccttgtcttgacgtaagaggtgaacatcttcttctcccccgtcatg

SEQ ID NO: 41024 - DNA, 449 bp, Zea mays
agcttgtcggagaggaaattctccggcctgttggtggagtgcacctgccctaagtcctaggatgcggagggggcttaagcgttttgcctgttggagattagagggatgaacacaagaacacacaagggtttagagtggttcgggccgccagagcgtaataccctactccactgtgtgatgtattgagcttgaaagctcgtatgaacttgtgagcctgagctgggtctaagtgtgtctgtcttgttcacgtcgcatgcctcctcttttatagctcaaggggggcatgtacaagggttttgagccccgacacatgggcccatggacaaatggaagggtggaactactgcttgccatgcccgtgtaatcttcgtgtgccctgacatccaagatccgtgtcgactcggcgcgcagggggaagcttttctattagggatgaatatagtgcaccg

SEQ ID NO: 41025 - DNA, 435 bp, Zea mays
  unsure (1)..(435): unsure at all n locations
ggtgctcactatatgtattaatgtttatttctttacaccgagtacaaatgcgggatgttctacacaagaattggattagttcgctacttctaatttagcattcacatcattgttgacacctctcaaagtataaatggcttcatgacaagtacattcttcaaaagacagcatcgaatttctccttaacttgtaaagcatacgatatttgtgcctcatcaaatatatcatgctcttcatacaacaaatcctcttcgctttctacaagtatattctttctattcaaggcatcaattaattcattaattttgtctatcttagatctatctaagcccttgaacaaacatgaataatctacttcatcctcatcactagattcgtcctaacttgaagaatcatatgtagagcngcgagtacataccttcttctttcttgcat

SEQ ID NO: 41026 - DNA, 367 bp, Zea mays
agcttaacttactaggcgatgacacacattattattatattctacacaactgcgatctaggaccataaaacgaaaatacagcttttagctctgaaccactttaatgaaaacgacactacgactaaaactcgcctggctgccctgtagaagggatcatacatgatggtcaatatttttcgtggatgtgcatatttcataagtggctcatgcagcacacaattcaaaagtaatctattcatgctaggaaccgaacaattaaaatcaatacatgatggcggtctattaatggaaccgaagaaacaacccacgctctatggtaaaactaatatgaggactatccatcacaattccaactgccaaacaaaaa

SEQ ID NO: 41027 - DNA, 464 bp, Zea mays
  unsure (1)..(464): unsure at all n locations
agcttacttcgtgtaactatgacagtattttttgaaaatcggctctgtattttattcttgtgtcattgatgcaatatgatgtatgatgtgatgttatgcgaaatgatgtgatgatatgatgcaaaatgacaatgatgccgaagatacatactcacactcccacactggaacaaacaatctcttcattcccttaggaacgactggaatctctttgccgtttatttttcggcttcaccatttatttttcggtgtaagttctgcatccccttatgaacgtcttttgaacttctttgccttctatttcggtggcataagttctgcattcccttaggaacgtcttttgaacttcttcgccttatatttcggcggtatatagctctgcattccctttggaacgacttttgagcagaaaacttactctgcgctcccttangaacgactnttttgtagcttcaacaaaactt

SEQ ID NO: 41028 - DNA, 343 bp, Zea mays
  unsure (1)..(343): unsure at all n locations
tattatgaatgctctacgctcacgatttgaacaaatagcttcaattggcattgacacccagtgttccttccgagggacatcctttccattggaaataatgtattctagtggagacacatgtccatatgaacgttgacttactttttcgcttacattcgttaatcattgcctattgtgaattcattgcttcatgtgcattaactcaanaggaacttaatgtacgcctttactcctcataaatgatgattcgcttgccattcacatatatatatatatatatcattccttatatactcccttatactactaatacctcttttccagtgctctatcgactttttta

SEQ ID NO: 41029 - DNA, 416 bp, Zea mays
acatgctcgcgcctgtttgtatgaccactcctaccctaaaccggagacgcgctcggggattaagaaaacatcatgggtcattatgtcagtacatttataagtcggattggcccttcatcatgagatctgtcattgtgcccaagctctataagtaaactcttcggcgcttgctcctgagaagactcttcgaacgatgacatctcttattttagtgatacttcggcgtactgaatcagaccacccaacaagtgccccctctctcggtgctacatcggtgtcttgaacaagcttgatccgcgaaaaagtattctacgcttctggatgctgaagatccaaacaacaccttccctgagctcgttggctataaacgatctaaataatcgtcgcgcgcgcgagggccccatattgcaacaata

SEQ ID NO: 41030 - DNA, 342 bp, Zea mays
  unsure (1)..(342): unsure at all n locations
agctcgccagtacttgttttatcaacaacatctaccagcacagcaactgcagaccataccagtgacttggccattcgcatgctggggactggatatgattggacctttcaagaaagctcacggaagatacactcatgtactggtagcaatcgacaaattcactaaatggatagagttcaaacccattgcttctttaacctcagctaaagccgcggaattcatacaagacataatatttagattcgaaataccgaacagtatcataactgacctgngatccaacttcacaagttcagagttcttcgatttctgcgagcaaaagaacattcagatcaagtacgc

SEQ ID NO: 41031 - DNA, 321 bp, Zea mays
  unsure (1)..(321): unsure at all n locations
gacctatcaaggaataggtctatgttgagcaacctcccggctatgaagatagcgagtaccctaatcatgtatataggctctaaaggcgctttatatgctcangcaagccccaagagcatggtatgaatgcctgctagattttcttatcactaatatcttcaaagttggaaaagtcgatcctactctctttactaaaactgttgccaaagatatgtgtgtatgccaaatatatgttgatgatatgatatttgggtttactaacaaatcaacttgtgaagagtttacgttgatcatgatttaanattctatatgtctatgatg

SEQ ID NO: 41032 - DNA, 334 bp, Zea mays
  unsure (1)..(334): unsure at all n locations
gcttctaaagggagaacatattttgcgactatacaatgttcactttgagatatacacgagttgtagcgcatgtcatgcagggaaaccagttggtgttcatcattcacataagaacatcatgactactgacaggtcactcgagctcctacacatggacctattccgcccgatagcttacataatcatcggcgggagtaagtattgtctatttattgtgcatgactattctcgcttcacttgggtgttcttttagcacgaaaaatctcataccccagacaccttacacggagtccngacacaggctcaaaatgagttcggcttaacgatccaaaaa

SEQ ID NO: 41033 - DNA, 411 bp, Zea mays
cacctgtctgtgtccttctggctggtgattgtgagtcgaagttggagccatgagtggtggtggtggtggcagggcctatgcaactggagagtggcttgccaaagctactgatattgtgtgttgatgattgcccacgtactcagtaatgtacggggaatagcacgaatcagtatgtaggacctgcttcggctaattctaccatgcttcggcttcagctattcccttttgcttctatatcgtgacatggcatgtcctagttgcacgccccttgtattctccatacaataagcaaaacaaccttcttggttgcgagctaaatcttcctccaaagctcctacctcctctgcctcttgcggctagtggccataaggagctctgttgtgttcctgataattgacagttgtgcggatg

SEQ ID NO: 41034 - DNA, 369 bp, Zea mays
  unsure (1)..(369): unsure at all n locations
agcttcanactcttcgtgtgcgttgcattgttgctacacctggcggtgtccttctggctgttgattgtgagtcgaagttggagccatgagtggtggtggtggtggcagggcctatgcaactggagagtggcttgccaaagctactgatattgtgtgttgttgattgcccacgtactcagtaatgtacggngaatagcacgaatcagtatgtaggacctgcttcggctaattctaccatgcttcggcttcagctatttccttttgcttctatatcgcgacatggcatgtcctagttgtatgccccttgtattctccatagaataagcaaaacaaccttcttggttgcgagctaaatcttcctccaaagct

SEQ ID NO: 41035 - DNA, 470 bp, Zea mays
  unsure (1)..(470): unsure at all n locations
acctgaggcatgcaagcttctcttagttattgttgctgctcttatttactccatcatgttacatgcttgatggacaccactcgagtatatcatttttttggtaatgtctcaacttcttgttgcaggtctgaacattacaattattggtcacaatgatttctattcttatagaaagcaggtgaacctttgtaattgtataagcatactcagatgtatatcttagcttcctgcagaactctaactacacccaaaagcccagtccaacttggtaaatataatcgagaaaaagagagatttgatgttaacatgacccttgtagctccttttagcttttctattttgaaccatcagttgcaaaaaatgaactacctaatcttggacatatgtttattttctaatatcaacaaaatttactaaaacacttaccagagtntaattaatacttacagcgtgaactctcttgtactgtg

SEQ ID NO: 41036 - DNA, 468 bp, Zea mays
agcttatgaagattcttcatcccaacgtggtttattcagcgatgccagagccaacccatgttagtcttagcaattaagcaagtgtcgagttcagctctattaaaattaactaagtatagctgaccctctaacactcccttaaatgctactgaatcatcatttcttctaaagacagtaacacaagtttaggccttgttcttaggtacccaaacggtcttgggtcctttgacattagaaacaagcacattgggtacccaaacacaagtctttgaccccttgtgtttgcccccaacatatttggcaactactttgcctgatttgttagtgagcacataagaagcatcaaaagtcttaaatgaaatattaggttcatttgatgctataggagatttctttttacgcaatttagcatgagtggattgctcagaactagacgcctcactcttatacataaaagcattatgagag

SEQ ID NO: 41037 - DNA, 342 bp, Zea mays
cctgcggcatgcaagcttctaagggcgagcacactctaggatttattgatgttcattttgataaagacaggggtcgttgcgcatgccaagcgtgagggccagatggcactcatcatcacacgcaagagcatcgtgactagtgacaggccactggagctcctacccgtggatgcattccggccgatcgcttacataaacatcggagggagtcagtactgtcgcataagtgtggatgaatgtactcgctgcactcgtgtattggttatgcaggaaaaatgtcgtacctcatagaccatatagggattcttgagacgggctcataccgagtatagcttatggatc

SEQ ID NO: 41038 - DNA, 394 bp, Zea mays
gtctggcgtggggaacctgacttgtgcggccgctctctaatagaaaccactcgagttgatcatgcgcctagcccgagaacgacccgtcataagtgaacgaccgcattaactacgtctggcgacgagccacgacagaggcgtgagtccgcctcccactcatgacctacgaacccctcggggtgtagtgcactcatgaactatgaacccctcgaactgcggtgcatttattgcctatgcacctccacctgtggcgtactcatgacctatcgtactacacctgagtgcacagaccggtgaccggacgcaacacgacgagctgctcggcataccccagatgatggcgctcggagcccatgctgctcacgcccgtcgccatagagaatacgagacaatc

SEQ ID NO: 41039 - DNA, 229 bp, Zea mays
tgggcggccaactcacatacggtggcgccgaagaggccctgctctggacagcctatgcacatgatatcggtggcccagcactgagtctctgcagtagtgacacaagtcctctgtactggaacagctaacaggactagacaggatgtttttataccatgccccgcatacatgacctcgagcgaatatgagacagctggtctacgacaggctcgctttgctgagcatcgac

SEQ ID NO: 41040 - DNA, 398 bp, Zea mays
  unsure (1)..(398): unsure at all n locations
tattgttctagcccttcaatttcataactatgttaagattattgaaaagaaggtgcttgctttcaaaacaaactctgctaatattattgaaaagaaactattcgcactattgttttaataataatgtacttagcatgtaatattacaaatgtattttgcatgtcgttggccaccctctgtcgccagtaatattatagcttccatgtagtatatataataaaaatgtactttgcatgtagttatgtacacttgttgtactatctctcatggattgaatatatatatagatgtgattgccggccatcctgttgttgaatcatgcgtggatgtcagccatcgtgctgttacttatatttgcangctttggaaacctcaccgtgcaggggacgtgctgccaa

SEQ ID NO: 41041 - DNA, 338 bp, Zea mays
  unsure (1)..(338): unsure at all n locations
agctcgtgaagattctttattctaacatggtttactcggcggcgccagagccaacccatgttagtcttagcaattaagcatgtgtcgagttcagctctatcaaaatccactaagtatagctgaccctctaacacacccttaaatgctattgaatcatcacttcttctaaagacagcgacacctgtattagtaaatagacaggtgtagcccatttgacataattgggaaactgacagcaacgtgtagtctaaggaatcaacaacaaaaacattggaaatacaatggtcaggagatataacaattttacccaatcctcngaccaaaccttgatcttcatc

SEQ ID NO: 41042 - DNA, 447 bp, Zea mays
  unsure (1)..(447): unsure at all n locations
agcttctaaagggagaacacgtgatangtctaactaatgtaactatccaatataatataccttgtgcagctcgtcaagcaggtgaacaagtgggaagctctcatcatgccaaaaatgtgatgacaacatcaagacccctggagctacttcatatggacctcttctgacccgacgcctatctaagcatatgatgaactaaggatcgtcttgtaataacagatgattgtctccgctatactagngtgttctttttgcaggataaatcttataccatagggaccctcaagcgcttcctaaggagagctcaaaatgagtttgagctcaccgtgaagaacatttgagcgacaactggtccgagtacaagaaccttcaagtggaggagtaccttgatgatgaaggaatcaagcacgagttcttctctccctacacaccatatcaaaatggcgt

SEQ ID NO: 41043 - DNA, 436 bp, Zea mays
catgcaagctcgcgtaacttttatatgatactaaatgtttttccctccatatgatctttgtctccatatatgtgtatcgatctgataagtatttcccttcaatttctaccgcacaagcacatatattgatgcctatgtgctgcacgtcctcatttcataaataactggtgttcgcatatatgtcctcattgctcgatgcccctccgtaaatatcgcgcaagttctatctataaccagaaaaccttaccccggctcctctcctctatcatctctgtcgccgcgctagaggtcctcaccaattatattgagggcgccttgctatagggatctagcatttcgttagggtcatatgattctcggtaatttcatctgaccacttatggccatatgtgttaggaatctaatacataatatcttctgggatatgttataaatt

SEQ ID NO: 41044 - DNA, 381 bp, Zea mays
ttggtatgcagcagacgactgtcaattgctgaactaaacgatgtgagaacctgcgtagctatgcgtcgatgaaggcatcagacggacaccctgggaaccaagactgtacaccctatgacgtctgcgttgcgttatgcacacgggatagagtccgtgtgatatgtcataagctgtaacagttatgcgactgtacatatgctagcggcagtcgtcttattctatacatgctacattactgtatgcagtgcacgattgcagaatctgactgtacagcgacgcactcatgtggactggcatatgcaccaattggactgtacggacatgccatacgcctatcaataattatatctgttagctccggctacgagacatgcatacttc

SEQ ID NO: 41045 - DNA, 392 bp, Zea mays
  unsure (1)..(392): unsure at all n locations
agcttgccactcgtgggacgggagtacaagatattttgatggatattcgggtatttgggtatggatattgatttatcgtactcgttttaaaaatatccacggatatcaagtgctacccgtatccgtatccatgggtacaaactcgtacccaaaaccatgcccaacgggttttatatccgtgggtacgtggataaatcacatccattgccatccctatatgagatggtgtcatctaaagattctatttttcttcatccggggagacttccttctntagcttggtatctattttccttttaaaaccagtcgaaaagcactttgaaaagaggtattagtagtataaggaagtatttaatgaatgatgatcttttatatgaatgacacataaatca

SEQ ID NO: 41046 - DNA, 454 bp, Zea mays
  unsure (1)..(454): unsure at all n locations
agcttgctcaaggttggactgacagatagtatgttaactgcatttggttcagttctgaaatctgaaaattgctgtatggtgccaagtttggagcccttttgtggttgttctataaggttttggactgagttttttgtaatggaagtgaagaccacctaatggtgaacaactttattaaaggatgatggacatgatcccacataaaaagcagtgtaacagctgctcaaagtttgactgtcaggtggttggtgacttagtctattcagaactgaaagactgaaatcagtacgtgatgcaaagtttagagccatattgcgaccaactcttgtggttntggactatgaactatgtggcaaagttggattccatagtacagacaataagtgttatcaatagggctgtactcggttctacaaaanaatgggagtaaaacacctctaaacttcctctgtta

SEQ ID NO: 41047 - DNA, 458 bp, Zea mays
agcttctaaagggagaacacgatttgggactaaccaatattcattttgagaaagacaggatttgtagcgcatgccaagctgggaagcaagttggcatccatcatccacacaaaaatgtcatgactaccgacaggccgctggagctactacacatggacttattcggcccgatcgcttacataagcatcagcggtagtaagtattgccttgtaattgtggatgattattctcgcttcacttgggtattctttttacaggaaaaatctcaaacccaagagactttaaaaggattcttgagacgggctcaaaatgagttcggcttaaggatcaagacaataagaagcgacaatgggacggagttcaagaactctcaaattgaaagcttccttgaggaggagggcatcaagcatgagttctcttctccctacacgccacaacaaaacggtgtagtggagagg

SEQ ID NO: 41048 - DNA, 380 bp, Zea mays
ctgtcaaactgcaagccgatgcccactgatagctcggacggtactccgaagccgccaacaatgctgtgccacacgaacactcgcgcactcattgatgatattgtacaaacagccctcgcctcgatccattcggcgaagcattacacggctaccaaggcgaacacgaggtctccctgagcggtgggcaggggcccgacaatgtccagccccacgcccggagaggccatgcacgggcactcaccttcgcatactgcgacgggcagcccgacccacgagaaaacctctggcaggcgtcgcacgaacttgctacccgatttgcggcgcacaacatcgctggccactaaaaccctgggaggagcaccttaggagctaaggccctt

SEQ ID NO: 41049 - DNA, 464 bp, Zea mays
  unsure (1)..(464): unsure at all n locations
agcttgaagggcggctacttcagcatangatatttatattgtcttgagctggagaaaaccttcttctcgattggggcaaggtcccgagagaggaatttccatgatggtgatatagttggtattatgaagtggatttatggtgaggtacgagcttttaaaggtatcttctctactcgagaggattattgtgcatggataggcgcccgaagcactaattcggtacttctaaaagtcagttatggccacctgaagacgtgcctggatcctgactatgaagtaaccatggaaagctgtagaagatcaaccattgaagcctcggagtgggggatattttatctgatatatggtcaaagggtgagaaggagatttccttgatgagtcaaagaagaatagagaaaaggtttgtgtttactaacttcttctcaccttcgttctactcttgcacagcatgtatgtcttctgat

SEQ ID NO: 41050 - DNA, 432 bp, Zea mays
agctgtatggtctgttctaataacacatctatgcctttgaaggtactgtctccatctctctatagccatgagcagtgctagaaattctttgtcatatagacaacaacctgttcttgacactcaaagctttgctcaaggaagcaatatgctagtttttctgtgttagaacaacaccaattgcatctgcacaagcattaattgttaccatacacacctcatgataattatgcaatgccggcacaggtgcacacatcataatctatttcacactttgaaaagctgcttcagcctctgaactccattgaaatgccttatgcttctacaaattagtgataggtttagcaatcaacccataatgcttcacaaaccttctatgatatccagtgggccccagagaccctctcaactcggtcacactagtaggagtgggcc

SEQ ID NO: 41051 - DNA, 443 bp, Zea mays
  unsure (1)..(443): unsure at all n locations
ngctcggtgctgcatgctgcaatactctattcacttgcatatctctgacactgaaaagtgtgcgaccataccatggacagggatcttcaccacaaccattcattttgccgtgcacacctttcctgctgagggatgctttcaaggatctcattgtaacctccaaccattatcgattatgcacggcattttatatggaaatagatgtatgaggtggtgccatggacctgtgcgtcccttgtgaaatgaatagaattcttgtcattgaaatttctaactgaagctgtttcatacgtctgattcacatgacctcccttaggttgtattgtataatataaacattgatgccatccttcctcttatagttatataaacaaatattatctttaagcctatctgcctggctcacaatgtattgagttgcgtcattgtgagaataatgtgtg

SEQ ID NO: 41052 - DNA, 447 bp, Zea mays
agcttaaaggatattattcaactaaagtaatatgaagttgataagaggccaaggtatgaaaacttcctctccttcagttgttttagtattctatccttagtgggatgtaccatagtataggttaatttccttgcaatataaaatgttcaacagtgcatataactttgagatcaactatatgtgtgcactagtttaaaggaatttaatctatccttttgggtttcaagaatgatgattcattctccatccacatataaggattatcatttgtgaaaccctcccttgtttttctaatgctctcttttctaagtgtttcaataaggtccttccaagtgttttcaagatggatttaaaatctacggatataagagtcttggttgtttcaatcattgagtttcaattgatctcatatcaagtatgatcgaatcaagaaaagatgaaagaagt

SEQ ID NO: 41053 - DNA, 355 bp, Zea mays
tgcttccaacgatacttatttactacgactatgacagtacaaatttccacaagataacaacttaacaattgaataagaaagagtctcataagactgttaaatcattgacatataaactaaaatgtttaaatatgtagcacagtttttagaggtaagtatttgaaacaagagtattgaataattcggtgataaaagcatgtcaataccaatggaatacagatggtcaaatggtatcaaattaataatggaaaaagaattccataagacaatgctatggttatggtcatctacaaagatgttataagcacaatggtgagaacagatctaatggaatgaatgagttaagaatatacta

SEQ ID NO: 41054 - DNA, 222 bp, Zea mays
gactgagggacatactgaaaggactaatgcagtattgtgacacttatagagagcatgtgcccttcatcctggaggatattgagacaaaagtctaccatatgctgaattcacatataacagtatctatcaacccagattgaatatgtaagctttttcatgcttatatgggaggaagcgactgactcctttgtattgtgtatacacagtagaaagacaattgtt

SEQ ID NO: 41055 - DNA, 449 bp, Zea mays
agctatactgcactctgtttgcaccaccacttcgcggttatatatacactagtcagggccggcggtggtgggacccgccgtatgagcttaatagcttattatatctgctggaacatttatccgaggagctggtgtgcgattcttctactgaactggtggcatttagtgtatgctagattgagttagtgtatgtttttctccttttttgttatttcttttactccgtcttctggagactgttatctatttctcttctaatatattgaagagtcaagtcttttgccgattccttttaaaaaaagaaaattataaagttgatggatgcggcgtttagaagggcctgatcaagggctaattactaagcacggctggttctgaaaggaagaatcgaactttgtttactgcatgcatctcactgagctcagtcgtcgggtgagagtgattgccta

SEQ ID NO: 41056 - DNA, 390 bp, Zea mays
agcttgaattcatggtaagtagcataggccaataatatacgaattgactcaagcctagctacgggtgcataggtttcaccgaaatccaaaccttcgacttgggagtattccttggccacaagtcgagctttgttccttgtcaccacaccatgctcatcttgcttgttgaggaaaacccatttggttcctacaacattttgattatgacatggaactaaatgccatacctcattcctagtgaagttgttgagctcctcttgcattgccaccacccaatccgaatcttgaagagcttcctctatcctgtgtggctcaatagaggaaacaaaagagtaatgctcacaaaaatgtgcaacacgagatctagtagttacccccttatgaatgtct

SEQ ID NO: 41057 - DNA, 295 bp, Zea mays
agcttcggcttcatctatattgtggatagcttttgaatcagtccaattcctcgcggcctttctggcagcttcctgactcccatgaatagcaataggtccctgatccgaaggtatcttcatgcaaagatatgcaaagaattgcttctaaagcattctgtgtttcgcgaccaatgatagcattgtaaggatacttcatgtcgacaatgtcaaacacaacttgctcattccttgtattgatgacaaatcccaaggtcactggcatgataatcttaccaagtgctacaatctgcctttc

SEQ ID NO: 41058 - DNA, 405 bp, Zea mays
tgccaaaaaagcaaagaaacattacagtgacagaagccatcggagggacaccaccacaagcttcagctccgaaggccccagctgttgagagcacaagagcaaccgaagcggcaccttcggaagccacaaccaccgaagataccatagccgaagatattcatttagaaagcacaattgctgacatagataaaatactgctacacatgcgcgcggaagaagctgacgcagccaccgaagagactaccgccccagagcccgagaaggggaaagaaatacccgcacacactttggaagatgaatttttaactttcaaaacttatgtggacaagaacttgacaaggctgacaaagaagacaacaaaaatatgctatatcttgcggatatcgcccgggagcacttctcttc

SEQ ID NO: 41059 - DNA, 462 bp, Zea mays
agcttgtgaaaccaatcacaagattattgttttatgatactaaatttaattggtcttcaagatgtaatgaagcctttgagcagctgaaagtattattgaccactgctccggtattagctcaaccggacattgaaaagccctttgatgtgtattgtgacgcatcaggcagtggtctacgctgtgttctaatgtaagagggccgagtgatagcctacgcttcaaggcagttgcgccggcatgaggagcattatccaactcatgacctggaattagctgctgtggttcatgccctgaaaatatggcgtcattatctgctgggaaatatctgtcatatctacatatatcataaaagtttgaagtacatctttacccattcagagttgaatatgacgcagaggagatggcttgagctgattaaagaatatgaattaacaattcattatcacccacgcaaggctaatg

SEQ ID NO: 41060 - DNA, 470 bp, Zea mays
agcttcgcaagcacatgataaacacacatgttatgttatagcatgctacgaccacctacatgtgtcctgcagatttacatgctaggctagtagtaaggcctcgaacagcacatgctaggctcctgctagtctagagagagggagggagggagagactatagagcaaaccatcgagctaggataagcaaaaaatttccaagctagcaaatgattctaaaccgaagaggcaaaaaaattacaagccacagggcttagaaactactacctccattttcttttatttgacgcatgatagttcaattttacactggcaaacgtcaaataaaaaagatcggagagagtacgaaacaagatattccatacagtcatctaataccataatcaccaaataaaagatcaaaaagttgcgaccaaataaacaagatcacatggctatgaaataagtttgagactgagcctatgtggagaga

SEQ ID NO: 41061 - DNA, 445 bp, Zea mays
  unsure (1)..(445): unsure at all n locations
agcttaagcatttctcctgaagttctgtaattgtattttgcaaattngagtatttatccacttcggctttcaggcttgtttcacaatatttcttttcttgctcgaatttttttgattgacggagcaattcattctttaatttgtcattttcagtttggacttcagccaaagagccctccatggtctggataacaaaatccttcttttctaatgcaccttcgtgctctttgaccatgatttcaagatcttggattgcgaagtctttctttttcagattggcttcgtagttttcaaccttttcagccaaatcttgaatgacggctttatttttctcttcctccagatcttgttgcattttcagaaccttgcttaataatatgctctgtcgaaatgatcttcgttagaacacgacccacaagttaataataacagtaataaaataaca

SEQ ID NO: 41062 - DNA, 278 bp, Zea mays
agcttctgaacgttcagttcaagaagctcgttttctgcggcaagctgaccaaggtgaagaactcttacaagctgtcgttcgtcaccaagccaaaggcctgcccgaagaagaccaataccggcgtgaagaagcccaaggccgctgccaaaccgaaggccaagtcccccgcgaagcccaagcccgtcacaaagcccaatgcggtcgtgaagcccgcttccaagccgaaagcagcagcaaaacctcaggcaccagccaagcccaaggtcaagcctgctgtc

SEQ ID NO: 41063 - DNA, 450 bp, Zea mays
agcttataacaggaggttataggcaagagtcttttcatatgtcatgatagaaggagaattgtacaagcatggagtttgtgctccactactcaagtgtttatccagaaccgaaggtatagagatgatgaaagaaatacatgcaggcctctgtggatctcacattggatccaggccgttacttggaaaaattttccgccaaggattttattggccaaaggcagcttccgatgcagcggaattactccaaaagtgcgaaggttgtcagaaatgtgtacgagatcaaaaacaaccttcgttcttaacacagctcatacaacccatttggccattgcaaaggtggggccttgacttgttaggtccgttaccaccggcccaagggaacctaagatatgttgtagtggcagtggaatatttttctaaatggattgaagcaagacctttagccacaat

SEQ ID NO: 41064 - DNA, 448 bp, Zea mays
  unsure (1)..(448): unsure at all n locations
agcttgtagagttcaatatatgtattcaagtgtgatggtccagaggctaagttgattatggctgtggacatcacaattgaaggagaatattgcttaagtgagactcgatatgcatatcttggagacaactaatcaagttaagtatggaggcaagaagagcttcagggtgtgtttggtttgacttttggctttggcttttgcccccctaaaagccaaaagccaaccaaagggttggatccatgaagtagctttttctaaaagccgactttcttgtagtgcaaatctgaaagcacctctggacctgcttttagtggcttttcggatggaactataaaaacatatatcgaagaatttttaacgacttttagtggtttctaccaaatggttnttagctttttaacagcttacagcctacagcagttttttccacagctcacagccacagcaa

SEQ ID NO: 41065 - DNA, 421 bp, Zea mays
  unsure (1)..(421): unsure at all n locations
agctatggatctgcgtgatgacggcatcttttatctggagaagagctgcgctttgctctctcgctctgttaaaaaatgtgagtctgaccgccctatcttctanggttagatgagcgtggagttgcacgaatgtcctttcatgctcctcatcctaagttgcgcttctgtgtcatgggcattacccacacaacatatgcgggaatccaaatgggaggaaacaccttacagaggaggattcatcattcggactccaatgctcattctcttcgccttcctttaaagggtgggcttcacacgctctaaaggaagttgaacatcatgtgaactctaatgtttggactcatcaaatgtatttttacattaagtcccaatatcatgtgcatcatgaataggttcatcagatggaaatattaatacatga

SEQ ID NO: 41066 - DNA, 384 bp, Zea mays
catgcaagcttctaaagggagaacacattataggatttataaatgttcattttgagatttacaggatttgtagcgcatgccaagcacggaagcaagttggtactcatcatccacaccagaacatcatgacgaccgacaggccgcttgagctactccacatggatctattcggcccaattgcttacataaacattggcgggagtaagaattgtcttgtaatagtggatgaatattctcgcttcacttgggtattctttttgcaggaaaaatctcaaacccaagagaccttaaagggattcttgagacgggctcaaaatgagttcggcttaaggatcaagaaaataagaaacgacaacgggacggagttcaagaattctcaaattg

SEQ ID NO: 41067 - DNA, 99 bp, Zea mays
gaggccgggttaaccccccacgacaaagagaggctagaagacacccaggggcccgggaaaaccgtaaacccgggattacaaacaaaggcccccctggag

SEQ ID NO: 41068 - DNA, 106 bp, Zea mays
ttggaacggtgtttgcgcgaaatggccgaccttcaaggtgggcggggtgcaagctgaggcccaccatggccggcagatcccacagagggaccccgggaacctaaag

SEQ ID NO: 41069 - DNA, 460 bp, Zea mays
agcttgcaaaatatctagatacggtccgatttatctaagcatccttcgaaggattctctgtcaagaatattcctcgaggacaaaatgagcatgctgatttgctagctaagtctgcggcacaggggctgccgttaccttcggatgtgttcttcgaaacaataaaggcaccttcagtggagctccttgaaagagcagtcctcaacatatctcctgtttacagcgaagattggagaactgaaataatctcttaccttcagggtaagttcctttcagatgacgaagcttacaataaaagaatagaggcaagagctcgtccgtatgtcatgatagaaggggaattatacaaacatggagtttgcgctccgctgctcaagtgcttatctagagccgaaggtatagagttgatgaaagagatacatgcaggcctgtgtggatcccacatcggatccaggccattact

SEQ ID NO: 41070 - DNA, 461 bp, Zea mays
agcttgcggaagttgggcgggagctcggccttgtgcttgtccttcacgaacttggcaatcgcatagctgctggaccccgtcctctccttgagcgacgtgatcgcctccgagaccatctgcgcaccgaccatccactattcagtaagatccagacgcggcggagaggcacgcacagcacggcacggcagaaggatcaaagggagggcaccaattacctcggcgtacggcgggtgggtcgggctggcgcgcttcttcggcgcggtggccttcttggccttggccggcttcgcgtcggcagcaggcgccgccggggcgtcggcgggcgcctctggggccgcatccaccaacggcgcgggagtctcagccacgtcggtcgccatcaaagcaggactcggacctcgacgtggaatgagggagcgagctcgggtgtgccgatgggagagagaatgcgagagctgtgt

SEQ ID NO: 41071 - DNA, 460 bp, Zea mays
gcacttctactgctagctctggatcactgattctagtaacatttcttaggaccaccatgccatgccgccggctatcttcttcctgcctcgctcgttttttattctacgctaataaatgcatataatgctcgctcatcatcgcaagacacggactactgtgatggaacacttttgagtgtcgcgtatgcagcagctatcaccggagaattataggtcatccgtttattatgcagtttgcaccggtcgggttgaggatacttttgcgccagcatggtcaagaccttctaccttaattatatatgaccatagataaccttatctttgtatatacaaaactcaaactgcaggtgtgagataatccgcggaccctatccattctattaaaaagaatatcttctcacatatgagaggacctcgaactcttgccctacacatacacaaccggtaccgaacctatgtg

SEQ ID NO: 41072 - DNA, 396 bp, Zea mays
agttacatatgtacacatacagatgtacatgaacagtttaccaagcctatcatgggagcacgaaggtcatcatatgcatcactagcatactgaccacctaccagcctctgggcctaccatacatcatataatgattggccgtggcttacataactattggctggactgcagattgactagtaattattgtagaatattacagaattacgcgttaacattctatacatgctgcatatattccacgggagaactttggggatgaatagagacgggaatctattggtgtctgtacaacgactgataaagcatcagcccacttcggggtttgttaccaaattttaatttgaacgttgactttgaggaaggactacatatgatttctatctcaacatgtcg

SEQ ID NO: 41073 - DNA, 448 bp, Zea mays
agcttgagacacatgtgtatactttttgattgcttgacgcttccttcgaaggatttgtttcacgaatatcccacgatgagaaaatgagcacgctgatctgctatccaagtcagcggcacaggggctgcctttaccttcgaatgtattctttgaaacaataaaagcactttctgtggaacttcttgaaagagcagtgctcaatatatctcctgtatatagcgaagattggagaaccaagatcatgtcttttctccagggcaatttcctttcagatgacaaagcttataataagagaatagaggcaagagctcgaccatatgtgataatagaaggggagttatataaacatggagtctgttctccattgctcaaatgtttatctagagctgaaggtatagaattgatgaaggaaatacacgcaggcctgtgtggttctcacatcggatct

SEQ ID NO: 41074 - DNA, 451 bp, Zea mays
agcttgtacacggagaatatttgatacgttttactaacgcgcattgcgaagaagatagacgttgtgcatcttgtcaagcacgtatacaattgggaggagcgcatcacggcaagagcgtgatgaccacttgaagacccctggagctgctgcatatggacctctactgacccgtcggctatctgagcataggagggagtaagtatggtttagatattgttgatgactattcccgcttgacttgggtattctttttgtacgataagtttgaaacccaatgtaccctcaagcgcttcctcacgagagctcaaaatgagtttgagctcaacgttaagaagacaaggagcgacaactggtccgagttcaagaaccttcatgtggacgaattgcttgaggaggaatggatcaagcacgagttctaccttccctacacaccagagcacaatggtgtggt

SEQ ID NO: 41075 - DNA, 322 bp, Zea mays
  unsure (1)..(322): unsure at all n locations
agcttgacgacngaatgtttaagcgtgtattttatcaatgaaccaagaattaccattacggacactgtatctgtaagatacaactgtcactctactctatttggatatatcgctatccatgtagatgattgtgttaatctgcaactacctctctctctctctctcacaatcccatggcatattgcttggctgctatgaagaccgaaggtgttaacttaataaggggtaagcgcttctacattcaaacttttcaaccttgtgtttcaactaaactcttgaacattcttaccttggctggtcatttatatgtacagaatttatg

SEQ ID NO: 41076 - DNA, 301 bp, Zea mays
  unsure (1)..(301): unsure at all n locations
tgcacgcatgcaagcttctaaagggagaacacgtgatangtttatctaatgtaactctcgaaatatatagaccttgtgcagctagtcaagcaggtaaacaaatgggaagctctcatcatgccaaaaatgtgatgacaacatcaagacccctggagttacttcatatggacctcttcggacccgtcgcctatctaagcataggaggaagaaagtatggtcttgttatagatgatgatttttcccgcgtcacttgnggatatttttgcacgatcaatctgaaacccaatggaccctcaaacgc

SEQ ID NO: 41077 - DNA, 290 bp, Zea mays
cttctcgaccggatcttaagtcacctgagtctgcactttttacccctacattgtcgtctgcagctcaatgaatggcaacttgccatatcatagaggctgatcgtacccaacgcagagagagatgaagccccatgtcaggtgctaactcacctacaggtcggattgtttcacaatcaagcagggattccataacaacacggagtgagtcataggcttcccagagtagcataacacccaacgtttcctgtccgctcaggaatatcacccacgataccacacatacatttgct

SEQ ID NO: 41078 - DNA, 296 bp, Zea mays
agcttgtcttattcatgtgacacacgcaattatatggaccttgcgcagccacgacaagagcgtcatcgagagaggaatctctcatcatgccaaaaatgtgatgactacatcaagacccccggagtcacttcatatggacctcttaggacccgtgacatatctacgcatatgaggaaacaagtctggtcttgttatagatgatgacttttcgcgcttcacttgggtatgctttatgcaggataaatatgacacccaatggaccctcaaacgcttgctatggagagctcataatgagt

SEQ ID NO: 41079 - DNA, 457 bp, Zea mays
  unsure (1)..(457): unsure at all n locations
agcacttangggttntatattnttcttaaatattttacattatttaagatctggcaaaattggttttacttgatttgggtgaataaaacagaagatatgaattattcaagttctgtttaaattttaaatcagatttaataaaaggtttcctggaaaaccactttgcaccgaagtcctcgggttatttccaaactaactctctcagttatacccccgcgctactattcatccgagtcactgacattgcgcanaaccccctagctttctcttcttctcccccgcggtccctccctaggtttaaacagtacccgcaagaaagaaaagggcggcgcggcttaccggcggtgagagaggtccggcgaggggcggtgttggctccgggaggtcctggcggtcacaacgatgtacggcttgatggcgggggtggccggaatcgtccggtccacgtgcacaggca

SEQ ID NO: 41080 - DNA, 458 bp, Zea mays
  unsure (1)..(458): unsure at all n locations
agcttggctgtgtgcagcanagttccagttctacctgtcacaccggactgtccagtggtgcaccggacagtgtccggtggtgcaggctggtccgcgtgaactcgccgctctcgggattcgacgacggcgtacgactataattcaccggactgtccggtggtgcactggactgtccgatgagccaacggtcgccagtgccaacggtcggtcgcgcaatccgcgggcgacgcgtggcccgcaacaacggtcggttgggcacaccggactgtccgatgcgccaaccaaccccgaggaccaatggtcggatgcgctagaaaaggaaggagatcgcgcaccggacaactacagtgactgtccggtagtgcaccggactcgagcctgagtcagtaggcttgttgtctcttgctcgttgaggacagacttcttttccttgtcgttgaccaccatcccctttccct

SEQ ID NO: 41081 - DNA, 416 bp, Zea mays
agcttctcctgtacaagtgctgcacttacctctgagtgcgaagctgccacatataataacacaggagcccctggcgtcggtggggttagtgttgttagatctatcaaatattgcttcagttcttccaaggctctctgctatactggtccccattgaaaaactttatctgacttcagcacttctaaaaaaggtgaattactctctgctgatctagatatcaatctgttgagagatgccacccttcctgtcaatctttgagcccccttctttgtacttggtggttccattcgaagtatagcttccattctgcttggattagcctcaattccctttggtgaaactaggcaaccaagagatttccccttcttcactccgaagacacatttatctggattcagctttaaaccaccctgtct

SEQ ID NO: 41082 - DNA, 470 bp, Zea mays
  unsure (1)..(470): unsure at all n locations
tctctaaccacctgaggcagcaagcttcactcgtctcttattgtctctatcgttataagttggcttcttgtggggagaagtgttgattatgggaaaaagggggagtttctgaaatctttgatcaatctcttttggaatgactctctttatacttcaacatgtgtgtttgacttacagatagagatttgagtttgatttgcaaaaacaaaccaagtggtggcgaaggatgatccatatatgccaaaattgaataaaacttaaatttattgtatttgaagtgagcttgcacttgttctaattgctctatgttgtgctggcataaatcaccacaaagggggagattgaaagggaaatgtgcccttgggccatttctatgtattttggtgattgagtgccaacacatgtgcttaatngggacattatgtacatggatgaacaacgtgaaaatcatgaagtaaaggtatgtttct

SEQ ID NO: 41083 - DNA, 428 bp, Zea mays
  unsure (1)..(428): unsure at all n locations
agcttcatcagcacttgtgcttataacggatttattgcncaccaaacactgatgttttacaaagtatggatgatgtttatgaagcataaaagctcttctttacgaatcatggacagaatggaaggtgttttttcctcgaatgctcaaaaacggtatgtacataaagattcatgcatcgcaaagaaccgaattacaaacaacttatatattacattctagcaccaaatattacaagcataggtcagccactgttacaataatattctagaaatgtttttacaatagctactcttcttccttccaaactttatctgcagctttcgtcaccagtttggtaacgacttcttctacaatagcttcggccatattaatacatactattggtttcttcatctctgggtcgaccacngggtcaaatggctctgggg

SEQ ID NO: 41084 - DNA, 448 bp, Zea mays
  unsure (1)..(448): unsure at all n locations
agcttctacactnggttttattcgtctactatgccttcgaaggtaaagcttctcggctntgcctatggttttcattccaggttggagaaaggttaagctcataaaccttcgagcagtacttgaaacatgtttgtcatatgatgttatatttaaggaccttcagcaatagaggcccctaacaccgaacaagctctaagagaggcagaggtcataatggttggcactcgaactttcgtttggataggatttcgttggatggtaccatggctgcaagcccaacaactaaatggcccacctagccaacaacccatattacctgcatctgcattaacgctggtgcgcaatgtttgttccctatcatatgccactctangcttgtttggttaggagtggattggagaggatcggaggtaatgaaattccttgctagtcaaaattgaatataaag

SEQ ID NO: 41085 - DNA, 244 bp, Zea mays
agcttcttaataatattgttggacatggatgttggagagacacgagcacaacacgaacatgtttccaatccttgaacagttcttgaagcccctagccttttcccgaagcctaacactccttttaactttagtttcaaccataattggttgcttctgcctgttaacggcttctgcaagaatgggtgactgtggctccacatgtacgtcctgactagaaggaggcaggcacttggggggaaacttg

SEQ ID NO: 41086 - DNA, 238 bp, Zea mays
gcgtgcaagcttaagggatactaatgtagcttgaatatataactgtcgaacaactctattaactcttgtagtaacgcgttgtgaagaataatgtgactaaattatactctgggagctttgtacataccgtgatatatatacgtaccgttccatcgatggataaggtggttccgcgctgacacaagtgttatttttgggccgaaggcgaacaacagctttccttcttttaacacatatt

SEQ ID NO: 41087 - DNA, 393 bp, Zea mays
gaaaaacatattagctaatgggtaagcgtgagaggaataaggtgacgagatataactctgtgagctccggacataccgagatatagaaacgtccccgtccatcgatggataaggtgctacagcgctaactcaatggtcatttttgagccgaaggcgaaccacagcatgcattcttataacacatagtgcagcataggaaatgcttctttgtcactttgtcgaagacttgtatttataactgaaccaactgcctgtgtcatgatgatgatgatcctatgtatgtctaaatgaatgtttatgaatgcaaatgtatgatgtaatgtgtcctgcaaatgaatgttcaaactcacgcatgcgaaaccacaaccataggcttcatccccttaggaataa

SEQ ID NO: 41088 - DNA, 462 bp, Zea mays
  unsure (1)..(462): unsure at all n locations
agctntagtaggatgtgtattagcaacttgctttccagcttgacacgcactgcatggcttgtctttttcaaacaccacatcctttaatcctctaaccatatctttctttaataccttcttgagtgtgctcatcccaacatgtgcaagcctcctatgccaaagccatccaagagaagctttggtgaagaggcaagttcttaaatctgcatcttctgaagtgaaatccactaagtagatgttgttgtatctaaatcccttgaataccattgattcatcatccatttttgttacaataacctctgatggagtgaataagcattgaagtccaagatcacagagttgtcccactgataataaattgaagctcaagggtgcaactaagagaaacattgatattgataagtcattngagattgccaccttgccaagtccttgcactttttcctttgagttgtctccaaa

SEQ ID NO: 41089 - DNA, 453 bp, Zea mays
  unsure (1)..(453): unsure at all n locations
agcttgttgtgtggttacttggatgacttgttgcttgtggatttatttagctatatcacgtcatgcgtttcaattcgtccgggaatcgaactctgtactatgcttggacctgtgttgctctaactcatataggtacgatccgttttgtcataatggcattagactttgcaccatgcccaaacacttaactcaactatgttgctctaactcatataggtacgattcgttttggcataaatggcattagactttgcaccatgcccaaacacttaactcaaacgggtatgggagagagtagttgatcatggaaacatnttgtattacaattcgttntataattggaccccatattgtgcgtggacacactacgctaacttgtacatgcatggaggagactgagtcgatctgatcctcatcagacagttgtgagcaatgaacgatgaagaaacattt

SEQ ID NO: 41090 - DNA, 464 bp, Zea mays
  unsure (1)..(464): unsure at all n locations
agcttctaaagggagagccacatttgngactaaccaatgttcattttgagaaagacagggtttctagcgcatgtcaagcagggaagcaagttggtgcccatcatccacacaagaacatcatgacgaccgacaggtcgcttgagctactccacatggatctattcggtccgatcgcttacataagcatcagcgggagtaagtagtgtcttgtaattgtggatgactattctcgcttcactcgggtgttctttntgtaggataaatctcaaacccaagagaccttaaaaggattcttgagacgggctcaaaatgagttcggcttaaggatcaaaaagattagaagcgacaattaaatggagttcaagaactctcaaatagaaggctttcttgaggatgagggtatcaagcatgagttctcttctccctacacaccacaacaaaatggtgtagtggagaggaagaat

SEQ ID NO: 41091 - DNA, 441 bp, Zea mays
  unsure (1)..(441): unsure at all n locations
acaagatagtgcttggcaatgtttatgagttatcattcacatgcttntatcagatattattcaatcaacttcttttcccatctgcttcatggggcattactaacaatgaggtactaataacatcaaacatggaccggatggctgatattgattggtgtcaactagtttatactgatttgcgtgatgctgccagtcgttggcacatgaggaacataacaaacattacaacaacaatatatggatgttcactcattgatcttgtaagtaattctctgtttaccaagcatatatatgatatccaaatatttgttctgtactaattatatatgatttattttctttctttgttcagatatactatcttgatcacttacaccaacctgcatcacctgagaacaagtatggtaatccacgcatcacgtattctgataatgagacaat

SEQ ID NO: 41092 - DNA, 459 bp, Zea mays
  unsure (1)..(459): unsure at all n locations
agcttgtgagattagtaatatgtattacatatgttcatctctgttctaaattttgggtcaccataaaataaattgattcatgattatgtacttgtgaataacacttanggaaatagtaatctacttctaaatgaagttaatttatgttatagtttatgttatactttgaattcagtatcgcttatgtagtattatgtctttttaaagatgtgttccaatgtttgtacatgtttggtgtgatgttcgtttgtactttccaaatgtattgaatgcatgctcgctttatttaaacaacgagcagtccgaagtgcctgagtgtgttgttggagaccttcctgagcagcaacctagtgaaggcaagtgtcctttgacccaatatgtcgtacttactttantaattactgtcccgcattactttatgaaacctaaggattgactagtctgtatttaccttatcct

SEQ ID NO: 41093 - DNA, 446 bp, Zea mays
  unsure (1)..(446): unsure at all n locations
agcttatatatggtacttttaccttctccttgaaattgcacctttcttattctgctctttgttattcgtaggatgatgaagctgaagcttgacagttgctacaatattttttcctgcaaaaattctggagagacttttgtaatattattatgtaaaaactcatgtaaatttgtacataccttgtaatatattttgtttccgctatccgtgtacaatctgctttgttgtggacgaaacttctttntgagccgaaggcgaaaaacaccttcccttcttttcatacataacgaagcataaaaaattttcctttttcgaagtctttcctcattgccgaagcgcctatcttttttgtgtgatatgatgatgattctatatatgtctaaatgaatgtttatgaatgcaaatgatatgatgaaatgtattgtggagatgaatattgtgaatga

SEQ ID NO: 41094 - DNA, 451 bp, Zea mays
  unsure (1)..(451): unsure at all n locations
agcttgtgaagattctttattccaacatggtttactcggcgatgctagagtcaacccatatcagtcttagcaattaagcaagcattgagttcagctctattaaaatcaactaagtatagctgaccctctaatactcccttaaatgctactgaatcatcacttcttctaaagacagtaacacctatatccgtaaaaagacaattgtagcccattttgcataattgagaaactgaaagcaagttataacctatagaatctacaagaaaaacattggaaatagaatggtcaggtgatatagcaattttaccaagacctttgaccaaaccttgatttccatccccaaatgtgatagctctgtgnggatcttagtttttctcataggaggagaacatccttttctcccaagtcacgtggtttgtgcacccgctatcaataatccaacttgagccat

SEQ ID NO: 41095 - DNA, 266 bp, Zea mays
agcttcgggcacacgttttattatttgaattttatcttgtctcgaagactgtaacggctgtgatcaggtctactgctatactaacacatgaaggccacagtactaaagcaactgcgatgaccccgatctctgaggtgatgaaacgtactgggttggctgctcaataaggaggagtagctatcttcaacaaggatgattctattgccgacacatttattgattgtgaacaagactatggctttttaaatcctagcaaacctgcctta

SEQ ID NO: 41096 - DNA, 470 bp, Zea mays
  unsure (1)..(470): unsure at all n locations
ctgcacgcatgcantctactacagggagaacacattttaggattatcaaatgttcattttgagatatacaggatttgtagcgcatgccaagcagggaagcaagttggtactcatcatccacacaagaacatcatgacgaccgacaggccgcttgagctactccacatggatctattcggcccaattgcttacataagcattggcgggagtaagtattgtcttgtaatagtggatgattattctcgcttcacttgggtattctttttgcaggaaaaatctcacacccaagagaccttaaagggattcttgagacgggctcaaaatgagttcggcttacggatcaagaaaataagaagcgacaacgggacggagttcaagaattctcaaattgaaggcttccttgaggaggagggcatcaagcatgagttctcttctccctacacgccacagcanaatggtgtagtagagag

SEQ ID NO: 41097 - DNA, 394 bp, Zea mays
  unsure (1)..(394): unsure at all n locations
tcacccttctaagcttattaagttaactaggggttggaggccaattcaaccatttcttcaacatgaacttggtgtgttgcgacctctctagcgcttttaactaggttcaaggcttaaccaaggattctctcaacttttcttttcatgccacttgtgataaaagaagattactatatgcatatgctatgagatgacttgcttaacacctgaggtgttacaacaatgacaatgacgtgcaacaaacagtggtcacaagtacacctgtgtccttaggcatgatgatagtctactctnttcacggcaatgtatctatcacatttattgtgatagacaaagctttatcttgactggtccacaccatatggccatcctgatgagagacacactcggcacc

SEQ ID NO: 41098 - DNA, 460 bp, Zea mays
  unsure (1)..(460): unsure at all n locations
agctntcttgagttcatcaggaccgcataaagaacattctctatttatgtataatttcttttggatggactcaatacttcggagacaaagtaaacaaccatatgcgctttggtacccttggtcacggtctcctagaccaatgcatcgcttacggttgactacgaagctgatacatagagtaacaatggagcccctggcgaaggtggagataatgttgtaagatttatcagataatctttcaattcttcgaaggcttgctactgagggggaccccattggaagacgtctactatttttaggacttcgaagaatggcaagcttcgttcagcagaccttgaaatgaatctgttcaaggcagccaaccttcccgccaatctctgagccccttttcttgattntgatggtgaagcttcgttcaacatgattggcttccctagagccattacttgctgtcctctga

SEQ ID NO: 41099 - DNA, 452 bp, Zea mays
  unsure (1)..(452): unsure at all n locations
agctngacccggtgaccctcgtcaccggaatattctaatcgtgctcaccggagttcaagaacccgccggcgcacgtggaccgggtaagcccctgcaccgttttccaattcgttgcgcgcatggcctctatgtcaccccgtgaagctcctcgtgcaccctaattgaactataccgccgtggtttggccggagcaggagccgccgacgacccccgccgcctgtgctcgtggccagggtagcttcgaccacctccgacaccgacccgcacaccgacgtgaccgtcgcgacctcccagacgtcactgaccaccccgccggagctctactgccgccggtaagccccaccgccgtaatctatgccgcgggtactgtttaagccggtcagggagcgcgggttagatttcagttaagtccagagggccttgcgcaatgtcagtgacccaagccaatagtg

SEQ ID NO: 41100 - DNA, 457 bp, Zea mays
gattacagagagtgacctgccgtgtacattctgagttcttgcgcttggattgcttcttctttctcattctctcttgagatcaaactcacttgtaattgaggcaagagacaccaatcgtgtggtggtccttgtgggaacttcgtgttccaaattgattgataagagaagctcactcggtctaaatgaccgtttgagagagggaaagggttgaaagagacccggactatgtgaccacctcaacggggagtaggtttgcgagaaccgaacctctgtaaaacaaatacgcgtgtcacactctttattcacttgctgattgttttgcaccctctctctcggactcgattatatttctaacgctaacccggcttgtagttgtgattaagtttgtaaattgtaaattcgccctattcaccccccctcctctaggcgaacttcaattggtatcagagcacagtgc

SEQ ID NO: 41101 - DNA, 470 bp, Zea mays
  unsure (1)..(470): unsure at all n locations
agcttgctgagatcgcaaacgtgcgaatcttgtcgaaaatccggtgcatacttcttcctggcacctatggctatctcttgtatgtgtcatgagtaaaatatcacgaagatttctccttcgtgattatatttgtaaaataacaaacaatgagaaatgaaatataaagtataaaatatattcacatgttttattatatgagtatataagtattaaaacatattattcgggcacatttataccttcgccttggcggaaagcaataattcaagcgtaacgtgccagtgattacaggatcgcgtgaacagtgtcgggatactgttcacctatttataggcacaggatgcaacctgcgcanaattacatttacgtcctttacaatcgactacaataatgacacaaaacatcatgggtatttaagtcaattcatctttaagtcggttcgacccttcatcttgagatctgtctttgtg

SEQ ID NO: 41102 - DNA, 136 bp, Zea mays
actggctatcaatatatccttgcgcttatgccaagaggtgagggtccttgcacgcacacaggagtgcctatattgtgcgagactgtagagggccatggcaaaagactgtgccctgagagcactattgccactttac

SEQ ID NO: 41103 - DNA, 434 bp, Zea mays
  unsure (1)..(434): unsure at all n locations
agcttgtcaagcatattttggtacccatctctagatgggtccatcaagggtagtcaacaaagatctaggagcccaaacattctttgtgctagcactaggtaaactcattacctttctagcacangttgcaactttgggtggcctagttacatgagaattaattgacaagctaggagtgagattattaccaatgggacaatccttgcattgatgtcccttctttcggcatatgtagcataggcgatcttcaagtcttgaagattacttctttccttgtttctttcttgctacatggatagtgaatattttcttttctaacactatgccttattgttttaaatggggataagacctaatcaagtgtcccttcttggagcatttacaacaaagtttatcatccatgttactaatcaagtcattttaatatagggaca

SEQ ID NO: 41104 - DNA, 436 bp, Zea mays
agcttctaacacggaacaaacccaacattgtgtgctctcgtgtattcgggagcaaatgttatattctactgaagaacggtagaaattctaagtttgctcccaaagctgtacaagggtttttgttaggttatgactcaaatacaaaggcgtatagggtcttcaacaaatcatcgggtttggttgaagtctccaacgacgttgtatttgatgagactaatggctctccaagacagcaagttgttgatcttgatgatatatatgaagaagatgttccaacggccgctatacgcaccatggcaattggagatgtgcgaccacaagaacaaacggagcaagatcaaccttcttccttaacaatggtgcaacccccaactcaagacgatgaacatgttcatcaagaagaggcatgtgatcgatggggagcacaacatgatca

SEQ ID NO: 41105 - DNA, 441 bp, Zea mays
  unsure (1)..(441): unsure at all n locations
agcttgtgaagattcttcatcccaacatgagataatctgcggtgcctgagccagtccatattagtcttaggaattaagcaagtgtctagttcaaaattgttatcattaaaatcaattaaatatagctggccatctaacactcccttaaacgttattgaatcatcacttcttctaaagacagtaacacctacatcagtaaataaacagttgtagcccattttacccaaacctttgaccaaaccttgatttccatccccgaatgtgatagctctttggggatcttcatttttctcatatgaggagaacactcttttctcccctgtcatgtggtttgtgcacccgctatcgattatccaacttgtcccactggatgcataaacctacaaaacaaatttacgccttgttcttangtacccaaacggtcttgcgtcctttgacatt

SEQ ID NO: 41106 - DNA, 416 bp, Zea mays
  unsure (1)..(416): unsure at all n locations
acactatagatgactccgctttctaacgcgctctatggacttaagcaagccccaagagcattgtatgaatgccttagagactntntaattgctaatgctttcatggntgggaaagccgaaccaactctttntactaagacatgtgatggtgacctatttgtatgccaaatttatgtcgatgacataatatttggttctactaaccaaaagtcttgtgaagagtttagcagggtgatgactcaaaagttcgaaatgtcgatgatgggcgagttgaactacttccttgggttccaagtgaagcaactcaaggatggcactttcatctcccanacgaagtacacacaagactttgatcaagcggttgggatgaaggacgccaagcccgcaaagactccaatgggaacggacggacacgt

SEQ ID NO: 41107 - DNA, 452 bp, Zea mays
  unsure (1)..(452): unsure at all n locations
agctnttaaaagaatcaaggaggtggcaaatgctctctttcttgccttggtttacaggtgattcaggctcagttccacagatgtcaaaataaaaacagttgtctgcctgatgttcctgaggtggtggtggtgaagtcttctctccttctacttcaacttcttcttcattttctaaagataaccatacataataataaatgcccatgtaatgctcatgagagtgcaaagataagagtttgntatctaaagttttgaatacaattttccttcacggttctccgagaaactagggtttccggagttagtaaaggaatctcaagggcacggggtatgattttgggctctaagtatcaaacaagatccatatcataccaaactctacccaaggcttctaaatgatgtataaaggtcatctaaaaagtntggcgaactttggaatcatcttatatttt

SEQ ID NO: 41108 - DNA, 406 bp, Zea mays
  unsure (1)..(406): unsure at all n locations
ttaatgctcaacttaagactagtcttaatgattttgataagctaaaattttcaanggatgcctacacgattggtagacacccctcaattaaggatggaactggcttcaagaaggaagccaagaacttaacaagccataaggctcccatctncgccaaggagaaagggaaggcccctatggcaagtagtactaaaaggaaccatgcttttatgtatcatgatangagacaaactanaaatgcttataggaattataatgcttatgatgattttgactctcatgccatgtttgcttctagttcttcctatatgcatggnagaaatatgtctatgagaaatgctattcatcatgtgcctataaagaatattattcatcgctctatgaaagtagtgaatgaaccttctac

SEQ ID NO: 41109 - DNA, 442 bp, Zea mays
  unsure (1)..(442): unsure at all n locations
ctgagctgaacttatatattctttcggaaggtgttttcatatnttggacccatcgcttgatgggttcatcacagttagtcaacacagatctatgaacccaaaagttctttgggttagcactacggtaactcattacctttctaacacaaatttgaatattgggttggctaattacaaagagaattatattgacaacgatacggagtgganagtgttacccaatgggaccaatcctttgcattgatggtcccttctttcggcatatgtagcataagcgatcttcaagtcttgaatatttcttccttccttgcttcttgcttgctacatgggtagagaatattttcttttctaacactatgcctttttgctttaaatggcgacaagttctaaacaagtgctccttctttgaccattaanacaaactatatcatccttggtataa

SEQ ID NO: 41110 - DNA, 436 bp, Zea mays
  unsure (1)..(436): unsure at all n locations
ttctccttctcttccctgcattcagcaacatgcctcattttctgctcgtcttcccattgatgctctgtagcaagctcctctcgtcttttctccatcctctctttgtcctctgcatcccactttttaagattctccaaccacttcttgtctttctatgagatttctgtgtcaatccactgctcaaaatcacaaagcggtggaagagtctacaaaacatgcaatgattagtaggcaaagaaaacatgcaccacttcgagtcttcaaattgttaacatattaaaagactattctcaccattaaattcatctagcgctgaacaatcgttggctcaaatgcatagttagcacacattcaatacctctgtcgataggtgtcatgatcctcagacttgtcaaccatgcaaggatcaccacacaaacacatangcactggaaca

SEQ ID NO: 41111 - DNA, 376 bp, Zea mays
ctattgatgtctcatcatgatcccgtcgctcttacccatcttaaaccgccgatcatagttgggatcatcagaatattgtgctgtcagatgaaatccattcctgctgcattgcttgcatgaatcatggacggagcatgcataacagatacatgcttctgctcaaaggatactcaagatctatctcatagaacggtccatgctgaggtatcagtattatcgtattcgccatgacctctgccggacacacagatatggatattgcctatgcgggggacggaagcgacgatctgtgcacataatcaatgtacaaatcattaagctccgcagctcatcttccaactccgcccgcagcttaattattattcatgatatcttt

SEQ ID NO: 41112 - DNA, 408 bp, Zea mays
  unsure (1)..(408): unsure at all n locations
agctntatcaaatggacgtgaaaagcgcctttctctatggaccaatcaacgaggaggtctatgttgagcaacctcccggctctgaagatagtgagtatcctaaccatgtctataaactctttaaggcgctctatgggctcaagcaatccccaagagcatggtatgaatgcctaagagattttcttattgctaatggcttcaaagtcggaaaagccgatcctactctctttaccaaaacaattgcaaatgatttcgttgtatgccaagtttatgttgatgatatcatattcgggtctactaacaaatctactcgtgaagagtttagtacgattatggttcaaaactcgagatgtctatgatgggggagttgaagtatttcttacgatctcaagtgaagcaactcctaga

SEQ ID NO: 41113 - DNA, 480 bp, Zea mays
  unsure (1)..(480): unsure at all n locations
cttatgcaacttctacccattatgagaggtgaactgagngcctctatctaatactatcttctctggaacgccatgcaagcacacaatccgagacatgtatagttcgaccaacactgcactattgtaggtggtcttgctggtatgaaatgggtcgcctttgtcaaatggtccactactacccagatggagtcataaccagtacgagtgcgaggcaaaccgacattaaagtccaatccaatctcatcccatttccattgaggaatctacaacggctgcaacaaacctgcatgtatctgatgttctgctntaattctctgacaactgtcacatacagccacatactctgctatctcccttttcatcccgtaccacctgaatcttttctttatgtcttggtacatcttctcactactanggtgtatagagtatgttgtctcatgagcgtctttgagaatcacgttccagatcgatctgatggcg

SEQ ID NO: 41114 - DNA, 379 bp, Zea mays
atcttagagcacctgctgcatgcaagctataaaaatggatgtggaaagtgctttttttgtgtcaatcaacgaagacgtctatgtcgtgcaaactcatactgtgaagatagcgaatacgctacccatgattataaactcttaaaggcgctttatgagctctagaaagccccaagagcatgtgttgaatgcctaaaagatgttttattactaatggcttcaaagccggggaagcccatcctactctcttcatctaaactatcccaaataacatcctgaatgccaaatctatgttgatgatatcatatttgggtctactaacaaatctacatgtgaagagttcactatgattatgattcacaaatttcagatgtctatgatg

SEQ ID NO: 41115 - DNA, 369 bp, Zea mays
ttacccactcttgatactctggccgttgtgctaatgctttatcacgccgcatgatctcaccattaatatcatctccagacattgatactccgcgggagtaacttattcaaatcttgacatatggttctttccaaagaagcctgcatggctcgtcttgccgcatcttgaattctatgacaactctcttggcggagctaaaatcatatccacaatgaatgaacgatgtgtctttgtcatcacaacactgtccaccacaatgaggttatctcgcgtacgacagttatgttgacggtggcggcggtgcctttttggtgacataggaccttgcacacaacgtgttgaaaccataatttctgatgatatgggatc

SEQ ID NO: 41116 - DNA, 373 bp, Zea mays
  unsure (1)..(373): unsure at all n locations
gcgcatgtcaagcacgaaagcaagttggtgttcatcattcacacaagaacatcgtggcgacctacaggccgcttgagctactccacgtggcctattcggcccgatagcttacataagcattgatgggagtaagtattgtcttgtgatagtggatgctattctcgcttcacttgggtgttctttttgcaggaaaaatcacatacccaagagacattaaagggattcttgagatgagctaaaaacgagtttgccttaaggatcaaaaagattagaagcgacaacgggacgaagttcaagaactcacanatagaaggctttcttgatgagganggcatcaagcatgagttctcttctcctacacgcacaacaaatg

SEQ ID NO: 41117 - DNA, 393 bp, Zea mays
agcttgttgcatgtgggactccacttgatgtatttattaatcggctctcaaaataactgcatgtgactcacgcatattggagccataactaatcttgttcgcttatacttctgaattgtgggattgtaccattctaaaattgttataatttaaaactgattcgcgttattcaaacaggagaggtttttcttgtaccacgtatagtaatatctttgcctgcttaaacacctctgccacacgtcttttcaacccttcgctcagaaatctctgatatgatgcatatttgatatgtaaatgtaatatgtaagcttagcttaccctacattaccgtgtgaatattatccaatactttttcttgactaagcggtaaaaactgtgcaagcagaacgaatt

SEQ ID NO: 41118 - DNA, 331 bp, Zea mays
  unsure (1)..(331): unsure at all n locations
tggccaagacatcttgttttgctgcgctggcgtactgccttttgttgangtcccttcacccgggtcgccggctgatgccgggacaagttacgccaacggtggaaacaacgctgagggtgctgctgcttctcctgccgatgcctgaacctgcaggaacagcttgtctataccatgcgcatgtttttcgcggcccgctgatgcctaaacactttatcgtcgagttaaacagctgtggtatctatcctctcgtttcgagcatcacgacatgtatgtagcaacataatcgtttatccatcgagagatacttatctcggacgcgatgaatgatgta

SEQ ID NO: 41119 - DNA, 429 bp, Zea mays
  unsure (1)..(429): unsure at all n locations
agcttgntgtgcttttggcgactccatttttcttttatgatacttatacatacataatacgcttgaagaggatgttagtcttaaataaacatattatagagtaacctccccctaaaagtgtgcatacaagttttgaatacttgtaggagacatgcacttgacttttgagatcaagaaggggcaaattaccctaatatgaagtttggcacatattgattcacaatgatactaatcaagggatatcaaatgataggtgcaaacaagtatcatttatctaggagtttaattaagccatgtgacatgctttgctaaatattttaaaccatgtaggtttgctcaaagagtatgaatttaaactgggcaatcataccattatgatattgaacggtcggtgaggcgactagatggggtgaatgggagccactaaaa

SEQ ID NO: 41120 - DNA, 392 bp, Zea mays
  unsure (1)..(392): unsure at all n locations
acatgtgctaagcggcgatgtctctttcagcccatgctagtcttagccattaagcatgcatctagaccggcctcttcttttgcaaaatcaactaaataaggttgccgtctaatacacccttaaaagctagtgaaccatcactccttctaaagacagacacatctacgtttggaaatagacagttataccccatatgacataattgactaacagatagcaaattatatccaagactctctactaaaaatacattagagatagaatgctcattaaaaatcgcaattttacctaacccttttaccttgccttggattccatcaccgaatacatggaatcttgggaaatctttatcttgacgtangaggtgaacatcttcttctcccccgtcatat

SEQ ID NO: 41121 - DNA, 282 bp, Zea mays
gtactgtgcggaggagggctggaaaagggttgtccaccgtggttgccctctggcggctctggcgggtcctggggaagtcgcccgagctattggcgagctccgtggagttatgcgtggtaccgaggatgcaatggggaaggcaccccggcactgggacgggccttataaccatggcaccggcgttgtcaccggcggccgccggcgcgcgggggtttgcgcacgggcgtgctctgagcgcccccccgagtgtcagcccgcgtcgaacacgtgggagctcgcttc

SEQ ID NO: 41122 - DNA, 376 bp, Zea mays
  unsure (1)..(376): unsure at all n locations
tgcgctctggtcattattttggcagcaaaacagngcaanagcttttaatgatgtgttaacttcacacctactcgtctatttatatagtggcgcacgtgggaatgcgaatcatcaatgtctttcgcaccggacaaacaaccactcgcgctcactaaacagtgggccacaaagtccgagaaggtgaatcgccagggcgcgcgtaactgccgatggagccacttcgcgcacggattattttaattcgttctcgccaacaagctcatggaagggtgttttcggatcttcggcatcccgaagcctagaagattatttcacggatcaagctcgttacgaanaacgatctagcaccacgaaggggctactgttggtggtatgc

SEQ ID NO: 41123 - DNA, 383 bp, Zea mays
gcttcatctttgctgtaactctgttatttggattctacacgaaaatccacagctcatatcttcaataaaacgggaaacaaacaaaacaattctacaataggcccaaaaatagacgaagcaacatgagaggaacaccacatactggagcaacgcgagggaccgtcgaactatgcatcagatgctgccactacacgcaaaaaggaaaccaaaccggagctataagaaccgaggaggagctatacaaacctatatcacgggctctacgaccagcccaacaaagacgacgacacgatgacctagatctacacaaaagcaagaattctatctacaattgaatgctgaaagtatatcaacattcctcaaagtgagtgtatctgtttatg

SEQ ID NO: 41124 - DNA, 419 bp, Zea mays
  unsure (1)..(419): unsure at all n locations
agctttctcctcctgcagagccatacgaccctgtttctgatccatcngcgatggaggcgctcgatgtaattaggattgctaacgaggtcgctgacgacactgtcaacaaactactgaacaaagctgccgataaagttttaaaggaggatgactagagcttatttattaaaactttagattctctgtatataatttttcttttgtaagcaacacttatcaactatctgtatatttaatgatgtaatatatttctttatgaggcgtgaaaacttcgcacgtagcgttttttgagccccaggcgaaaaaacaccttcccttctttgcacgtttcataaagaaagaaagaaattctcttctttgctgaagcaatctaaagctcttacatagatgttgcatagaatacattgtcaacgataatc

SEQ ID NO: 41125 - DNA, 450 bp, Zea mays
  unsure (1)..(450): unsure at all n locations
cacttaaatactcaagctctaaagaaatattgaatatattatctgtcatgcttcgggtattaaactctctaaagaagaagaacaagaagcacaacactatgcccataagctgaaatatccaaaaggggcattagtgttcaacaacagcggagaagaggattttctgtactatctcccggacaataaggagatatctgtctggcgggaaatgagcagaaacttcggatttccaacattagaagatgggctttcagtaccgtcgaaggatgaattggccgacagtttagcatataatagtataaaggtgtgaaaatcaaattttttgtacttaaaaacgaattttttcatttgcttatactcaatactatacttcttttgcagggcttgatccttagcaatgccctcanggcatataaaaatatcgaatgcgaaggatgcactatagctctg

SEQ ID NO: 41126 - DNA, 419 bp, Zea mays
agcttgcacatagtctcgatgatgcatgcctgtttatattttaagtcttctaaagctattactttctgtgaaaccgcattgaaaaagtaacacaagcgtgtgatgacaactttgacatgctctgtttcgagggctcttaccgcaattgggaggaacaccgtcatcatcacatggcagtcatgagagttgtagccaaatagagacaagtccttcatcctgactagtctgctgatattggatgagaaacctgtgggcactttgaccccacgcaaacatttgcaaatctttgttctctcctcaactgacaagttgtagctagctagggggaggtaaggcttccctttgccactatccactggatgaagctccagtctgatttgaagatctactagatcattgcgtgatctgagtccgtcttt

SEQ ID NO: 41127 - DNA, 419 bp, Zea mays
  unsure (1)..(419): unsure at all n locations
gttccccatattgagcactatgtcaacctctacggtatgggctacccctcgcaggggggctcaggtacatgatgagccattggccttggctctcagcgggaaccaagcaggcgcaagtcaactataagtacaagaccatacctcaggccataccatctataggggcacgagacacgtcctcatagtatgtagccaactcccgtccaccaagcacctctgcttggacctataaataatataccctactggtttaggagggacaggagaacacttcacgagttttcttctccagtcggtattggcacttgcctcaatcaacccagggacttgngatccttccctcttccaatcagcctgtactccctactgcaagcacttatgtgcgagtaatataagtgtcatcccnctctactggaagt

SEQ ID NO: 41128 - DNA, 444 bp, Zea mays
agcttgaggctgtgtatagattaccgccctcttaatgttgtgactatcaagaacaagtatcctttgcctcgtattgatgttctttctgaccagttggtcggggccaacgtattttccaagatagaccttcgctctggctaccatcagatcaagatacgagcaagtgatattccgaagacggcattctcaaccagatatgggctatatgaattcttggtgatgtcattcgggctgacaaatgcaccagcatacttcatgtatctgatgaattctgtttttatgccggaattggacaagttcgtggtggttttcatcgatgatattctggtgtactcaaagaacgaagaagaacatgccgggcatttgcatgtagtgcttcaacgtctgcgagagcaccacctttatgccaagttattcaagtgtgatttttggctaaaggaaatc

SEQ ID NO: 41129 - DNA, 427 bp, Zea mays
  unsure (1)..(427): unsure at all n locations
gaaagcgtgcaatatgagtttgcggtatggccgtatntatacgctcggtgcgttgaaagttgaaagaccccacttgtcattgaatgttgctattctagcaaagggaaggtgttttttcggaccttcggcgtaaagccttcgtccatatcgcaatttaaatttattatttcaaacaaattaatattgcgaggggctactgttggggaccttcggcgtccgaaggtcctcaaaaacaggatttaacagtatttctgtagtacaatgtgtgaacaggtaccctcgaactaaagtcggcattgcagtagaccggaataatacgaagcttgatacagagccgaaggtgttgagcangaaagcttcngcgtaacagcaaagagtggaaccgacttaaagatgaaaaggctattcagacctcgatagactacta

SEQ ID NO: 41130 - DNA, 438 bp, Zea mays
  unsure (1)..(438): unsure at all n locations
agcttcggcatgacagcagaaaaggggaaccgtctttttgatgaaaagcccaattagacctcaaagaattactatagaggtattgataaatgtaaagggcattaatgtaattttacacgggctgcgntccgtgcctataaatagatgaacagtattcccgtgctgttcacgctgacttggcattcgctttttgcatcacgcctgtacctttacttttcatcaattccaaggtacatttataatttgtttatatggatttgataataaaaagaagttaatgaaaatatctgtattattatttgtatttcttatatgtgntcttcttcatcatctatcgaacttgcgaaggtctttttcctcgtaaccttcgtccagaattcattatatccgaagggatatatatgttataaggacgaacgactttaacatttaacactt

SEQ ID NO: 41131 - DNA, 405 bp, Zea mays
gacaaaaagcacgaggttattattgaaaacctggaaaacaaaatttaagatcaaacaactgcttttgagaaaacagagttcaaactccaaacaactgaaggtttactatcggaagccgaagctaaaataacaaaactgaatacgaagcttctcggttccgaaaaagaaaagctgaagcttactgaaaaacttgaggctgaaatccagaatggtttaactttgaaaaaatcattgatagaccttgcaaacaaatgcttgaaattcagcaatcgatgtgttcaacgactgaagaatgtgttttattcagttggggccagtagtgaagaatttattccttctggtgaagatctgccaggagcctttgaacacatcgaaggtgagattgatgatgttattgttggacac

SEQ ID NO: 41132 - DNA, 380 bp, Zea mays
agcttgaagtttaaactctgtttaaaagtaactctttatttgaatttgaacctaatttaaaagggagaaaaagaaaatagaagaagaattgcaaactctaatttgggcccaaaccgcctcacaccggcccagccagaattcatgtcggccctcatcttcagccgaacgggccgaataccgtaaacaccggcccactaccctgccctttttttttttttctgatcacaggtgaaagtagcctagagggggggtgaataagctacacctgaaaattttcactaaaaacttcgaaatagggttaaataaagatgcactggtgcaaaccggttcggtcgattttagtcaccactgaacaagtttgaaccttgctcacttaaaat

SEQ ID NO: 41133 - DNA, 466 bp, Zea mays
  unsure (1)..(466): unsure at all n locations
tattngcagattcgatcgttaaacgagaagcggnggaaaggactatggaatggtagaaacgatagaccctggtagtgtataggagtatagatgacatatggctcttgatgactataattgtgcgcacttgggtgttgaagagagcgtcctacacttattctcaacttgtccatttgtaatcagatgttggagtcgtatatatctgcaggttggacgaatgatngcttgacccttttcatattctggtcagtgtcaagaatcaacgggtagcccctttcttctatgatgagattataatntccgtgtcctgggcaatgtgaatggttccaaaatgaatttatggaagagtttgcaggagatattctctgaccaaaacttcagtttagaagcctttgtatagtttcttgattttctttgtcactctttgttcttaaatccgctcttgtaccaattcacattctcgaat

SEQ ID NO: 41134 - DNA, 359 bp, Zea mays
agctgacattggtagattgacaagcatattcttttgttagttggaaacttaacaatgtctttgactgcacagtgactacattgcaaattcggatgtatcaattcaagcagcacatatccttatttatttcactgctatgctgatatgctgcttcggctgcttacatctataattttaactatgaacttttagtttgctttaaatatttcttctataaagcaagagaatgccatttttaatttgttgacctgcgctttgtgatagcatatatgtgttttagtggtgtggtgtgcgtgtaacattgggagttatgtgtgacttatacggcaatcaccgcactgtgattgctgctaatgtgc

SEQ ID NO: 41135 - DNA, 460 bp, Zea mays
attcttagagacacctgcggcatgcaagcttctaaagggagaacatgtgttaggtctatttatgtaacttttgaaaaagatagaccttgtgcagcttggtcagcaggaaaacaagtgggaagtgctcatcacatcaagaatgtgatgactacatcaagacctctggagctattgcatatggacctcttccgacccgtcgcctaccttagcatcgggggaagtaagtatggccttgttgttgctgatgatttttcctgcttcacttgggtattctttttgcaggataaatcagaaacccaagggaccctcaagcgctttctaaggcgagctcaaaaggaatttgagctcaacgtgaaaaagattataagcgacaacgggtccgagttcaataacctgcaagtggaggagtttcttgaggaagaaagattcaagcacgagttctccgctctctacacaccac

SEQ ID NO: 41136 - DNA, 381 bp, Zea mays
tctgaatatctgcacgacgggtgaaacgttcctggtaaggtaaggaaagataccgaacttgtcaagtagttcaggggcacctacagggttgtctgaggtccgttggacaaagacaactgtaggtgggcctaattacttgggaggttccgtcacagccttcaggttcccgagggcttcctcggcctcaggagtccaagcgaagcactcggccttccttaagaggcggtacagaggcaggcctctttcaccgaggcgcgagatgaaacggctcagagccgcgaggcatcccatgaccctctgtacgcctttcaagtccttgatgggccccatgctggtgatggctgcgatcttctctgtgtttgcctcgatgccacgctcgga

SEQ ID NO: 41137 - DNA, 433 bp, Zea mays
agcttgccgtctaggcttcactccagcgaagctttattgtttcaagagctgtgcatcctagaggcagtgatctcctcaccttccacatgtatcgctacaatgtgtgaaagtttgaggaggcttggagacatctacagcaatgttgaagagatgactcacttgccaagcaaccaagtttgctctctccagcaaacgaaaatgttggatgcagaaatcgaatcttctctctagctgctggatctctgcaacaccatgcaagagatctttgttgagttgaaggccattatccaagatctgcaagtggctctaagaaaaggagatgatgccaccgttcaagccaagatccagtcttatagccgcttggtgaagaacgctatacaatctttcagaaggcatgcaagaaggcactcctgccagcacagattgtcaatta

SEQ ID NO: 41138 - DNA, 454 bp, Zea mays
  unsure (1)..(454): unsure at all n locations
cactctgccaaataggactcataattatacctctaatgtcttctttttcttcagatcattctttacatagaaccattctgtcatacagccgctgggccatctcttccgaaaagatggcacggtgcagcttgacccaaaccgagaaacaaaattgtagcagccaaagctattgtgatactgttctttaccccaaggtattgtctcgtatgataattcgtgcatattgcagaaactntttgcatcaggcttcagaccttggcttcgcacggcccacacgaagatattcagcctaatgattgcctccggggtgagttggtgaagatagacttctaaaattttagcacctccacgatgaagctgctcaagggatatcgtagcccagccttcaaaaagcttcggaacactacgacctcattctcttcagggtgtggacaaagtttcttcccttcgtccg

SEQ ID NO: 41139 - DNA, 359 bp, Zea mays
agctttatcaaatggacgtgagaagtgcctttctttatggaccacaacaagaagaggtctatgttgagcaacctctcggctttgaagacaatgagtattctaatcatgtgtataaactctctaaggcgctttatgggctcaagccagccccaagagcatggtatgaatgccttacaaattttcttattgcacatggattcaaagtcggaaaggccgatcctacgctctttactaaaacacttgagaatgatttgtttgtatgccaaatctatgctgatgatattatatttgggtctactaacgaatctacttgtgacgagtttagttggatcatgacacacaaaatccaaatgtctatg

SEQ ID NO: 41140 - DNA, 325 bp, Zea mays
  unsure (1)..(325): unsure at all n locations
taaagccatggttagtatcatatgccaatattatgcgaattgtttctagcctagctacgggtgcataggtttcatcgaaatccaaaccttcgacttgggagtatcccttggccacaaatcgagctctgttccttgtcaccacaccatgctcatcttgcttgttgcggaagacccatttggcttccccttatgaatgtcgccgaagatggtgtcgacngggtgatctcgttggattgcttggtggactcttgggtgtggcgggctttggtcctcatcctccttggcttcctcatttgcatttcccccttgatcaatgccatcatct

SEQ ID NO: 41141 - DNA, 428 bp, Zea mays
agcttgggaactatgcccgtatccaatctgtctgagctggtactataagcgcttgccagatgcccccgttccggtcgaccatgaccaacacccaacataagacttccctagttatttagccaagaccagagccatgatagtcctcatggtagcactgttttcccgggtggtcactccatgttccaattaatatgcaataatcttgtttaaccatcgggttcacaacaacaaagtaatcttaccatttggaacattaatatcataagcgggagtgactgcataaagttaagttgtagcaatagcatagctacaaatgtaaagtataattcccaggtttgatcaaggaataaggttggaaaggttatctaaataggtaacccatcaaattatgcatatatatccgaaagaataaactttattaaatgtat

SEQ ID NO: 41142 - DNA, 391 bp, Zea mays
agcttgccttcgcctcagtgtaccaccctctattttacagagacgcggaacgcgctaatggcaaaattttcacagtcgtcaagaaaatgctcctccacgacaaaaaaggcaagtgacctgatctgttacccgaagtggtctgggcgttgaacacaactgaatgcaaggcgactgggttcaccccttttcgccttctataccgatcggaggctatgactccgcaagaaataaaacaccggtcaccatggacagttgcgtcccccgctcccgacgtagacgaccctacttcgaacgatctcatcgaccgagatcgcgtcttcgccctacaagctctgaacaaataccaagctcagacaaaagcatggcgcgaccacacagtcatcccgaggga

SEQ ID NO: 41143 - DNA, 443 bp, Zea mays
  unsure (1)..(443): unsure at all n locations
gacacttaaaactcaacttgttacttatgtctggcgatgatatcttcaatcacagagcttttancgccgggtggataatgcggagacgcgacgaggcacggcccatggaccacgtcgccgtatgggcttggtcgaggaatgacatcgataggggccagaatgggcgcccggggctgctcggatcgcccgccgcacttgacgctgcggcctgcggacagcggtacagtaccgctcgctcgcagtggggcggcgacgacacgcgtangcgaaaaagacggcgccttccggcttaccgatgtgccgcccagcgccagctgtggatcagtgaagaaacgaacgtatcagcctggaacgcgtgttccttgctactactagctatcaagtcgaagagcggagcatgcgattncgtcatcggcaatgggcaatcagtgtgcgtctgtgat

SEQ ID NO: 41144 - DNA, 431 bp, Zea mays
gcttgtgtatagaaaaattaagtacgagtactttattttattatgcctaatacatggtcatgataactttgtgttaattaatatgtctgctaaactctgttagtttattgcatttgcaagcttcgcgtcctaagattcctgtggtggttggtgaccacaggaacaacatgtccatgtcgagattaatgccttgcaccctcaccaggttcattgtaacactgttggggctgaactgcactgtaaataacgctcagctgcaatgttgttcagctgcaaccgatcagcagctgcagtggttgtttagtgcaaccgaacacggtctcgctttcttagcagaaagcgcctttggtggacttgcgagggcttgctctgcttcctaagaacaactagaagagttggtggcatctgaactgtctgcaagtgcgtccatt

SEQ ID NO: 41145 - DNA, 431 bp, Zea mays
atcatggctcatgggaaatgtgtgcgacctctgtagattttaaaaactggtatatcagtcatactcatggttaagcgcacccttgtgatccactttaattagagatacactggataactttatgataatggtttaatattgatggttattgttgggggccttcctattccgaaggtcctcaaaaacgtgactaatatgttttcagtgtaacatatactactatatggaggcttggctttgagatgaaggtatgcgtgatatggaaatacaacccgaaggcaggatgaacgaacgccgaagctgtggctgaaggagctctcgcttactacaacgatgaaagtggaagatgaaaccgacctatagggtgaaagactacttaatccttgatagcttgccttatgattaacagtaaatgtcacggacatgaatgt

SEQ ID NO: 41146 - DNA, 444 bp, Zea mays
  unsure (1)..(444): unsure at all n locations
cctgcggcatgcaagcttcataactnctagtggtacttatgggaacctttttatgcccgaggggctcaagaatgctggaggaagcttcagcagaatgacagccaaggtccttcactcttaaataggcaggaatctgctgacttatgttgatgacatcatagtaaaaagcacgaaacaagagaatcatattgctgacttgcaagagacgtttgccaatttcacgcaagttggtcttaagctaaatccaaaaaagtgtgttcttggagtaaagaagggcaagttccttggatgtctggtatcaacgaagggaatcgaagctaacctaagtaaggttgaagctatccttcggatggagccgccaaattcaaagaaggggacttcggatggagccaccaaattcaaagaaggggctatcattaaatagatttatatccagatcagcag

SEQ ID NO: 41147 - DNA, 488 bp, Zea mays
  unsure (1)..(488): unsure at all n locations
tgactacatcttgttgggctctacggatcagatggctttggttgcaaaanatctagcctaacaggccttggtctgagttttctattccgagttgcaaggtggtcaaagttcttttctcggtggctgttggttctcacgttggaaatggcaatgaaaccctgttttggacgagagattttgaaatttgacacccaattcgtaagcctttcataaaaaatgatatgtagggtcacagtgagtcattgatatgtgggctagaatgttaaatcttgaaaggcttgcaaatcagatgtcaaatttcaaaaattctagttttgggttgataattggctgcaagggaggagtgctagacattcggcactggttgtttgtgctttcgtctcgaaatatgttgtacacaagcgtctgtttactgggccttggaggatcacgggtggatcatccaaggagcccttacggncagagtcatttgngagtttatggagttg

SEQ ID NO: 41148 - DNA, 399 bp, Zea mays
accaatggttcattttgagaaagacagggtttgtagcgcatgctaagcaggaaagcaagttggcactcaccatccacacaagaacatcatgacaagcgacaggccactggagctcctacacatggatttattcggcccgatcgcttacataagcattggcgggagtaagtactgtctagctattgtggatgattatactcgcttcactcgggcattctttttgcaggaataatctcatacccaagagaccttaacaggattctcgagacgggctcaaaacgagttcggcttaaggatcaagaaaattagaagcgacaacgggacggagttcaagaactcataaatagaaggcttccttgaggaggatggcattaagcatgaagttctttcttctctaca

SEQ ID NO: 41149 - DNA, 415 bp, Zea mays
  unsure (1)..(415): unsure at all n locations
agctttgataatgcagctagatctggaagacatttttctctcgntattattgacaacttagaaggccacatcaaagagcaatcagctactattggaaagaagaacttcgagcttcaagcgactgaaagcttattggcggaagccgaagctaaaataacagaactgaacacgaagcttctctgccaatctgaaccaattgaacaagaaaagcaagaacttaatgcaaaacttgaagccgaagtccaacaaaattcagatttgaaaaaactattggcgggccttcaagacaaatgcttggaatttaacaacaaatgtattcaacgactgagaaaaactttccactcagtctgagctagcagtgagaaattcaccccgtcagctgaagatntaccaaagacctttcaacatattgagg

SEQ ID NO: 41150 - DNA, 415 bp, Zea mays
  unsure (1)..(415): unsure at all n locations
acactatagattagctacgcttgaaatcgagcacacatgcatacactatacataacatcnggcctagatgcggtaatataaaagcaactttctattattgaacgataaagtttttgatcaactatagtacctccttcatctaagtctagatgaccatttgttgccattggaatcttgataggcttagcattttctaaaccaaactttttgagcatgtccctcaaatatgttgattgacttataaaaattccatctttcaattgtttgatttgaagcccaaaaaagaagctcaattctgctatcatagacatttcacattcctttgacatcattgttccgaactcctcacaaaataattcattagtagaatccaaaataatatcatcaacgtagatctgacaacaaataaatcttg

SEQ ID NO: 41151 - DNA, 336 bp, Zea mays
  unsure (1)..(336): unsure at all n locations
agcttctagtanctatatatgagagagaaagaatattttctattttgccactctcaattntagctgcctgttattatgccatcccgcgtctatgactggtgagaccgtctgtgtctatgatttgtgggtccgatcgcatactggcgaagcccacaaatgataatggcaaaattgccaatggctcataagaaaaaaaataatactcacaacagcattcatattttccgtggtcttgggccaccaaaaatattttagccaaaaatagggctcagttttgtccagagccaccggaaatacctaactttctgcaccagccttataccgtgaaaatgataa

SEQ ID NO: 41152 - DNA, 427 bp, Zea mays
  unsure (1)..(427): unsure at all n locations
agcggcttactgcgacatgaaaaagcttcaaggcacgtggccatctctctgcaggtggcctactccggcgaggctatctggaccggccgtgaggcaagtgggtatggcggccagcccttggtctcattcgcggtgaatatattttcaccccgaggcgttatccaggcaccagtggacacgaatcgcatcgtcgacgtgaatccaggcgcggnggtcatcggcggcaaggtgcactgcacctgtgatctcattcagttcactgtaccatcaggaccctatcatgacgcctgagaaagcagtttcaagtgccccgatcttcaattctcatgtgataacttactaatccatctttagacaaagttgtctcctataatctagcgttaatctttctatagccatcatacttcaattctcactaaatcatact

SEQ ID NO: 41153 - DNA, 421 bp, Zea mays
  unsure (1)..(421): unsure at all n locations
agcttgtgaagattcttcatccaaacatgtgcttgtcttcaatgctagagccagcccatgttagtcttagcaattaaacaagtgtcgagttcagctttatcaaaattcactaagtatagctgaccctctaacactcccttaaattctattgaatcatcacttcttctaaagacagtgacacctacatcagtgaataaaatggtctggagatatancaattttacccaattctttgaccaaaccttgatttccatccccgaatgtgatagctcgttggggatcttggttnttctcgtaggaagagaacatcttcttctcccctgtcatgtggttagtgcacccgctgtcgataatacaacttgagcccccggatgcataaacctacaaaacattattagttcttgactttaagtacccaaat

SEQ ID NO: 41154 - DNA, 372 bp, Zea mays
  unsure (1)..(372): unsure at all n locations
attatagaacatgcctctagccaatttaatgtttttcattttctaaggcatgctcattaattttggcactaagttgagctatgtgatcattntggttcctaaataaagctaggtgatcatgaatagcatcaacattaatgtctctacatctagtgcaaatagtaacatgctcaacggtagatgtaaagggtttgcangtatttaattcaacaatcttagcatgtaaaataacattctcatctctaagaatggaaatagaagcattgcaaacatttaaatctttagccttagcaattaatttctcaatttcaatcttaaggctatgaaagggatacattcaatttgtcatcctagcaataaactaacatatca

SEQ ID NO: 41155 - DNA, 432 bp, Zea mays
agcttgagttagttcttctacatagaattatttttgtttcttagaaccgagaagggtatgaagcatattcatgagaaaatagaagccggcaaagcaaatttgcttaaaaaagatgaccgaggaataatatggtttaatgatcacatagttgtgcccaaagatgctgaagttcgccaacaaattctggacgaagctcatcttagtcgatattccattcaccctggaagtactaaaatgtatcaagatttaaagcaacactattggtggacaacaatgaacaatgaaattccacgctatgtggcaaggtgtgacacatgcagacgtgtcaaggccatacacatgaaaaccgctagacccttacagtccttgcccattccagcttggaaatgggaagatattattatggacttcattgtgggaatacccccgaca

SEQ ID NO: 41156 - DNA, 419 bp, Zea mays
tacgtcgtgctgatgccagaacaggcttttagccccaacaaaatatggacgtacgccaccaaaatgttaccgccacttgttggagagcttggctccaaaaggattactcccaggagttgcgggtgaatgagttgctggcgaatcacgtgatgtctgtgagaacaagaaagacagcaggcaaattatgtatagataatatcatgaaagaaatcaccctttctctatcagccagcgatgcttcaacctgcttgttcttggacatctatctcaagacagccacaacctactacactacggtctggaattcttcgtagattgcagcatgaggtacctgtgaacaaacatttcagaatcatgatgctaacatatagtgtcatacacgcgcatcaagaatcaagtgtcatatactgaatataata

SEQ ID NO: 41157 - DNA, 285 bp, Zea mays
cacattatgcagggaactagcgggaacaagctctccgcagtcatattctttaccacaaaagtaccatgtttcgatactacacatttattagacttcagaacaactatgttttcatctcgacatagcatcggaacactaactagactcttcttgatagacggcacatgctgctcgctctataatggcaccggtgttcctgaagaaagctcagaatgaccgtgtcaacaccaagaacatgagcacgcgacccatattccattaacaaggcgccagacctcccgacct

SEQ ID NO: 41158 - DNA, 418 bp, Zea mays
  unsure (1)..(418): unsure at all n locations
agcttctcctgtccgaaatgagctatggtattttttacttttcatntagaatacgtgtagatgaacttatgcacctgtgaaacgatcaactagagcaaactagctagtccaattatctgtgttgggcatttcaaccaccaaaatcatttaagaaaaggtttgaccctatttctctttcaaggagccggtgtgttctcaaagacaagattcgaggttaggttaacatcaactcaaaatccgaccttcggacataccgaagacagggttcatcaccaaatatgaattatatgagttcactgtcatgtcattcgatctgacgaatgtgccaacttatttatgtacttgatgaacaacgtgttcatggactacctcgaccagttcgtactggagctcattgatgatactccttgatatttct

SEQ ID NO: 41159 - DNA, 453 bp, Zea mays
  unsure (1)..(453): unsure at all n locations
tataaaactaagcttcactagngattctttattacttcaagaatgtatcattctattgaaaggatcacccatctaaacaaattgtgggtgatataaagtagggtgtcaaactcgctctccgtttgcttcaatttgtgaacatttctcttttgtatcttgcattgaacctaaccgtgtagatgaagctctacttgatgttgattgcgaaatgcaatgcatgaggaattaaataactctacctataatgaagtttgggagcttgttgagacaccaaagaatcacaatgtaacaaagctttcaagacaatatgggtgctttgtctagtccattcgagacactgtctaccagtgacaacattcattcactagatgagaggcagcagcagccttcagaatgactttaagtcagttaccttcatctttgacaactttagcttctactactacagtatga

SEQ ID NO: 41160 - DNA, 387 bp, Zea mays
agcttctgcgaccacagcgaactcgcccctattgttctcttggtcgcgggtgccatcttcgtcgggttctacggccgctgctacctgcggtagagaagaattggcgggcgtgcttggatagcgctgagagaattcctcgccggacatcgatctgtgctgcgaatccgctgtccgctgtgggcacccgtctgtgggtcatctcccgctctggtaagccctttgttagattcgtggagtccataacgtcgtgtaaccccctcgggttaagaagatgcggtgcctaagcgtccagtccagtttttcactgatggcgccgtcgggcatgccaacgcccatgttcttgaccacccgcgtctatggagatgagttgggatctggcggtcgttg

SEQ ID NO: 41161 - DNA, 408 bp, Zea mays
  unsure (1)..(408): unsure at all n locations
tgtctcatcactccttatgctcttcctcaggcgagggaggtgttctactcgacggtccaacccggtggcaagatggacgaccaagtcactccagcaaccatgtcctctagagaacctggtaaattatgtcacaagcaaggctgagtatactaatactcatctaggcttacccggtgtgaggagtctactcctctacctctagacatgcaactgtttggctgatgggtttggttgcaaaagcactagctgagtctaaaaatcaagtcttaacctttgccagttttagtgtgactctcttaagacttaatgtgtactattactcatncatggtataaacaattatacatcaaatcttttgcaaataatacattctaactgtactaatgcaatcatgcataagcaactatt

SEQ ID NO: 41162 - DNA, 390 bp, Zea mays
  unsure (1)..(390): unsure at all n locations
agcttggctagatggacgcttcttcactgacgtctgntgctcgangcttcgtgcttgctggaccctcttgtctttctagtacttgttcactaccggaaaaagctaaagagtacggaaacttccaaggtcctggctggcacctactacagagaagaaaccatgaagatgcccaacagtgaccttggtcatcggctggggactgtgggtactgaaatcttttgctttgttacttatggattacattacaccctattaagcacaaacttctgcttttgaaaggaaacagcaaaatacttgcctcttcaatgtattacaagagacatgaataatagacttcacaagaccgagcacaaaaaagcttatctaggaaaataaatttaaaaaagcaaa

SEQ ID NO: 41163 - DNA, 324 bp, Zea mays
tttcttgtagaccttctgcgacgaaacatagacccaacacctgctaagtcttatgctgatgaatacccaaggcactgagaaaactattgaggataaaactaactgatattacggatagttatgcatcaaagttcggttatgcaagtatttttgagtggttctcaacgctaatcttgttgaaatattctttgttcagtagtttggtaataggtctcaagcttgaaaatttgtaggtgattctggtgcatatgtctataactatcgacagagcagtcttgcttgcacaattatagcaagatggtctagattaaatgaattaaatct

SEQ ID NO: 41164 - DNA, 371 bp, Zea mays
tctcctacaagaacaacataggataaaaccctgagtacgcaattacttagcaagacttacccgactaaaaaaatactctcaaaggtatgctggctcttgggaatcaaggtaaagctcatcaaagttcaaggactcattttgcagtaaagcttactagaagtgggtccttaaaccaagttttatttcacaagttagtttattacctgaatcttctagcctgaatctagcatttttctaatctaaatcattcacttgacctacactaggttgcttttaaaatccaaatttttgttcgcttgttatctacgatgacaggcagcgatccagtcttcatatccgagaagtaacggcgatccgaatcgattaatacc

SEQ ID NO: 41165 - DNA, 382 bp, Zea mays
tcggcatgttcgtagaacatggaaccgacttaaagatgaaaatgccatttagacctcgatagattgctatagaattatcaccaaatgtaaagggcatgtatgtaattttgtatgggttgtaccccgtgcctataaataggtgaacagtacccccgtactattcacgctgacttggtgttcacttttgcgtcacgcttgtactttcatttccttcaaattgaaggtatatctgtaatccaatgctatttttatttatatataataatgatatatgatgatctatgtaattctttatggttcttggaatttattcttcgttaatatgtaatgcatttataatggttcgccctttgtgaccttcgtccgaaaatcattatatccc

SEQ ID NO: 41166 - DNA, 434 bp, Zea mays
agcacactacgactcattctctcatgttttttatttgtctctaccccctcgcgggcccttacaatgagacaaataccggaaataccttcctttcatgtcgacaagaagattctctttgatagctgatttgacgataaccgcatggcttggtcgcccagggcgatcttcggagtcttcaccaccgctgtccacatcataactgtcgctgtcaccagaatcttcagacaaaccttccacaatctccttggtgatttttctgtattggccttcgacattgctataagaaaccctagattcttctcttcatcgagacttcacttcatctcgcgagcagccttcatatcttcagacatcttcgagaacactaaacaacctgcttcaatgccgaagcttcacaacttataagctcagcacatcttggcgcgcaagagcta

SEQ ID NO: 41167 - DNA, 442 bp, Zea mays
  unsure (1)..(442): unsure at all n locations
gacactatagatgactaccgtttatcanacgagaatagcggcaagagcccgtccatatgtaataatataaggtgagttatacaagcatggtgtctattctccattactcaaatgtttatccagaactgaaggtatagagctgatgaaagaaatacatgcatgcctgtgtgaatcttatatcggatctaggcctttgttgggtaaagtttttcgtcaaggattctattggcccaaggcagcttcngatgcagcagaattagtccaaaaatgcgaaggttgtcaaaaatgtgcaagagaacaaaaacaaccttcgtctctaactcaattaatacaacccacctggccattgcaaagatggngcattgatttactaggcccacttccaccagcacaagggaatttaagatatgttgtagtggcagtggaatatatttctaaatga

SEQ ID NO: 41168 - DNA, 252 bp, Zea mays
  unsure (1)..(252): unsure at all n locations
acttctttaagacaggacacctacatcagtaaagagacaggtgtagccccattttgcataattgagatacngaaagcaaattggaatctaatgaatctacaagaaaaacattggaaatggaatggtcaggtgaaatancaattttacccaatcctttgaccaaaccttgatttccatccccgaatgtgatcgccctttggggatcttggtttttctcatatgaggagaacatctttttctcccctgtcatgt

SEQ ID NO: 41169 - DNA, 455 bp, Zea mays
tttttagtgtttccgaagatgtcttgttactatgaagctgttactgagacgattctgtctcttgatgaggagaaaaacttggggtttcttatagcgatgtcgaagacaaacaccgaaaaaatcaccacagaaattctggaaggcttgtctgaagatactggtgacagtgacagttttgatgtatatagtggcggtgaagactccgaagatcgcccctggcgaccaagtcatgccgctttcggcaaatcagctatcagagaaaaccatcttgccaatatgacgggaaggtatttccgggatctatccattgtgagggcggacgaatgggaaaagacttgtccacacccttgagaaaatgaagttgtggtgtatcgaagccatttgacagctggattgcgattccccttgagcagcttcgtcgcggaggtgttgaaaatcttcgaagtctatcttca

SEQ ID NO: 41170 - DNA, 354 bp, Zea mays
  unsure (1)..(354): unsure at all n locations
agcctgagaagatatctccacccgacgccatctattcttgcttccttgagtcctcatctaccccacgaagcacaaatgggggcccgttgagggccttcatacttcgaaggtcctcaaaaacatgaatcaacaccgtctccaagtgtcacatatgaacaagtacccttcagcttggattaaaggcatatactgtttggaaagcacgaatgcgaactaaggtttaaccaccgccaaanctgcgcgccataaatcttccgctccataacagaaagagaaaccgacttacgacagacaatgctatctatgtctccacagttngttctttattacatactgaatatgaacggcattaat

SEQ ID NO: 41171 - DNA, 381 bp, Zea mays
  unsure (1)..(381): unsure at all n locations
tgcgccgcgttgttaccgtccctgaccagagagaagagnactatgtctgcgccacacatcggactgctatgacgaaggacttcgtctttactgcggtatagcccccatacgaagatatagttgcttcgtagctcatcaagaactgcttgagaactgaatgcccatcatacatgaagagctgatgtggcttgtttgatgggggccatgtggtatcctgcactactgctgatataggagaagcatcagtatacacaaaatttccatgatggaaatcgacataccaatcatcatcatcgtaagaattatattgacgaacctctctttgtggaggtcttctcggcttgtcatcttgagtcagatgacgtatttctttaccagcat

SEQ ID NO: 41172 - DNA, 398 bp, Zea mays
  unsure (1)..(398): unsure at all n locations
ttttttctaaccataatgaatgtgagaacgaatgtcatacttgacgcatattcactttaaagcggcacttgtatgacgaaactgaggattcccaattagaatgaatgaatgtatgtatgcttgcaatcgcatataaaacgaaacggccgactagttccgaaaactttcatgaaaaacccctgatcaccaacacttattggaagcaagagtcccttgacctatccttgtcctattcattctctaaatcacccacctcgattacacatttatacctaaggattgactancttttgttatccatgtgcttgattacctatttgggatggaatataattgactacccttcttctatctgcataaatctcattaacgaacatgatgagattatctatgatacg

SEQ ID NO: 41173 - DNA, 341 bp, Zea mays
  unsure (1)..(341): unsure at all n locations
actatctgagcccttgaccccctgcgtacaacagggagtacttgtctgaaatcacccccgaacacaacagttcttccaccaagggcagctcatggcgtcccattatatcacgcatgctattgtctagcgccttaattgcttgtctcttagtcatcgatgcctcgtnccagataatgaacgatgctttttgtatcaactttgctgtcccgctttgtttcgtgaagctacatacaacaccatcattcatagtaagtggtatcttgaaacatgaatgggcagtccttcccccangcaatattgaagccgcaacaccagatgtagctggtgcaactgcaatcttg

SEQ ID NO: 41174 - DNA, 286 bp, Zea mays
  unsure (1)..(286): unsure at all n locations
tcctctgaaagagcccagcggggccctccctgccacatgaaaggaggaaagagaagaaacaaggtccacctttcgatgcgaaatgtcaaacgaacctcgctgtctgacgtcaggccgacaggaagggcgggataaaatgcgaacaaaccccccggcctgatgccgaccgtccaaaacccctgcatggggaatacnaagagacctagcccactcctcaccctgaattgggcggctcgcccatgcctcggcgaactctgccgcccgcataaatacacccgaagagggc

SEQ ID NO: 41175 - DNA, 398 bp, Zea mays
  unsure (1)..(398): unsure at all n locations
tactaaagactttttttaatctatcctcatcaacttacccccgaagctattatcaaagtacggattcttatatgggccatgagaagtcaaaggttatagccagatgccaagtgtctctacaaatatccacgagttaccatatcagacgaaagcaactgggaaagagcaataccacaactaattttggttactacagcttcataccccacgctgaggccagttatcctgtgccaacatttcggaacaagtggccaagttcttggatgcaagaatagntatatgtgaagggtgacctgagtgaaagggaagatatataaggggttattcatcgctctatatggcctcgtttctggatcatgagtccggtcatttgcgcttgtgaatcatcgtgcaagcgt

SEQ ID NO: 41176 - DNA, 361 bp, Zea mays
cgccctgaatgcaacggggtgagcttccgatggctcgccaagctcgttgattttccctcgaaccctctatcatgcacttcaaacttacaaaatgcccgataactttctcgggggtcattttagtatatctaaggttaccacgaatcaactgaacgtgaatgagatttagaaaaacgagagatcttaaataacatttaccacttcgggtcatcccacttcttgctcccgaggttgcgcacttggttcaccaaagtctcgtaccggtcgacatgtgttgtggctccttcccttcttgaaacctgaaccgaccgagctcccctcgatcgtttaccgcttggggatctggtgagctcatctccct

SEQ ID NO: 41177 - DNA, 438 bp, Zea mays
  unsure (1)..(438): unsure at all n locations
tatgggcnttctcctgtggactccattgtatataaagagacttttacgtagaatagacttgaaaacatgtattagnttcaaagacttaaattatagagtgacctccccctaaaagtgtgcatacaagtattgaacacttgtaggagacatgcactttgatttgatgtcaagagagacaaattatccataatcccagctttggcacatataagttacatgataccagttgaaacacaattgaagtattataccacttgtagtatatcaattgtagtatatgtcacgtgaaaatatcaactgatgtatcattttcttagacatgtcgaataagctatgtgtcatgcttaatttgacattttaaaccatgtatgtttgctcacgaatatgaattgagcaattctaccatacgaattacctagtatgcatgcatttttaaac

SEQ ID NO: 41178 - DNA, 356 bp, Zea mays
  unsure (1)..(356): unsure at all n locations
ttgtcaaccacaagacactataagtagacttttatcccaactctctccatgctgaagggcacatgctctcaacatatctcccaatacttgataaatcctttcaatccgtccatcagtctgagggcgaatacacgaactgaaattcaactttgtactcatattctcatgaaagcttcttcaaaatctcgatgtaaactgcgaatctccatcaaacacgatcttttttngtactccatgctaacacacaacccgagccatatattactctgctagctgagaacctttataaatattctctacaggaataaagcgaaccactttggttactctatccacattacccatatataaccata

SEQ ID NO: 41179 - DNA, 205 bp, Zea mays
  unsure (1)..(205): unsure at all n locations
aaccagattgtgaatggactatctggtcctaatcctgaaccttatcaactgatttcgtttggggaatggaatgtgttttctatacccacctctttcctcacaagcacaaagctgcatgaaaatttggacaatgggcatgtttaggacaacttntttccttgagttattttctgaaaatctagaattcctgattatctaattgtca

SEQ ID NO: 41180 - DNA, 444 bp, Zea mays
  unsure (1)..(444): unsure at all n locations
agctngagacgggaacaactgtggcatgcactatatctcttgtagaaaatgtcaaggacttgaggattgtaaagaggaaggaacaaaataagaaaatcaatacctcttccaaaagcctcaaagtaacatccaaggtaataatcaagtcacacttcacactaagaaaagtaagaagtgtagtgaatgctttgaaaaggggcactctattacgtcatgtccctatattaaaaatgacttgattattaacaaggatgataaactttgttttaaatgatccaagaagggacacttgtttaggtcttgtccccatttaaaacaaanaggcatagtgttagaaaagaaaatattcactaaccatgtagcaaaaaagaaacaaggaaagaagaaatctttaagacttgaggatcgcctatgctacatatgccgaaagagcggcatcaatgc

SEQ ID NO: 41181 - DNA, 446 bp, Zea mays
  unsure (1)..(446): unsure at all n locations
ctaataccaacatacaccacctttcaccggttggggactctcgcacgacacacggttattgtaatacatcacaagtacaaacatcttccttcgttgcgagtataaccatattacggcatatactcgcacacctcaatcaattatcttacgccaccaccactataatacaccacggaacacacacacatatgtgcccccatattacacacaagacatcaacaacatagtgactacgacaggactaatcataccctggattgcatcgactatcaccatcaccgatcatatgcctaaaaccaatacacttctcacataaacatctatcgatgtattccctaaacatgatccgcatntatttatttaaacttagtcttcgcgtcaaacaacacatcgcatatatttctatcgaaatcttaaaacattcgagttcttttctagttcttttc

SEQ ID NO: 41182 - DNA, 429 bp, Zea mays
agcttgggaagggtcttcatccccacatgcgcttaacttgtgatgccacagccagcccatgctagtcttagcaattaagcatgcatctagaccggcctcctcttttgcaaaatcaactaagtagagttttccgtctaatacacccttaaaagctaatgaaccatcactccttctaaagacagacacatctacgtttgtgaataagcaattgtatcccatattacaaagttgactcacagacaacaagttatatccaagcgactcaactaagaatacattagaaatagagtgctcggatgaaatagcaatttttcctagtcctttcaccttgccttggttcccatcaccgaatatgattgaatcttgcgaattcttgttcttgacgtacgaggtgaacatcttcttcctccccatcatgtggtttgtgca

SEQ ID NO: 41183 - DNA, 438 bp, Zea mays
  unsure (1)..(438): unsure at all n locations
agaacacgtgataggtttgactaacgtganattctaanaggatagaccttgtgcagcttgtctagcaggtaaacaagtgggaggagcgcatcacagcaagaatgtgataaccacttcaagacccctggagttgctgcatatggatctcttcggacctgtcgcctatctgagcatatgaggaagtaagtatggtctagttattgttgatgacttttcccgcttcacttgggtgttctttttgcaggataagtctgaaacccaaaggaccctcaagcgctttctcaggagagctcaaaatgagtttgagctcaaggtgaagaaaataaggagcgacaacgggtccgagttcaagaaccttcaagtggaggaagtccttgaagaggacgggatcaagcacgagttcttcgctccctacacaccacagcaaaatggtgtggt

SEQ ID NO: 41184 - DNA, 320 bp, Zea mays
cccacacctcaggaggaggacttggatcaagaaattagggacctccaaactattcatcagccgggtcaaaaaaaaaacgaaaaaatgctttgtctcgccgatcttcacaagaaaattgatgaagccgctgaggaaatgcgtcatctcatccaggatgaccaagaccgaaggcccccacacaaagagctttgtcaagacaattcatacaacaatgatgaatagtatgatgattttcatcatgcccatttttcttttgatgatgcttctcctttggcagcagagttgcaggctaccccattggccccatcatacaaaccacc

SEQ ID NO: 41185 - DNA, 472 bp, Zea mays
  unsure (1)..(472): unsure at all n locations
gtatatgggctatggnctctaactccgctaaatgggtcagaacctgtagaaaggtacttctttaggcctgatatggtgaaagaggtcgaagaaaaggttcagagaattattcataatatgaagaaagctcagactcgacaaaagagttatgcagaccgacgacgacaacccttatgctttctggtaggcgattatgtctacttgaaagtttcaccaatgaagggtgtatcgcgtttcggggttaaagggaagcttgcacccaggtacattggtccattcctggtacttgagcaatgtggaccagtggcataccgactccaactacctgaaaccttgtctgctgtgcataatgtgttccatgtgtcacaattgaagaagtgtcttcgggttctcgatcgaaccattgaagtaacggatgttgtccttgaaccggacttgacatactctgagcaccctattcgagtctcggatc

SEQ ID NO: 41186 - DNA, 419 bp, Zea mays
  unsure (1)..(419): unsure at all n locations
catgtctcgtatgattcagaatcatatgttttttatagcccatcagaacgaagcttcttcatgcgattctcacttatatgacccaaacgacagtgccacatgtaggtaggacttatatcattaggccgaggccttttatcactaatattacagataggtgcatcatcaagatttaaaatgaataacccattcataatggatgcaaaagccacaaacatgccattcttagagatcacacaaccattgttttcactcgcaaatgaataaccatccttcatcaaacatgaaggagacataatgtttcgactcatactangaactagataacaattatttaactccaaaataaatcctgatgggaggtggagttgcatcgtcccgaccgtcaacgtaacaactcttgcattattgcctaccca

SEQ ID NO: 41187 - DNA, 392 bp, Zea mays
  unsure (1)..(392): unsure at all n locations
acctgaggcgtgaagctatgaagaatcttcatgcgacgcgggctattcttctatgccagagccaacccatgttagtcgtagcaattaagcaagtgtcgagttcagctctattaaaattaactaagtatagctgaccctctaacactcccttaaatgctactgaatcatcatttcttctaaagacagcaacacaagtttaggccttgtgcttaggtacccaaacggtcttgggtcctttgacattataaacaagcacattgggtacccaaacancagtctttgaccccttgtgtttgccccccacatatttggcaactactttgcctgatttgttagcgagcacataacaagcatcaaaagtctaaatgaaatataccgtccattgacgctat

SEQ ID NO: 41188 - DNA, 362 bp, Zea mays
caaagagttcgaagttgtcaaagtcattgtatgaacttcaagataaatggctgaatttcagcaaccggtgcgcgcaatgactgaagcatgtcttcaactcagttggagctaattctgaatagtttaaaccttcagctgaagacctgccaggcatcttcgatcatattaaaggcgaagtcgatgctcttgatgaagtcatagctgggcatggtgacttctgcgctctgctagcttctcgtggcacgactgttgcttttatgaaagcttggtgcacacacggcaatattgtaaacagaccgaacttcagcttatcactagcggacttgaatgacatccccggccttggccaaagcattgggaac

SEQ ID NO: 41189 - DNA, 452 bp, Zea mays
  unsure (1)..(452): unsure at all n locations
actgaggcatgcaagcttaatatgatatgtagatcccatgagtgatttttgtcttgatttanacattgttcgagtcccacacacagaaccctatcttcttacggtaaaaatgtctaaccctactaaggtactgcattacaaaaaccatagttaccctactgcaccgtgaagtaaagttgttttcagaatacaactctgaacatcttatatattattgccttatcataagcattacatgagcattcatggttgcatatggttatatatataaaaccaacaattgactgctgaagaggaagagcctactccgtcaacagaaaatncacctaccgggaactgtttttactttgacatctgtggaacatagcccgactctcctacaacacatagcaagctccggtgcatttgccaacctcctgatgttcaaactcttatcacttgaatgatgcatt

SEQ ID NO: 41190 - DNA, 434 bp, Zea mays
tactcaagcgtgcagcgacaatcatatttgcatgcaaaccgtaacgacacgtttgcaatagctctcatatttgcatgcacatgagaagtcagcttacattgcaagagtcctcgctggctgccgacgcgccttcggttagcttacattgcacgattcctcgctggcgaaggtaggcgacttgaggctcataaattcccgatggttgacctacggtggaattggtggaggcgctggtggtggaggcagtggtgcttactgatgatgcaccctcctttcctggcacatctcctctctatccagggcaatctttggcattgctgccgcatctgtgcatgcatgtacgacatggtatctgccatctcgtgcagtatacacatatgggctgcaacagaagtgtcagctccggctggcggacgtgttggaggattcatctc

SEQ ID NO: 41191 - DNA, 440 bp, Zea mays
  unsure (1)..(440): unsure at all n locations
atcttaagtcacctgcagctgcaacttgtaaaccagcagagggatggtttatgtatattcanctcatcggccttccaaatgtaatgaagcttttgagcacctaaaagtattattaaccactgctccagtattggctcaaccggatattgaaaagcccttcgatgtgtattgtgacgcatcaagcagtggtctcggctgtgttctaatgcaagagggccgagtaatagcttatgcttcaaggcagttgtgccggcatgaggaacattatccaactaacgacctgcagttatctgcggtggttcatgccctaaaaatatggcgtcattatctgctggggaatgtctgtacattttacatattataaaagttgaagtacattttacccagtcaagctcaatatgagacaaagagatggctgagctgatcaagattatgaatta

SEQ ID NO: 41192 - DNA, 234 bp, Zea mays
ctctggttgaaacctttcgttaacgccccttcctctaacgtgccccacgcgctaaacatgccgtcataactcgggacgcgcctagagaaacacgactcctccatagatggaaagacccgatcatcatctttttctttttttaccagcgaagggatcccaagtcttcggagacgctaccctagaaagtaagtgcctgaggtacacctaacgctgtcccctatgtaagtcagcgcc

SEQ ID NO: 41193 - DNA, 271 bp, Zea mays
  unsure (1)..(271): unsure at all n locations
atatggagacgacgggacgtgagctacaacatgaatcacaagtcccacggaaacatgcccaagtatctggttgatggggatgatcttccccactactcttttctttgtcagaaaccacatgggccattctttntcaaacttaaagctggtatgacggcatcaacctcactcatattatgcccagcatatacctcgtgtggtatgactattctcgcttattaacctaccccatgccctgttggtatcaatatcatttgggaaaaaactctat

SEQ ID NO: 41194 - DNA, 284 bp, Zea mays
gacttaaagatgagctgccctgcttggaggcgaggctttttttggcagggtgtactcacaggcctgctaagcctgtccagttactgccaaacggcaatgaattgttgagtaacttccaaatggttcagtattggccatttaattgactttgtttatttgaaacaaaaccatatatggaaagttgattcaaaatcaaattgtttttacgtctaataggtgttggatttttagtttttgtaccttcactttttgctaaaaatctactatatatggtcataaattaa

SEQ ID NO: 41195 - DNA, 403 bp, Zea mays
  unsure (1)..(403): unsure at all n locations
tgtggcgccctcgggcgtcttgtcgtagctgaagcaccaaatctcccacttggaagccttgtggccaaatccttcgggcgtggtggcgtcgcagagactgctgataccatgtcgagtgtagtaaagctatgtcctgagcctcttccagctggtccaatgaatcttctcggctggcctagttgcttcgatcgtcgtaagcctttgtcctcggggaaccgtattccaagtccatgggtaagatggcctcggccccatagactatgaaaaacggcgagaagcccgtggcccggctcagcgtcgtcctcagactccaaatcaccgagggcagttcttttatccaccgcttgccaaacttgttgaggtcgttgtagatgctcggctntagtccctgcaaaatcatgcc

SEQ ID NO: 41196 - DNA, 383 bp, Zea mays
agcttaatgcctctaaaagactgtctaactttgttaatggctaagctcacatggctcacgataacgagtgttacattttataccctcgcggttattcccagcacaaaattaggagaattcactctaagaagactcactctagctctcatcatgcttttatgtataagagtgaggcatctagttctaggcaatcaacccatgcttaattgcctataaagaaaactcctattgcatcaaatgaacctaacatttcatttaagactttcgatgcatcatatgttttaactaataaatcacgcaaagtacgtgcccaatatgttggggccaaacacaaacgatcaaagacttgtgttcgggtacccaacgtgcttgtttataatgtg

SEQ ID NO: 41197 - DNA, 398 bp, Zea mays
  unsure (1)..(398): unsure at all n locations
ccctctacatctaccgttgagcatgtcactattttctcttgatgtagagacattaatgttgatgcctttcatgatcacctaactttaattaaacaacaaaatgatcacatagctcaacttaatacccaaattaatgagcatgacttaaaaaatgagaaatttaaatttgctagaagcatgctctattgtgggagacaccctgacattaaggatggcattggcttccaacagggagacaatgtcaagcttaatacccctcctaaaagattgtctaactttgttaaaggcaaggcttccatggttcatgataacgagggttacaatttataccctgccgtgtatcctcaacacaaaattatgagaattcattctangaagtctcactctggctctcatca

SEQ ID NO: 41198 - DNA, 244 bp, Zea mays
aggggagtattccaacactcaaacactcatgaaaacccctagtgcaaaccaaaatgcaaatttcaccatttgcctattttctctaaaaattaattagcctatggcgaaatattttgaaaagtatatgagggtgccaatacctgtcccaacaagtgttatttcgagtgattataaattgggattcgggttggttgggagttatatacaaaataccaaattttttcaaactttcctctgtctgggc

SEQ ID NO: 41199 - DNA, 233 bp, Zea mays
tagactcatggagtccgaagaagctgcagcatctacaagggagtctattcttggtaaaaggaactcgtccttcggacatgccttgttgagatctgtgaaatcaatacacattctccattttccattagcccttctcaccataacagagttggctagccattctagatatgttacttctttaataacgccagcactgagagatctttttacttcatttcgagcaccttccggtt

SEQ ID NO: 41200 - DNA, 437 bp, Zea mays
agcttctaaagggagaacacgtgataggtctaactaatgtatctttcgaaaaagatagaccttgtgcagcttgtcaagcacgtaaacaggtgggaagctctcatcatgccaaaaatatgatgacaacatcaagacccctggagttacttcatatggacctcttcggacccgtcgcctatctaagtataagaggaagtaagtatggtcttgttatagttgatgatttttcccgcttcacttgggtattctttttgcaggataaatctgaaacccaagggacactcaagcgcttcctaaggagagcccaaaacgagtttgagctcaaagtgaagaagataaggagcgacaatgggttcgagttcaagaaccttcaagtggaggagtatcttgaggaagggatcaagcacgagttctccgctcctacacaccaagcaaat

SEQ ID NO: 41201 - DNA, 464 bp, Zea mays
  unsure (1)..(464): unsure at all n locations
atctctaagggtctcctttatttatntattaaataaacaaaacatacacctacattagttcatattcaatcctaaaaattagagtgtgcaaacagtaagcgaaactattttatttaaacagagaataattctatgaacattttacaatttgaatcactaaattaggagttcatatgcaaaagttataaaataaacaagtttgggaattcaaaatatgaaattagggccaattctgtgaatatttaaaagtccagggctaaatctgcaagattacaggggtctgcgcgcgaaaacctgngatggcgggttgatttccagtaaaccgagggtctctttaagaaaactaccgcgcgaagaggtatcaggtgaatctaaccgtcagatcagaaaccgatggtcgagattagatctgcggccgagggcgcgcgcggnggcggactatcgctgacaggcgggacagggag

SEQ ID NO: 41202 - DNA, 400 bp, Zea mays
  unsure (1)..(400): unsure at all n locations
gcagcttaagacatgctggtaccagtttccaggctttatatgaagccgtcacagctcaggccttgttccagtgcacgcaagaccatgaggaataccttcaggcgtatgtccgaaggttcttgcgaatgagagcacaagcgcccacagtgcccaatgaatttgtcattgaggccatgatcaagggccttcggccaggacctacagctcaatacgttgccaaaaagcccccccagactctacagaagctacttcagaaaatggatgaatacatccgggctgacaacaacttccgccaaataagggaggaagcttacaggttctctgagatgactaggggcttctgagggagagttcaccctacacatgtcagatcaatccatagctncagccagaatgatga

SEQ ID NO: 41203 - DNA, 361 bp, Zea mays
  unsure (1)..(361): unsure at all n locations
gtagagcctctnccagccgcgtccgaccttcggagtagaccgtgcatgcctcggtgaatctacccgagcgatgaatcaaactttgtctcgccagagaagccagtccacggtcgccatacttcacccgaccgccggtgaacgtagaccgagctccacggtgagttgttcttcaattccttgcacgagtcgactcatcaacaccccgtgaagctcccgtgcccttggattgacctgtatcgccatggttaggccggagcactcgccgccgacgagttcacccgcctgcgcacgtggaccggtcgattccggccaccaccgccgttgagccgtacctcgatgtgaccgccagaaccttccggag

SEQ ID NO: 41204 - DNA, 323 bp, Zea mays
tttatatcctactggttatccgaccccaaaatttagaattcatggtgggaagtcttattctatatctcatcatgcttttatgttcaagaatgacgcattctacccatgttaaaatgcctaaaaaaataatactcttactgcatcaaatgaacccaatggttcattaagactctcgtgcttctatgtgcttactacaatcaggcaagtagtgccaatatgtgggggcaacacagggctcaagacttggttgggtcccacgtgttgttctacataaagaccaaactgttgggacctaaaaaagcctaatgtttgccgttatcctc

SEQ ID NO: 41205 - DNA, 417 bp, Zea mays
gcgtaaaacttatcttgctgcctgcacaagagcgctaggaaggtctatttctacccgatcaaccgcgtcttcccaggctgatttcgcgcaaacatcgagttgctggaaggttcgtaatgctctctgcgcttctagttggagatctattgtactgctgccctgagatcgagtgagccggcgtcgatattccactggtgtcgtggccaacgatgcctgaggcttggcgggggtgtggagacctcgagaccgatttgtgttggctgtggacgtgttttattagtagtttgggagcgctgaaggttagcgccgtcgtgaccataattgcatgttcgccggagtggacggcggatcatcggatctgagcagttgtgaaagagtggatacctaaggtcttatgtgcaacgatcagcgacacgt

SEQ ID NO: 41206 - DNA, 277 bp, Zea mays
ccattttctgaaacagcgtctcaaaggctggatgggccttctggtgaactattgaacccgaagaccttgctgaagacctttaatcatgggcctcatgaccatttcattgggcaccgtgggcgcttatgcccttatacgccagaacctttcgacatatgcttgaaaggaatcctcatgatcttgagtgcactggaacaaaaccctgagcagtgactggctttgtatgaaacccttgaaagttggtgaccaccatgtccttaagcttctgccatgacgt

SEQ ID NO: 41207 - DNA, 414 bp, Zea mays
atcgttcatctctttattgctcgatagaagcattttaattttctcaatcacattgagaattgatccacagatcaaaatggtatttacataaagacacaggattacagactctcccccaccataccgataggatacactcgtgtcagaatcatttacaacaaagacagctggtggaagaagattatcaaacttttcatgccattgcttaagggcttggtttaaggcatacaatgattttaataacctggacaccttgtgttcttgaccatacgcaataaacccttctggctgatccatatagatctcctcatccaactctccatttaggaaagcatgcttaacatccatctgatgaatgataagacataagaagctgcacggctatttatgtgcaattgtagtcagtcgaccact

SEQ ID NO: 41208 - DNA, 245 bp, Zea mays
ctccccatcttatgaccccagtgtgctattacatatagaatcggagaatatcatgggatcaattgacatactcccagatcattggcttgctcatgcagcctgcaagtgcaacaacgtcatacatcttttatgctgtgagtaagctaactctggttgtgtagcaaccagtagatgatcactgccgtgctcttgagagaaaggtgcggatttcgaatggactattacctaccggattcattatacca

SEQ ID NO: 41209 - DNA, 320 bp, Zea mays
atctcaatagcggacacgcgtacgcctacccaccgaagtgctgcccgaaccacacactgagatagaaccagacttgtcctacaagagcaccgaccaggtactacatcaacagagagatccacaccggcaacgccaatcacaatgtataaagctcactggagtcaacattccggagaagaaactacccgggagactgaggattctctacgctcccgcttccccgactttctgcacaaaggagtcggtacctacccccaaaccccacacccacctgccctttgaattcactatcagaaaaacttacataacaacgatagtct

SEQ ID NO: 41210 - DNA, 380 bp, Zea mays
  unsure (1)..(380): unsure at all n locations
agcttcaaagctaaagacttagcagatcacagtgttctttagcntaaaaatgaatgagcaggagtggttggccagaaagcgtgcgaaataatgttgcggcatggtcgtatttatacgcttgatgcgttgaaagttgaaaaaccccacttgtcattgaatgttgctattctagcaaagggaaggtgttttttcggaccttccgttcaagggcttcgtccatatcgcaatctgaatttattatttacaaattaatattgcgaggggctactgttgggggccttctgtcttcgaaggtcctcaaaaacatgatttgacaatgttttccgagtggattatgtgaacaggtattttccgatccacaattatgaatatgaagcacg

SEQ ID NO: 41211 - DNA, 439 bp, Zea mays
ctcacgcttcggggtccttgcacacgcttggactaggcattattttggttgtgcacgaacccacggttgtcttaggacacgctgcgccttggccgtttccgtccggaagaccggtgcccctctcccgtgggttccaaacctagtcgctatgccgtgcgtagagtgtggggagggacgaattcgtgcgacgcggggctggatctcagtggatcgtggcagccaggccactctgccacttacaatgccccgtcgcgttttaagtcttctgcaaaggattcagcacgccgcccgttgggaaggtagcttataggcggtccgtcgcggctcgtcggccggtcgggctgaaccaatggcacgggcccttggtgcgctaacgccctaacatgggtccgggctggcggcgagcagaagcgccgtgtgctagcttggattctgactt

SEQ ID NO: 41212 - DNA, 430 bp, Zea mays
cgcttggtgccaatggagaagcaagaatctttgttgtcttggttatcaaactgcttgccgttgtcaactgtcagttctgacggtcctactaagcggcaaacaatgttctgtcagaagaatatttgggcactctctgatgttattgtagagacagcccgcgcctccatccatttggtgaagtactcgacagcgaccaaggcgaacttaatgttcccttgatcggtgggcaggggcccgatgatgtccacgccctagcgctggagaggccatgtatgggcgatcagctttgtatactgcgaggggctgccccaccgatgagaatactattggcacgctttccaggaccgggtgacccgaattgcggcgcatatcattgctggccactaaaaaccttggcggatcatcttatcaactacggcccttggccctg

SEQ ID NO: 41213 - DNA, 370 bp, Zea mays
  unsure (1)..(370): unsure at all n locations
agcnacgggaagactctagaggacaacgtgggctttcttttgatgccacacacaacccatgtgaattctacgaatcaagcacgtgtagagctaaaccctatcgaaatcaaccaaatatagctgaccctcaacacaccctcaaaagccatcgaatcatcacttcttctaaagacagaaacacccacatccgtataaagacagctgttacccctttacataatcgtgaaaccgaaagccaattataatctactgaacctacaacaaaaacattggaaatagaacgggcaggtgagatggcaatctacccaatacttcgaccacaccttgatatctatccctcaatgtgacagctcgctggggagcctggctc

SEQ ID NO: 41214 - DNA, 414 bp, Zea mays
agcttctcccttttcttctcatcagcattcatattttattattcacttggccagccagcctataacactcaaagttctaccttggaatttataacatcaataattaaaaatgtccccaaatgaatatattgcctaaataaatgattaaaataaaagatacttgaaaattaaattatacttggtttatgtgttagactcttctttgggaataaataattagaaatattctcttgatagggtgatataaaactatcctttagtataaattatgtaataatagttgtgtctttaaaacatatgattgagatatataataacaagaagatttttcatgtgtgttaaaacaagtgggctatttctttcattaactatgtagtttaaaatattaatgaataaactaatacgccaaaataa

SEQ ID NO: 41215 - DNA, 447 bp, Zea mays
tccacaacaatccatcacacagtggagtagggtattacgctctcttggcctgaaccactctaaatcctcgcatgttcatgtgctcagtcatcgcttagcaagacaggcaaaacgcttaagccccttcctcatcttaagatttagggcgggtgcactctgccacccggccggagaattccctctccgatagcgtcattatctgttgggaaatacttgccatttatatacggatcacaaaagtttgaaatatatctttacccagtcagaactgaacatgaggcagagaagatggcttgagctgattaaagactatgacttggaaatccattatcacccacgaaaagccaatgtagtggcagatgctctgagtcgcaagactttttgccattgtcttacggaaagagcacctgacactactttatgtccagaaatgggagaagtgaatct

SEQ ID NO: 41216 - DNA, 415 bp, Zea mays
agctttgttgtatagatacggatgctgtgggtgtgtgtgttgcattgcaccgcacatttgcagcgcaggtgtatgtgcatgggcgagtgaatcggatccccgccactgtctgcaaatctcagacatgaatgcgcctgctttttaccacggcgagggcgaacgtgaccaccaccgggctccgtcccggtcggcttcggcttctgctcctgctcctcgacgacgaggaatacccgccccacccgccggctcgctagtcttactacattgctggagtactcctacttgggcaaccatcgccatgcaccgtcgattgttccagcgaagagaacagtcgaccttttcatgtgagttacggagtctaggtcatgtcactaaacaaccggcctggttggttaacctttttctgacccacttt

SEQ ID NO: 41217 - DNA, 281 bp, Zea mays
agaacacattttatgattaacaaatgttcatttttgagaaagacaggatttgtagcgcatgccaagcatggaagcaagttggctctcatcatccgcataagaacataatgacgaccgacaggccactggagatcctgcacatggatctattcggcccgatcgcttacataagcatcggcgggaagaagtactgtcttgttattgtggatgattattctcgcttcacttgggtattctttttacaggaaaaatcttcaacccaagaaaccttatagggattc

SEQ ID NO: 41218 - DNA, 389 bp, Zea mays
aactacattcattggactctatgactctagtagaaggagggagagctcaccggagtggagggagagagcgacgacggggagggaagcggtctatgccatcgggcgttagtgaggtgcgcatcggcgacgataatggcacacaacaccgaggatgagaccgctcggggcatgctgtcatgtgagggtgccaggctcgcaacatagcgcataagggggcgaagcggtgcctaactccattggagcatgagtaatggcgatgatagagagggaggttggcggtcggcatggattgcgccggtgaggtcacgggcggtgagatagggctggcgggcggcgcccatttgccagaggtggaagcgggcactatagagaggggtggcgcatgactg

SEQ ID NO: 41219 - DNA, 453 bp, Zea mays
  unsure (1)..(453): unsure at all n locations
tgtcctgtngtttcactgctttccgccatagctgcgtgcttttctgggtcctcgataacaaactattctgtattggcattcagtgccacactgctatgtgattcggatttcggaccttggtttagcgcgacgcatgagacagcacagcggagagtggcgtggccttggagacgcaggcctcgcctcacctactagtcagtgtttagtcgtgttgtgcttagtggcggacctaggatttttatgtanggtgtgccgtaacaaaattttcatttaaaattgtatctaatgtacatataatttcatagtaaatctgtaaacaatttgatatatagatataacgtttaacactcaacanataaccatgnaaaatgcatatattaaacataaagattgcaataatactacttatatggtatgngctctcttcatttatcctctctctctcttggtctt

SEQ ID NO: 41220 - DNA, 311 bp, Zea mays
ggcacacgcgccacgggcttcgggggaatgtttggagatcacccacaaaaaatctacctgttattctatggcgaagacacgggccataacactatgatgtgccacgttaccatccacaaacagaacgagatagcataagcagcagcacaacaaactcagccgaagcacgtcatgcatactgcttcgcatcattcctcttatattccagaatatgtaggcaaccacccttcacccgctgttgcttcggcaagccacctccaaacatcttggcagcaccctccaccaccacccgcgacgcagcgaggacagca

SEQ ID NO: 41221 - DNA, 291 bp, Zea mays
  unsure (1)..(291): unsure at all n locations
ctggactgaggagtaactatactacccggttgtaggaacccggtctggtcttgacaaacatgggtgcgagttgacatatgcactggataagcgctacctattgtacgcggttgcagatgcccgacttggtattaatccattgatatccactgtacttcttagatatgaagacatggacactacccttctccataactgacaactaatctcaagattttgataaaagaggatatcgcatgactatggattgatccgcgattgataanaactatactctagacactacttaac

SEQ ID NO: 41222 - DNA, 407 bp, Zea mays
  unsure (1)..(407): unsure at all n locations
tgcaagcttcttnttcacctccggtcgcgagcgcgccgtgtttattattgagagccaccgcctctcgggtctttcaattgaggcccccgcttgctctctaacctcatcacgtaccccatcgttcagtatcacccccagttctgccaccgcgagctccaattccaagttctccccaaatcggggttgtgccaccgcacgaacatcctcacctacgccagactaactcatgttatttcaaagctctctgttacttgatctaacattcttggatcctccttaagctcaccggcccacccaacagaattataccgcactaatcttgggaacactataactgtctgcaccattctgtcagcggacaagctttggactatcatttgccaatgagtgagggaaagctcggccac

SEQ ID NO: 41223 - DNA, 424 bp, Zea mays
  unsure (1)..(424): unsure at all n locations
gaacacgtgatangtctaactacatttcaattctaataagatagaccttgtgcagcttgtctagcagggaaacaagtgggaggctctcatcacaccaaaaatgtgatgacgacatcaagacccttggagatgctgcatatggacctttttggaccagtcgcctatctgagcataggagggagtaagtatgggttagttattgttgatgactcttcccgcttcacttgggtgttctttttgcaggaaaagtccgaaacccaagggactctcaaacgcttcctcaggagaagctcaaaatgagttgagctcaaagtgaagaagataatgagcgacaacggatccgagttcaagaaccttcaagtggaggagttctctgagaggaaggatcancacgagttctccgctcctacacaccaaacaaatg

SEQ ID NO: 41224 - DNA, 389 bp, Zea mays
cccttcatccctatctacgggtaaggtccctatccagcgttctatctgtaaagcgctataacaatacaacttgtttgaaatttttgcctagtgaatgcactctaggtgtgtcaaacatatgcaatgccaatgcttatgatgccatgctcaagttttagttacagtaacaccaggggtgttacatttcctatcgaaaattaatgcatgattcttttgattactactagccataggagcctctcctttttccttgttgaaaatgggagctctttggtttgttaagttcttgcgttccctttgaaaaccaagaccatccttaatagagggatgtttaccaatagtgtaggcctcccttacaaatttagtacgcaaattattcttgctagctt

SEQ ID NO: 41225 - DNA, 448 bp, Zea mays
tgtaaagggagaacactatttgggactaacaaatgttcattttgagaaagacaggatttgtagcgcatgtcaggtatggaatcaaagtggtgttcatcatccacacaagaacatcataacgactgacaggccactcgagctcctacacatggatctattcggtccgatagcttacataagcatcagcgagagtaagtactgtctagttatttgggatgattattctcgcttcacttgggtgttctttttgcaggaaaaatctcacactcaagagatcctatagggattcttgagacgggctcaaaatgagttcggcttaaggatcaagaaaattagaagcgacaacgggacggagtttaagaactctcaaattgaaggcttcttgaggaggagggcatcaagcatgagttctcttctccctacacccacaacaaaatggtgtagtgga

SEQ ID NO: 41226 - DNA, 433 bp, Zea mays
  unsure (1)..(433): unsure at all n locations
agcttatcaaaagaaatgtctcgaatcaagaatatttatcttatgcctaagcccggaaaagaatgtttatcaagtggctctggaaagatatctgctaactgatctttattattaaatgaagaaatctcgatatctcccttttgttggtgatccctaagaaaatgataccgaatggctatgtgcttaatgcggctatgctcgacgggattgtcggccattttgattgcactctcattatcacatancaaagggactttgggtaatttgtaaccgtagtctcgcaaggtttgccctcatcaaagcaattgcgcgcaacaatgtcctgcggcaatgtactctgcttcggcggcggaaagagcgaccgaattttgcttctttgaagcccaagacaccaaggatcttcccagaactggcaagtcctgatggctctcct

SEQ ID NO: 41227 - DNA, 363 bp, Zea mays
gttgagactaagatgaacagacgtttggtatgctttctttggactctgatgtacacaagcaaacaataaatctttatcactgtaagttcataatgttctcagtcatttttgcagaaagaggacacttacaaaggaaagtgtcctatgaaatatgtcacttcttgggctaccaagctaggggagcactgccttcaaagtatgattgcggttatgcctacgcaagtccctcaccagttcatttaataaagaatattgattggttgttggtttaacacgtgggttgttggtctcaagttctgtggcatgtgtgctaccacatcgtagctgccagattgaacggatacatggctacagtgacaaatc

SEQ ID NO: 41228 - DNA, 388 bp, Zea mays
  unsure (1)..(388): unsure at all n locations
agcttgaagcccgataagaggccgctttttatattttgtatccgagggccttaggttatcaaagaaaaattacacacagctggagaaggtactgtatgctgtcttgatggcctccaagaagccttcgcactatgttcaagcttaccacataattattctcttcttctacaacctctgaaggatattatgaggaaccgacaaactactgtgaggattggaaaatgggctgcaaagctcaatgaattttgcattgaatatgttcatagatcttcgatcacgtcccggcgttagtagacttcattgctgattggacgccangggctcctgaggaagaaacataaaaagacgctcaagcatggacagcgttttgcgatgggtcttggggaac

SEQ ID NO: 41229 - DNA, 399 bp, Zea mays
tgcctagcaacgcttgagatatgatgagcacagtgcatgcttctatatgggtgtgccgcctgccagcaggatatacaggcatgccacctgccagcgacatggacaggtctcattaaatgctgagacaacacactgcttgccaatggaatggacaggtcgccacctgacagtataatgggcaggcctcattaaatgtcgaggcggcacatcgcttgtcaagcggcgcgccttatccgcaataaacgcaggggccgcgtaacccggaacgtcaggctccgcccgctggcttacgttacacgtaataggccacatggcaccatcaggtctccgcctatgcggtgagcagaagcgtatgcagacaggtccgcaccatactgtgtcctgacacgtgtcagtacc

SEQ ID NO: 41230 - DNA, 345 bp, Zea mays
tcatgtaataacccatctttacattatttttatggatagcttctcataagagatggcatagtagcacaagcactagtttcttttttagcaacccttttatatgtgggaggcaagccagttgctaaaatagagaaacctcataatatggactaaatttccttgaaccctcatgcacaatatattttgaatgacatggataatatgcatggttattcaatgaagcctagagggatgacttacattattttgtgtgtctaatatagaagaatcaaatcctaattaactagatagagaatacgtcacataattttggagtgttcaccatatgataatattcattcaact

SEQ ID NO: 41231 - DNA, 421 bp, Zea mays
ttagagacacctgaggcatgcaagcttgtgccatgtcttgttaaacattttatatattgttcggttacttcaagggtatgcaaaatttaaccgagcaatcctaccatatgattaacttagtatatgtgtgataatcaattgacagtaaataccacattgaaagtataagatactacttaaggaacataataatcaatttaagataacgatggaaaagcctatatcaattgaaacagtactagggtaaaaaaggtaaactatatactttatacttttaagaaagatgcacctatctaaaataagaaatgataaagctagctacctaaacactcgtaacgaatttgggtccataattcttactaacccacttggcaataaacttgatcccttatgatgtaccacatgatatacactccctttt

SEQ ID NO: 41232 - DNA, 360 bp, Zea mays
atgccacacccagcccatgcacagtttaatcattcagcatgcatttacaccggccttttattttgcaaaatccactatgtgaagcttgccgtctagttcacccttaaagctatggaatcatcacatcttctaaagacaaacacatccatatttgtaaacaaacacgtttatcccatacttgcttatttgactaatagatagcaaattatactcatgagactctactaaaaacacattagagatagagtgctcctttgagaatgcaattttacctaacccttttacctttgcctggattccatcaccgaatattattgaaacttgggaacctttgtcttgacgacgaggtgaacatttcct

SEQ ID NO: 41233 - DNA, 332 bp, Zea mays
tttctcgcaactattatgcccattccactactctaggtgcaaaactcatgtttggtgtggttttgcgcaatttcgttgccgcaccgtcacccattccgaaacaggtgtcggggtgcatacaaagcttgagttttcgccaacggaaccatttctttgtttttctcatcgaacatgccaaatccactactttaggtccaaaactcatgtatggggtggttccgccaatttgggtgccgcacgtcacccattcagaaaacgggtgtcgaggtgcatacaaagcacgagttttttccctcccgtaccatttctttattgttacataaaacatgccc

SEQ ID NO: 41234 - DNA, 439 bp, Zea mays
cctgcagctgcagcttagcttcaaggcaccagctgttgagagcacaatagctaccgaagctgcaccttcggaagctacagccgccgaagctgccacggccaaagatgtagatttagaacacacaatttctaatattgataagatacttctagacatggccgcagaagaagctgccgcagccactgaagaagctatggccccagagcctgataaggagaaggaaatagccgaagacactttgaaagaagaaattttcaactttcaaaacttagttggacaggagtcgacgaaggctgagaaagaagagttaaaagaatatgccatatcttgcggatatcaaccgggggcactagtcttcggtggcgttgacgatgaaaagttaggctgtgtccgagatcaaaccggagcgaaggttattggtactctatcaaagagtatt

SEQ ID NO: 41235 - DNA, 476 bp, Zea mays
  unsure (1)..(476): unsure at all n locations
tctaaagggagaacacgtgataggtttaactaatgttaccttcataaaagatagaccttgtgcagcttgtcaagcatgtaaacaagtgggaggagcgcatcacagcaagaatgtgatgaccacatcaagacccctggagctgctacatatagacctcttcggacccgtcgcctatctaagcataggaggaagtaagtatggtttagttattggtgatgactnttcccgcttcacttgggtgttctttntgcaggataagtctgaaacccaaggaaccctcaagcgcttcctaaggagagctcaaaatgagtttgagctcaaggtgaaaaagataaggagcgacaatgggtccgagttcaagaaccttcaagtggaggagtaccttgaggaggaanggatcaagcacgagttctccgctccctacacaccatagcaaaatggtgtggtagagaggaagaacaggacgcttatagaca

SEQ ID NO: 41236 - DNA, 397 bp, Zea mays
  unsure (1)..(397): unsure at all n locations
ctgcagctgccatactgtcaagcacaacatctattttacagcnaatgcagaccataccggtgacttggccctttgcatgcctggggctagatatgattggacctttcaagaaagctcaccgaggatacactcatgtactggtagcaatcgacaaattcactaaatggatagagttcaaacccattgcttctttaacctcagctaaagcccgggaattcatacaagacataatattcaaatttggaataccgaacagtatcataaccgacttgtggtccaacttcacaagttcagagttcttcgatttctgcgagcaaaaaagcattcacgtcaagtatgcttccgtagcacacccgagagccaacaggcaggttgaacgagctaacgggatgatagt

SEQ ID NO: 41237 - DNA, 413 bp, Zea mays
  unsure (1)..(413): unsure at all n locations
gcctgggagtctcatacgccaaaatatacgaaacgactcaatcctatctacaggtgcatatatttgaccgacacccataccttctactcgagagtatccgttggacgcaacacatgctatgattcttgtcaccacaccatgctcatcttgctgtgtgcggaagaaccacactgantctacaacatattggactagacgtgacatcaaatgttatacctcacatctacacaaaatgttgatctcctcttgcatcgacaccacccagacctaatattgatacgcttgctctaccatgagaggctcaatagaggaaacaaaatagtgatgttcaactaaatgttccacaccagatctagaggatacccgcttacgaacgtctgctaggatggtatcaacggtagagatctccctga

SEQ ID NO: 41238 - DNA, 430 bp, Zea mays
ctatccttaatgccagggtgtctcccattataaagcatactgcgagcaatttctatattttcatctttttcatgctcggcaattctaacatttaatttagttatgtgatcactttggtctttaatcatagcaaggtgatcattcatagcatcaatattaacatctctacatctagtgcaaatagtgacgtgctcaatagtaaatgtagaaatattgcaagcactcaattctttaatcttaacaattaaactaacattttgagttataagacaagaaattgaatcattgcaaatagtaagctctctagacaggttatcacaatttctacttcaagagcataggcatccttgagctaaaaaatttctcattctccttaacaagcaagtcctcttggctttccaatagtcattcttcttgttaatggtttcta

SEQ ID NO: 41239 - DNA, 380 bp, Zea mays
  unsure (1)..(380): unsure at all n locations
atctacgaacccaaaagtcctttgtgttagcactaaggtaactcattaactttctaacacaagttgcaattttgggttgcctaattacatgagaaataattgacaagctacgagtggaaattgtaccaatgggacaattcttgcattgatgtcccttcatttcacatgtgtagcataggccgttttcaagatttgaagtttttcttttttcttgtatggtgcctgctacatggttagtaagaactttcttntttaaccctatgcctttttgttttaaatggggacaagatctaagcaagtgttcctttctggagcatctaaaacaagtctatcatccttgttgatatcaagccatctttaatgtacggacatgacctaat

SEQ ID NO: 41240 - DNA, 382 bp, Zea mays
atacgccaatgatattcgaattgtctcaaacctaacaaccggtgcatattgtttaccgaaacccaaacctacgacttggagagtataccttggacacaaatcgagctctgatccttgtaaaacaccatgctcatcttagttgttgcggaagacccatctggttcctacaacactctgattatgacgtgaaactaaatgccataccacatccatagcgaagatgtcgagctactcttgcatagccaccacccaatccgaatcgtgtagcgcttcctctaccctgtgtggctcaataaagaacacataagaataatgctcacaaaaatgtgcaacacgagatctaacagctacccgcttatgaataccgccgacgatggagtct

SEQ ID NO: 41241 - DNA, 410 bp, Zea mays
  unsure (1)..(410): unsure at all n locations
agcctatgaagattcttcaacccatcttgttgttttctgtggtgccatacccaacccatgttagtcttagcaataaagcaagcgtcgagttcagctctatcaaaatctaccaagtatagcagacgctctaacactcccttaaatgctattgaatcattacttcttctaaagacactaacacctacatcacgtaatagacaggtgtatcccatttgacataattgataaaccgaaagcaaattgtaatctaaagagtctacagacaaacattggaaatggaatggtaggtgaaatatcaattctacccaatcctcngaccaaaaccttggtttcatccccgaatgtgatagctcgctggggatctttggttttctcataagaggagaacaacttcttctccccttcatgtg

SEQ ID NO: 41242 - DNA, 376 bp, Zea mays
cttgctcactaatgaattctaatatatagtggaagtctacttattaatctattatctatgctataggccaattattgtatgcatatgtatatatccctacgatatattctcacttataacatttgaagaactcctccggccttcctatgtcgtaaacctgactccgccccttcctgaaacccaatcaattcacctctaatcgaacaaactctaaatgagacggttgttcaactgtcgttgttgtagaacgtggttgtctgatcacctgactactcgcctctggcgaactgtcattccaaaaaattatggcattataacaaattagcactccaatatgaccaactgcttaagaatgcaaatatattcgtcgacacta

SEQ ID NO: 41243 - DNA, 413 bp, Zea mays
actacacaatactcaagcttatgttgagagacaacatactctcggaacacaagtcaattgactagagagttgatcactactatagatcactacattggagtctcttcctaaaggtgttggctatgaacaggtcataagctaccgcaaagtccaatagttactcttccttctgattcctactaccatacccaatacctacatgaaccacctggaaacctgcacttgtacctacatgcccattgaggtctcctatgaaaagcttctcactaataagttcgtctctaaccatgcatctaagtcatcgtagaaaaatcgtttaggctgtctccagcacgagacgctaaagcatccgctaccctatatatagtggttatcgtcatccgctaccgccccagcaagacacggtaaacgat

SEQ ID NO: 41244 - DNA, 301 bp, Zea mays
agctgcactggccatgtagggacaatttcaaccgcaagaaaacagcaagaaggccccaccacgaccacaaaaaggacaaccgctcacggcgagggcgccctacttcgaaaaaagctgagggctctttcaataaccgacggcaggctgcatgatgggccacgtatggaatgggattttaccaaaacacaatacttgccatcagcgccatgatccgacgcacacggggcggcctcaacaaatcacctcgaagtggacgcccgtatcactgaagcagaccatcgatgtaacgcgggtaactcac

SEQ ID NO: 41245 - DNA, 298 bp, Zea mays
  unsure (1)..(298): unsure at all n locations
gcagcttggagatttattgccactgttttcttgggctcanggtgaanaagcgaataaagatgccgaagcatggacagtgttttgtgatggctcctgcggaaccttctgagcaggagcagctgctgttttggtttcaccgtctaaggttaaaacttgctacgcagcaagactggatttcagctgcacaaataatattgctgagtacgaaaccttgctcctgggtcttccgaaactaaaagcgatggggatcaggagggcgatccttaaaactgattctcagattgtttcgggtcatatt

SEQ ID NO: 41246 - DNA, 258 bp, Zea mays
ctaaaagaatgacgggagaactctcgaatctcgcggattcgaactcctttaagtacctcataactagggtgttatcggcgccttccttgttgttgctgcctgatcccgcctccagacatatgaacgacacaaggttgaatctgggaagaaccctacttcccatctctctcttcactatctttcttttcactatttaccggccctctctttctctcttgctccttccacttgaggatcctatcaaagagcattaccatc

SEQ ID NO: 41247 - DNA, 436 bp, Zea mays
  unsure (1)..(436): unsure at all n locations
agcttatagttcattntgaattattgaatcactcaccttatgaaaggctattagctggctctgtccagctattgtagcttataaaaaaggtttagttgatctaaacagggtctaaacccttgcctatgtgctctcatatctagcatttacatccaccagacttcatcctttatccagtgcagtgattgggttcaatgtcttcttgggatcacagagactgagcagacagngtctctattattgtgctttctgtcatgttttagatgtatacaatcttatttgaagttgttagagtggacgtactaactagttcaacccaaaagctcaaactgttaggagaaggtatgcaattcacttatacacttcaacacccacactcacgtgtagccagagagaggcgtaaacgtagaaataaaggggtggaggcacaaatgaa

SEQ ID NO: 41248 - DNA, 452 bp, Zea mays
  unsure (1)..(452): unsure at all n locations
tgtgaagattcttcatcccaacatgtgctagtcgtcgatgccagagccagcccatgttagtcttagcaattaagcaagtgtcgagttcagctctatcaaaatctaccaagtatagctgaccctctaacattcccttaaatgctattgaatcatcacttcttctaaagacagtgacacctatatcagtgaatagacagttgtagcccatttgacataattgagatacagaaagcaagttgtaatctaaagaatctacaagaaaaacattggaaatggtatggtcaggtgatatagcaattttacccaatcctttgaccaaaccttgatttccatccccgaatgtgatcgctctttggggatcttggtttttctcatatgaggagaacatcnttcttctccctgtcatgtggntggtgcacccgctggcgagtatccaactttgagccccggat

SEQ ID NO: 41249 - DNA, 435 bp, Zea mays
  unsure (1)..(435): unsure at all n locations
atcacaactaaataaccatctattatttttttgttgattttggcacagaagcttgttattactgttagatgccaacaaaaataacccttaggacagaacccacccctagttaagagttgtagtacaaagtggcccatttacacaacttttgttatttttgtctaaagcaaagcctttttattttgaacctcatattcctagaacaggctttagtgacccatggaaacccacttgtaatnttacagaatttttggaaaaggttaaaccactgttgtagttcaaacccacactagaattcataattagaaaatgaaaaaggggaaattgataatagacacttgtgtcaactagcccaactagtaaaactcttctttaattgcccactgaaatatgtaaagggaaaaatacaaatatactatgcttatccttaccaaa

SEQ ID NO: 41250 - DNA, 450 bp, Zea mays
taaccttgtaacgaggataagctgcctttgttcaggaggtggatggttcttaagcctccttgaaatccttaagggtgaatgcttgagatatttataacatgctttcaaaagtgcatcaattgtcatgagcatttgagcatcacacctatactatgacacaatgcacttctatagatatgatctcattaacctaagtatgtgcacttggcatttaagaccaaaaatttgttttcctctctatgcacatatttagggggagcaatctatattgtatagaattgattgagcttaattgacatatctttttaatcatgtctctttcctttggtacatttgcatatttcttatctttcattgtgtgccaaggctaagactaatatgttttcatgagcatctcatgtattaagtcttagattgaaagggaaatggagtattcggcaaagacatcgc

SEQ ID NO: 41251 - DNA, 452 bp, Zea mays
  unsure (1)..(452): unsure at all n locations
caagtcaccgcagctgcagcttgctcanaaacattgcttcgtcatantattatatgaaactaacaggaattctaccttgaaatttgaatataacagactgccgacgatatgttgtcgcaggtagtcgctaatgtccgcttcaagccttggaaatccgacactcttcgaaagagtgccgattatctttgcctcggcgcggtctcgaatacatcctagggccccttcatcgatttcaccaaagagcatggctcctgactggtagccacaggaaataccatattcctgtagcttcttcttttcagcctcggataattcttgaccgaccaggtttcgaaggtcgaagtccatttcctccgacgcggcatcggcaatcttcttccctttgccaggcactgtggccatggccctctctgtagccgcagctgtttcttccgcagccatacccaatagta

SEQ ID NO: 41252 - DNA, 438 bp, Zea mays
  unsure (1)..(438): unsure at all n locations
tctnagggagatcattcgttaggactaatcaatgtctgttttgagaaatacagaccttgcgcagcatgtcaagcagggaaacatgtgggaagcactcatcatagcaaaaatgtgatgacgacatcaagaccactggaacttcttcacatggatctcttcggacccgttgcctacctcagcatcgggggaagtaagtatggtcttgcaatagctgatgatttttcttgcttcacttgggtattctttttacaggacaaatccgaaacccaaggaaccctaaagagcttcttaaggagagctcaaaatgaatttgagctaaaggcgaagaagataagaagcaacaatgggtctaagttcaagattttgcaagttgaagagtatcttgaggaggaaggcatcaagcacgagttctccacttcctacacaccatagcaaaac

SEQ ID NO: 41253 - DNA, 378 bp, Zea mays
  unsure (1)..(378): unsure at all n locations
agcttcttcggacggtccgaagactggtggcggacgattcttctacactcaggacccgcaacagtcacgtgcattctaaccacgacgaccagagataggtacgtggaaaaacaaatacatttaaagcagctggtcggctggtcaaatccggctcgactttcgatcaattgttgtccaaatatgtgaaaaagaatgctggtccattgaccggccagcaaagcgaccccgctcacccattcatgagcaacgtcaggtcatgccgattgaccaccccaccaattggaagaaatgaaaggtcatactgtacaagtgagacctaacatacctacatggacacctncacccacttatccgcctatgccatattgaaagggaaat

SEQ ID NO: 41254 - DNA, 426 bp, Zea mays
  unsure (1)..(426): unsure at all n locations
tgtggagattcctcgcaaacgggaataatcatctaaaggataaactgttgtattcaagtngatcatcggatcacttgaaaggggttgagagcaaccctcgtccattgggacgccacaacgtggaagtatgcaagtgttacttggtcgaaccacgggataaaaatcacgtgtcttgtgttgatctctctgtgattatttgtagtcacaagaactcgcttcaagttatttagccgcactaacactcttaactaagttttgtggctattagtgtttgaattttacaggatcacctattcacacccccncctctaggtgctctcacgttcatctaatggctttgtgaaaatattcggaattgatcatcatccttactcttctatgaatatctctttaactcatggctctaaaaaatggctgggatgtaat

SEQ ID NO: 41255 - DNA, 395 bp, Zea mays
agcttcctagaggccattaacacagaagacaatatcttgtccaattctgaataaattttccttgagcaacttagaacttcggagaccaagtacgctggagcctgctttctgaattggccatctaacttctcttgtacaagagccgcactaactgcacagtgcgaagctgccacatataatagtaatggaacccctggcgaacgtggagttagtgttggttgatcgatcaagtattgcttgaactcttcgaaagctttttgctgagccggaccccactgaaaaacttccgttgacttcagtatttcaaagaatggcagaattctttctgctgatcaggatatgaatctgttcaatgatgttagtcttactgtcagccgttgggctacctctttgtg

SEQ ID NO: 41256 - DNA, 352 bp, Zea mays
tcggctgtcatatactgtgagcagacctaactatgactgctatatttatctaggtacataagtctacgtgccatgtgtgtgttgaatcaaaacatcctcacaagcctcacaacgctactgcggcgaggaaatcggcacctctccaacatatggattctgatctatgcgagacatatggtattatgatcgaaggaggtgaaagatactgtcgcacttttatacacgactccactagattttgctatgcgtgtctcttataaacccaacaggacgcgttcatttattttaagagctatatagctgaagccgagaaccaccgtgagaggaaaattggtaccgttaaggtccgatc

SEQ ID NO: 41257 - DNA, 438 bp, Zea mays
tcagctccatctatgttacggattgcttctgagttaatctattttccttccgcccttctggcggcttgctgactttcatgaatagcgatgggtccttgatctgaaggtatcttcatgcaaagataagcacgatgaagaattgcttctaaagcattgagggtgccacgaccaataattgcattgcaagggtattccatgtcaacaatgtcaaacacaacttgctcagttctagtgttgctgatgaacccgaaggtcactgacatggtgatcttgcccagtgctacaatctgtcttcctccgaagccacagagaggatgtgtagcatcatgaatcttatcttctggctcttgcatttgtctgaaggccttatcaaatatgatatcagctgcactgcctgtgtcaaccaagacattgtggaccacaaatcctttgataaca

SEQ ID NO: 41258 - DNA, 450 bp, Zea mays
  unsure (1)..(450): unsure at all n locations
tccaaggcacaacccanagctgaaatgaagcatgcagatgttttagctgcaacaattcaggctaaaaccgaagctgggccttcagtgcccaccgaaacagagtctgccgtagttgaagaaaaggcgacatagcaaattgcgtctgaaaaggttgaaactcctgctcccgaagcttcaaaagaaagcactgattacatcattcgtcatgcttcgggaaagggactttctcaagaagaaaagctagaagcacgacactatgcccaaaaattgaaatacccgaagagggcattagtgtttaatggcagtggggaagaagattttttgtactgtctctcggataataaagaaatatctgtttgctgggagataggtagaagcatcggattcccgaagctggaagatggcctttcaatcttatcgaaggatgagcttgctgacagcttagcgtat

SEQ ID NO: 41259 - DNA, 382 bp, Zea mays
agcttgagcttcatatatagtacggattgtttttgttttcaaccaggttccctcaggccttctggcggctttctgacttccatgaatagcaatgggcccttgatctccaggtatcttcatgcaaagataagcaggatgaaaaattgcttctaacgcattgaaggtgccacgacctataattgcattgttagggtattccatgtcaacaatgtcctacacaacttgctcagtcttggcgatgccgatgaatccgaacgtcactggcatggtgatcttggccagagctacaatctgcctttcttcgaacccacagacagggtgtgtaccatcatgaatcttatcatctggctcttgcatttgcctgaacgcctcttcaaatata

SEQ ID NO: 41260 - DNA, 450 bp, Zea mays
tgagcatctaactgtgtactgtagacgacagttatagcctttatactccgaagccacaaacgatgtgttgccagaagaattgttggacagtgaccgaagttattgcggctaaaagcttcgcctcaatccacttggaaaaatactctaccgtcaccacaacatattttagatttccttgtgctgagggaagtgggcctagcaaatcgaggccccacctttgcaacggccaaatgggctgtatcaactcagtgagagatgacggatgcttccggtttcttgcacattattgatagccttcacattattggactagttgtggtgcatacgatactgccttcgcccactaaaatccttgtcgaaaaacttttcccaacaagggcctatatccaatgtgagatccacacagacctgcatgtatctctttcattaattccataccttcagttcttg

SEQ ID NO: 41261 - DNA, 433 bp, Zea mays
  unsure (1)..(433): unsure at all n locations
ntaatganatcgaggatgtggcactcgacggtggctcgtttgtttccatcactctcctggtctcgcggaactttgtcagctagaggatcttcaggtacaactgcctcttgcatctcttgcggtgtactggttacgtcttgtctagagtgactacaggtcagaggatttgcttgtgtggtgcttcgatcatcctccatccttgcatctccatgtacaacatcattcagcatccaaatcaattcttcatcttcatccttttcttatagcctcacttcaccaatggctagcttcttaataccttcacagggtggcacttcattttctatcaactcattagcaacattcccttgcgagccgttaaattcatcgaatgtcacatctatcacaatcgcaacaataccagtggtattactgaagacaggatatcgtgagc

SEQ ID NO: 41262 - DNA, 448 bp, Zea mays
  unsure (1)..(448): unsure at all n locations
ntatctntgatgcagcggaatcctttgctgctcatgatttatatggatgatttaaaggcgtcgaatgttggttagtgagcttatagtttctctagctgctttagctgatcaacttatctttaatcacacattccctttcagctgcattatcagatatggctcaacaattctctgaccttgaggtgaagtattctcagaatcaggccaacttcgctcaaacttctgcctttctggatagtgcccgctctctaaactcttctctgaatgcccagcttgattctgaaaagatggcacatgaggtaaacttccctggctgaccctgctctgttattattgcttctgtgctgaatggcgttttctgtttgtaggaggagaaacgagcacttgntgcctctcacgacaatcttgacaggctgtaccgtgatgccagcaactccttgaccatcct

SEQ ID NO: 41263 - DNA, 416 bp, Zea mays
  unsure (1)..(416): unsure at all n locations
ttagggaggaacttgacggcggncatggctgagaatgtatttctatcaacatgagcgcaccagccacggtgagcacaggctgcgcccgactggattttatcctcgagctaaagcagcacagcgtgggaaaagaagggatcatgggaggctgggcaccgcgtgctgggaaataagcaccacgcgcccaaaagatcaacagaacggtggcaggaaaatcagagcacaggcagctggatcttcttctatcagcagcggtgacagattatttttttatgaagaacctatgagacggcgatgggcgttggggctggaatatgaacagcagtcggcggcggcatacaacagaacattgagtgctcacaggataacgaataaacccaccttcgtgctgtacttgaggacgtattatttttata

SEQ ID NO: 41264 - DNA, 425 bp, Zea mays
agcttcggctatggttagaaattctggcagcataacagtgcaatagcaatgaatgctgtggtaacttcacacctacccgtctgtttatatagtactgcaggtaagaaagtgaatcgtcaggatttttacaccaggcaaacagctggtcacacccgctgcgcggtgggccacagagaccaaatattaaacctgcagggtgggaccgctacgtgctcggaaactgtatcgtttctcgacaacgagctcagggaaggtgtttttcggaccttcggcttcctgaagcctaagagacttttttttcacggatcaagctcattacgaaaaacgatctaccaccgcgaaggggctactgttgggaccatgcttcgtcgccgaaggtcctgcagaaagagacagctttcgctgaagctgctcgtacgtgacgc

SEQ ID NO: 41265 - DNA, 446 bp, Zea mays
  unsure (1)..(446): unsure at all n locations
tgagaaatatttagacacggtccgaaggattgaggctttcttngtaaggttttgttttaaaaatattcctcgaggagaaaatgaatatgctgatttattagccaagtcagcagcacattggctgcccttaccttcggaagtatttttcgaaacaataaaagcaccttcggtggaacttcttgagagagcagtcctcaacatatctcctgtctatagtgaagactggagaactgagatcatctctctccttcagggtaactttctttcagatgacgaagcttataacaggaggatagaggcaagagctcgaccatatgttataatagaaggggagttgtacaagcatggattctgtgctccattactcaagtgtntatccagagccgaaggtatagaattgatgaaggaaatacacgcacgccctgtgtggatctcacattggatct

SEQ ID NO: 41266 - DNA, 441 bp, Zea mays
agcttgacagatactgattaagctgatgcaaaaagctctatattatttgtgcatcaaccatgttaaagatatcgttatataagaatcacacactgctctgtcaatttatgcataccttgcaatatattattacatatccatccgtgtatgaactgctttgatgtggatgaaacttgtattttttgagccgcatgcaaataacaccttccattctttacatacacaacaaagtataactatgcttattttatactcatctaaaccttgacatctacaaccgaagcaactatttgtactttatgatataatgaagatgatcctacgaatgtctaaatgaatgtgtatcaatgcaatgaatgatgtgatgtaatgtgtaaatgaatgagcaaacgcactcttaagacgcccacccagactctgtatccccttaagaacgaatgt

SEQ ID NO: 41267 - DNA, 368 bp, Zea mays
catactgtcctgcacagaagtctggagagatccttgcaagataagtatggcaagaactgatgtgaatctatacatacctcgtcatatatcttgtctcctttatacgagcacaaactgatttgctgtgatccacactacactattgagcccgaggggataaacaccttcccttgttttcgtgcactgcgaaacatgagaagttgcctctttcttcaaagcttgtgctcattgccgaagcgactatctttattgcgtgaaaagatgatgaggattctatatatggcctcatgactgtttatgattgcagatgacatgatgtacatgctcctgcagatgagtatctgagcacatattcatagaccgttttc

SEQ ID NO: 41268 - DNA, 350 bp, Zea mays
atgctggggattggatatgattgaacccttcagaaagctcaaggaggatacacccatgtattggtggcaattgacaaattcactaaatggatagagtttcagcccattgcctctttaacctctgctaaagcccgggaattcatacaaagcataatattcagattctggataccaaacagtatcatcactgacttgggatccaacttcaccagttcacaattctttgacttctgcgagcaaaagagcattcagatcaagtacgcatctgtagcccatccgagagccaacgggcaggtcgagcgagccaacggaatgatattggaggcactcatgaaaagggtctttgataa

SEQ ID NO: 41269 - DNA, 464 bp, Zea mays
gaaactaacctcgacctcggcgacggcctcggtcgccatgggcacgccgtgcgcgcgtattacgcgcacgtagaggtactccacctgctccaccaggtcgaaggtcgcagctcgccttgtcggcgacgacgccgctgccgaggcggggccgcgtctccttcagcgagaagtccgcatggccggagaacatgggcgggacggggtaagggtccgcgtgcatcgccaccggcttcatagccatcgggaccggcgggtgcggcatgacatccatgggcggctccggcggcggctgcacggccgccagaggatggcgctggtgctgctgctgcggcggcggagggtgtgggtgcgagtgccgctgcttcttgtgcccagtcaccgtcggggccgacaccaccttcggcccaaccaccaccagcttcgacggcttcttctgcttggacttgacgacgacgtcgccggag

SEQ ID NO: 41270 - DNA, 476 bp, Zea mays
  unsure (1)..(476): unsure at all n locations
cactatccaanactcaagcttngtcatctganaggaaatngccctggagataagacatgatcttatttctctaatcttcgctataaacaggagatatattgagcactactctttcaagaaggtcaaccgaatgtgcttttattgttttaaagaaaacttccgaaggtaatggcagtccctgtgccgctgacttggctagtagatcagcgtgttcattttctnctcatggaatattcttgacagaaaacccttcgaaggaggcttcaagtcttcgaactgtatccaaatatttttcaagcttcgaatctcttgctttgcaacttttgtcaacatggccagaaataacttgggaatcacgtttgagaaccgcccttcttatccccattgctttcaacttccgaagacccaaaagcaaagcttcgtattcagcaatattatttatacaactaacatcaagtttcattgcgtagcatggt

SEQ ID NO: 41271 - DNA, 434 bp, Zea mays
agctttggaaaattcccataaaataaccattaggtatctttggctaaaatttggcatatggtcataatattatacctaggtaccagcaaaaataacccttaagataaaacccactcctagaagagagttgtagttcaaagcaccccctctgcctaaatttaatatttttgtttagagaaaaccattctcattttaagcctcaatttttgagactgtgttatacaaaccagtgaggagccactgtaatttctacataatttttgaaaatttctaaatcagtgttgtagttcaaagccactctaaaagcccaagtaagaaaagggaagaagggcttaacgaagtactaaatcaagtcataaataactttagccaagaaccttatttaatcttcaataatacattgaagaattgttgagtacaaccttaagccaact

SEQ ID NO: 41272 - DNA, 457 bp, Zea mays
tcagttccatctatattatggattggctttgagtctgtccaatatccttcggcccttctggcggcttcctgacttccatgaatagcaatgggcccttgatccgaaggtatcttcatgcaaagataagctggatgaagaattgcttcgaaggcattaagagtaccacgaccaatgattgcattgtaagggtattccatgtcaacaatgtcaaacacaacttgttcagtcctcgtgttgtttataaatccgaaggttactggcattgagattttgccgagtgctacaatctgccttcctccgaagccgcaaaggggatgtgtggcatcaagaattttatcttcgggctcttgcatctgtctgaaggccttatcaaatatgatatcagctgcactgcctgtatcaaccaaaacattgtggaccagaaatcctttgataacacaagagatgaccatagcat

SEQ ID NO: 41273 - DNA, 306 bp, Zea mays
tgcaactttgacatatcttacgaccgggcgattttgcccttcccagagtccagggttgcaccatttcgagaaaatggtgtgacatgtaaagcgccacccagcataaccggctttacataacacgctaagagccttcgccgaactacttgaaggaggaaacctattcgatgttggaggaatgcggcgcgaatagccccaaccttacaaaaatggaaagaattatgatcccagaaaacttacgatcgaaaggccctaacgtgcaacgatagattatacgatttacttcgtgcttatttcggcttgata

SEQ ID NO: 41274 - DNA, 441 bp, Zea mays
taatgtccctcctaaaagattgtcaaactttgttaagggcatggctctcatgcctcaagataacgagggttatattttgtatcctgctggttatcttgaggataagattaggaggattcatgcaaagaagactcattctcatcacgcttttatttacaagaatgaggtttctagctctaggcgttctacacatgttaaaatgcctaagaagaaaactcttattacataaaatgaaccaaacatttcatttaagacttttgatgcatcctatctgctaactaacaaatcaggcaaagtagttgccaaatatgttaggggcaaacacaaggggtcaaagacttgtgtttgggtacccaacgtgcttgtttctaatatgaaaggacccaagaccgtttgggtacctaagaacaagacctaaatttgttttgtaggtttatgcat

SEQ ID NO: 41275 - DNA, 369 bp, Zea mays
gctaaggaaactcaataactcatgcctaaagcaatgccttctccatacccataatgtatataaaaaattcgaactatgtcatagatgtgttattaaacagaaaattaacaaatttcacctggaagacaagcattgtcatcaatttacctgctttggaaaaggcaatgaacctaaccaaaggcctaatattggagtaatgtctagggggaaacttccattctatcgatctaatgtccacaagatttttttcctcaaaacaaatcatacgatattcttttgaaaacataaacaacaattattacttcctttcacagtgaacacaactgaaattgctatgatgcctattttaacttgtcgtacattgaagct

SEQ ID NO: 41276 - DNA, 451 bp, Zea mays
  unsure (1)..(451): unsure at all n locations
tcggcgatatcatgtgtagattaaggtaatcatttttattctttntntctatggcacccttttccttttcaaaaggggagaaaggtttttaatggggccatagcatgtaattcttctttctcttatttcagttctactagagcaatatccnccaaaaatgtaaatgtaaaagatgagcatgcaccatcgagtgcaaagagaaaagaaaaaacagggagaagctcgaaaaacgtccctaaggggatgcatagcatgacgaagctacaaaaaagccgctcctaacggagcgcagcgtaagttttctgctcaaaagtcgttccaaagggaatgcagagcttacagcgaaaagtcaacgctgattccaccgaagtataatgcgaagcacgaaaagtccacgcgataccgtcaaagtaaaatgcgaagaaattcaaaagacgttcctaanggaatg

SEQ ID NO: 41277 - DNA, 443 bp, Zea mays
  unsure (1)..(443): unsure at all n locations
agcttctaaagggagaacacgtgataggtttgactaacgttcaattcgaanaagatagaccttgtgcagcttgtcaagcaggtaaacaagtgggaggagcacatcacagcaagaatgtgatgaccatttcaagacctctggagctgctgcatatggacctcttcggacccgtcgcctatctgagcataggaggaagtaagtatggtctagttattgttgatgacttttcccgcttcacttgggtattctttttgcaggataagtctgaaacccaaggggccctcaagcgctctctcaggagagctcaaaatgagtttgagctcaaggtgaagaagataaggagcgacaacgggtccgagttcaagaaccttcaagtggaggaattccttgaggaggaaggaatcaagcacgaattctccgcttcctacacacctcagcaaaat

SEQ ID NO: 41278 - DNA, 448 bp, Zea mays
tctaaaggaagaacatgtgttaggactaaccgatgtctattttgagaaagacggaccttgtacagcatgccgacagaaaaacaggtgagaaccactcatcaaagcaagaacgtgatgacaagacatcaaaaccactagagctcctacatatggatctcttcgggcccattgcttatcttagcatcgggggaagtaagtatggtcttgtaattgttgatgatttttcatgcttgacttgggtgttctttttgcaggataaatctgaaacccaaggaacattaaagcgcttcctaaggagagctcaaaatgagtttgagctaaaggtgaaaaagataagaagcgataatagatctgagttcaagaatcttcaagtagaagagtatcttgaggaggaagcatcaagcatgagttctctgctccttacacactgcagcaaaatggtgtagta

SEQ ID NO: 41279 - DNA, 386 bp, Zea mays
agctttgtgtggagttggaagaagatttgatctctcttgtgtgccctgcattgaatgctagagctcttgtaaatagttggagggtggaaacttggatgacttgaatgtggggtggatgagagtttcatatccccaccccctctctcccatcatttagtctttttctttctctattcccctctacattctacccccttctcccactcttatttctccacccctttatccctcgatttctccaccactttattatttcctccatctccttcctcattccatcattctcacccccatccactcaacttatcactcccctctactctctcccctccctatttctctcacccctaccctctcatctttcacatcccttccgcttcttcttc

SEQ ID NO: 41280 - DNA, 452 bp, Zea mays
tcagcgacaggggctggtactttacagccgctggatccttataggacgtcctttctcttagagaggcccgaagccagaagaggaaagttgttagtccaacacctccggaggatgacttggatcaagaaatccaaaatctggagatccttcaacaacaggtgcagcgcaagaaggagaagatggctcgtctagccgatcttcagagacagatagacgaagcttctgaagaggttcgccatcttgttcaagatgatcagagccgaaggactccacgcagagagctccatcaggaaggcttccacaatgaggacgactggtatgaagatttccatcatggaaactttgcttttgatgatgcttctcccctctcaacagaattgcaggctacaccatggccccagtcttacaagccaccccagttactcatgtatgaaggtcatacagacccgaag

SEQ ID NO: 41281 - DNA, 428 bp, Zea mays
  unsure (1)..(428): unsure at all n locations
agcttggggatgctaaaaaatcatctattgtgcatgaagttgngggggtcaccgaggatgttggagtcatttgtgacttacttgatagtcctacaagtgaaccactacctactaaccctatttgtgataaatgcaaaacttctctcatgaatgataatattgctcttgatgaatcaaaaatcaatgttgagaatgaagtgttagtagatagagtaaatgctctaactcatgacctataaaaggcatatggtggaaaggctaaattggacttcatattgggaagtcaacggtgctcacttaaccgtgagggtcttggatatgttcccaagaaagaaaagaatgcttttataaagcaaaagacattgtttgtgaaagaatgtgacaaagtgtgtcataagtgtcacaagaagggacatgttaagaaaaat

SEQ ID NO: 41282 - DNA, 450 bp, Zea mays
  unsure (1)..(450): unsure at all n locations
tctaaagggagagcacattntaggattaacatatgtttattttgagaaagataggatttgtagcgcatgccaagcagggaagcaagttggtgttcatcatccgcataagaacatcatgacgactgacaggccactggagctcctacacatggacctattcggctcgatagcttacataagcattggcgggagtaagtactgtctagttattgtggatgattattctcgcttcacttgggtattctttttgcaggaaaaatctcatacccaagagaccttaaagggattcttgagatgggctcaaaatgagttcggcttaaggatcaaaaagattagaagcgacaacgggacggagttcaagaactctcaaattgaaggcttccttgaggaggagggcatcaagcatgagttctcttctccttacaccccacaacaaaatggtgtagtgga

SEQ ID NO: 41283 - DNA, 408 bp, Zea mays
agcttctcaagtggggattcaatagggacttctgtaattcagaattctgaatttcagcccttgagctaaagaccaggcgtgttcaccttgatccctagctcaaatcctaatgaccccattaacaaaaacgtgtctaactaacccctctgtcacatgccagaaaatggcattgggacgcgagccctagacacgacaaaacactagatttgcctcgggttcgacagagagacagaccggatttcagggctccaaatctctaaaaccagtaggcaaaatcctatgacccccacacaagatcggtatattatagggaggagaagagggtttgtgcactgaccaaggcaagagcaggctcggatgaatgaccacacgtgctagaacttgggcagaacgaacgtgcacacgtgt

SEQ ID NO: 41284 - DNA, 418 bp, Zea mays
  unsure (1)..(418): unsure at all n locations
tgaggctgactcgccgaagcaacagaaactgcaggatgattgcccacatattctggaatatagggcgaatgatacgaagctgtatgcatgacctgcttcngctgagcttgttgtgctgctgcttcagctatttccttttgcttctgaatagtaacatggcacatcctggtagtatggcctttgttctcaccgcacaataagcaaaagattcttctcggttgatcgccaaatcttcctccaaagcccctggcgcctctgcctcttggagctggtggtctgaaggagctttgctgttgccccgaagcctgtgaggaacattgtggcctttgctgttggcttcctctatcatcatattgtgtagagttatgaattgatctcacgtgcctcgggtagaacactcctccgaagcccctggtca

SEQ ID NO: 41285 - DNA, 428 bp, Zea mays
  unsure (1)..(428): unsure at all n locations
agctttnggcagagcaaaatgaaaagataaagattgttgttctaaaaaatgctcctgacaatcatcagatggtggctccatgtattcaaaaggatatcgctaattgcttttcaaaggtaagattggttttccttttttacatgtgaactttcaactctctatgcagtntttgaattttataataatccataatgtgttatttgcagatcatagtgagttctattattgaagaaatcggtggtgatgtattttgcttgttggttgatgaatcggctgatgtttctgataaggaacaaatggctgtggttttgcggtatgttgacaaacatggagtactcaaagaaagacttattggtgttgttcatgttactgagacaacagcttcttgtctcaagtctaatattgatgcattattttccaagtataaa

SEQ ID NO: 41286 - DNA, 432 bp, Zea mays
  unsure (1)..(432): unsure at all n locations
tgaagacgtccncagcccgaaggtncgttgatgtcaccttttgtttcccgccctcggtgaagcccacaaataacgagaggtggtagactatagggcataatctcttcttggggtccttcagcattataacatcacagccatgccttctctgtctaactgcattggaaagtgccttttctccaagttcccttattgatggaaccagtatatcagactaacagtatatccctttatcgatggaaccagcttgaatggcagacaacgagcagcctagtatggatgtggtctgcaccggtgcgtctaacaaagttgatgaagacgcgaccaaacttgaatggcagacaacgagcagctccagtgaaaggagcggcgaggatagttctagtgacgacaatccttgtacttctataccttcaagggagaaaaaaacat

SEQ ID NO: 41287 - DNA, 424 bp, Zea mays
  unsure (1)..(424): unsure at all n locations
cagcttgaaggactgcttcngcaggagagcttncgagcgtgaatacttgttcggnccacggagtcgctttatccgagcgtgagttacttatcgcagaaggtgatgagtgaggtatccgtatcccggaggcgtaggagtccctcggctcggtcagccttggctgcttacgtgtactccgtcgtttccaggatccgcttttcgaagtagtcaagaagcacgagagtaatcctgctaaaaagagatcctttttcgaggaaaaattcgacgcagagggggtctctccccttttagcccccgagggagggtcgggctttgccggggctaggccgacccttccttgacgactaaactttgcgtaggtgcgaggtatatgaacaacttggaaacatcttaagggtagaagcgacgtatctgtttgatgttc

SEQ ID NO: 41288 - DNA, 441 bp, Zea mays
tgaagccatggtaagtagcataggccaataatatgcgaattgactcaagcctagctacgggtgcataggtttcatcgaaatccaaaccttcgacttgggagtatcccttggccacaagtcgagctctgttccttgtcaccacaccatgctcatcttgcttgttgcggaagacccatttggttcctacaacattttgattaggacgtggaactaaatgccatacctcattcctagtgaagttgttgagctcctcttgcatcgccaccacccaatccaaatcttgtagtgcttcctctatcctgtgtggctctatagaggaaacaaaagagtaatgctcacaaaaatgtgcaacacgagatctagtggttacccccttatgaatgtcgccgaggatggtgtcgacagggtgatctcgttggattgcttggtggactcttgggt

SEQ ID NO: 41289 - DNA, 443 bp, Zea mays
gcttcttctctacagtcagaccaccgccgctctatatgttgcggcgacggaccactgctccctcacatgtcgcgacgaccatcctcctccggcctatgttattgacccacctccagtcaggtccgataggagcatgcctatcaaaactagatttaaaatcgaactactttctattgaagatcaaactatttttattctcaataactatttagcgacttggaaatgctcttgtaatgtttggatccatcttacactacagattgatgtggaaactgaagccattttgcaattttgccatttacaattttgctattattaatttcatctactaagcgatgtttaaaaataagcaatttttcccttcaccagtttgttttaaggaatcagctatggtttatggttaatttaatctataatttttttagcaagaatgcgatattgca

SEQ ID NO: 41290 - DNA, 449 bp, Zea mays
tctaaagggagaacacatattaggattaacaaatgttcattttgatttgacaggatatgtagcgcatgccaagcaggaaagcaagttggtgtccatcatccacacaagaacatcatgacaaccgacagaccactggagctcctacacatggatctattcggcccgattgcttacataagcatcggcgggagtaagtactatctagtaattgtggatgattattctcgcttcacttgggtgttctttttgcaggaaaaatctcatacccaagaaacattaaagggattcttgagacgagctcaaaatgagttcggcttaaggatcaagaaaattagaagcgacaacgggacgaagttcaagaactcacaaattgaaggcttccttgaggaggagggcatcaagcatgagttctcctctccctacacgccacaacaaaatggtgtagtgga

SEQ ID NO: 41291 - DNA, 391 bp, Zea mays
  unsure (1)..(391): unsure at all n locations
catgagcttagctgttatttacaaacagccgatgcaaggcttagacaataaacatgcaccgagaccggacccttcttttgcaaaatcaactaaataaagtgtgccggataatacacccttaaaagctagtgaaccatcccttcttgtaaagacagacacatctacatttgtaaatagacagttataccccatatgacataattgactaacagaaaacaagatatatcctatactctctactaaaaatacattacagacagaatgttcattaaaaattgcaattttacctaacccttttaccatgccttgagtcccagcaccgaatataattgaatcttgagaatctttcatcttgacgtaggaagagaacatcntcttctcccccgacata

SEQ ID NO: 41292 - DNA, 433 bp, Zea mays
actcaagctggtgaagacacttgatcccaacatgagctcgtcggcggtgccagattcatctcatggtaggcttagcaattaagcatgtgtctagttcagctctatcaaaatctactaagtatagctgaccctctaacacacccttaaatgctattgaatcatcacttcttataaagacagtgacgcctacatcagtaaagagacagttgtagcccatttgacataattgggaaacagagaacaacttgtagtctagagaatcgaccgcaagaacattggaaatagaacggtcccgagatatagcaattttaccaagttctttgaccacaccttgatttccatgcccgaatgtgatagctcggtggcgatcttggtttttctcatatgatgagaacatccttatctccccggacatgtggattgtgcacccact

SEQ ID NO: 41293 - DNA, 383 bp, Zea mays
  unsure (1)..(383): unsure at all n locations
taagtagcataggccaattatattctaattgactcaagcctagctacgggtgcataggtttcactgaaatccaaaccttcgacttgggagtatcccttggccacaagtcgggctctgttccttgtcaccacaccatgttcatcttgcgtgttgtggaaaacccacttggttcctacaacattttgattaggacgtagaaccaaatgccatacctcattcctagtgaagttgttgagctcctcttgcatcgccaccacccaatccgaatcttgtagtgcttcctctaccctgtgtggctcaatagaggaaacacaagagtaatgctcacaaaaatgtgcaacacgagatctagtggttacccncttatgaatgtcgccgacgat
